United States Patent Application Publication US 2006/0240418 A1 - sequence listing, part 2

SEQ ID NO: 4894 - DNA, 350 bp, Canis familiaris
  misc_feature (1)..(350): n = a or c or g or t
acacagaattttaagactttaaaagtcattttggnnnctgtgatgtgnaaatatnnatgtttccaangannnaatgnnggtgnncngnnnnnatannnntgacanntnnntacttacatannnnnnnnnnaagtaaannnnnnnaactctcccatttcnnnnngnnnnatttatttaaataaaatatgcttattaaaacacttcctccaaagatggtttnnnnngtaanctgggcatttgttcaaaaaagnntaatattgtatncttgtgtgaaanntaaaaaaaagcaagtcttgcnnaatgataatgccacnnngtgtgtatttttgnntgctaagaggtagaaaagt

SEQ ID NO: 4895 - DNA, 554 bp, Canis familiaris
taatttgagcatatacttgtaaattctaatgcaaaattacacaattttcctgtaaaaacaatatcaatttttaattagggagcattttctttctagcctgtatttcagtctagaagaaaagataatgagtaaaacaaattgcgttgttaagagaattctagtgctgcattgtctgaagttagcacctcttggactgaatcgtttgtctagactacatgtattacgagtctgtatggcaagtttgcagcaagatcatgtgcatatcatcccattgtaaagcgacttcaaaaaaatatgggaacacagttagttatttttacacagttctttttgtttttgtgtgtgtgtgctgtcgcttgtcgacaacagctttttgttttcctcaatgaggagtgttgctcatttgtgagccttcattaactcgaagtgaaatggttaaaaatatttatcctgttagaataggctgcatctttttaacaactcattaaaaaacaaacaaaacaaaactctggcttttgagatgacttatactaatttacattgtttaccaagct

SEQ ID NO: 4896 - DNA, 641 bp, Canis familiaris
aggccaagtcctgtgtagtccccagctctgcattctcaaacccgctgggctgcccagtgcttgtggttcaggtaatcagctagaggagtctgcgtggctcccagcttgtcctcagtggttcagccctcagctctctggaatccagtagtgctcgcagaggtgcagcctacaggtcagtattgagtgtctcttacgacttgctgctgcagagtcaagtgggatccagactgaggccaagcctgtgaagctgatcatagttaaaatgcctttgcaaagtggtcacttgagcagctcttactgaaggccaacagaatgggctgcccctggccctggggctcactgctcttgctgggctgactagagtccagcacgtggctatggcaggccaggtgggggccagttacatttataaagtcacctgccccagtggtccaaggaattggctttggtcaatcctgggctggtgggggtgggggtcagagtcatcacggtgcttttgggcagcatttgtgcaatggcccagagctagacaccaggcttcgcagaccaaccctgccctccgtgagctgtgtgtcttcaggcaagtgtcctaacttctctgagtctttcatcacctgctggccagggagaagaggtcacca

SEQ ID NO: 4897 - DNA, 485 bp, Canis familiaris
  misc_feature (1)..(485): n = a or c or g or t
tcagtatactaacattcatatnnncagttttgttttgttttgttttggcagttgncannaagttaatttgctttagtgaaaatccctcatccacccttncncnatgaatagctcttccttgctgttttaatgtggtacacacnatagccnnncagacctattannccagtataatnnncagtgtcctaactaaagttactgacttggnnntannngcagtttttgtgtcctgtttgcttcttgaannnnattaactagaacatttnnnnnnnncctttttaatatgtgatgtnnnttgacctaatttatgtgtnnnagnnctacaccattggtttccagtaccctatgtgtaagatacacacttgtgtgcagaaagtatctcccttcaggcttgtaatacccttcacgtggaagatcaatgagggaaatctttatattctgtataaaaacaaatcaaatttatatactaaaatcatttgtctaaa

SEQ ID NO: 4898 - DNA, 488 bp, Canis familiaris
  misc_feature (1)..(488): n = a or c or g or t
cancgtcgatggagtttattcagttttcagtgggaaagacaacgtaagccaagttgccataattgacacnnncaaaggtaaaaagaatctctcctattggnnaagttattgtgacatgattaatggtacagatgcagcctcatttccaccttttgtagagaagacacgagtattgcgtttcttttcctctgacatttgcaggtcaatctatgctgtgtttggagctgaaattaacctgaaaggaattcctgtctatagatttgttcttccatccatggcctttgcatctccacttcaaaatccagataatcattgttnnnnnncagaaaaagttatctcaaataactgcacatcatatggtgtgctagacattggcaaatgcaaagaagggacatctgggtggctcagtggttgagcgtctgcctttggttcacgttgtgatcctggagtctgggatcgagtcccacatcaggctccttncnnngagc

SEQ ID NO: 4899 - DNA, 647 bp, Canis familiaris
  misc_feature (1)..(647): n = a or c or g or t
gacagcagtggtgtgactccaaggacaggcttcaggtagaaaagnnnnggcttctgcacctgtcnnagttccgagcgggctccgagctgtgcaaggccnnnnctaggcnnacttcaggggacccagtgtcttcaccagccacaggttctccacttgcccctctcctgctttcgtaggacccttcccgctgctccacattcacagtgccccacatccccctggtctctagcaccacgttctagcaggagttccccgagaagcctcgggctgcataggcagcaaacacggctgcaatcggtcccacacgagagagttagcctgatccgggcccactcctgagatgcctgggcctgcgggaggctggtcaggtgcggttcacaacagtgttgttgcttgctaatggggtggcaatgggactgaattgtaataaaactgttatttaatctttgtctctgtattttgatacttgaatgaattccccttttattttactgtacatataattgttagtctgattttgtccgatttacgaacatcttgtggtaccaaacatacccactctgtgcaacgacatagactgacctcactacacaggagagagtgtaaatattcctgggcttccggctttggttttgttattttcataa

SEQ ID NO: 4900 - DNA, 79 bp, Canis familiaris
  misc_feature (1)..(79): n = a or c or g or t
ggtatggtgtaacactnnnnnnnntggtgtgtgtgtgtgtgtgtgtgtgtgtgttctgatgacctggttataatannta

SEQ ID NO: 4901 - DNA, 603 bp, Canis familiaris
  misc_feature (1)..(603): n = a or c or g or t
gttgtttgtnntgaaggatgtgtctctccagtccattcaggatggtgactacaacattccccagccaagcannagacaccgttgatgagggaaagtaccccatcactgtctttataagcagctttggtgtcgccaatggtaaacatcctctcagataagctaatgcatggcaagaggcaagcactcagtacccttgccaccaggaagattatgtatttcatcccaaatggacgctgtctgatgttcatcagaatttgtgtggaaagcaaccgagaaagcaacattcgttcctcaaagatactgagctcaccttgacagcattaacttgcacttctcctctgatgttctggaatactctcatgatgaaggtattataaagtgcttctagaaggacacagagtacccgtcagcacattggtcatgctgctcaagaataattcaggtagtggtgcctgagttgttcagtcagctaagagtctgcctttggttcaggtcacggtgtctgggacctgaaatggagcctgatgtggggctccctgctcagcaaagggtgtgttctttctctccctctgcccctcttgcctcttctgccctctctctctc

SEQ ID NO: 4902 - DNA, 574 bp, Canis familiaris
  misc_feature (1)..(574): n = a or c or g or t
aatcnnctgaatgtaacagaggaactnnngnctaacagcangacgaggattctgaacgtccagaccaggctcacgggctccaaacacattaactnnngagcggtgctgagcngcggctgcctctacatcgagatcccaggcggcgncctgcccgagggcagcaaggacagcttcgcagttcttctcgagttcgcggaggagcagctgcacgccgcccacgtcttcatttgcttccataagaaccgcgatgacagagccgccttgctccggaccttcagctttttgggctttgagattgtgagaccggggcatccccttgtccccaagagacccgacgcttgcttcatggcctacacgtttgagagagagtcttcgggagaggaggagtagtggcagtgccgcctgtggcccttgtgctctgccgccgccggagccctggaccgcggtccctttgcctgtcgtgctttgtgcgggtggcggaccgacggctgtgctgggggcgccgacggcaggcctgctcatctctgctgggtttgtccgcatgttgtaattgtgcaaataaacgctcactcca

SEQ ID NO: 4903 - DNA, 626 bp, Canis familiaris
  misc_feature (1)..(626): n = a or c or g or t
caccatccatccgcctgcccccagatgcccccctccntggnnccaaaggcaagccnnngacacccaaacagagccagaaggaaaaggagcaatgggaacaggcaaaggcaagtgggcagctggataagctcccaaccccaagtcaagccaagggggcagctgctgcaggagatgcgtgtcccccacaggatgtgctccccagggatgcagcccaccaagatccagcccttcaggactcagcctcccaggatccagcccatcaccgctcccaggattcagttcaccactgctcccaggagagtctgacctcccaggagagtgaggatacatacttgtaaccccggcagctcaggcctgtggggtgaggctccacacacccctggggctcacagactgacagccgagggcctgcccatgctgatggcccagctgcccggccctgcgtggcagagagtctggccggccctgcacagactctgcctgagcctttttatttatttcctcccgagtggagcttgggctagcccactggggccggaggaggtgagggccagtgagcagggcctcactcagcccctcttcctgggggatgctccctagggctggggtgctgtggtgagggggga

SEQ ID NO: 4904 - DNA, 618 bp, Canis familiaris
  misc_feature (1)..(618): n = a or c or g or t
aggcgatgtnnctgcagagnntggtgcannnggtagaactgaacatcgtggnnggctatgggtcacccaaagacgtnnnnntatatgcggcgctgggnnngcccccgagccagacctacatcgtgnnccgcgcagtgcggaagctgcaagctcagtgccagttcctgtcagatggctacgtggcccacctgggccaattggaggcaggctcccaccctcatgcccccgctggaccctccagggctgccctggccaagagcagctatggcggggctgcccctgtggacttcctccgaaagcagagccaactacttcgctccagggggcccagtcaggtggagcgggagggcccagggacaccacccactgccctggcccggggcaaggcccggagcatcagcctcaagttggacagcgaggagtgaggtccaaaatgtggctggccctgagttatttattcgtgtacttgaggggcccaagtggcacctgtgggaagctgggggcccagatcgctggcccccccaccccacaccctgcatccnnnnntgcccctcgatgttacttccctttcatgtgggggggcacctagcctcggnnnnngagggagcagtaagggcc

SEQ ID NO: 4905 - DNA, 545 bp, Canis familiaris
tccttattcctttttccccctagcccctggaaaccactcatctacttcctgtctttcttaatttgtctattctggacttccacgtaaatgaaatcctacaaatgtggctttttgtgtctggtgtctttcacttagcataatgttttcaaggctcatctgtgttgtagcgtttatcagcactgcattgtttttttctggccaagtaatgttccatcatatgaacatatctcattttgtttatgcatcaattgagggacatttggcttgtttctgcttgttggctattgtgaacagtgcttctatgaacattcatgtgtatgtttttaattctcttggggcatcttttatttttttaatgccaatttgcctttctatttttaaaaaatctccattgaaatgggcattttttttttgtaaatggtcagatactattttaggctttatgagccatatgacatcgtgtatatagttgtcgcaactgctgaactctgccattgtagaataaaagctgccataggcaatatataaacgaatgagcatggatg

SEQ ID NO: 4906 - DNA, 533 bp, Canis familiaris
  misc_feature (1)..(533): n = a or c or g or t
gtggcactgccactgcaggtcaggtaccatgagtcnnacccgngcggnnnngctgcacggcctttcagggcgnnttcgagttggggcgctgagccagctccgcacggagcaccggccttgtacctaccagaaatgtccctgcaatcggcttcgggaggagtgccctctggactcggatctctgctctnnnnnnggctgcacctctcagaccaccaccaccaccaccagcaccaccaccaccagcaccaccaccacttccctgccccccctcagctctaggatcagacccacccccttccttttctttggccccagccccagccccagccccagccccagtccagcccttgctttttggagacgagtcaggatcgggctggaggatatttggaacagtctgtcttcagtgttcacagagatgcaaccagtaagtgtttggtgatagccaggatctgtgttgatgaaaagtcctgatatccaaaatcctgttactaaaccagccagtgtgttgcatcaagtattgtnngctcact

SEQ ID NO: 4907 - DNA, 574 bp, Canis familiaris
  misc_feature (1)..(574): n = a or c or g or t
atngtccngagcaaaatctcgtcgtaatttagatttccaggatgtcttngacaaactggcagatatgggaatcgcaatccgagttgcctcacccaaactggttatnnaagaggctcctgagtcctataagaatgtgacggatgtggtgaacacctgccatgatgctggaatcagcaagaaggccattaaactgagaccgattgctgtgatcaaaggatagaatgctgactgcagccaccaaactccactgcccctcatgggatggaggtggactgaaactcctcagacatcagactcgagacctgacaggttccaaagtgcacagctgtaactgtccattccaacgtggctggcgggcggctgctgccttcaggagccagtgttgtaacattaccttccgggaagagtaacattgccctcatttggaaaggaatgtatgtgcttcctccctgattatcccacatgttttaggaaaatctgttagggggtggggatagatcaagatactgcctaactcctcatagaagtcttagtcatgacagtgagcttctttacaccaagctctgtgtttata

SEQ ID NO: 4908 - DNA, 593 bp, Canis familiaris
  misc_feature (1)..(593): n = a or c or g or t
tcnacagctacacacttgaatgcnactacaacacggggcgctcngtgnncagcatccctgccgcctgccatgacaacgggcgtgccagcccccctcnnncgccggccttcccctccagatacactgtggagctgttcgagcaggtgggacgagctatggccattgcagctctggacatggccgaatgcaatccgtggccccgaatcatactgtcagagcacagcagcctcacgaacctccgtgcctggatgctgaaacacgtgcgcagcagccgtggcctgagcagcactgtgaaccggcttgcctgtttcctgctctgaaaatcccttgagccgagcacgcagttttagcactggcacaagtgctggtggcagcagcagcagccaacagaactctccacagatgaagaactcccccagctttccttttcatggcagtcggcctacagggctgccaggtctgggctctagcactcaaaaggtcagccaccgggtgctgggccccgtcagaggtaagccagtctgggagcccctgcaacaggtgttcagttgtttggggcactgctgggggaagtgagagcttgaagatatacg

SEQ ID NO: 4909 - DNA, 656 bp, Canis familiaris
  misc_feature (1)..(656): n = a or c or g or t
agagangtnngcagacacagttcaaggagaagtacangnctgttcatcagtncaggaggctgtgacgggtgcagatgtgatcatcacagtcaccatggcaacagagcccattttgtttggtgaatgggtgaagccgggggctcatatcaatgccatcggagccagcagacccgactggagagagctggatgatgagctgatgaaacaggctgtgctgtatgtggactcccaggaggctgctctgaaagagtctggagatgtcctattgtcaggggccgagatcttcgctgagctgggagaagtagtgaagggagtgaagccagcacactgtgacaagacaacagtgttcaagtctttgggaatggcggtggaagacatggttgcagccaaactagtgtacgattcctggtcatctggtaaataaaacaaaggatctttgcattgaagtagatgttacagatcaagggatgctgttaccagctgtttcatgatttctagatcaaatgagggagtccagtgcctagtgagctatatagttttgagcttatcatgtcttaccttaactaatgagatccccatttgtgtgtgtagttggaaagcaaaactaggtggccatttcttctgttataccagattatagcaaatgtcctttccct

SEQ ID NO: 4910 - DNA, 397 bp, Canis familiaris
  misc_feature (1)..(397): n = a or c or g or t
ggcggganncgccccacagacccccaacttcccctccaaaccctgaagtgaaaccaacacttggttatccccacatgggggccactgccaagaagtacccccccccccgaaaaaaaataattaaaaataaacttacgagctggccccacccagcaccaggcctcccagaaatagaggctgcccgcgttgctggggcggctgagacgcaccactgcccacagcacttctactcaatgtagactcaaggcttctcctcgatcatgttgggttctgattttattttttcttgactgtaaagcccttttttctctcctcttttgggacgagagccctggttttctatacgacccgtggactgcccccctccccccgcctgcccagctaggctggcaggcag

SEQ ID NO: 4911 - DNA, 606 bp, Canis familiaris
  misc_feature (1)..(606): n = a or c or g or t
ggctcggccagcaccacggnnaaggcgccaaagaccccggccagcggctccaccatgccgctcagctgcccgtacctaaggagagaccagagacaggtgtcaccatggggagggnngagcagacgctcagtagccagcgtgcccggactgctgactcagccccagaaaacagatgcctttcgtgccacagcctgggtgcccgtggcagtgcangagctcctcaccgtgttttcagnnanntnctcagtnntccgnnnnnnnnngacannntaggtgccnnnnnnnnnnnnnnnngtagannnnnaagtttnnnncannnnnnnntnnnnntnnnnncannntnnnnnnnnaattcacataccatagggcacacccgttcaatnnnnnnnnttcagtggtttnnnnnnngtcacggggttgtgcaaccgtcgccactacctagttccagaacattctcatcaccacaaaaggaaaccccatacccannngcagccactccccatccctccctccctcccccagctcccagcaaccactgataatgctttgcgtctctatggacttgtttattctggatatttcacataaagggactcatgcaacact

SEQ ID NO: 4912 - DNA, 304 bp, Canis familiaris
  misc_feature (1)..(304): n = a or c or g or t
ggtataatattgcnnnggggcctagagcctagattcannnnnncangaaaaagtcacttgnncgggagtnnnantgcataaggnnnnnctggaggannngnnnnnaaggctgtgtcatgagagaagttgaatcagaannntcatcaaaccctgtgaaggagtagtgaatccaagagnnnaggaaaaaagnntaattcaagtagaagncnnnagttagttgtaaaactgggngnnntngatgagagtaaaggncngnaggcaaggacaggnggcagnnnagngaaaaatcctttgaagcannngg

SEQ ID NO: 4913 - DNA, 692 bp, Canis familiaris
  misc_feature (1)..(692): n = a or c or g or t
gggggtagnnnnngtggtgnagacggtgnnagtccctgacacgggggacagtgtgcctcagggaagacttcagggaagacgtagcggctctatggaaaatgggtgtctctcgccactaaggnctgctgagctgagtgtcatctcggtgacctgcggccagagatttccctccgcgtagactctcgcgggacatgcctttctggttctaggaactcttcatttttgactctgccggcaaggagctgttttctgagatgctggataaattgtgggagagtcccaacgtcttgtgtctcgtctatgatgtgaccaacgagcagtcctttgccaactgcggcaagtggctggagaaggctcggtcacagatgccaggcgcctcgctcccaggtgtgttagtggggaacaagacagacctggccagccggcgagcagtggattcagctcaggcccggtcgtgggccctgggccaaggcctggaatgttttgaaacatccgtgaaggagatggagaactacgaagcccccttccactgcctggccaagcagttccaccacctgtaccgggagaaggtggaggttttccaggcgctggtgtgagggccccggggaggctggggatctggccatggctccggctcctccgggatgagagaagctggaattgccctgcaacctccaacatatcctgacagc

SEQ ID NO: 4914 - DNA, 684 bp, Canis familiaris
  misc_feature (1)..(684): n = a or c or g or t
gcannagctccagcccgtgctgtatcagctgtaaagaatatgaatcntcctgagatcccaagaaatattaacattggtgacatcagtataaaagtgccaaacctgccctcttttaaataaaaaatttaaaaggccactcccaggtaaaatccagggggaaaagtcatctaagtttaccatgcacttgtttaccaaaaatagaggaggagagtcttaatttttgctcttggatttaagtcaaggtactgtataaaagttgtgtaaaatcagtatgaaagttcaatgttgcttttcttgctcagtgattttgaagaaattgagtagttccagtatgatatttctctttcttttctaaactgcattcctgtgcccacctgaaggcatgcctctatgtattggctactacagtatttcaaacagtatttgagatatttctttaaattatgtacaatccacaatgttggtgttttgtatggatcacaagtgcagcattccataattctttctgttatttgtcatggttgttatttaaagaaccaaatatgtattgcatgaaaacattatgacctttcctcttagtttaaataaactccaaggtaactggacttctaaagtacctttctgtttgcctgatatctactttagcaataatttttttacgaccttctgactcaacaaagtaaa

SEQ ID NO: 4915 - DNA, 408 bp, Canis familiaris
  misc_feature (1)..(408): n = a or c or g or t
ccttcacgctgtcaagtactactnccagaactttgctcccnnnntcaaggagannnagatgaacgccatcgcagcngacatgtgcaccaatgcccgccgtgtcgtccggaagagctggatccccaagctcaaggtgctcatggccgagggcgatgcctacaccaccttcatcagcgacacgggcaagatcgagccggacatgatgggcgtggagcacagcttcgagacggccagccacgacggcgaggccggcccttcggccgaggccctccagacagaccgcccgccctgtccgtgtgaagtgccaacgccctccccgccctgggccgaccccccactccccgggcccgtaagtgagattgcacattaactactgtaaggagaggagccgcactgggaaatgtgaac

SEQ ID NO: 4916 - DNA, 548 bp, Canis familiaris
  misc_feature (1)..(548): n = a or c or g or t
ggtgggnannagggcatnnacatcattatccacatcttnnnnntggcactggcacgnnggctcntgaangactctnnnnncatcttcttagaagtgnacccaagacacccagagcttgttggcaactggcttcagagccagnntgacttgtcccttgatctcgtggctatgcgcagagacttctgtgggaggccccggttcctgcatatccagaggtctgggccacaacgtggctgccctgcagatgcctggccagggccccagcctgccagagtgcctggctgatagttcttcctggaatgctactcggagggaggtgatggtaccttccagaacccaggtgcatttgacatttcacatggttctgtgattctacatttctgtatgttctatatatcctaggagacttgagggtagaagcaagggtggagtggcaaagaacaagggcatctatagtttggctcagagctgagcaggcccaggatcccagtctggctccatcacatcagtgtggccaagggcagnnnnntcaatgtctctgtgggtgg

SEQ ID NO: 4917 - DNA, 650 bp, Canis familiaris
  misc_feature (1)..(650): n = a or c or g or t
acaacacaatgagaatcaatcaatnnnaagaaatagcatggggtcatctttagagaagacactgtgaaatgtaagaaggcgaaatacacacacacatacacatgcacacacatgcacacatattaacaaataggaaaagagcttgagttcaaatcttgatttttatgccattatcagctatttgtggtcaacttagttaacttccatgcctacatttccccctgtatccaatgaagatagctatggtatggtcctttacagttgttgtgaggattaagtgcattaacaaatataaagtgcttaaaacagtgcctgacataataatgaatgtccagttagtgtttgccaatattggtatcggcattattctttgttgttttttttcaacattattctttgaaaaagatgttttcagaatagctgaacaatgaagtcaaacacatagtgagtcgaattcaaaagtaatctgaaaaatctgaacctttcgcactctcaaagacccaaacctgaaattcaaataagactttggatttctccccgctgtgactcagcagtaggacaggtcaaaccaggataataggtgttctcactgttcaattcaagaaacagtgactgtgtaaagtgtaccaaagttgacaactatatactgt

SEQ ID NO: 4918 - DNA, 659 bp, Canis familiaris
  misc_feature (1)..(659): n = a or c or g or t
tatattcatcaaaatgatgnnctatttattttaaagtatcatttggtacttttttttgtaaattgctttgttttgtnnaatcagatactgtnnaatcaaaagcancttttgcttttcttacacactcttgcaaagctttcagatgttactcagctacgtaggtacataagacttaatgcacattgttggcatatctttaagttggattcaaatggccatttttctccagttgtagtaacttggatttcttttttacatatatgcccattaaccccagttaaacttttgtttgttttacttgtttgatgctgtctgtttgcattgagtgttaagtcactagaactaatggtagaactcttaaagctttatctgttccagttacttttattaaatatttttcacttggcttatttttaaaactgggaacataaagtgcctgtatcttgtaaaacttcatttgtctctcttgttcagagaagttcattcatgttcaacaggaaaggcaaagtatacatgagtgcttgctgtcagatatggctccagctccacatacgtagaaagaaggggatgggatggcatcaacaccatccatctcgttggactagttttaagtaaaagttttctgatttgtttgtgtttttttgaaccatactatttag

SEQ ID NO: 4919 - DNA, 567 bp, Canis familiaris
  misc_feature (1)..(567): n = a or c or g or t
agtgttttgttgaccctgcaaacctatgccacagacttaaaatctgaacaagatttactaagtaacaaggaggnctacaccaaactcagctggagggaacagcaggccttacaggttcgctttggtcagaagatgatcctaaaccagttgttggaactgacaagttagcaggttccctgttgtctgaaggaacatgcacgagaagaattttatttgaagctaatattcactgatatttgaaaaaaaggaaatttgcatcttttgctttggtttccctttattaaataccaaaaggaaaagtagcaaagatagtgtgctaggtagggttaactaagaactgtgtaagaaccgggcatagcagactcgggaattgctgctggtcactaagaccaataaattttataactattttgttcttggtttgaaccagagttagcagaaatgtgatagtaataaggtctttagtataagctagcatttagtaacatggactttgaaagtagacctgggtctgttttgagcaantttttcccaagaccttgnnncctctttaagggaagaaaccct

SEQ ID NO: 4920 - DNA, 403 bp, Canis familiaris
  misc_feature (1)..(403): n = a or c or g or t
agctcacttaccgggnncngctgcatagagtgtacagnnnagtgaagaatcgcctagactatcacatctctnngcagaatatgatgcgtcgaaaggaacaagaacacatgataaactgggtggagaagcatgtggtgcagagcatatctgcccagcaggaaaaggagacaattgccaagtgtattgcagatctaaagctgcttgcaaagaaggctcaatcacagccagttctctaaatgcatctatcccggtggagagagctagaagcaattaacnnncctgtgacatctttctgttaacctttcctaaaatgaaaagtttgtttcatatagtgagaaaattaaaatgatctatttgccagtgagcggtttttcatccttcttgcttgtattttgagttccat

SEQ ID NO: 4921 - DNA, 453 bp, Canis familiaris
  misc_feature (1)..(453): n = a or c or g or t
tccaactgtgggcagnacccaaccactcacttccagtgaaaagaanagagtgaagctgacggaatgtctgattctgggattaggttactgccgggcatctgtactgctagcatgtactgccttgttgcaatagtgctgtgagccaccctctggggggcccgagagctggggcagccaggaggtgagaacccctggagcctgtccaccacagggatacacatacatgcanagcacacatacatagatcacatgcatgtgcatatccttatacaatgtgtgcatttcttactgtgggatcagggnnnnnntagtttgagaaatacttctactgatagtacagtagtctgagagtaacctcgaaacctctggttctctaaatatgtataggattcatctggagggacacctgggtggctcagtggttgaatgtctgccaggaccctgagatcgagt

SEQ ID NO: 4922 - DNA, 587 bp, Canis familiaris
  misc_feature (1)..(587): n = a or c or g or t
agacttgaagnagtagcatttgatgatgcatcgggacgtannagagnacaatgaattgctacaataagtcactccattctttctcattacttgggttacggatgcctcagacaaggtgcaaatatctttcttgtttctaactcctgtatatgcaggacgctggcttcagaaatgccagcctcatcccaattagataaagacagtatggagaaaaatcatgcaaggtgagctatcctaaactgcctcctgcctatagtatggacagctgcccccagttatgcatagtgggtacgctggaacccaatcatctgatgtccctggtgtttcatctgcttttctaatgtcatcacaatgaaaaaaaaaaaaacaaaacacattagccatcaaatttcaggtgaatttacaagcttttaaagataaaaacacaattatgcagctaacttgtttagtctaatggagtatctgttgctgtaattccaaaaggtcctgaatattttaaaaagatataggtgttcagtatatgtttgttaaatacaagttgtttgactgtaatcagtgtttccatcaagagtcactgaaagttgata

SEQ ID NO: 4923 - DNA, 547 bp, Canis familiaris
  misc_feature (1)..(547): n = a or c or g or t
gatgcnntcatctgagnntaacccagatcnnnnnagccacccagctgatccacagatccatgagctatggttttatttttggggggtcaggggaaagaaattgttatgcagccattatttctgacaatagagatctattcctttgggtctaaagcaattgagccaataatgattattactattcccctgcctgggattcagaatgaaataagtctagaagagaaaagattctgtttctgatttggcaggttttgtgaatacagatcaatgaagtggtctggctgtatttatatacactgatgatttacttcctggtattctttctgattcccactagtaatgtttcagaattagttgaagaatatttcattggcctggtgtccagccactcccaatcatacatcatgaccacattaaaccattccttgttccccaaacacacctcaaacacaataacactggcatgccttcactcacacctgataatctttccttccttctctctttatnnnnnnattttgggtagtcnnnnnnccagctgatttcc

SEQ ID NO: 4924 - DNA, 503 bp, Canis familiaris
  misc_feature (1)..(503): n = a or c or g or t
gggcccccnncaaaagaggcnctgcgnnggnnnnaatccagatgtcaatgttgtcaggtgtcccatacagatttannaacttccttgccaaatcctggtttcgnngcacccggctaagctgtgccagattccggggctgggagaggctacagaagcgcctccaggcattgtaccctgtagggagagggggcagaggcggttcagtcttaccctgctgccttccccttagcttctgcttctccacagcttctcctgagagagctctgtggtcaggaaatgtcaggcagaacaagatctctgctgacagaagagggccaaaacttgcaaagatcaaaccactgccctctaattttcaaagtgagtggacaaccatgcatcaaccaaggagtgtgtcctaacataagaagctgctgtaactcaacaatcataaccataaagacattactgggcaccaatgcatcagttaggtacaaataagatggacccagaacataaaagactct

SEQ ID NO: 4925 - DNA, 85 bp, Canis familiaris
  misc_feature (1)..(85): n = a or c or g or t
tgtggctcnnntggtcaggggtccaacnnntgatttcggctcaggtcgtgatctcaatctgcttctctcccctccccccagctca

SEQ ID NO: 4926 - DNA, 589 bp, Canis familiaris
  misc_feature (1)..(589): n = a or c or g or t
tccttcttacnnagggattccccacactcggtctttgcagtagctgaggattttgccttttctcctgcctcccagtctgaccctccctagtcagatggcaatcccaattaggtttcttattttaggcccacccctaccttgttttggggggctccagagaccagggggcctgcggtgttaggaagcagccttggaggttgccttggtgctgctcaaggatccatccagcagggggcagtaagtgatgttgggagtatccctggctgctaggcccttggcaggggtggtcctttctacattcccattcacctgaaagctctttttggattgggtttctcattccattgttgcctgctccctcccacactctcctctggtagatttaattttacgctttcctttgttacagcccttttcttccccctctagagattcccctctgccactctcccctccagagtttgttttgtggtgttacagtggtaactgcagttctcaactggtttttctcttctttttgttctcctctggaatgtagactgtacatgtttaataactcaccttctctctccttgctcaaaatgtggga

SEQ ID NO: 4927 - DNA, 510 bp, Canis familiaris
  misc_feature (1)..(510): n = a or c or g or t
tttttgctatgttggaatgacactgaggaatggtttcatttactttgaaaacgtgagggttnctccaacttttcatgaagtaaaaataccttacataaaaccattacaaaatggtttttaaaaaaacatcaggtggccactaactgaaacatctccaggcaactcgcaagagccgtggcattttcctgccagagcaaatgggcctatttggaaataagacaagatattcgagtacagctaagacatgaccctgtgtccttagaaaattaaaaacctagagcctactatctgagggcagtggcatccatggagatgaagcactccgtaagtcacccctccctggccccttccaggggtaatgccacgttcatctgtccccaaagaggtgttcagacaggggtcagtgtatccaactaagtgtgcgtgcagagcaggggaagtttgtatttacaccttctgtacattttttacaggttgcagcaattaaatagttgattactgtgttgattt

SEQ ID NO: 4928 - DNA, 373 bp, Canis familiaris
  misc_feature (1)..(373): n = a or c or g or t
ggttggccatcttacctttgnnnctcggtgtnnntgagggngcagagggggtgnnttanccttgcttcactgtgtggcccccannnnnctggagaagcatcgagacccggccaggtagcagcagggccggcnnncagttcnnntgcgtgtnnncgcgctggtggnnntggcgttgtcctggatctttacgtggcgggagggtngncnctgtgnnagggnnnccgtgntgcgttgctgtcttggaaaaggtgcnnnaacgcacccgtgttttatttgtaaagnngcagcttgaacagggcaggtggcatgnagnntcgcatggtgggcttgnnagnnncttttcngtgtatctgtgngnnnnnntgctttctgt

SEQ ID NO: 4929 - DNA, 490 bp, Canis familiaris
  misc_feature (1)..(490): n = a or c or g or t
aagagaaagaaatcagcagaagagacaaccaagagcatcatcaaagcaattttatnanntcttnnannagcctatannacaacccaaagnntactgcgcgactcaagacaggaagttgcccgggcttcagaagacatttaccgagaagaaatgttcccagtaaacataacatccaagcagcatgccccgtgatcccagaacaacacaatagtgatttgtctgccacattgccttcagggaatcaggaggaggaaatgaccactctcttattttgaagaaggttcagcacaagggcaaaatcatcaaatacagtgagacactggatgatgctataaaaactaaacatttgtcccagaaaagagctcctgtctgaaagtcttgacatttgtggtgacgtcccagccccctttctctcggcaaatggtcagaaaggaaagcaagttcttcaaggaggggaagagatgagaaagaacaagggactttggggttg

SEQ ID NO: 4930 - DNA, 709 bp, Canis familiaris
  misc_feature (1)..(709): n = a or c or g or t
cacactctnancaggtgatnctgggttannngcagaccaanncagagaannnaatacctgtcaacacccctanctgacagatggnncacagtctcagaccaaccctacagtnnnaatgatagtgaaaggagaaaagggggatngccttttcancaatgtagnaatggggaggggaaagtagatgnnnnccaaaatgtgaatcagtgtgatacaatgatgcctgtgtcagctgggcttttgctgaacaaaccagcaactcnnaacaatcagcaccactcgcctggacacccctgaggtcntagtcctgtccagtagtcagcctgtccattgtacttctgtgtgcctgccccctactgtctgtgtgaggtacatctgatatattcattcccatgaaataaattgctagcaaactaactttttaactactgaaaaagagattaaaaacttttacttaagccatgctcaaattatggactgtatttcttatttttagaaatcaatctttacctttaaaattttaaaagaaaaaaacagatactgataaagtttccatgtacatgtgttctcttctcttcatgctgccagcaagccacatcaaaagccataaaaaaaagtgctcaggtatatgtgtaaatcagaaagtgatttatttacagatcaaagtctttgtttcatggagctaccaaactttttcattctacacctgaaa

SEQ ID NO: 4931 - DNA, 183 bp, Canis familiaris
ccattcccatggtccagccacactggtttgtttcccacgcttctcaaccttgatttgtaactcagtcggggctttgctttgtgtttctggtagattgtgtttcagttgggggtgctggcgcggcctgtccctccctgggctgctggcttgaccctcttttcctaagagaatccaatgcactct

SEQ ID NO: 4932 - DNA, 597 bp, Canis familiaris
  misc_feature (1)..(597): n = a or c or g or t
tttgttttgttttngagcanaagagnacggtagagttgtgtngnnnaggccattcttctgcaaagctccaagagtgnnnagagaagcactgggtttcagagtggtgtttgaaaggatttctatcgtaccactgaagaggttccccgtaagccctacggtagcactgaagagtatttttctattggtgataagccactcacgtgaaggtgaaagggaagtaaaattaagttttctcattagacataatgaaatttaagacaaaacagctttaagatcagctattcagcatagatgtgtgttaaaacaatttgctctacacctagtgttaattttattaattggagtgtgagtctttctcaagggtagaaagaagccttctacccaacaaactagtagatctaaaaattgaaaaaagaaaaaaaaagctgaagacaaaaacaagcatgaagatgtcatatttgatgtcactttcgggtttttccccaaaaggctgatgcagtgactcaatttggaaagctttcagcttccagtccttgaatgtgaagtgtcgttggcatgtctggcagtagtctctcattcactcctcaataaacaaca

SEQ ID NO: 4933 - DNA, 259 bp, Canis familiaris
taaagaacacccatatgcctactactcagctaaagaaatgaatcatcacaatgagttcacactttccacacatcacattgagtgtgtgctgaaataaactgagagctgttgtcacctgctcctgtttttcagggacccaaatcttccggcaggattactctgtcctaggaccatagggaaccttgaaaaaaggtgtttgagatgtttgagatcatggaagagaaaggcagaagcccagggagagcagccagagacatac

SEQ ID NO: 4934 - DNA, 707 bp, Canis familiaris
  misc_feature (1)..(707): n = a or c or g or t
ctcttggacagtnntgatttaaataagannggcttgtggnnaaatgaatatgatcagttttttgaactttgatagtaattctggttcagcaagtgctctcactgttttccccttctaaaaaatatgattggaattgattagagatgtgtagcttttcacagagatggtaaatgccacctctaaatttatagattggttttatatttagatttatataacgggttatattaatatatttaaatactgaggaaatcccttcactctcagaacagcaagactcagctgtgtttcaagttgtgttccctagcctgttaaaggcaatggctgaagataagctggcagtgtccactttatctttttggtcttaactatgccaatttaattaaaattctttgcatctaaaatgttgccttttgctaattgaaaggcattttagtgtggtttgtgcgtaatattaaaattttaacacttgggttttatacacctgtaaggtcagacgcttttaaaatttagtgtgaggagatacagcagcagacttggcttgtgaattcttgactaagactacgttattattcaggattgtcttctaaacagctattcagtgacacaaatgtggaattaaccatgtgtgtatgtatgattggtaatggtgcttttgccaactccttagaaaggttaaaatagaggagatccgtcctcagcacaaa

SEQ ID NO: 4935 - DNA, 548 bp, Canis familiaris
  misc_feature (1)..(548): n = a or c or g or t
cccagcgtntccacnngtcccagnagtgcancaatcccccaggctcctnnnattccacactcacacgtataccaggctcctccccttggccatccagccacgttgtttgggacaccgccgcgattctcttttcatcacccttacttcctacctggaccgcactatttcccatcaagcacgtgcccttatagtcggcctccctttggctatggaaattttccaagttcaatgccagaatgccttggttattatgaagacagataccaaaaacatgaggctatgttttcagctttaaatagagactatccttttagagactacccagatgaacgtacacacagtgaagattctcggagttgtgaaagcatggatgggacctcttactataatagtcatagtcacagtggggaagaatacttaaatcccatgcctcagctggacattggagccttggagaatgtcttcacagccccaacatcaacttcctctagcatccagcaagtcaatgtcactgacagtgatgaagaggaagaagaaaaagtgctcag

SEQ ID NO: 4936 - DNA, 558 bp, Canis familiaris
  misc_feature (1)..(558): n = a or c or g or t
tagtgcttcaagggatatttgtgcatgttttatttttttaagnaagaaatcagttaatacttgtagagttttgaaatgtgaaagatgagggaggagacagaaatgggtgtgggctttggtgggtaccatttggagcatcttgtcaggccagagagcagtggcccagagagagtagagggctcttgtgctcaggaaaagccctgtgtcatggctgcaggtgattttcatgttctagtattcttagtgtttagaaatattaacatgtggggaatccaagttaagagcatgagagaactgtgccctatttttgcaacctttatatgacatttcaaaataaacattttagaacttttaaaggaattattgataatctttttgggtaacattgtaacattagagttcctttagaaaatgttctcagtttttagacatggtgaagtatttggggtgaaatatcaggctgatacttgcttgaaaatgctttagcacggacgaaaaagctgaagcaaaatactaattnnnnnttttaagtgattcnnnnnaaggatgtgttgtatt

SEQ ID NO: 4937 - DNA, 613 bp, Canis familiaris
  misc_feature (1)..(613): n = a or c or g or t
gcntgctcagnnagcagcaagatccgccggctgtcggcntgcangcagcagtgagggtggctgcccacagcnnntctcatggacccccagccaggtgccacggcccaggttctcagccttcccgccgaccgctggcccaggcctgctgcccaagaaggccaccaccgcaccctccttgccgaccgcccctcgggaagccgggggccctggagggccgtggctgggggacagcagggactgaggtctggccgcctcctcatggccagtggacacgacctcctgttgactttgcagccctgggccgagccccttccccgggcccggggaggagggagagagccggcgagtgggccctgtgggaagcccttgccatgcactttatgttcagactactggttctcgccccacccctgacttctttttactctgctccacgttagcgcctcccacacctagtgatgtgttcaaaccacagccacagcaggagccggtatggagaacaggcctgccagccaagatgcatgcccagagcccaggggagccaggcggctgccttgtttttgttgtttggttggttttttctttttttaagaaaaaaataaagcagnnnnnn

SEQ ID NO: 4938 - DNA, 605 bp, Canis familiaris
  misc_feature (1)..(605): n = a or c or g or t
tcgtcagtctgcaggnncgaaagcccccatctccagcnntcnnnccatccagnnnntctttaggaaggggacaccatcgagcgagcgtgcattttcagtgagcagattcgatcctgactttccgtaaggatgccgtggatgcgtcctgagacccacaggaagcatgttgctgccccactgttcggaggccgagggggtcacctgccagtcctcccggcgagctgcagcccgggaccagctccgcggcggccttccgacgccagacggcccagtaagttgagggatttgtccagtatgcagggtagggtgggcggcaggcgcccggcttgctcccggaccacagcactgcccacaccctgccctccagggtcacaggggcctttcctccgccctctgcgggagccagcgccagggcactttgctcccagacgggctcagatgttcccggacggtgggaaaggcccatctctggcagtcagtgacagaaatgactccgcagtctgcctttgttgttatgtttggtctatgaactgacaatctttaaaatgtgaatactgtaacaatatgttttcttggattgttgtctttaaaagggacttttgtga

SEQ ID NO: 4939 - DNA, 567 bp, Canis familiaris
  misc_feature (1)..(567): n = a or c or g or t
tgaaagggaattttctcactcagcggggtaccactgtagccggcatgaaccaaacacatgcctcccatggccatggtcaccntggctaccagggttacccangccaccngagccatccaagccatccgagccaccagagccacctgagccaccagagccacccaagccatcagagctacccaagccatccgagccacccaagccaccagagccacagtctgcccaaccgcagccaccagatctgtcaaccctttgaagccacctaaccatgggtggagacaccccttcccccagcaaggctggcacacaattgcaggcctgttctctctcctgtggggcagcctgtgtggcccagagtgagatgctgctgcccaaatccctccttcataccccctcaggggtcctgggcccctcccagtctgtgagtagggtatgccacagaggacggctcctgatggagggcgagtggaaggaagcgaagcagccaagacagactcacgggcccctgaaggcccacagagaagataggcgaggcagatcccaggagtagctgagagccccagactg

SEQ ID NO: 4940 - DNA, 528 bp, Canis familiaris
  misc_feature (1)..(528): n = a or c or g or t
aagctgtgcannctgcttgcatggttcagtaccagaagtgtcttgtggnnncngcagctcgaggcaaggnntggggtgcccaggcccgtgcccgcntgcggctcaagcnnaccagctctgtggactccccaggaggtcccctgccactccccctgctcaaaggaggggttgggggtgcaggggcagcccctcgaaagcggggtgtcttctcttttcttgatgccttccgtctgaaaccttctctgctccatatgccctaagttaatccaggaggactgggtaaggaggctctgggtccatgcccaactctataccccttcatacttcaggggtctgtagcctctcactccttgaagccttctctgcctgcccctctggctcttgcctaccctctgtttattgcccaatttattcaatgtttatagagatgactgagaggccctgcaccacaacctaggcccctgactgtcctttccctgggtccctgtgttccttgcccctgtccaatcctggacagttggctctacc

SEQ ID NO: 4941 - DNA, 515 bp, Canis familiaris
  misc_feature (1)..(515): n = a or c or g or t
gagcgagtgtnncccggcctnnnacgacccgacgnnggactacatgaanctgctcggcatgatcttcagcatgtgcggnctcatgctcaagctgaagtggtgcgcgtgggtggnngtctactgctccttcatcagctttgccaactcccggagctctgaggacactaaacaaatgatgagtagcttcatgctgtccatctctgctgtggtcatgtcatatctgcagaacccgcagcccatgacacccccctggtgatgtcagcctaggacttctctctacacattcccccaggcctggcccctggctgctcagcctctgccctcagctgctgtcctgggctcccctgaatgaggtagtctccgggcttgcagctgaatggagggaacctgaccctttccctgggattctacttctgctgggcagaggggaataccttaggcctaccctcctgcctgccttccccaccctgcctgctgctgggggagatgctgtccatgtttctacgtgtatctac

SEQ ID NO: 4942 - DNA, 709 bp, Canis familiaris
  misc_feature (1)..(709): n = a or c or g or t
tcaatcaagcaatnncagagctagnnnccattccgtatctacaggacgtcagtcaacannnnnnagaattgctgcagtcactaatgnnagatgccatnnacannnnngaannnngaagannngataaagaacgtgtgtggaatacaatccaaannnacngactgctcannnacctggccatccaattctggctccagaataaagctgaagcacgtccgatccacaggctccagggagtgtccagggactgtccatccagtggccggcaggacaggggctgatcgatgggaaagtctccctccgcttaaatgctactgaagcatctaccgagagtatccaacgatacgccaggacctagaatagacactaagaccgacatgtgaaataacataaaaagcatcagctttctcactctgtgacccaggtctcgggctcctcatctgtgacacagcgataatggtcctcaaaagggtactgagggccttaagtcggtcatgggtcttaactacaaagacggggggtgatgtagtgaagactgtaaatccggcaccctcctctgagagctagaggagtgggaaacagtccctgccccgaaggagtttctagaaggagggcctcggccggccccacgtggggctgaatgcaggacgggaaggggcggcaatggnnnnnagaagatgtgagannnnnnactgatataaaatggtcc

SEQ ID NO: 4943 - DNA, 599 bp, Canis familiaris
  misc_feature (1)..(599): n = a or c or g or t
gcatgcataatatcttgtnntacctgtgtnnaatttcagctttcctcatacagaaggattttgtatccccggactacttgaagaagtggtcagccaaaggcattcaggttgttggttggactgttaatacctttgatgaaaaaagttactatgaatcccatcttggttccagctatataactgacagcatgttggaagactgtgcatctcagttctagaattttcccccagggaggaaacgtgggtacagaaattgcctgttggcctcatgcagggatacccaaataccctttgtgctagcccaagccctggaggatcgggtggctcacacaagcaatagttggtatttgcatttttacctgaaccagagcaaaacctggttttgctttccttgctccatggaatgcctgagttcaacaccattgctcttgaaaatccgggtctgcaaaaaggcacaacagctcctgccccagcctagctgaggcatacactgagacccagtgaggatagcacagattgagttgtacaatttggggatgcagatgcaaatgcatgggaaatgcatgatcattcaaacttgacactttaaaacttgacac

SEQ ID NO: 4944 - DNA, 218 bp, Canis familiaris
  misc_feature (1)..(218): n = a or c or g or t
tgaagagagcaacttgaacctggaagcacatagcctggctgcacgggcagccctttatgcaaccacgagnnnnnnnaatttgagcaagaagccgatgcacagaggaggggagaaccttgatcacacatggcccgccttccctgggacaattcagcacagggcacggcgatcgacgggtcctcgctccgggaatagccttcggcctggcgcgggcagcc

SEQ ID NO: 4945 - DNA, 563 bp, Canis familiaris
  misc_feature (1)..(563): n = a or c or g or t
cgggtgtcgggnaggctgtcccggtggttctagggactggccagcgncttgggtggtgtcggggtccatcaggttggcccaaaggagggttcctcttcccctatgtggggcctgccggaggcctgttcctgctgttagtggtgggccccctcagccagcgaatcgaatcaaggcaggccacagagagggggggtggggactccatggaaggttctggagagggctggtgaaccgtgtggagtgagctgtcccttggcagcagagccggacaagtctctactaaggtgaacgccggtgggggccaccctcgctgtcctggcccgctcggctggtgctccatcatgctcagtgccttttccacggcccctgacccccggtgtgtgtaccagggctggggtcccgggagggcaaagtccacgccttgggcttggggatgcggtggccaggcgtgggggtccagccctgctggggtgggagtgggacagggctggtggccaaactaaatcactcggtgaggaatgcagaagagcgctcattccattctatttaattgcagtgtacaa

SEQ ID NO: 4946 - DNA, 486 bp, Canis familiaris
  misc_feature (1)..(486): n = a or c or g or t
gggatgtcagannngaacgaggcctctgtccctcgagagaaggggcttccctgtnnnntctggggactttctctctcactcttcccacctccgtgagtcaggccaagggtcggcagcaagagtggaaagcaccagtctgcccatggtccctgccgccctgccaaatctaagccagtctcactgtgaaccacaactaaccttaactgggggggagtgaggggctggccaggcctgacaaagcctcagggtgtccccagccctgcacccagcttgagcccctcaatcctgcctcatcccctgctcccattataccccctccagcggcagccacctctcccacatccacccctgctgctctgctcttcggaggctcggaggcccttcggatgttggatgtttgagagacacgttctcttccctgtctggtggacaggacagtggcaaagctcaggctctggctttgcaggggtggtggtgggggagcat

SEQ ID NO: 4947 - DNA, 551 bp, Canis familiaris
  misc_feature (1)..(551): n = a or c or g or t
cagaatgnngctctacacagaatggtagtttatggactcgcttaggatctgcacccaagaccaaagaaaagaacacannnnnngtggatcacagggcgccaggcactgaggaagatgattctgagctgcaaagggcatggggggctctgataaaggagaaagaacagtctcgccaaaagaagagccgctgttaccagcacccttttcccaagaaaagtcaattcccaggtgcttattggacagccttcgagggggaagatgagggaagctgccagctcacccttccaggaccctagtgtgggggccgaatctcatggacctgacctcagaggtgcaccggtgccgcccaggtagataagagatgcagcatcgatcgtgcttccgtttctccctggggatttctgttaggggcctcttcttagcaatcagcttgaagtgaagatcaaattcagtgctgtgggatttttaggaacaaaaaactgtgacttctggatttcgggtggatttttgtgctggggtggggtcatgagttaatgttgaacaatttttaa

SEQ ID NO: 4948 - DNA, 441 bp, Canis familiaris
  misc_feature (1)..(441): n = a or c or g or t
cccccaaccgcctgcaccnnaggctgtcccagctnnngannnnnaccccctcacccnnnnnnnggtnnntcaggacactaacacaaaagcatcctctcgatccangaaaacagggtnnnnnnctcgtgcgggcccacgagccttctgttcctgttcctcttgccctggcagctctgcttgctggcgtcgcctgggcctgtgtcacnnnngcatctttgntgtcctccttccncggncctngccgaccatgccagggagaggatccccaagcctcctcactttctacagaaaacctacaagaaaacactcaagtcatcgtaatnnncgtgctccgagctctcannnctgcnnntgtggctctgggggccctaggagctgnntattacatcattgaatccttgtgannncaccccccaggcccgtagtccagcagatccagtt

SEQ ID NO: 4949 - DNA, 654 bp, Canis familiaris
  misc_feature (1)..(654): n = a or c or g or t
ttgcacaagaannnatgctgaggcattaaatgaatgcctgtataagtngnnncnnatttctacaattcagtatttgatgtggtcatgtaaatatgtacagtattgtaaatacataaaaaatatataaatttttggctgctgttaagatgtacttttaccttttaacatttataantaaatgaggacatttgacctcagtgagcactagaagaaagccatgactgatatgttgaaatactgatcctctactcttctgagtaaggctgagttctacatctctgactgcctattggaaacattttttaaatggaaccaaaattgtcatccttacaaatagaaaagactgatagttgacacgtttataagtgataaaatggagaagtggcttctttgggtgaggagccaaaccgaaccactattttattaggatcacaattttgggggaaggataaagtgacatcatttcattttacaaggtgccaagatcccagttatcgtcattttctgtttaatttcagataaagtattgagcaaaatttttaaagtgatttaattattaaaaactattgattttattttggccataantnnnnnctcataaaaattttagaattatttccactgtgtttcaagctgtatgtttcttgtttaatt

SEQ ID NO: 4950 - DNA, 617 bp, Canis familiaris
  misc_feature (1)..(617): n = a or c or g or t
cagagcaagnncagcanctacttcgtcgagtggatccccnncaacgtgaaggtnnnngtgtgtgacatcccaccccgggggctcaagatgtcctccaccttcatcggcaacagcacggccatnnannngctgttcangcgcatctcggagcagttcacagccatgttccggcgcaaggccttcctgcactggtacacgggcgagggcatggacgagatggagttcactgaggccgagagcaacatgaacgacctggtgtccgagtaccagcagtaccaggacgccacggccgaggaggagggcgagatgtacgaagatgacgaggaggagtccgaggctcagggccccaagtgaagctggaggggcagagccaggctgtcgctgtggcccagaggcctgtcccccagagccacgtcgccactgacaccgccccgagccttgcccccaccagctctggccacagcgccctagggctcccgagtgtttgtcctccagtatttacggcatccccaccccacgtgagtcctgttttcccaccataggtcagctccatcgtgtctgctttattcgtcagctccaggcctgttttatggttngttttgttttttgtttttact

SEQ ID NO: 4951 - DNA, 422 bp, Canis familiaris
  misc_feature (1)..(422): n = a or c or g or t
ccagagaaaaaatagacnnnnnnnnnttcagggttgnnnnnctgctgttacaaagtgtattnnnnnncngaaaaatgacagnnnnnnnnnngnntttgtnnnccagtactgcaagtgcctnnncntnnngcagnntttccagttttcccaannnnacatgnncnnngnnnggaagaggatttnnaannnnnngtgtgagtgccgnnncatggactgaaactcagcagggactctgggaggnnngancnantnnnnnnnnntggtttgttacttgaatctccnannncntatttgaatttttacagatatttcagatcagtggtgttgggccactattgttacctcaaanttgtttttttgccctattcatttcnnnnnntnncgnntactattttttaatgttcagtttggtttcattttta

SEQ ID NO: 4952 - DNA, 664 bp, Canis familiaris
  misc_feature (1)..(664): n = a or c or g or t
tgcatnnctntgtgcatnnnggtgtcaccatgaagctcatggatgaggtagctgggattgtngctgcacgtcattgcaagaccaacattgtcactgcttctgtggatgccattaactttcacgacaagatcagaaaaggctgtgtcattaccatctctgggcgcatgactttcacaagcaataaatccatggagatcgaggtcttggtggatgccgaccccgtggtggacaactcacagaagcgctaccgggctgccagtgctttcttcacctatgtgtccctgagccaggagggcaagtcactgcctgtgccccaactcgtgcccgagaccgaggacgagaagaagcgctttgaggaaggcaaagggcggtacctgcagatgaaggcgaaacggcagggccgggccgagccccagccctagaggccatcctcacgccgggccccggagtggccccaatgtctcgtcacttagaattcacccccttggccaaaaacccaatccacattgagagctggtgttgtgtgaagtgttcgtcttgcagtgttaacctgtgctctcctgaaaacctacacaccaaagctttatttctatcactcctgtgtaagtgctacagtgttgtccctgcctccagaggctccctagggaatacttgcgtgcacact

SEQ ID NO: 4953 - DNA, 494 bp, Canis familiaris
  misc_feature (1)..(494): n = a or c or g or t
gagggtaaaatttttccttcagtgcatgagtgnctactatgtactagttgctgaagatacagagatgaataagctctagtcactaagctgaaatagctcattatctgaatgtggaggtttattagtgttctcgatgtaaagtattttgctaacaccatctagaagataagttacaaagctctcaacctcttacatataatagatttagagttggctactatcctgaaagaagcccctttttctgtttctctttgatctataagcagatcttttgagaccatcactcacatccaaaagggcaattgtgatcaaaagaaagacagtattttaaggaattctgttctgatcagaaccaggttcttaactgccatagttgcctgatattgatatgtatatacacacacacactataaagtacttgatgtgcttgactgatgcccttggtactgtaacaacctatattgttaaaaaaaaaaaaaaagtgttgttgtgtc

SEQ ID NO: 4954 - DNA, 607 bp, Canis familiaris
  misc_feature (1)..(607): n = a or c or g or t
taaaggcaggtgccaatatcacgccccgggaaggtgatgaactcgcccggctcccctacctgcgcacctggtttcgtacccgcagcgccatcatcctgcacctcagcaatggctgtgtgcaaatcaacttcttccaggaccataccaaactcatcctgtgcccactaatggcagccgtgacctacatcgacgagaggcgggatttccgcacgtaccgcctgagcctgctggaggaatacggctgctccaaggagctggccagccggctccgctatgcccgcaccatggtggacaagctactcagctcccgctcggctgccaaccgtctcaagtcctcttcataggccttcctcccctctggactggcaccccttcccacccccacagcaccttggcccgtactggttagcttccacagtgccattttctagaatgtacccccccagccctgggggctgggaagagctacagcacccttgctgatgggggtcaccatgtaagttatttttgtacatgttcgggtgtgggttctatggccctgtccccctcaaccccaccatatgaattgtacagaatatcgcttttgaatctgggannnnnttttcct

SEQ ID NO: 4955 - DNA, 489 bp, Canis familiaris
  misc_feature (1)..(489): n = a or c or g or t
gtgagcaggaggtcctccagtagggacaggtaggtcatccatcagtcnnnnnnnnncctcacagatggaccnantagnnngggcctcagtttctccaattannnaaattaacatagaanacagagagcagacttgnnnnnngaaggatgattttcaaaggcctccaacctgcacatgcacttttcaaggcttgtagtatatttataannnngtattatttttttaaagggggccacaaattacacannnntaatattctgtaaaaaactcactcatccccagattgtgtcaggtagctaattcagaggcnntaaagattnnnnncattttgaagaaggagcccaaactccttgaaagattagaaatcntncaatnnnntctctacttttctctacttttgcnnantcctnttatttttccccactgctagtgttgaagntnnnnntatcagcaacnngnnnnnatcagatattcatgattttannnnaa

SEQ ID NO: 4956 - DNA, 584 bp, Canis familiaris
  misc_feature (1)..(584): n = a or c or g or t
tgagcttcggagagatcgaggaagacgcctaccaagaggacctgggcttcagcctgggccatctgggcaaatcaggcagcgggcgggtacggcagacacaggtgaacgaggccaccaaagccaggatctctaagacactgcagcggaccctgcagaagcagagtgtcgtgtatggcgggaagtccaccatccgtgaccgctcctcggggactgcttccagtgtggctttcacccctttgcagggcctagagattgtgaacccacaagcagctgagaagaaggtggctgaagccaaccagaagtatttctccagcatggccgagttcctcaaggtcaagggcgagaaaagcggcatcatgtccacctgaggggctgtaccctgggtggctgcccctgaagctacacaggccctgcccttctgaagggatcaggatcaggatagggctgggaggttctgtcctcagcccagtgccaggactgtccaggaagactcaggaggagacccagtccccacgcacgagatcgctccctattgcaggggggcagagccagtcttcatcannnntcaccttttttaactagga

SEQ ID NO: 4957 - DNA, 604 bp, Canis familiaris
  misc_feature (1)..(604): n = a or c or g or t
tggtcagcagactggcacatctgtngaacaaactgtaatagcccaaagtcaacatcatcaacagtttttagatgcatctcgagcacttccagagtttggagaagttgaaatctcttctctgccagatggtactacctttgaggatatcaagtcactgcagagtctttatcgagagcactgtgagctcaatggttattcgggacttaaccttacgcagtgctgctagctttggctccttccacctgatccgtctactctacgatgagtatatgttctacttagtagaacatcgtgttgctcaggcaacaggagagacacccatagcagtcatgggcgagtttggtgatttaaatgctgtgtctcctggaaatctggataaagacgaaggcagcgaagtggaaagcgagatggacgaagaactggacgactcttcggaaccccaagccaaaagagagaagaccgagctgaaccaggcgtttcccgtgggctgcatgcagccggtgctggagggcggggtgcagcccagcctcctgaaccccatccacagtgagcacatcgtcacgagcacccagaccatccggcagtgcagcgccacaggaaacac

SEQ ID NO: 4958 - DNA, 357 bp, Canis familiaris
  misc_feature (1)..(357): n = a or c or g or t
aaggagtngagcagaacctgtccatcaagaacagagacaggttcacccagaacctgtnnnncttcagangagatgtggcggaggccctgcggaatgatggcagcagcgagccatgcagtctggacatgatgagctgaccaccttccctgaccatgtgccaagcagcctttatccagagactcttgtgcgtctgggtcccaggacagtgatgttagctagcccaggagaatctatttttcaaaacaaacaacaacaaaagccctgcctttttataagtctggcctaactgtaagaatttataatagtgcacaatgtaaattcagtctttgctcagaaaaagcgaaagatgttttcagt

SEQ ID NO: 4959 - DNA, 645 bp, Canis familiaris
gtatagtaagagtcgcacacattttagagttttgaacactgtagaacacagtatgaatatagatatcattagtagtattaaaattatgcttataattttttttgtttatctctgggattaaagcagtacagtacctgtgtactaattttgaatattccttaaaataagtagaaactatgaaacccacagtgtcaaactacaaaaatgcatttttttgggggggggggaactaccaaatcagtagtgtctgattaattttgataagggagatctaatctttcattgaagacttaagctgtatgcagaacaaggaaagcaaccatccctttaagaaacatggagaaaaatttagttaaacacatcatgtgtcagagtactaggtaccagaaaaacagtataaagtgcctagtaatttgaaagtgatttattaatcaatactaaaattactgaagatttaccctcaaataatataaaaccaatgtgaacattcaaacaaaaagtttgctgtttattagcatatttttaaatttttgaaaataaggtcatttcaatccactgcatatcaatatctgggtttctttcaaaaaatcatttgtttttaatatgaaaactaaataaataattttgaaaattattatttgttct

SEQ ID NO: 4960 - DNA, 605 bp, Canis familiaris
  misc_feature (1)..(605): n = a or c or g or t
atccacnnnatgccagctcaagcactacaaaagtattgtgtaaaccagcaataatttgatgtgtagcattccatataattttcattttcatgtacttttaaaaacgggaagctcttaataaattacaaggtttaggtcagcactctatgtatatgtgagtccgatagatgtttttattttgtgagatatttgttcttaaggaaaaatctgatggattatggaagcagctcactatgttgtttccttctgcactttgtgccctaacagtattaacaggcattgttttctatgaattctatttttatgatactattaccctaatttgaaatttaacatcaaatattatgctaagaataggagagtttactgctgacacctaatttcttaagaattatcccacatgagccagctcatcccgttaccgtgtgtttattcaagtttacctagggccttagagaaaaccccaccatttcaaggttgctaggccattagtaatgatacactgctgtctttttcgtttcaaagacagaaatccccatgcccaattcctgcctaaagaggcaatttaatcctaattttnnnnnnataaatactcaagnnnnnnn

SEQ ID NO: 4961 - DNA, 537 bp, Canis familiaris
  misc_feature (1)..(537): n = a or c or g or t
ggcatgggtnnaggtgatgagagccgccacgttcacctacagcccactgttgtactngattaacaagcgtcggtattatggcatgaacacagccatcaacacggggcctccccctgctgccaccaagactgagactgaggtccagaattcagatcctctatgggagttggacatctctgagagcaggagctctgttgccgaagacagcagccccaaggtggagggccctgctctgctacaacctgcattgcagcccctactttccccaatgctgcggtcccagaccagctccccacttccagttcccatctttcaggaggtgcccttttccatttccctgtgcaacctgcctccagtgatgaaccactcagtctcctaccctttggacacctgtcctgaaaggaacatccacttccattccctacccacgatggcccatggagaccactgcttcaatgccaagccttttgcttcagagttgtagcctgctctgacggcgggagctggaggtaacaggggcagagcaggagaatggag

SEQ ID NO: 4962 - DNA, 471 bp, Canis familiaris
  misc_feature (1)..(471): n = a or c or g or t
tcagcagcnnncttctcacttcattagcactaaacaagtctcttgctctcaggaatttgtccaaaaaagaataaaaaccacctgagattccatgtaccagattatgaacttttctcataggtttgaattgcttacttccatgtcctaaattaaccatagcttcatttgaccgccaggtcttaagtctgttgacagtttcagcatgactgaatcgctcattttttattttttatttttatttttattttttttgctttcagaaattggcttggttctctttagagttggtgtaaacatgccatgtaataaatgatttccacttaatggtacaacagaattattgctttcttagatgtatgtgtagtaaaagtcaatatacacatttatataatttctttcttcaaaatcttatacttaatttgatatttctaaaaattgcacatgtaantcatgtgnataacannntaaagt

SEQ ID NO: 4963 - DNA, 603 bp, Canis familiaris
  misc_feature (1)..(603): n = a or c or g or t
gaagaagctggtcaaagaggtcatcgctgtcagctgtgggcctgcccagtgccannagaccatccgcactgctctggccatgggtgcagaccgaggcatccacgtnnaggtgccagctgcagaggcagatcgcctgggtcccctgcaggtggcccgggtcctggccaagctggcagagaaggagaaggtggacctgctgctgctgggcaagcaggccatcgatgatgactgtaaccagacggggcagatgacagctggatttctagactggccacagggcacattcgcctcccaggtgacagtggaaggtgacaaactgaaagtggagcgggaggttgatgggggcctagagaccgtgcggctgaagctgcctgctgtggtgactgctgacctgcggctcaatgagccccgctatgccacattgcccaacatcatgaaagccaagaagaagaagattgaagtgatcaagcctggagacctgggtgtggacctgacctccaagctctccatagttagtgtggaggacccaccccagcgaaccgctggcatcaaggtggagactgtggaggacctggtggccaagctgaaggagattgggcggat

SEQ ID NO: 4964 - DNA, 501 bp, Canis familiaris
  misc_feature (1)..(501): n = a or c or g or t
attattttttaaaacacaagaggtgtnntgacnnnnnnnnngactgggaagcccctgggtatcacaggtcctgttgtggcctttccttgatgtgacacttgaactannngattttttgaaggctatannnnaaccnngactatttgttgttatgtgcannnctgtttgtactgtttgtataaaaaatagaaaaaaaaagaaaagnnnnaaggcataaatcttnattgcagatttattttcattgcnnactttagacattgtgattcactgaaatcatttttctactgtcaaatatgtaccttttcttcatgctggtattttttcaatagtaatgtagcctttgtactgagacaaattttcattgttatttttagaaagattttttgctaagaaaaaaattaaacatatttacatatttttcattttatttcgtattttctttaaggagtgctttctcaatcattactagagttgtttctgggagggactttcatatctggt

SEQ ID NO: 4965 - DNA, 676 bp, Canis familiaris
  misc_feature (1)..(676): n = a or c or g or t
agaatcctcagcaccctcctgcnctactgcaggccccgnnnngagggccagcttgctgccaaggccnntgagaaagtgctgtccctgnngcagctcctgtttccctcggaggaagacagtggggcagggcctccccaggaaggggatggggtccctgggggtggccccctgagcccgacacagacccacacccaggaaattcgggaaaagctgctcagcctggaggagaccatgaaacagctggaggaggtggaggaggaattttgtcacctgcgactcctcctgtctcagcttggggagaacagcaccccccagcctgggtgtacctgaggctccttgggccaggcaggccttttgcaagactgagggccacccgccgccaccgcacagcacagctgccgcagcatctccaaccccaagggtccgaggagagggaaccgggctgccaggggggccatgcctgggggggcccagctgggatcactgcctcccccaacttcccattggccttggccttctctctctcctgccttctgcttgggggactcagggcttcattccggcaggggggaaccacagtgaccctctcccattccccaggccatctcagtattgcctggagggggcacccttctattccccacccccaagtgcctttgctctgtttttataccct

SEQ ID NO: 4966 - DNA, 643 bp, Canis familiaris
  misc_feature (1)..(643): n = a or c or g or t
ccagatcttgatttccttagagagtgaggaaagagnnnngctagagagnatnnnagcagannnnnannnngaanncagaaancngcangcagagtatgatnnnnnaaagcagcagcatgaacacaaaggcctgtccccactgccatcccctcctgaaatgatgcctacttctccccaaagtccccgggatgctgagctcatcgctgaggccaagctgctgcgtcaacacaaaggccgcctggaagccaggatgcaaatccttgaagaccataacaaacaactggaatcccagttacacaggctcaggcagctgctggagcaaccccaggcagaggccaaggtgaatggtacaacggtgtcttctccttctacctctcttcagaggtcagatagcagtcagcctatgctgctccgggtggtcggcagtcagacttcagaatccatgggcgaggaagacctgctcagccctccccaggacacaagcacagggttagaggaagtgatggagcagctcaaccactccttccctagttccagaggaagaaatacccctgggaagccaatgagagaggacacaatgtaggaagccttttccacttggcagatgatttgggcagagcgatggagtccttagtttcagtca

SEQ ID NO: 4967 - DNA, 543 bp, Canis familiaris
  misc_feature (1)..(543): n = a or c or g or t
agggacagnnttcactccccaatttctccccgtctaatgggctgtgttgccggccacatcccaggacgggtctcctacaacctgccttaagctgactgaagcattgagtaagaaggtgtttcccgcctgcacctgctctgacagggccatgggggtgctcgtgggatgcgttcccttgtcttcccgcacatctggtaccttaggaagctctttagggagcggagtctgagcaccgttcttcctaccaacatgtcctgttgtaaatagagcactcatgtttgccaggccttcccaggggctgggattgctggtggtgggtggaaggggctctgtgtaccccaagggcgaggagagaacgcacttggcatttctgtacgatgttgggatgtacagactgtcctttgtgcttctgggatgtgcctctctgcgcatgtgccaggccctgggacgggggcactgctgattctgtgtgctctgcccactgcccccactttgcgtctctgggatgcacagagatggggccttgtcatgtaaatgccacag

SEQ ID NO: 4968 - DNA, 561 bp, Canis familiaris
  misc_feature (1)..(561): n = a or c or g or t
tatataangtgaaagacnncacatgaaagttaggaattnncggtnnttaatttcagttttgaatatcctatnnnncgcataaagggtaaatgataaggaanctccatgactcatgggaannatggttgcttcctggaactgataccatagggtctggcccactgcagtccctgtctgggtgcttacagccttgtggtagaaagtgcatggtcccaggctcagctggtgaagagcttgtattgccaatagggttagtttctctggccccagcctggttaatgggctcttcatctttggtgcccaccaaggcagccacattgttctgttgttctgttgtgttctttgtacttaacagaaactgttgatagggcccaaaaccctacagaaattctatgtctgtaaaaaaccaacagatggaatggacttgtctgaatgtaaagattttctgtttgatagataatttcaaatttcaatattttaaatgataatcagagttccttttacttacaaaattggattattttttagaattataaaaattnnngctgctttaccactgta

SEQ ID NO: 4969 - DNA, 129 bp, Canis familiaris
ctcacccctcacatccaccggggagaaagcaggtgcggagaagcagcaggcctgacaccccaacatcgaagcttccctgcaacctcttaaccactcgctgcccctcggaagacgcttccctgaactacg

SEQ ID NO: 4970 - DNA, 285 bp, Canis familiaris
  misc_feature (1)..(276): n = a or c or g or t
ccccagacacgtgaggaatgcctggcctccgagtgaggacacccaagaaaacaataggggcaaaagatacccccctgggtctttgtggattacacacgaaccannnnnnnngtgtctctttacaccaagatgaagtnnnnnattgggaaaggacacgtcagagccgtgacagtgatgagacactttaattgaaaagcaaattcgtaatttagtgtgatgaaatgagttcataaccacccatagtggctggggaagtcnnnntttttggggagggggaaaaaaaaa

SEQ ID NO: 4971 - DNA, 588 bp, Canis familiaris
  misc_feature (1)..(588): n = a or c or g or t
tgctactgtggntactgtaacacttaatttttctccaaaannnnctatgaaggctgccagcaaattcactaatcacaggatgagtccagagatggtctgtgactgctgacatttcacaaaagccttattagtatgcttgagtaccagcaaagcaactgaataaacgagctgcacttctaaggataaccaggaatccagcacacttaaagagatcctcaaaagagtgggaatggatttaagaagcagaatctcaattttgagaaggagcaacataataggaagaatggtatgcatgccactgaatgcatctatcctcaactaattccacttcctgggttacacacggcagtgtttctccaatgttcccccctcaccagtacagatcttgttctcagcaggaaatactggcacttaggactcaattagataccacagatatgctcaccctatgtaaatgattacaaatgtgtgaaaaagaaacaactgtaatttggacataaagaaaccactatgtttttagagaaaattggacattttagacttaaatttttttttctttcatgattggtaggataatagagcagaatg

SEQ ID NO: 4972 - DNA, 685 bp, Canis familiaris
  misc_feature (1)..(685): n = a or c or g or t
aactaaataagaatccagacacatncgtgagaaattcccnttccaaggcatgnncaaatgtnnnnnngcccaaannaannacagtgctacctacacccatttgccatcagaggatgcccatnntagggctttctctgtaatgagcattgaggcttagttnnagccaggttcccacctcttcctcaagacttcatttacatgagttgcatgggcacttttgtttatggctgaagaatggaggagtttatactactatcttgtcggtggaagacaagggaggaagaaattgaacaacaatggggcatggtgtgtcatctacctaccccagcactggcctttgtgccctcctatagcaatggaagagttcggaccagaagcagaggggctgttcctccaagagacttgatgagactgggtgaaggagtaggcttgggagctcagtagatctgctcctgcttcccattacatccagaaattgctgggtgtgctagaagacagaaatcctggtacagctgtcagcatcctcatgagggatgttgccaacatgggcaatggcaaggctcctagaagccacttcacggtcactggacatgagctaaaggaagccagagatagagaagaaggaggaggaggagactcaaatgtgggaaatttagtaggactccaagaagtgaaggattatgcc

SEQ ID NO: 4973 - DNA, 411 bp, Canis familiaris
  misc_feature (1)..(411): n = a or c or g or t
tgagcnngcttctgtccatttctccccttgcctcctcctanngtctgtntngacctnnnnngtgggggtggggtcgtcccnanngtctgcagctggttgtgctctcccagcatcctctgacncnnnnngttggccatcatcctcagtgcacctgtccaacagcacctcnngnnacgccccttngnngaccccgcttccnnnatgtctgtcgttgaggcccccgnnnnnacgcctgctgccaagacctgnnnnngcgctgggtctgccctcctgctcagtctcctctgcccccaccctggggtgtccctggatgtcacagaatctgaggggaggccttttagagttcgtaaagaccccaaagtgatagggatctgtagaacgtttagaaagaacatgttttcagtgtctcca

SEQ ID NO: 4974 - DNA, 663 bp, Canis familiaris
  misc_feature (1)..(663): n = a or c or g or t
gcagggccagagtggcatcatctcctgcatagncttcagcccagcccaaccnnnctacgcttgtggctcctatagccgttccctgggtctgtatgcctgtgatgatggctcccctcttgctttgctgggaggacaccaaggaggcatcactcacctctgctttcaccctgatggcaaccgcttcttctcaggagcccgcaaggatgctgagcttctgtgctgggacctccggcagcccagccatccactgtggtcgctgagtcgagaggtgaccaccaatcagcgcatctacttcgatctggattcgactgggcagttcttggtgagcgggagcaccagtggggctgtgtctgtgtgggacaccggcggggctggacaggaagggaagccggagccgttgctgagttttctgccccagaaagactgtaccaacggagtgagtctgcaccctagcctgccattgctggccaccgcctccggtcagcgtgtgttcccagagcccacagagagtgaggacgaaggggagcgggaggtggaccttcccctgctttccatgcgccacgtccacctcgaatgtcagcttcagctctggtggtgtggtggggacatggaaccaggatagctgatgctccccagggccagaagggccagggagggactgag

SEQ ID NO: 4975 - DNA, 652 bp, Canis familiaris
  misc_feature (1)..(652): n = a or c or g or t
cagcaggatnncaaagactannnnnntctccccatatcagagactttgagcatngaagaggattctnnactctctctgcctacctcacctgtttcctgtatgnannaagaggaagtgtgtgaccccaaattccattatgacaacacagcaggaatcagccagtatctgcagaacagtaagcgaaagagccggcccgtgagtgtaaaaacatttgaagatatcccattggaagaaccagaagtaaaagtaatcccagatgacaaccagacggacagtggtatggtccttgcctcagaagagctgaaaaccctggaagacagaaccaaattagctccatcttttagtggactgatgcccagcaagagcaaggagtctgtggcatccgaaggctctaaccaaacgagtggctaccagtccggctatcactccgatgacacggataccactgtgtactccagcgaggaggccgaacttttaaagctgatggagattggaccacaagctggcagtgcagcccagattctccagcctgactctgggcccacattgagctctcctcctgtttaaaaggaggctcccacgtcccccactcctggaaatcacatgagaggtgctgctcagattttcaagtgtcgttctttccatcactagg

SEQ ID NO: 4976 - DNA, 559 bp, Canis familiaris
  misc_feature (1)..(559): n = a or c or g or t
ggcctgcatttacctcatgggattcagattcccactctgcctcaccgcagatgcgctggaacaacaaggtngaaccttgnctggggaacactaaccacctgagcgttccagtgtgccagtctctggacaagtggaggtgtctgcagagttacctgcttaagaggctttcctctcaggctgtgtgtctcctaagtatggagagttgtttgggcctcttttctgaatcagtttgtccttgtggctggtcctgggtgcagctgggagcaggtggccttgggaggtggatggtcagtcctcttctggtccgagtcccgctcagtctgaggccatggtgcaggccaggcactcccaggcatcccgtgtcttagggtccctcgaggatccctgtccaagtccctgactgagcaggtgtggccttcaggggcctctatgtccaccagtctgctggaaggggttggaaaaactatggatccctttcacatgtataagtcggaatttaaaattcttccttataaatttaataagcaaagattatgttttcctattgaaattattgatg

SEQ ID NO: 4977 - DNA, 415 bp, Canis familiaris
ttgcaccgacaccggtacttaggtgcggagcggcgtgtccttggacttagagagcgggacgtccggcttgcgagcgggcttcttcgtttcgcgcgcgcgacagaaaggcgattgaaaaatgggtgatgttgagaagggcaagaagatttttgttcagaagtgtgcgcagtgccatactgtggaaaagggaggcaagcacaagactgggccaaacctccacggtttatttgggcggaagaccggtcaggcccctggattttcttacacggatgccaacaagaacaaaggcatcacctggggagaggagaccctgatggagtatttggagaatcccaagaagtacatccctggaacaaaaatgatcttcgctggcattaagaagacaggggaaagagcagacttaatagcttatctc

SEQ ID NO: 4978 - DNA, 507 bp, Canis familiaris
  misc_feature (1)..(507): n = a or c or g or t
ctgtggattggtgactcttgtagcnnnnnnagcggcatgcagactagcagaagttgaggtcctcagtcagtgacctttcctttcttctgggtgcccagcctcctttcctcacctaatacccaagcccatcacttgtattttctggtgaggtatggtttggtaatggtgggaaaaatacaggcgtagagtagttgaaagctctgctgttctgtcccttccttcctatcttaatgagaaacaagtgaggtagagggcccgtcgtgccgcctcccccaggcactcctcctaggccagaggcctaccccttcccaggccttctctacccagntgtctcttggtttccaaccccagaacaggactttggcaggtcacctgtacattggcctggtgctggagagtgaagctatgggattttcgggaactcttggttcctagaaattccttggagatcagacctctccaaagggaagcaaggccaaggggtgtgcaccggatggggaacagcag

SEQ ID NO: 4979 - DNA, 671 bp, Canis familiaris
  misc_feature (1)..(671): n = a or c or g or t
atttaaatannttttaaagaaaaaacatctaaaaataaatcntaananacaactctatnnngattatatcaaagcaaatttttnnnnnnntgcaaattgctttgtgtgttcaatgctaggtctgatagcgatagcttttagtagacagcagtaggtgcctgcagaacttgtgtttttctcatctttaaaatacaactaattatnctcttaatcaaggctgtctgcttatttatactagcgtaggcaacacttaaatttcccttcttagtatgcttcataaccgcttttcagagagcttttgcttgttctttatcctgtatctcgtgtttatgtgcacagtgccaattgaagagtgactgggtggagaccctgccttgcctcagggagaaccctcccctgcagagtgtcaggcacctcaccccagtagcctcaaggcacagtactcttgggcagtaactggataccttttatttgaataaacaaactgggggaaaaatgcttccttaagtgctgacagcctttttaaccaacacatttaaaattgtacagaacaaaaaataaaatcaaagactgatcttgtacagatattagtgttaccagcattcacgtggaaatcaagagcaaagaaaaaataatgttaaacaactctgtaccataacattttctgtaat

SEQ ID NO: 4980 - DNA, 550 bp, Canis familiaris
  misc_feature (1)..(550): n = a or c or g or t
tcaagctttgancttcctatcatcagattatctctccagagtgtacctacctaacaaattaaaattnnnnnnnnnnntataaaaatatatcagaatatatcttttgatttgcaagagatttttcattagttttcagtagtagatactgttgtgggaagaacatatattcctgattctgtagagataaaataattttccattggtgatcttttttgtcaaaacagctttctttagaagactttgttttatccttctctgtagagactgagttgtatcctatgttctaaagtaaattataaaagagcatatgttactttggctttaccactttatttgaaaaaatatacatgccatcaaagtctgcaggaatattttaatttctataatgcaactaatgttaagccataaagcatctttttagtatcaaaactaataatctaaatttgannngctgcaaatgaattatagtgtctagcatttcctttttagttgcccttttgtgttttgccttcatggtgtaggggtcntacccccttcattcacttgtgaa

SEQ ID NO: 4981 - DNA, 488 bp, Canis familiaris
  misc_feature (1)..(488): n = a or c or g or t
caatngctgcttccccntnnacggccacgtgctctgcnnnaagtgccacaccgccagagcccannnnnnngtggggacgggagagtccactccccacccgcggaccacccacagagaccgccctgccccccacctgccctgcccccccttcagttattttctgatgtccagcctctccttccacgccagcccccacccaggtatcccagacaccttgtcccgggccccaacgtggcctaggactgcagagtcccagctctgggtttccagcccacctccatcctgcagggaccacccaccgtcctccaggtgtaccccacctgagggggcaccaggttgagcgctgctgctttcactgctgcaccgatgccctcggctggccccggagcagccacatactctgcttgctgagggccaggagacgcccagactctgggaggctgggccangctgggccgaccggcctggacgtcctcccacccccaccc

SEQ ID NO: 4982 - DNA, 509 bp, Canis familiaris
  misc_feature (1)..(509): n = a or c or g or t
aggggaatcaatgtggtccaccccaacgacagagtgtcagtcactccgtcccggcaagaaatgagctatgaagtcatgaaaagacacggannaancgtaaatgcaggttacggggtgaaagcagccagcccgggaggctccgcacaggatgattccaggtatacgacgttctggaagagcccgagtggcggagatggacggagaccgccgtcggcggcggcggtgggtcgggggtgcgtcggcaggacacagggccctcggggcagcgaatccgctctgaggatacacgtggaggacacacgccatcactcgtcggtccaaaaccacagcacgtgcgccaccgagagtgagccccgagtaagcgcgggcctggggatcaggctgtgggcgcggcagccgagccaggcgcatccagggaggggagggcagctgtcgcggggacggtgtgagggtgggggcaggggcctcacgtgggacagttgtcacgttccctcccattgtggtgtgaa

SEQ ID NO: 4983 - DNA, 545 bp, Canis familiaris
  misc_feature (1)..(545): n = a or c or g or t
gatgccatgcacnnnnncagacatgtgcactgataacctattgaatcagaaatgtaaggcattggtgatgtttgcatnnannntcctgtaagcaacactttaacgtcttacattttctctgatgatgtcacattcaaaattatcatgacttaaatattaccagagcagagtgtaacggccaacactttgttcgctcattctacactgtctctgaccatagagagtgcgggaatagcttggaaaagtaacatcgcctggccatccctttatttcaccaggctattcaagtattcctatgccagagcagtgtcaactcttggaggttctggggtgcagccaacgccttcgtgtggtagctctaaatttaaacctaagaaactggggcannnnagcattgagccacagcacaaaaataaagaacaacaacaaaataaagctgtcgttaaatttaaaacaactacaccattactaactgcccaaaatgtcaatttgatatagttcctttcatgcaggtataaattcaattgttagttacaattgttgga

SEQ ID NO: 4984 - DNA, 179 bp, Canis familiaris
  misc_feature (1)..(179): n = a or c or g or t
ggaggaggagccccagggtgctggtatggactgctgggactcaggcctctcggggnngagcagaccccaggaccctccccctgaggtggctgcaggactcaggctgccaggtcataggaagattatggctctgccagggctcnnnntccctgcccgatccnnnnactcctcacctcaaa

SEQ ID NO: 4985 - DNA, 482 bp, Canis familiaris
  misc_feature (1)..(482): n = a or c or g or t
gacgagcaagacgacgggnnnngcccagctgaagccgtcgctcaaccagctgaagcaaacccagaggctgcacggcatggaggtcacggcgggctggcccccggcccccggggaggcgcgggctagactctgtcctcattggaaaggaagtaaaggaactgcccatgcctgtaccccttccgcagcccctggaaaccacaattctccatgtggatctgactgctgtcggttcctatatgaacgtccctcgagcagcagtggggatgccgtgtctggctccagcacccggccctctgtgcaccgcagccgttcccggaaccaccccagtcctacccatgccagattctgagagtgagaagcccgactgagctcacgcaggcccgcccgaccccgacgccaggccctgtgtcgtcacacgtggagaaggcgagtccacacctcgtgtccagttcacgctgttttgtaaccactttctaagcatt

SEQ ID NO: 4986 - DNA, 162 bp, Canis familiaris
tctctctctctctctctctgtctctcatgaataaataaataaaatctttaaaaaaagtattcttataagaaaacatacgtatttgtaaaaatgttttcctgtatcaagtatttgtgcaatgagagctgaattgtaaactattcttgtaatatctagttattt

SEQ ID NO: 4987 - DNA, 610 bp, Canis familiaris
cccagccccaatcccagaattcttccaagctccctgaccttttgaagttttcacccacccattccaagtatcctcatcccttttcatccccttgcttggcttctctgcatgtggtcatctgctgtggcctggtgtgtaatgggttaaaaataagccactgcctgacatcccaacatttgacaccctagcaatgtgtgactcccccaacattccactatgccatcctgcagctgaaatgggaacactggctgcctttccagccccaaactcttggacagaggatctgggaggtagaggccatgccagagaacttggggaaaatgagagggaggaagggaagaaggagacgaagctgagctaaagctgacctcctactgagtaagatgaaaacaggctgaaaaaccaccccaggagaggacctctccccaagcaagccaatgagcagccctgccagactactaccagactgagaaatccagacgcttgtcagggctcggcttctctgccaaatgactgtgtggaaaccaaaatgagccggcctgtgttcttcctagctcccaccctccccgtgccgctgtgctctgctcctccccacacttccctgctatag

SEQ ID NO: 4988 - DNA, 411 bp, Canis familiaris
  misc_feature (1)..(411): n = a or c or g or t
ggaccctccaagtcannngatggaagagcatggacacaaacaaaatgtattcacccaggcttttnangatnnngtgtttnnnactaancagttgttgatgaatggcatattagtgcnnnnctgccgattgagatgccatgagggaaagaggacccaggggcttttgctaatgtccctcccttttcatgccncnaggccctgctgttgtatgggttttgtctccctagcaccaccttctgtttacaatgtgagatggaggttgaacatcagctagtgaggccnnnnnncatccttaggatgtgccaatgaaatgacagcanaagttcctttctctttggtgaattcttcccccattaattgtttacatgtgatccagcaaaatgcaatttcnggtgccttcnnnnngatctg

SEQ ID NO: 4989 - DNA, 591 bp, Canis familiaris
  misc_feature (1)..(591): n = a or c or g or t
cccaatctcttccttcactcccacgactatactctctactcatcagatgtngaattcatcaatgagatcctgaacatccgtaccaagggccggatgtggtacattctgtcactgaccctctgccgcttcctggcctggaactattttgcacagcttcggttggaggttctgcagctgacccgccacccagagaattggaccctgcaagcccgctggcggcttgtggggctgcccatccacctgctctttttgcgtttctacaagcgggacaaggaagagctttatcggacctatgatgcctattccaccttctacctgaattccaacggcctcatttgtcgccatcgcttagacaaactgatgccttcacactcagccccaacgcctgtgaagaagctgctagtgggagccctggtggctctgggactgtcagagccagaacccaacttacacctctgttccaagacctgatccaggaactggagtggaggcagcactgaagactttgctatgtacgcacaagaggaggagatggaggtggcctagaatctcaggagccagcttcctctcttcttttgctctccttttttg

SEQ ID NO: 4990 - DNA, 422 bp, Canis familiaris
  misc_feature (1)..(422): n = a or c or g or t
ccgatcagatgtctgccagaagctgcactaggggcagtgtgccccatctcctgacaccctccagcccatgtagcccctgcttcccactcaccctgggcttcccagcacttgagcccatcttcccctgcagttgggggcctgggctcccccagccagcctggagagatgagtgatggctgacaagtccagggtgaccacccatagaccagagcagtggaaacaaagctcgggtcccaccccaggtacaggcctcacctgggggcactggtgatggtgccccataggtccaggatgtggtggggggcatcagagcagccagtgcccaggtagctggaggggagctgtttcctcccacctgccactggcgccccctgtctnnnngttgtggaaagggcgtntgctgcccctcacttctgctctgt

SEQ ID NO: 4991 - DNA, 610 bp, Canis familiaris
  misc_feature (1)..(610): n = a or c or g or t
gacaggacccagcatgnctcaggccaccaagaggaagcatgtggtgaagnaggtgctgggnnagcacatggtgcnnnctgaccagcagcagattgtgagggtactcaggaccccagggaacaatctgcatgaagtggagacagcccaggggcagcgcttcctggtgagcatgccctccaaataccgtaagaacatctggatcaagagaggggacttcctcattgttgaccctattgaagagggagagaaagtgaaggctgagatctcctttgtgctctgcaaagaccatgcctgaggccttttcagaagtggctgagaagcacaacaacaacaggaacagacagactcagccagaactccctgcagagccacagtcatcaggagaagaatccagctctgaagatgattctgatctctttgttaacaccaaccgcagacaatattatgagagcgaggaggagagcgaagaggaggaggcagcctgagtccctggacccatttctcctcttgctcagggacgagtacttggctcctctgcgcttggacattctcagggtgctctgcagttcttctctatcccctccccctgcacgggggacaagacagggcc

SEQ ID NO: 4992 - DNA, 476 bp, Canis familiaris
  misc_feature (1)..(476): n = a or c or g or t
gccaagggccccatgtgtgtgtatgtgcgttgtgtgtgtgtgcacatgtgtgttcttccatgtatgtccatatttaacatgtaaaaatgctccnntgctctgtccccgagacatgttgtacatttcacccacagccccccatcatagcaataacattcctgctgccaggggtgcttgagccagccaggccctgccagtgggaaaggaggccaagcggtgcctgcctatgaaatttcaacttttcctttcatacatgtttattacgcaagtctgctgtccgtcccagtcggatctgggctcgctgaccccggcgtgctctcaagtcccccttccagctgcccggggccctttgtataaggtgtcctaatactgttttgttttgtttttttaaataaacagtgttttgtagatttcagatgactatgcagaggcctaggggaccctcagctctgggcagggcctgggggtcccagatt

SEQ ID NO: 4993 - DNA, 565 bp, Canis familiaris
  misc_feature (1)..(565): n = a or c or g or t
tcactgatgactcctccgcacccttccttccgangtnnaaagttcactgtccccatgtgtccttcacaagcctacacatgcccgcgctggtctctttccttcccctggaaagagtgaagcagccttgtgcttggctgggaggtgctaatgcttgctctttactgagctcatgggtgaggacatggggctgctgggtgtagactccaggatgtgcccttcctcatttcccagcacaagtgactggctgcccgtcttcaccaccagctgggtcattttcaaacaggaggaatgcaggtgagacatggagaggtacttggaagcactgatggcttctcctgcacacgtgcaccgccgcccccagcacaccccccccccccgccccacctgaagcagcacaggccatgctgatgtgttcctgggtgtccagaaagtctgagtcttagagccagaattagacgtatgggggctcgatacaggcttgtagtttatttcagagagagcttgagaaatccaggcaaatgggggtttaaaaatttattactgtccatttacatttttgtctgat

SEQ ID NO: 4994 - DNA, 527 bp, Canis familiaris
  misc_feature (1)..(527): n = a or c or g or t
gtgtgccactctcagaaatgtcaactgttanntcctctcttgttcngtgttngcaccatgtacatttcattctatnnnnnnattcccctctattgcctcaccagaagcacatgcttcctctagcttagaacatgactaccatattcatcctcaagccaaggatgctaggtctccagctctgagaagtatcccacatggtggccacacaatgggtcaaaatgtgaaaaatccaggcccttaatttggctacaatgaggcaaatgttatttaacccaaccaacctactgttccatttcaacttgtcactttgtaatcatgtagagtcaactttagcaccacctaagcaaaggaaagtccagttgtgtttcagatggatatcaaatgagaccaaaagatttagtttttgcagtctgcctttggttcaccaaatggccccataaacactagttcccattctaaatagaactcagtaaccagaagagcttcnnnnntttccatccttgaanannnctgtagatgcagcttct

SEQ ID NO: 4995 - DNA, 497 bp, Canis familiaris
  misc_feature (1)..(497): n = a or c or g or t
tttcccctgaccgccnnnnnnngnnnggccggcttcacccngctnnncagtntnnnggcctttgccatgtaccgcccgtagtgcctccacgggctctcggcagcgttgctggcccctctggaccttgctcccctcgacacagtgggcgatgctgtctgcccaggcccaccnntccggcctgcctcttcccactaccctgnagcccagcccngcgcagcagagcgctccgggagtccgccgacgcccctccctgtgacctccatggctctgggccacgtcctggggctgctggctctcagcccccattgacagtcagctcctcggggtcaggcagctgctgtcactgccttggccccccgcagagccgggctacacccctgggccnnnnttagtgtcctgcccgaggacccagncaccnctagncnnngatagctccttgggctggttggaggacccaaggactgcggggcgctggggaaggggagctgggaggggca

SEQ ID NO: 4996 - DNA, 413 bp, Canis familiaris
  misc_feature (1)..(413): n = a or c or g or t
tactgatgatagccagtgttattgaaggtgtgggaatacaggcatttgttcacacgttgttgagagttccaactgatacaacttcagaaggtctttatttatttatttatttgagagagagagagagggagagagagaaagggcggtggcagaaggagagagagaatctcaagtggactctgnnntaagcacagagcccgactcagggctccatctcaggaccctgagatcatgacccgaacggaaaccaagaatctgtcacttaaccaactgagccatccacggaaggttattttaacagcttttgaaacaaaaaatacagagacccttcactcagcatttaacatatcattgcagctttgtttttagtaatggatacttcaaagtagcctaaatgttnnnnnnctggaaac

SEQ ID NO: 4997 - DNA, 532 bp, Canis familiaris
  misc_feature (1)..(532): n = a or c or g or t
atttgttggtnnactagtgctcactatagttgtcattgtcggagccattcttttcgtcccaggtgaatattcaacaaagaattcttgtggacttggtttaattgtaattcctacagtaatattaacattacttcagtactgtgtgtttatgataggtgtttggatgtctcctttcaccattgccatattaatccttcaggtactgggctatgtgctctctgtggttggactaagcctctgtgtctcagagtgcaccccagtgcatggccctcttctgatttcaggtttgggtattatagctctagcagaattacttggattagtttatatgaaacttgttgaattcagagacacaccttcggtcagttgaagggcaagaagagaaaagcttccaatcagaagactatacaacctcctaggagtaactgaagtgaagtgatggactctgatttggaaagtagtaagacgtgaaaggaatacaattgtgtttgagcaccatggccttgattcactgttcaggagaagaaaacaa

SEQ ID NO: 4998 - DNA, 527 bp, Canis familiaris
  misc_feature (1)..(527): n = a or c or g or t
cttcagattcaccctttaggaanatgcagagcttnncagacaagatggtgtaaaaagtaagcaagtttggtcgatggcatcactttcagaaaagccaaatcaaatcatcatcatcatcatcaccatcatcaccatcatcatcatcatcatctacttaaaggcattcagaaagctgctgaatcaaccagaactagaggggccaaaattctgaaacaatgttgagtaacaagaaagaacaaacgaacaaaaagacaaacagatgcgcacacacacagggctcagggaagatgatcaggtccctcgctcgctctccatccctcgccggcgctcccccccccgcccgcgctttgattgacaggcaagatgtcggtgcggagcgaggcaggagcgaatgcagcagccgtcacccccggagcccggcggcggcagcagcagcagcagcagcagcgcgaggaggagacagcagccagccgcagtcgccgccgcagccgcgcgagccatgcagaccgcatcttgaggacgcgcta

SEQ ID NO: 4999 - DNA, 459 bp, Canis familiaris
  misc_feature (1)..(459): n = a or c or g or t
ataaaaggtaaaagaacagttagacttaaaaattcaacagnngaggtgattcccttncttagagacacaaatgggagtaaaaacacaagtcagtcacttaggaagcgcccaaataaaccagagagagcttacacctagaaacagtgcaacactggtctgttcccggcagtaagcatttcctaggattctgttaaaactatggtggcggatgctggatccctatcacacacgctgctgttccacttcgcaggagcagttgctcctgtgaatatgagtgtgaacaagagtaattcggtactaggaaatactgttttgttgtcagaaatacttttctgttccatgagggtttaatcagaagggaaaaatgactgcatagctcagcattacatacataacaccctagggctgtgtctcagcctgagcatctgcagtaatgttgagaatactaaaggctgggaa

SEQ ID NO: 5000 - DNA, 637 bp, Canis familiaris
  misc_feature (1)..(637): n = a or c or g or t
cttttcaccccatccgctccccaacctncatagtnnatgggtngtgcancctgaacactgacgacatcgnattcactggttcttgaacacagtggccaggaccttctgtctcctcagctcagccatacctttgatgtaaccattaaattaaaggaaaaacctcatttctggtagatcccaggggacactccaggacccccgtggttacaacagtgagatggcatccagtccctccaggggccagatttcttatgtgggcggatgctgcagtcaaaaaccaggcatgctctctgccaatgcacttaccagacagaaatacctgtatgtaaattccatgctaatttattaaatttcagttggaaaggaaggtgctggatatgatgtatcatctggagagtcagactgatgtacagagcttgaggcaatcataatagttggatgaaaaggcttagatgaggcatagatactattggtatatgtgcaggctcattcatagtaaattatgttcttgaagtccgatttcattcctggagctcagatctcatttgctattattctatactttatatacccaaggacattgcctcagggttgcaagctctttaaggagaaatttatgcatatnnnnntgtattgt

SEQ ID NO: 5001 - DNA, 557 bp, Canis familiaris
  misc_feature (1)..(557): n = a or c or g or t
gtctcccaaagaagcagttttnnnngtcaattatgttcctggttctttttccctacctgaaagtgaagctggagaagctgatttctagnctgagagaagaggatgaatattctatccatcccccttcttcccgctngaaacagttttatagagccttcctggcagcctacccatttgtaaacatggcatgggaaggctgtttttttgtacaacaacttcgatacatccnagggaaggctcagcatcattcaccactgctgaggctggctggagttcggctaggtcgacttacagttcaggacatacaggctctggagcacaagccagctgaagccagcgtgatgcagcaaccagccaggagtgttggtgacaaaataaagtcatctctgaagaaagctctgggaggtgctgccttaaccctgtctactggcctttctgtgggagtattctttctgcagttccttgaatggtggtactcctctgaaaatcaagaaacaatcaaatcactgactgccctgcctactcctccaccacctgtacacctagactacaattcc

SEQ ID NO: 5002 - DNA, 508 bp, Canis familiaris
  misc_feature (1)..(508): n = a or c or g or t
acangagccccgaagtgctccggccatgtgatgtaccatacgcagaggcgagnnagcatcccaagatggtacccggtcataaattacctgttttggatacaaagcccaaaggaatggagggaatccaggcagaaagcacaccctcagaaagcagtactgaaagcagccagtgtgtgaggcggggctctggcgcagacgcctcagagaaggtggaaggttctccggcagagaaagaggcccagctcaggactgatgccagaagcagcccagaggcaggcancgcgtgcagcccagccagctgtggaaaggatccggatggcggcccacatgcctagaggagcacagacttcgaccgcagcttggagataaccgttgggggatgcagtccactttgagagctagcagggcaacacactgctgctgttgacagcaatttagggaagacaataaagcagactgagcagatcaaggccagttcataactcgaatagaattgtttattgtccag

SEQ ID NO: 5003 - DNA, 640 bp, Canis familiaris
  misc_feature (1)..(640): n = a or c or g or t
gcactatcatccttcntggtggtgctgagcagtttatnnannngacagagcggtctctgcatgacgccatcatgatcgtcannagggccatcaagaatgattcagtggtagctggtggcggggccattgagatnnagctttccaagtatctgcgggattactcaaggaccattccaggaaaacagcagctgttgatcggggcatatgccaaggccttggaaattatcccacgtcagctgtgtgacaatgctggctttgatgccacaaacatcctcaacaagctgcgagctcggcatgcccaggggggcatgtggtatggagtggacgtcaacaatgaggacattgctgacaactttgaggcgtttgtgtgggagccagccatggtgcgcatcaatgccctgactgcagcctctgaggccgcctgccttatcgtgtcagtggatgagaccatcaaaaaccctcgctcaacagtagatgctcccccagctgcgggccggggacggggccggggccgcccacactgagaggcaccttgtccctcacaagagtggctggcaggctggctgcagggtatgcttactctgtcttggttaatgggtattatgaggaaggggtagtaattggcctgctcagctctcac

SEQ ID NO: 5004 - DNA, 701 bp, Canis familiaris
  misc_feature (1)..(701): n = a or c or g or t
cccttacaagattnatgnacanctccacannaagacagtggtgttcagatagaaagagagttccccaaaggggattacaagtgctgtgacttggttgtgaaaataaaagaatgcaggaagagtgaggagcctgagccagcaccccccgaaccggcaccccccaaaccagcgacccctgagccaccagagacccctgacctgtctgaagaccattctgagggtcagcgaacacctgtaggctccttgaccctgcaggaagcactggaaacccgtaaaccccagttcatttctcgctcccaagagcggctgaagaagctagaacatatggtacagcagagaaaagcccagcggaaggagaacctggggcagaagcagaccctctttcccgtccgcaccaacaagaagcagttcacggttccccacccccttagtgataacttgttcaaacccaaagaaaggtacatttcagagaaggagatgcacatgcgatctaaaagaatctataataacttgccggaagttaaaaagaaaaaagaggaacaaaagaagagagtgatcttacagagtaaccgactccgcgctgaggtcttcaaaaagcaattactggaccagctccttcaaaggaacgcggtctaaccacaggctgccctgctgacccgctacctggccctgggatgacttcaaacgctggatcaagcatt

SEQ ID NO: 5005 - DNA, 613 bp, Canis familiaris
  misc_feature (1)..(613): n = a or c or g or t
gngcaggacagggtttttacttgtcccttgacagnctcttctctagaggaccaggcttgtgggggacaggattttgttagaaaaggggatcgaagcagatcctctaggaaatggataatggcttctgattaaccatcatcaggctcctttgaagtaaatagaaacagtagtgctagttatcactgctctggagcctgatttgacaaggttggccatgtttaccatgaaacacaaagctgccttggccagctgttgcttctcttgtggtactatttaagcatagattctgttacccacaaagggtctgtgactactttccagttgtctatgatgcccagacccctctcattcttacctgtctacctccattcttgagggggaaggtttggtgttcctgagagacctcagaatagactggtacattcatctcccttgcatagagtagggaagctttccacctcattgcccccaccctccacctatgttatgggcacttggagatggggcacatgtcaatctaggaaaccagggcatgaccatgtccactgtggagtgtgccatccatctggcacactatcctagtgtcattnnnnngttcacgttttctgttgga

SEQ ID NO: 5006 - DNA, 703 bp, Canis familiaris
  misc_feature (1)..(703): n = a or c or g or t
aattcagacagttccggtgcatgaaaccgtgctggcgttttnnnncagctttcccaagaagtattcgtttctggatcaggatacaggacagagcctggtgccactcttcctgtgtgtgcgcctgcacggcatcatcaaaggcaaaaatctggaggagttaaggcacattaatttcttcccggagtcctggttgatccgggttacagccaaccattaccacgcactggagagtgggggtgacatggttcacgtgaaagatcttaccacccaggctatgagatttggactgctctttaaccaggagtatacaactcattcagaaatcattgccgtatatggattcttctttgagataaagggaatcaaacaggatactacctcttatagtttttacatgcagagagtaaggcacactgatttggagttcccgtcctcggtctgtaagcatggcccggttagcctgagagcggagcgcttggtgaagtacgagatcagagcccagaccctggtggacggcaagtggcaggagttcaggaccaatcagatcacccagaagttcgggtttgtcaagccatcctgtaaaagccacgccttgaaaatccaaactgtgggcatcccaatctatgtaagtttttcattcatcttcccaatatcttgatnnnnnnnaaaagaatctatgggacttttctttcttccaccagtg

SEQ ID NO: 5007 - DNA, 613 bp, Canis familiaris
  misc_feature (1)..(613): n = a or c or g or t
ccaccactacttcccagccatgctcnnctccagcatgnngacaggaattctgtngnatactctcntgcggctctgtgcnnggagtctggcctcttctttcctggccaggggtgtatatatggtgggaatcctgagcctgctcctgggaactgcctacagcttctacctcttccaccctctggcttatgggatggttggtccccttgcccaggaccccggaagtcccatggcaggactaaggtggcttgaatcatgggacttttgaggctcctgcaaggactccagcctgagtcctggaacgttctggggacagccagctgtgcagccaggatctggacctcccagctgtgggcaaagctgcccgaggagcccgaggaattctgctacccgccaggaccaagctctgcgagcctccccggaatttaacccaacactagggagacccacagctctgtctgcagagattccaccactgggaatggcttggcaacagaggacaacatctctcaggcccatttccctgagtgtgcaacctaaggaaggatgaatgtgagagagaatgggtgtgagtgtgtgggagtgtgnnnnnncatttgcccatatacctgtggac

SEQ ID NO: 5008 - DNA, 606 bp, Canis familiaris
  misc_feature (1)..(606): n = a or c or g or t
angtctagtgtnnaaaaatttgacctgattatttacacgagtgcagtaagaatagtaagtgatcctataggnncttttttaaggacttnctagnctgaacttnnaacagcctcccaaggtgagaagccaaacaaaaaatacttgctcagacttcccctgtaacagctgtaggtttggttaattctttctcaaggccccaaaagtgtcccgaagttcttggacctgccaggaaatgaccctccctcttcacctggtaaatctgctgggaaccctgtaagcaaggtatcaggctgtttttccagggggcacagggggctttattggctctgtatagtcaaccttatttccttaagctgtgtggtggtgtctgagtttgtgcaggtctccctcaaatatgacattctagtcaaagccttggtaatataatcagtgtttccagttgtgttctattactcttattgaacttatgcaaatgagtatattatgaaaatataagaatattgaagggattaggtagagaagataaatgttttgttcacaaagatatgttttatcaaattgctgtaagttatagttatcttaagaaaaaatttctttaaagctgga

SEQ ID NO: 5009 - DNA, 526 bp, Canis familiaris
  misc_feature (1)..(526): n = a or c or g or t
gncagnaggtcgcaccccgcgccccgcgcntacccgggnaggacagggannagcagtgcacgaaccgcttgtcagctccacagcacggggcccgggggttgacagtaggagacactttccgttttgggcctaatgattaggaaaaaaaacaaaaaacaaaacaaaaaaaacgagacgcgcacactgcagggctcctggcttggctcgttggctgtcgtgccctggagatctttccaaatctgagcatggagactgctggttcctccctctcctggtgccgccgggctgcgtctgggcggcgggtgggtgacccacacctgcttcactggtgctgtggcgtgtatctacatccaggattattgtgttttatgtcatgctccatcattatcctctctgtcgagcctgaagttctgggggaagtacatgctcagatctgcaggtagtactatcccaggaggctgctaccgcgtcagcccacggtggcgttccagagcccagggagagctcggcatgttacacgtttgga

SEQ ID NO: 5010 - DNA, 454 bp, Canis familiaris
  misc_feature (1)..(454): n = a or c or g or t
agnnnnnngcagcaacgnngannnnnagtacattttttggtcanntcagggaactnctgcatctgcctggcatgtagtcagcagggtgcctacccctgtcccacacggcnnngcctcacgccctcacccatatggctctttgaagagcacaaaaaggaaaacggggatgtgggggggaggggacaacaactgaggcagttgactgtgttcagctttatttatttttttaatcgatttttttttctccaagactaccagtctcagaagttagaacaataggcagtatgatatgtttgtgcctaatcatgttgtgattctttcttcttagtagaatggaatgtttggcccccataagaaggattatacttgatagacttgtcttatttaggttctgtaattgcccactgtactgagattcatattaaannnnnngtatttttgttatgtatcttct

SEQ ID NO: 5011 - DNA, 560 bp, Canis familiaris
  misc_feature (1)..(560): n = a or c or g or t
cactctggnnactcatccccttcctcctctgtagcccaccccacccgcacccggnctcagctccagaatattctcgcccctcgctagagaagggggctgcagggaggagaggccctagggccgactctttggtcagggagcaggaccggtgaagacaaacagcttcctgccaccttgggctcctcctactttctggcactttctctgaattcttgccacatagactctgggtgaagggggtcccgtcttgacccctgacaggccgcacctcccaaggcctcagttcactcctcctggcaggctcagccctctcgctcaactggagggccatatgcccatgcaaggggagagggcctgctcccccaggccgcagagggggagccccgctcttgtcccctcgcccctcctgaagggtgtgccgcccgcaagcttttgaccaactaagggaaaggaggatttgaaaggctgcctgtaaacacggggtaggaggagccttcagatatttttgtatatgtttgcaaaaggggtggggagaagaaaccaaaggtctgttgtactaa

SEQ ID NO: 5012 - DNA, 650 bp, Canis familiaris
  misc_feature (1)..(650): n = a or c or g or t
gngnctgccatgatttctcntagaattctgatcatannncngagtgaantattccacccgcacctttctgtacaaatactaattcaattttaagtcttaagtcacttttttaatatatatgatcttctgctcttcccacttccagccctttctactgctctcccactcttccttcgctggtagtagccacgtgccctgttcccccaccccccactctgtatgtggggaggcaggggttggagcagttacccttctttccctcttgctgatgagcagactcagcaagagcatccatatccttaccatgttcggagtgggcttggtcctgggtggtggggcaggccctaggagcgagggaagggagaggcaactcttccctcagctggctgtcatcacgctgcagcccccactcaccctctgactcacagctgggacagaaaccacagcatcaccacagcattattgtgacagccaccaacccattgcccacaacctgcccccctcccccacccctggtcaccctgacctctggctctgagccctgttctgaccaaatcacgatgatgagtatttgggggtgggtgggtgggtaagggggggggagtgggaggggatggaaccaactttttctgtattttgtattgtatgtt

SEQ ID NO: 5013 - DNA, 564 bp, Canis familiaris
  misc_feature (1)..(564): n = a or c or g or t
caccatnngcatccgccactccacacgggctgccaccatgcctgtnnacnnngcaccctaacacntttgggtcccagctgcccctggaccaagcctcagtttacctatgttgccaagtggggtgcgggcaggcccctccggggcctggttttggccggtggggggcttggagaagtgggggacaggcgtctctttccttccttttttctgaactctgaggtccttctaggccacctgcttcctttggtccctggaggatgtgaccccacggccctgtgcagggtgccctgccttccagcgccccagtttcttcctcctggtcacaccaggccaagtcgggccaggcagagaaagggacaactccggccctcccagtggctggcccgagatgcgcttcctgtgtcctagaactcggcgtccgccctgctagggcctgggtccccagcacgactcggatttctgctcaacttgggctcttccctgcatctcacgggagcacagctgcctgcctagtcccggccccaaatccccaaattgggctggaagcagcctctttccctcgca

SEQ ID NO: 5014 - DNA, 559 bp, Canis familiaris
  misc_feature (1)..(559): n = a or c or g or t
ggttgctcaggnntnnnactaaacangcaaagagagnagtcnngtgcannatggggtaatccagagcancctggggaaactggactgccactcnncaatgaaaactattgtgaaaacctttcaacatctaatatcctgtggagtcctgtaggatttttattctagactaaaaaaacacctatttggttaatgtacnctgaaggatggatttggagatgaacgaattatgtgaataggtgtgtatgttttcctgcaagtacctataactgccacctcctctctggccacttctcagaatgattttgcagatcagcacttacaccaaggagatcttgaagatcaacaatttggtcagcaagtcacttcctctggccaacatactgtcttcatgggtaaagctcttcagccaagggtctgagaagagcagagcagcaagacagaagaagctgagatttttacatgtgatgatagaaggaaacatctatcttaagttattgcaatatttggtttnctgaaatccatacacgaacttgacctgagtaatacacttctgttttcc

SEQ ID NO: 5015 - DNA, 518 bp, Canis familiaris
  misc_feature (1)..(518): n = a or c or g or t
gctgatccagcatgccaatgtgcaggcacacagcagnnncatccggaacctggagcagctggggggcacggtcaccaaccctgggggcccggggacctcaagccggctagagcggagggagcgcttggagcccacctatcagttgtcccgctggaccccagtcatcaaggacgtgatggaggatgccgtggaggaccggctggaccgcaagctctggcccttcgtgtccgaccccgcccccacgtccagctcccaggctgctgtcagcgcccgctttggccactggcataagaacaaggccggcgtggagatgcgggcagggccccggctcatcatctatgtcatgggcggcgtggcgatgtcagagatgagggctgcctatgaggtgaccagggccaccgatggcaagtgggaggtgctcattggctcctcgcacatccttacccccacccgcttcctggatgaccttaagacgctggaccagaagctggaggacattgccttgccttgaccgcccc

SEQ ID NO: 5016 - DNA, 567 bp, Canis familiaris
  misc_feature (1)..(567): n = a or c or g or t
actccaannatgtgtannnnantacaaaagaccccntatagctcaagcaaccttgaaaaagaaaagcaaagctnnaggcatcacaattccggactttcagttatattgcaaggtgatagtaatcaaaaagtatggtannggtacaaaaacagagatcaacagaacagaatagaaaacccagaaatggacccataactatatggttaattaatctttgacaaagcaggaaagaatatccaatggcaaaaaggcagtctcttcaactaatgttgttggggaaactggacagctacatgcaaaagaatgaaactggaccactttcttacaccatacacaaaaataaattcaaaatggatgaaagacctaaatgtgagacaggaaactcaaaatcctagaggacacaggtggtaacttctttgcattgaccataccaacttcttgctagatatgtctcctgaggcaagggaaacacaagcaaaaataaactattggaactacatcaaaataaaagcttctgcatagtgaaggaaatagtcaacaaaactaaaagcaacttttggaatggga

SEQ ID NO: 5017 - DNA, 559 bp, Canis familiaris
  misc_feature (1)..(559): n = a or c or g or t
tggttcggctgttattaantgatttgtgctgaggccatagttcatagtgaaagctctggctggagatgcttgttgggtctgtgaagcctgggccaggcagccaaatctggcctgtgctgaggatgaaaccctctgctttcacatctnngngctgcaccctcattactgaagatgccttttgctttatagctttgctggagagcaattcattcttcccatgtctgaaaggtaatgttgcctggggcctaagcgtcctgctcctttgggcaccattggaatggagccatctgggaggtcagggacggggactgcctgaggagagctagccctagcctggcccctgcccagatgccattccatcactgatatttaagtgaaggggaggatccctagactatgttcttggctccagactcaaaaatccacaaaagccaaaccagctcatttcaacaaaggagcgctgatgtgaggggcaaggctgcctctgctccaggctcttcagaaagcatctgcatgtgaacaccatcatgcctctataaaggatccctattacaggaac

SEQ ID NO: 5018 - DNA, 632 bp, Canis familiaris
  misc_feature (1)..(632): n = a or c or g or t
cgtcaataaagtcccaattngncactcggtattgagtacactggaccctgacagctggctcctgggccagcgtnnttnntcacannacgnntccaccaagctgccccggctccggccctcccatcctggagggagggcaagaactgacacctttggaaccgcagaatgtgttcaatgcagactcgctcaagggcataagttattgtgaacattgttgccaatcaccgctcaacagccctgctagattttgtatgatgctgaattattatgccactaattccaccgagttaagacccacccatgcttgttacacttgtatttattgaaactgtggattcttgcccctgctgcccttgtatttactttaagcactgatcacttatcattcattcagtatggtttcccccagtcccttgtacacattctggtatgaaatgtaaaattaacctgctacaaattggttgaatgtttctgtcaatggtgcaaacggaggccagcgtaagccaatggggcacctgcctgaaggaggaacgggaaaggaaatcaccaatttgggctctcagagctaagacacacgtattgattctgttgcacattttgcactggtttatggagattgttttcttggacgg

SEQ ID NO: 5019 - DNA, 709 bp, Canis familiaris
  misc_feature (1)..(709): n = a or c or g or t
ggcatctgagtttattgacttgtatgncatgtgcagtttacatcttccttacactctnnnnnnggtaaattccaattctgatacttgacatctagctaagagggtccatctcttctcacctctatcctaagtcagtatattcagcaaacatttatttacagagcccttactgtgggcaaaaattgttctgggtaattggggagaaaaatagaaaattcacttatttaataaatgtctactgagcacaatctagtgaatcattacagtacagcctcattgttttgaggtgtattattcgtaattattttacaccattcatatcttaacgtaattataagacccagaatactatcaaagataattttgtggttatctgacatttaaaagtatccagtatttctgtttgcatcccattaatacaaataatgaaaaaatgttttaatctgtaataaactgatttattgtgcagtgactgtaatatactagagttatattaaattgttaactctgcctcctcaaacacatattaggcgataatcccaaaaataagtatttaactgcattagatataaaggagactctgggtgctataattagattattttgaggcagacagagagctgttatcccaactgatttagtatggttctgtaattgagaaaatgttcaccagattatactttttagtgatttacatgtacattttata

SEQ ID NO: 5020 - DNA, 638 bp, Canis familiaris
  misc_feature (1)..(638): n = a or c or g or t
tgancatgaagaagagttcaattttggagacgtcttngtgcatcaagccatccacaccatcgagtattgcctgggctgcatttcaaacacagcctcttacctccggctctgggccctcagcctggctcatgcacaactgtctgaggtgctctggaccatggtgatgaacatcggccttcgcctgcgaggctggggaggactcattggggtctttgtcatttttaccatatttgccgttctgacagtagccatccttctgatcatggagggcctctctgcgttccttcatgccctgcgactgcactgggtggagttccagaacaagttctacgtcggggctggttacaagtttgctcctttctcctttaaatacatcctggatgggacagcagaggagtagttgcaggtccggtgctggccatctcctctcggcggccaaagaagttcagccttgtcttcaacgtcagcctgtgcaaggcagtcgatgggatgactgttcttggctacctggaggcgggaagccatgtatattttacttataagccttgggatttgatacaacctaaccatgttataggggaaccgacctcaagttgggtcataattgtcaaacattaaaatgattgagaaacggggag

SEQ ID NO: 5021 - DNA, 537 bp, Canis familiaris
  misc_feature (1)..(537): n = a or c or g or t
cctgccagcccagtcngtccccannagnagtcntgactctcatttccctcccgacaaaacattnnncctcnctcactctcccccacttagtatatgaaccacctttatnctgttgtgcaggcctaaaactcagaaggctncttggttttgtggctacagtcctattgtaagagctggtcccacaccacctctgcacacattgtgatctgtgtcaccatcagcctgattcacaccaccccattctctccaggacttccagaggagcctctgggacattctctccttcccttctttccccccgactatccaccttgcatacatcctgcatttcagaatgacctttcccagcattatgcatatcacagaagctcctgccttgcaccccccctggaccccctatggcttcccaatgaagttgggtagtactgttagcatcatggactcctacccatccccccgacttcctctggggcacaccgcagggtggatcatgctccagctcaatgacctcatcttcatccttcacacataccaagt

SEQ ID NO: 5022 - DNA, 660 bp, Canis familiaris
  misc_feature (1)..(660): n = a or c or g or t
cccaccccagccacttnnngaggagccgatggaagttcagggatcagagaggacttctcctgagcctcagcgggagaatgcctccccggccccaggaacaacggcagaagaggccatgtctcgagggcctcctcctgcacctgagggcggcggcggcggctcccgtgaagagcaggacggagctgcagccgagactgagccttgggcagctgccgtccccccagagtgggtcccgattatccagcaggacattcagagccagcggaaagtgaagccgcagccccccttgagcgatgcctacctcagtggtatgcctgccaagagacgcaagacgatgcagggtgagggcccccagctgcttctctcagaggccgtgagccgggcagctaaggcagccggagctcggcccctgacgagccccgagagcctgagccgggacctggaggcaccagaggttcaggagagctacaggcagcagctccgggctgatatacagaagcgactgcaggaagaccccaactacagcccccagcgcttccctaatgcccaccgggccttcactgatgatccctagctgtttgctctttggccctccctcatcaggggaccatttcccccatcttccttcacagtatttaaggaataaaagtcagatttccn

SEQ ID NO: 5023 - DNA, 531 bp, Canis familiaris
  misc_feature (1)..(531): n = a or c or g or t
acttgccaagaaacagctgcgagccacacagcagaccattgccagctgnnnctgcaccaaccttgtcatctcccaggggcccttcctctactgctccctcatggagggcactccggacattgtgctgttttccaagccagcgtccctgagcctgcttagcagacacctgcttaagtccttcgttttttcgacgaagaaccggcgctgcaagctgctgcccttggtgatggctgcacccctgagtgtggagcagggcacagtgactgtggtgggcatccctccagagactgacagctcagacagaaagaacttttttgggcgggcatttgagaaggcagcggagggcaccaactcccggacactacacaaccatttcgacctctcagtaattgaactgaaagcagaggatcggagcaagtttctggatgcgcttgtttccctcctgtcctgatgagtttgatctccgcagacatgacctcctccttatttatattaactgggttttattggaccataagttatggatgtagt

SEQ ID NO: 5024 - DNA, 56 bp, Canis familiaris
tccccacttgaaccatggagtttccaataattttttggttttcttttttctttttc

SEQ ID NO: 5025 - DNA, 637 bp, Canis familiaris
tcgcagtcggccacctggcccccctgcctgccggggcgaaaagtccaccatacattttctctccaattccattccttggacatgctatagcatttgggaaaagtccaattgaattcctagaaaatgcatatgaaaagtatggacctgtatttagttttaccatggtgggcaagacatttacttaccttctggggagtgatgctgctgcactgctttttaatagtaaaaatgaagacctgaatgcagaagatgtctacagtcgtctgacaacacctgtgtttgggaagggagttgcatatgatgtgcctaatccagtttttttggagcagaagaaaatgctaaaaagtggccttaacatagcccactttagacagcacgtttctataatcgagaaagaaacaaaggaatactttcaaagttggggagaaagtggagaaaaaaatttgtttgaagctctttcggagctcataattttaacagctagccattgtttacatggcaaggaaatcagaagtcaactcaatgagaaagtggcacaactgtatgcagatttggatggagggtttagccatgcagcctggctgctgccaggctggcttcccttgcctagtttcagacgcagggacagagctcaccg

SEQ ID NO: 5026 - DNA, 440 bp, Canis familiaris
  misc_feature (1)..(440): n = a or c or g or t
ctggtgccccatctcataatcggggtacctgaanctaaaatgccttgtagctcctcagttcaggatctgaggccagccgtcaactccagggcctgaccctcctcccgtgccacccctgccccggctcccagctctagggggcggtgggagggagctggctggggcaggcgcaggggcgccaggaccccccctgcaggctgcgctccttgaagggccagcagtctgacggctgccctgggccccagccgcccctcagacggggagacagccccaggttctgggccagccgcagccacccaaggcttcggttaatcacaaagaaagttggcaggagcccgggggtcagcggtttagcgcctgcctccggcccagggcctgatcctggagccccggggtcaagtcccacatggggatccctgcatggggcctgcttctccctc

SEQ ID NO: 5027 - DNA, 665 bp, Canis familiaris
  misc_feature (1)..(665): n = a or c or g or t
gaccctcactgcccacagcngtnncctgcncnnnnggcccccaggtgtagtgggnntcccaggnnngccggtgttgcgggtgtgcaggtgcggcccgggcatgccttgcccaccgtgcttctcgtggtgggttggaggccctgcatgggccgttgtgtgggggcttccctgtggctgggagtggtaggagcccaccctggcctgggggtgaggaggagcctgccgcacatctgtttctgggctgagctgagctgtagcctctgctgtgtgatgttggacaagataccagctttgagggtttgcaggtcattccaccatcagcgcaggacaagggcagtccagagcctcgccctggggctgcctgcatccttctgcatctgggactggccaatagaacaggcgggctctgggcactgccttccctcatgccagccctccacatctcctgccctggagctgccctgggcctggacagcagggcccaggatggagcttctgcttggtttacttgctgctggtttgagatgtggccaaggtttcgcagttgggggtgactttcctccccgcttgagaccactgacttctgttgtccccagcaatgtgaacctctggtgctggggtgtcctctttgatgttacaggnnngctattaaagtnnncccnnnn

SEQ ID NO: 5028 - DNA, 347 bp, Canis familiaris
  misc_feature (1)..(347): n = a or c or g or t
acagacctnnnnnnnnnggatgagcagaccagctttgaggttgacctgtttcttttctttgtctgccttccctaaacaccagcccccaggaggatattaagcagccttaagcttaaattcctactccctcttcccagtttggctcacttgccttagagtgaaggctaggaaaggaaaaaaaaagggggggtggggattccctagcttcattcctcccctagatctttccagtttgacttccccaaacccagaaagatttcctctaccacattcgagagaaatgagtacattgtccccttttcctctttccttattgtcaaacagtcccagccttccttgtccctttt

SEQ ID NO: 5029 - DNA, 663 bp, Canis familiaris
  misc_feature (1)..(663): n = a or c or g or t
tcgctgaagttatgggnnattttacgtttngatatnnnanttttnnnnntttttttgannnnnnngagnnnnnagaaannnnagaaaagggatcaccctgggaaggggctgctggcaaggagtccaactggccccatccgagcccttgtggctctctgacctgaggnnaggacactgggccttgctggtagcaagaaaaagttccctcctaaattctcttaggattttggagaatttttgcacagtaataagctctgggtttgctctttgggcttatcaaaagggaaaagttaactcaaagattgtaaactattaagtattccagcatgttgctgacctagttggatagttgtacctcaaaaagtaggtgagaaaaggcttccttgtcccaggttgtcaaataatgacagaagagctcacttacgtgccaaaattcacttttatactagtttttcagtgctttaatatttgtaacttaaattttaaaactcatatttacaaacactactgtaacttcagtgaaactgaattgtgtgattgaagctttttgcttattatagtatttattacactacttaattcagtaaatatataaaagtagctttcaatttatttttatattattttacatgtttttacctgcagttgtgtatgtgaatttac

SEQ ID NO: 5030 - DNA, 471 bp, Canis familiaris
  misc_feature (1)..(471): n = a or c or g or t
caacttgacatttggggnnnnnacaggnnnnngnnnnnggnacgaatannatnncagttggtcaatgctcctgggtgtgggcacccctccagnnnncncnttgtccccgttannnnnaggcatcatggnantggcnntgggtgctccagggctcnngctgctggcaggaggcatatttctgctgctgtggcacaannagtgctcccaataccagcctataaactgaggcccnnncnnnggaggacgggacattnnnnagtgggcctgtgttgctggtctgccagttgaagggttnnctgctcccttctcccatcnngctnnnnngcaannnnnnagggaacccccangcggggcttccatcatacnnncaggagggaccnncaacagggtgattgctagaggtggggggggggtcnnntngngatactcctctgcccttccaccattttcctggcatgagactcacagaca

SEQ ID NO: 5031 - DNA, 594 bp, Canis familiaris
  misc_feature (1)..(594): n = a or c or g or t
ctgcannaaggttgtagagggtgtcntccagcntgtctnnctggtgagtgacacacnnagggtgtcggacatccagtggttccgggaggcctatggggctctgacacagaccgtccgtgtggtagcctcggagcagagccgacagcagcggggctgggtgttcaccacaggggtggacgatgctgagtccgagtgtggtctggacaactttggggcctttgactgggtcattgagaaccatggggatgagcagcgcctggaagagcagttggagaagctggtagtgtttgtccgctccagactgtagctccaggtcctgtgagcactggggccgccctgcctctgctgggctttggtctctaaggcgggggaaagacagagggcctgggtctaggtttctgggggcccggcagacatcagacaagtcaagacacccccagggacctcatttctttgtacagagaacagtcccgcctctttaggaggagactggagggcaaaagggggggtgaactggctgtgcttgacctttgtccatggtgccaggcctgtgagcctgtgcagcctggcttccctgtctggatgtgctcagcc

SEQ ID NO: 5032 - DNA, 635 bp, Canis familiaris
  misc_feature (1)..(635): n = a or c or g or t
agatcagagcatccacnnggccctgtgcccagggacccccatcantagtcccangtctggaggagagaaaagcatctgctggatctcgcacccagggatccccatcactagtcccaagtctggaggagacaagagcatctgctggatctggtgcccaggaatccccatcactagtcccaagtctggaggagagaagaacatctggtggatctggtgcccagggacccccatcactagtctcaagtctggaggaaagatcatccactgggcctggcagccacggacttctgtcactagtcctaagtctgcaggagaacagagaatgcactgaacctggtgcccacggacccatgtcactagtgttaagtctggaggaggacagagaatccactggacctgctgcccatggacccccgtcactagttctaagtctgcaggaaaacagagcatccactggccccagtgcccatagatccctgtcactagtcttaagtcttcaagagaacagagcatcagctggcccggagcccaaggacccccatcactagtcccaagatgagcacagaacatccactggtccagcacccctggaccctcaaacctcttcccaccacctgctggcagggggatttcta

SEQ ID NO: 5033 - DNA, 687 bp, Canis familiaris
  misc_feature (1)..(687): n = a or c or g or t
tatcntgcttaaataaaagggatgaagaacttcagaacttattnnaggttgtaaaccaagattgtgaggcttcaagttcagagattactgaaaaattaactgaacataaagcagctaatgagaaccagcgtaacattatttttggtcagataactactgatgaagaaaaattaatggcacaaagtctagaacttaatgaaaccataaaaattggtttaactaagcttaattgctttctacaacaggatctgaaactggatatcccaacaggtatgacaccacaaaggaaaaattacttatacccatcaacactggtgagaaccgaaccacgtgaacagcttctggaccagttgaaaaggaaacagcctgaactgttaatgatgttaaagtgttcagaaaataacaaagaagagatcagtcaggacttggatgaagaaaagtctgttctaggacactctattgaagaacctgtaagtcaggagtcatctaaagatgctagtgtggattgttcatcaagtggtgggattccgtttttccagcataaaaagtcacatggaaaagacaaagaaaacagaggcattaattcagtggagaggcctaaagtggaagaaactacagagcattctgttacaaggagcagattacctctacgagcctagataaatctttagttaacttgaggatcgg

SEQ ID NO: 5034 - DNA, 582 bp, Canis familiaris
  misc_feature (1)..(582): n = a or c or g or t
tcactgtcntcctcagtttcttcacaggtatccttttgctctgtgcactcatactgtatcagctaaagctaaagcaaggtcaatccgtgtactactctacttacaagatcacctggatcattttcactgcctacttaagtgtttccttctttatggcctctggaattctctctctcctagagtgtaaaaagtccaccagtgcttgtgcctgcgcgatcctcatccatacacctgaaagagaaagtgaggacatagaggaatctgagagttctgtaaaaattgtttccttaccagaaaatgcagcagcgcctcgtagtattgttcatacaagggaaggttctccaaacagaccacaactccaaactcgtcgtgtaacctgggctctatgatttgacaattgatctttcagcatatgcttatcttaatggaaacagctttgcgtgttatgtgctgtgtgtctctctacaactgtattgtctttgtttggcattatttaatgactatgcctgggtcagggtctatatgaaaatccagaaggtggctttttaaaaaaaaaaacaaaacagtttcttctatttgttc

SEQ ID NO: 5035 - DNA, 664 bp, Canis familiaris
  misc_feature (1)..(664): n = a or c or g or t
gaccagagcagnnnctccacggcgtccagtncncgnnnnnccgcgcgncgcagcaccagcaccctgtacagtcagttccagacggcggagagtgagaacaggncgtacgagggcacgctgtacaagaagggggccttcatgaagccctggaaggcccgctggttcgtgctggacaagacgaagcaccagctgcgctactatgaccaccgtgtggatacagaatgcaagggcgtcatcgacctggcggaagtggaggccgtggccccaggcacgcccaccatgggcgcccccaagaccgtggacgagaaggccttctttgacgtgaagacgacgcgtcgcgtttacaacttctgtgcccaggatgtgccgtcagcccagcagtgggtggaccagatccagagctgcctgtcggacgcctgagcccgtcgtggagaccactcggggtgggcagggccccccggccatgtttacagcccccgccctcgacagtattgaggcccccccccctgtacagcccctgccagcgcccgcccgcccgcccggcccgcggtaacttattttggagtcgtgggtgagcggccgggcccggtacgccccgtgggcctgtaaataccgccccgcacagccccctccgcgtgctggtcccccggcgccgcccccccct

SEQ ID NO: 5036 - DNA, 534 bp, Canis familiaris
  misc_feature (1)..(534): n = a or c or g or t
tccagacccccggtctacccatgnatcttcaaaatgggaaatttttngataatggtagttctnnatatattttgaaaccacagttcctaagagatagtaaaacaccatttagtccaaataaaacaccaagatacagtaatccagtgacacttacaataaggctcatcagtggtattcagttacctcccagtaaccattcatcatctaacaaagctgacacattagtgattctagaaacttttggtgttccaaatgatcaaatgaagcagcagactcgtgtaattaaaaaaaatgcttttagtccaaaatggaatgaaacattcacatttattattcatgtgccagaattggcgctgatgcgttttgttgttgaaaatcaaggtttaatagccggaaatgaatttcttggtcaatatacattaccagttctgtgcatgaacaannnnnnaccgnnnnnnttcctctgttttctaaaatgggcgagagtcttgagcctnnnnnnactgtttatttatnnnnngtacatcagatagc

SEQ ID NO: 5037 - DNA, 667 bp, Canis familiaris
  misc_feature (1)..(667): n = a or c or g or t
aagggnnagctcatacacacatacaataagaacagctccgtttgtgagaactctgggtacttccagcagcttcaggggaaaaccaacatcctcctgctgggagactccatgggggacctcactatggctgatggggtgcctggtgtggagaacattctcaagattggcttcttaaatgacaaggtggaagagcggcgggagcgctacatggactcctatgacattgtgctggagaaggacgagacactggacgtggtcaacgggctgctgcagcacatcctccatcagggggactggatagagatgcagggctcctgagggcaggtgtggggctggagctgcaggctgcggagaggagggagcctcacccggaggccgccctgtggggagcgctgcttctccctgtgtgtgcagagtccaggggggtccagctgctgagcccaggcctctccctcctttcccagcgtcttctgttgtgttctccagagttttgcgggaagcccaagagatgggagggccaaccaggtgaacacaggacctatagagtgttagcactctagggaccatctagtccaggggttcttttttcccccaatttttaaaaataggaagctattcttcaaacatctaatgtgtgaaacagatcaaaataaaaaaaggaaannnn

SEQ ID NO: 5038 - DNA, 722 bp, Canis familiaris
  misc_feature (1)..(722): n = a or c or g or t
aatnntagataattccgagatctagactttactgctacttgggaantatacnnaaatttgagggcattttataaaagtanaactacaggnntagttattttggcatattaagttattgttaatatttttcctaaaaaactggtggtttgcatccatggtaaaatttacacagtatttgctgcctccatctaatcccatcaagaaactttgtttttattgtgttagtaattcaaaataactatgctccaaaaacttgatttaacactccagaagtttttactaagggctgtttttataaaaactgctattgcttctaacttagaatttttaaaggaagagaatatactttcactacttgcccctcctgtgcccaaagaaagtctttaaaaaagtcagtaggcatcctcataattatgaagttgctaaggtagtatttgagattttcttttaagtcagtgaccgtaaggagatctacggcattaaaagtgatgtaaacagttactcagtgcagcaagtagcttgtgtccatccagaatggctgtacccatttatgacatgttatgggtaaatgtgcactggaaaataaaccaaagaaccacaatatatcttatacttttgtgaactgtgttttatggataacttcagttttcccaaaaagctgacatatttcaataatttgacatcagtgttaattctgagttggcagaggtagcctaaccaac

SEQ ID NO: 5039 - DNA, 606 bp, Canis familiaris
  misc_feature (1)..(606): n = a or c or g or t
gatgcagactaactggatctaattgagtactccaggtattttccagctggaccagatttcataatctgnngtctccaactgtgcatatgtttggtcagttgacgtctagggagtaggtttcatctagaaagggtctcatttaacatccttttgaaacttagtgctctggcttttttgttttgttttgtttattttttttttgtttttaatttttgtttttatgaagctcaattttgggcagttgatgagaatataaacctgggtggactttcttaaagttacgaatcagccatttacaacatcannnnnnatggaagtgggagagacatactaccaagagagttgggcagtattaattaaagaatactcaggagtttctgctcctataatgttccctgttgagagaagatgagcagaactagggccttcagcagggagctagccaaaaaacctgctaacctctgcctggttttgttccaccctttagttggctatatggtattattttcagaattgcactttccttcaccttgtcatgactgctgccgaaagtgtgtttttannaacatgaagttctagagtcgtgacctcatgagaggannnggg

SEQ ID NO: 5040 - DNA, 594 bp, Canis familiaris
  misc_feature (1)..(594): n = a or c or g or t
gcacacacaannnnnnnctgaagccacacgannatccccaatgggagggggncgtgaacttaatgtnctatgggatccaggactatgatgaaaaaacccccngcgtgcacctcgtgatggagaaannagacaccgttttctttcatcctttgctcatccacggatcaggctggaacagaactcagggataccgcaaggcaatttcctgccatttcgccagtgctgactgccactacatcgatgtgaaaggcaccagtcaagatgtcactgagagggatattgtagggattggacataaattatatggaattccgaaagacaccagcctgaaggaggtgtctagatatcgagcccggctggtgaaaggaagaaggatcaacctttgaagtagctgcctcctggagctctttgagacaaaaaccaaaaggaatcaagatgcctgtggaacatgttttattaatgagctgtcctaatctttcctgtcacttgttatgaagatcacaacgcacttacagggaactttatgggatctggttagctctgggtgaggggctgttgctttaatggatgaacaggtgtaacagtggcctatta

SEQ ID NO: 5041 - DNA, 537 bp, Canis familiaris
gagcaaagccctaaggactggatctccctgtgcctactttctgatcaggaattccagttaatttataaagaagcagtttttgtgtgccattcacactggtcttttaaacattgctttaagcttatcgcagtatatgtattgggatttttctgtaaaatgggtgtaattttctctgaatacaggtatgtgacaacaagagaagttgcttgcatgccagttcaaattgttctatagaaaaatgctgttaaaagatacagcatggtcatcctagtacttttttttcttttttacttgaaacattacaacctttataaagaccatagcaggaaaacagtgtactttttttttaattgctaaatataaaattttaattttcctttatgtgtgcagtcttaaaatatggggggaatacaacaaatcaaaataatttttttgtagatagccattacgtttctttaaactgtttcaatgccaatgtgtgttctacaaaagagaatggtttcataaattaactgatttaagagtaggtaccagtgt

SEQ ID NO: 5042 - DNA, 380 bp, Canis familiaris
  misc_feature (1)..(380): n = a or c or g or t
gctgctgcaggtgcagacgcacgccctgctgttnntgagagccgcgggcctccccacggcctccgtgtgccgctcgaaggggggcggcctcacctccctcgtgtccgcaggtaagacacccccccgccttgcaccgccagcctcgctccccgctgcattcggggtcccccgagaaaagcacctggaacaggtagggaaccgcaggtgcgacctaggccctgctcctctggcgggggcagccagaccaccaacccggacagcgggctcccatccccaagtgcctggagcccgatctcgtgtcgcttccccgaggacggccttggggcgtcgcctggggcccaggccgggtcccgggtcctgagatggagctgcgagtgggt

SEQ ID NO: 5043 - DNA, 595 bp, Canis familiaris
  misc_feature (1)..(595): n = a or c or g or t
tccctttccntgcatcccccgtnctcttgagccgatgcacccatagctgccagatnnnagtatgtgatctggggccccagctgttggctgagtatttttagggcaaggaaaagcactcagaggggaaacgaaggtagcagacagaccagccctgatatggacacgtggaccgtgggtatcagccctcggaggaaggcttatcatgggaaggacggttcttcagagatagcggtgtggcgtcaaacaggtagttttgcacataacacaccaaacggcccagtacaggactgtcgagagaccacggccgcctgaaggagcctgtgttggtactaatggaccttgaatttggggacactccttggaggtctccagcgcagtgggacggttttccagaagaggcgagtggcccgcccctcccagtctccgccctcagggagcagtcctccatcgtgctgaatctgtcttccaggagctgcccctgtggggcggggttgccgggccagcctttctcttcagccacatcttgtgtatgcaaggaagccaggaatacaggttttcttgatgatttgggttttaattttgtttttattgcgcc

SEQ ID NO: 5044 - DNA, 599 bp, Canis familiaris
  misc_feature (1)..(599): n = a or c or g or t
acagagaacttctcatgaatcaaaaaaggggtcttgcccctcagaacaagcnnnaactgcagaaggtgatggaaaagagaaaacgagatcaagtaataaaacagaaagaagaagaagcacagaagaagaaatctgacttggaaatagaactattaaaacggcagcagaagctggaacagcaagaacttgagaagcagaaattgcaagaagaacaagaaaatgcccccgagtttgtgaaggttaaaggaaatctcagaagaacaggccaagaagtggcacaagtgcaggagtcctaggccctggcgacaagagaccacacatgcgccacacccactcactccgtggggaagccgtgagcaggcgcctcctcgacacttaatctcagggccagagcccctggagagaaccccagccagcagagaattgttactttaaaaaagatttggctttgattttcctacaatctaggcggataaatgatctgtgatggttgcaattcctattcaccaaacgaaggacgttgaccagcacttaagttgggataaatgaacctgtgttcataagacataaaacaaaaacacaaacaccacaaagcagaa

SEQ ID NO: 5045 - DNA, 636 bp, Canis familiaris
  misc_feature (1)..(636): n = a or c or g or t
ctgacanncgggggcccacgactccattttctccanntccacctgctgatgtcacttgctttcctgtnnaagaggcatcagcccctgctgctttgcctgcctcccccactgggaggttnnaggctggnntcagcagccccttctcagacctcctggggcccctgggtgcccaggcagatgaagcaggctgcagcgcccagccctcaccggagcgggagccagagagacagccgtccccccttgagccacgccccgtgtcaccctcagcctatatgctacgcctcccacccccagcgggcgcctacatccagaatgagcacagctaccaggtgggcagcgccctgctctggaagcggcgggctgaggccgcacttgatgctctggacaaggcccagcgccagctgcaggcctgcaagcggcgagagcagcgcctgcggctccggctaagcaagctgcagcaggaacgggcacgggagaagcgggcgcaggctgatgcccgccagactctgaaggagcacgtgcaggactttgccatgcagctgagcagcagcatggcgtgagtgaagggctgctggccccggagcttcgggctcttcctccctcagaatccacctggaaagggacccggtctgagct

SEQ ID NO: 5046 - DNA, 569 bp, Canis familiaris
  misc_feature (1)..(569): n = a or c or g or t
ctgctgacannagctggtctccacgtctgtggatccagcacagcacggcacacttccttctgccccctcctagatgtctgttcgtcatggaatgtaaagaatgacagcttttgacacaaaacttgagccatttggagatttactcctcatacgtcaatatttgaatctttttccgtttcctcccgctttattcaccttgatggtgaaaggagaccggtagcatcttttctacagtattaaaattgcagaagtagtttctcatttaaaacaacaaactcaaatataaatcagtaattctatgcccgccagagaccagcctgtttcttctccttttctcctgggaataatcttgggcttcttcctgaatcctggcaacttccatcctcttctactgcttgggcttccctgtttgcacgcatgtgtgtgcaggaatggctgtgtgctcggactcagtcccagctggaagcatgctctgccccgttactgttccggaaacagaaaccttcaagccctaggtggagccatttttgtcaagtcatcaactgtatttttgtactgaggttaacaaa

SEQ ID NO: 5047 - DNA, 571 bp, Canis familiaris
  misc_feature (1)..(571): n = a or c or g or t
tgctggattnnagcctttttctcanntcttctccctgcaattgcaacnttaaaattcattatcatcttttatgtgaaagaggtgagtcttctttatacctgcagaccctccccaaggcagttcagagcatccaattctaatttcttcttcctgttggtgctgttgatcggactgtgtttggcaataatacctctgacaatcagcatggcacgcatcccttcctcgaaagcctgtgggccattcaccaacttcaacaccacctgggaggtggttcccaagacggtgagcacctttcccagctcactgcagtccctggtctatggcgtcacatcggaagccttcgcagtgcctttcttcatgatcatctgcctcatcatgttttacttcatcgccctggccggagcacacaagcgagtggtggtccagcttcgagagcagctgtccctggaaagtcgtgacaagcgttacctgatccagaaactcacagaagcccagagggatatgaagaaccgactggattatcaatgaggatcccgccacgtgtggctcatgagctgacctagtgacctgc

SEQ ID NO: 5048 - DNA, 719 bp, Canis familiaris
  misc_feature (1)..(719): n = a or c or g or t
gttgnnagncatcanntgaatgcccccactgatgcatcnntctgtcctggtgctgccacggcatcaccagnnnnnnggggcnntgcagaagacacctgccaggaaccagcacgcctcgttatgtaggatcctcttgccaccttcttggagttactccctgcccctgtcatacagagaaaagcaggactccaggtggagaataaggctgggcctgatgaaacactagtggagcaacagttccaaatgcagacaggtgccctagaggggaaaagacgtggcaggcgggatgtatttcctccagagtttgagaccctgaaaaacaacaggtggcatctggtgtgctgttcttgagttttagttcaggattagttgggtttcagcctggattttttaagagaggaaatgttaccaaagttcccttgggctttagggcgagaccttgctaagtgaacgtgagtgggaaaacttgttttaaaaaggcagattccagggtcccaccctctgaggattctgatgtattggggcccaagctgggacataggagcctgtcttctcagggcccccccacacctgatgcggctcaggccgtcctggaagttgctttaaagggctgtgccattccttctttacccgccttccccgacccccaaattgaattgcagctgtttgtgttgttttatattttctatatttccttggttcttgaaaaaggaatgata

SEQ ID NO: 5049 - DNA, 341 bp, Canis familiaris
  misc_feature (1)..(341): n = a or c or g or t
ttgagtnnnaactatgtgctaggtatttaaanngcatagtaactgaaacttcatgatgactttataagtgctgtcannngccctcttctacatatgggcaacttactaaagctcacacagttactgaatggcaaagatggacttgtctcttgcagtgtagcccaagagctattaaccatcgtgtatatgacttcaaaaataaattgaagaaatgtgcatgactgaaaacctttgccgagaggcgtgcaagaagatgggaatgtcaccctgaatggctccgattctgaatgggaagcctcttacagtagccattgtatccaaatcagtcagctgtttaaatt

SEQ ID NO: 5050 - DNA, 586 bp, Canis familiaris
gaaatgatttgtcatctgtttcatttgtttgctttttcctgacagagctagaattctggattgttccccgttttaaaaattgccaaatctaaaccagaagtagacagggcagaacacaggtctcttccttcccattcattttcacagggcaaaaattcacaagcagtttccctagaattatgtatgcttcatgtctggcttttcagtatcataatagaattatgtttttcctataacagaaaggatatgtagatacttgagaatggtttgggaccactcttaacaatatagcttcttctgatacttattttcagaggggaaggaggggaactaaaatgtatgaagtgcctgtgatggatggtagattgtttacatcccattcaaaccttacagcctgtgaggtagatttcattttggtttcatttaaccagtgagagacctggaaatcaaagaggctggtagtttgcccatggtagcagtattggaatttgagctcagatctccaagaattgaaagttttaaatgtgtttttttcccttttctctcaaaaatgtaacagttcctgacaaaaagtggcatctttact

SEQ ID NO: 5051 - DNA, 206 bp, Canis familiaris
gcctcagggcctgggggctgacccagctgggccttgaggataggccgaggggccgcactggctggttctggtctccagagaaccctggcgtttgctcccatctgagccacccaactgagcactgaagagcaactctgatgtgtgcacctttgcatctcctatcacgccacagactggcccttgagggcagcctgctgcactagctg

SEQ ID NO: 5052 - DNA, 619 bp, Canis familiaris
  misc_feature (1)..(619): n = a or c or g or t
tctctttcattttttgaagatggtgaatgggnnntggtaatcagagatttgagaatnntagtaagtgaggcagggcttgttttacatctccaattccctctttgaagagccagtactgaaggtaccattgatttacctgagttattacataaattacaaagcattctaaatattggtacaaaggcaggaagccttctttccaatgagctttatttcaccttcctgcctcccattccacattctttccagcacaagtgaagtatttcgttaactacctccaccagagtagttaggtcaagtagttgactgtcttagaaaattttgatttctgagtgtcctggctttaattcacgccatttctgcttgcttgtaccatgtgggaatgagttaggtgtggctatattttctcttgcttccctttttaactaagactggattacagttgacccttcggcagtgctgagggcttaaggacaccaaccctcatgcagccaaaaatctaataactcttgattctccaaaaacataactactaatagcctattgttgaccagaagccttaaccagcgacataaacagtcaacacctattttgcgtgctatgtgtattatacactgta

SEQ ID NO: 5053 - DNA, 517 bp, Canis familiaris
  misc_feature (1)..(517): n = a or c or g or t
tcangaaacacccccccgccccgccccagngccccatcnnncaggcacaccctgcacaaggcaaggcacctgnntcgtccacaccccgtggccatccgtgcgtctcccactttcagccaaacatgggtcattccactacgaacatgtcctggagaaatggcatcacttgacaggagagggcaggaaaggagggaaactctccagctcactcaccctcgnnnnnngactaaggttctcctctggacaaggcccctcacacttcaggagattgtagataacactgacttttttttttgaccgatacctagtttttgtaattctttatcttttactaataatactgacacatttctagctctcacaaacatagaataagggtttttgcataataagtgggctgctatttaggttaacaattttaattcaggttttttagttggatgaacaaattcctgtaaccttctttttcctatcatcgtagtaattactctagtgataatgactgtatataggccac

SEQ ID NO: 5054 - DNA, 495 bp, Canis familiaris
  misc_feature (1)..(495): n = a or c or g or t
gacatataagggcatngcaaagagcnctgagagtccnnnnngtnnagaaaagggacagccaaggaggttatagttcagtgtgggcttataggtgtgtgctggaaacaaagatactcctggccttggggcttaaactccacagcccatcaggaacctgcaaagagaccgtgtggaagacatcagcaagtggtggcagcagtgaggctggttgcctaggcaggggccacctgcaggaacctggacttcattcccccatggagttcctgaaaatagaagaaaaacagattcatctattcccatttgaaatgataagatttacaaaaatagtacctctagaggccacgttatcattacctaaaataccttcaccttcctgtcatctctgagtaggactgctgctgcttggctttaggagacgttagagaataaagtccttgctcattcactagctgctttgtcgatttagttttcagcttgtcatgtttggatcatttg

SEQ ID NO: 5055 - DNA, 466 bp, Canis familiaris
  misc_feature (1)..(466): n = a or c or g or t
ttgtgtgccgggagtgcaannaganattctccactctgacgttgctgcgacggcatgagcgctcacacccagagctcnggnnctttccntgcacccagtgcggcaagagcttctctgaccgggcanggctgcgtaaacacagnngcacccacagctctgtgcgcccctacacctgcccccactgccccaannnnnnnttgagtgccagcgaccngcgcaagcacgagcgcacccaccctgtgtccatcgggacccccacacccctcgagccccttgtggctttgctaggaatgcctgaagagggaccagcttgaggcccatgtcccctacacctcactcccaggagcccagacnnnnnaggaggcnnnnnnnancnctctgccccagctcactctttaaactccagatccttgcccccgcccccaggccgctagctcttccttgccaacaaagagctggggacaat

SEQ ID NO: 5056 - DNA, 690 bp, Canis familiaris
  misc_feature (1)..(690): n = a or c or g or t
taccaaantnntgaaaagggaccagtganngtgcttnatgtnnatgatnntaatgaaannnnnngtgagnnnnnnnnngagatcaaaaacagctnnnncccagagnnnnnngnntttatgcccataagtgacccagcctcatccgtgtccagctctccgtcgcctccctttggtcactctgctgctgtaagccctaccttcatgccccggtccactcagcctttaacctttaccactgccacttttgctgccaccaagttcggctctaccaaaatgaagaatagtggccgcagcaacaaggttgcacgtacttctcctatcaacctcggcttgaatgtgaatgacctcttgaagcagaaagccatctcttcctcaatgcactctctgtacgggcttggcctgggtagccagcagcagccgcagcagcagcagcagccatcccagccaccaccaccaccgccaccaccgcagcagcagcaacagcagaaagcctctgctctttctcctaatgccaaggaatttatttttcctaatatgcagggtcaaggtagtagtaccaatggaatgttcccaggtgacagcccccttaacctcagtcctctccagtacagtaatgcctttgatgtgtttgcggcctatggaggcctcaacgagaagtcttttgtagatggcttgaattttagcttaaat

SEQ ID NO: 5057 - DNA, 433 bp, Canis familiaris
  misc_feature (1)..(433): n = a or c or g or t
gtggggnnnaataccctggctccctccagtcacatcaatccagattcaaagtgtgnnnnncttccnnnnactttgacttgatctactgaaaagttggggnnngaggggtgccttcattgccctttgttcanttcctccagcccaacttgggactcaggtggcaggactggagacccaaatcctgactcccagccctgttccctcctagccatcccagcctgtctcaatgtagcagacccttcctaggggagcagggaggggaagccagagtttgcaaacccaggggctccttttacattctttctagaacctcctttatatcctcagcccaaaaggcaatgcccccctcctttcacttccaagcctggaattgtgcataacccggatcttgtatctttnnnnancggatgttatttnnnnnaagggcagttcg

SEQ ID NO: 5058 - DNA, 549 bp, Canis familiaris
  misc_feature (1)..(549): n = a or c or g or t
tgatccagaaactgagatnnncagtcaatcatgatgagaaannngatttgaatgatagtaaatgggaagatattcatgttattactnnagcactcaaaatgttttttcgagaattaccagaacctctttttacatttaaccattttaatgattttgttaatgcaattaaacaagaaccaagacagcgagttgctgctgttaaggatctaatcagacagttaccaaagccaaatcaagatacaatgcagattctttttagacatctcaaaaggaagaggacacggcagggagccacacaggcggcagaaccggggccggcagaatccagtcatcaggaggccccggctcaactgggctgctctcatctgtcccccaatgctgggagctcatccctgccgcagctacctcctctcgctcttcccgaggtgctgtgttccctccacacccacttaccccagaaggtgcagcttggttcaggtgcagatgagcaggagtattattagacaaacattttgatttgcccttgccatttatatgaataactgtcat

SEQ ID NO: 5059 - DNA, 508 bp, Canis familiaris
  misc_feature (1)..(508): n = a or c or g or t
tgaannnactcatgtcaatntncnggatctcaagaggatttnnaggtggaataagtagcttctagaccagattccagctgtggtcngagagctgtctagtggttgactaaaggcccttctgtacccaaaatattactccagaaagaggaaatcttggcttctcactggagacactatgcatgttttcaaccagctgaccaagagctggtgtttcctttgatccctactcaggaacacccacctgatttccagagtgtcacttaatcctggtctgcacatggggatgtggagctgaggcccacatctctctgtccaagtgtactgggcaaatgtgcctggggcatatagcccctgttaacagtcagttttttttttttttaatgcatgcaagaaataaaaactaaaactatagtaacctaatttgccaggagtagatgaagagctttccctcctacacagtgaggaggattttgaatcaacactcctcgcctgctgagataagtgacag

SEQ ID NO: 5060 - DNA, 604 bp, Canis familiaris
  misc_feature (1)..(604): n = a or c or g or t
ccaagacaggaatgaagtaattgaagctacaaatgangcantacttattaaagaatcagaattaaccagatnacnagccaaaatttctggacgtgaaagggcagaagacattaagtttctaccagccctgcttgcatctgcaacagaaattatgcctgacattcaagatccaaaatttgctaaacattctcacacagcctttttcaagtgtagaaaactgcgtcgctctattagtgccagtgaccttaatttcaagactcatagtgatgaagatctttccgaagaattactgcaggacttaaaaaaaatgcagttagaacagccttcaacattagaagaaagccagaaggatctgacttatacccagtcagactcatttaaacctctcacatatgacctagaagatgatagttctgagaataatgacttcagtactctcagtggaatgctaagatacataaacaaagaagtgagactattgaaaaagtcctctatgcaaacaggtgctggtttacctcagggagaaaatttgtaattaaatgaagatattgatgtgatgaaaaatgagatttttggtactgtgtttattacatgtagctcatac

SEQ ID NO: 5061 - DNA, 626 bp, Canis familiaris
  misc_feature (1)..(626): n = a or c or g or t
cccaagcacaagnctcccctcccattccccctcccccccttgcagaacaagacagcgaaaggcagcctcagcacagagcagtcggagcgggggtgaggggggcagtgtgctcgtgggaatggaaagtacagcaagcacaggtgagtcggggccggcacccctgccagagtcccggtgggtatcgcggcctctgccctcctgctcgccccaggccaggcggcgccaccagcctttaatcacatggactgccgacaccaggtggatcggacgtgtctctgactgtcgcttagctccccagaatgtccgtggagaggtacttgaggttttagggccatcccattgcctgttggagttcacggtgactgagctgaagtcaggccctgtgtgcggcgcccccgaagactcccaggacagaccatgacagccacccaccctccgtcccagctccggagggcttctagccggggaggcagtccttgttcatttgctccctgtctgtacagcttacagtggcttttcctttgaaaaacagaaaactccccagttttggtctttgaaatcttcccccccacccccagtactgtgaaggactcctctgcacagaagtacaaagcgggggaagattt

SEQ ID NO: 5062 - DNA, 647 bp, Canis familiaris
  misc_feature (1)..(647): n = a or c or g or t
gaccagaccagctgcgagccaagatgatcctgtttgcatnnnnnnntgccctggttcaggcccggcgnctttatgnnnnccacactaaggttttggagcagccggttgttgtgcagagtgtgggcaccgatgnacgcgtcttccagttcctggttttacagctgaacaccacagacctggcgtctaacgacggcatcaagaatctggtctgggtggactcggaccagctcctctatcagcatttttggtgtcgcccagtgatcaaaaagaaagtggttgtggaacctgttgggccaactggtttccagccagagacgttcaggaagtttttagctctgtatttgcatggtgctgtgtaagccaaggaccgacctgaggtctgaagccccctcgtcccccttcacgcagaagatcctgcctctagagcagtgctgggcctgccggaacctcagtgctcctccagcctgctggtctggctgccaataaagagcgcttctggggccctggagcccgtgcctggtgtggggagctgtcaggaagggcgcccgtagctgcacagcggctacaccgtgagcctgcctgcgtgtgcgtgcggccctggggcctgacctggcccaccctaagccctccctgcccacggcccatnn

SEQ ID NO: 5063 - DNA, 447 bp, Canis familiaris
  misc_feature (1)..(447): n = a or c or g or t
tggnnaagagttcagaggggtgaatggggtgtgtgannagaccnntcttgcannnncagatcctgggcccatccaccnnnaagnngtgtggcnntgggcaccaggcagacnnnnntgccccagccctnnngagtggatgccagacagggcaagactgactctcagcaggccaggcctggtcctggcccctccccaaaccctaggcatctggctgggctgccccttccaagcccagtacaagacctgtttcctcatctggaacacagccataaagatggtcatccaggagccccgtcacagcaggcctccatgaaccagtgacagatggccccatctgcagcacccagcccgagccacccagtcccaatcccccaacccctcaacaccactgtgggctgggccctgggcccaaggtcagggacacactccatttccttgaagtagggc

SEQ ID NO: 5064 - DNA, 583 bp, Canis familiaris
  misc_feature (1)..(583): n = a or c or g or t
gtgtatgaccactgtcatcccagaaggcttctgagaagaggggcannagcagctctgttccccaaagactggtccatcttctcccccagaacatgctcttctctgtttcctgctcatgggcttgggccccagctcggttgtgtacttctggaggggaggctgctctctagctctctcccagcggggcatctaggtggttctgaatttcttcctacctcacagggttgttgtgagacttcgaaggtctgaggatgagaggcccctcgtgctctttgtaggaaaagtggaataaacatccagcatcatttgtaacaagaagaatgagacgcagcctgtgtgggcagcaggtaggctggtgctctggggcctgtccttggatccccgtgccatcctgcagttccagccactttgaggcccaccttgggggctttcagatgttcgacatagaggtaccaggccaacccctgctacacatgccctaatgaattgctgaccatcaaaggaaatggaccctgcttttaaggatgtacaaacgtatgtctgcattgatgtctgtactgtaaatttctaatttatcactgta

SEQ ID NO: 5065 - DNA, 480 bp, Canis familiaris
  misc_feature (1)..(480): n = a or c or g or t
ccagtcatccatacatctcgtgacatngcancctgggctgaggtagctttgaccctggtgtcgagagaannaaggctccgtcctcaaggcaagtgggccagtgaaaaagtacagcttgagaacgaaatgctgtgagttatcatgtgctttgagcagatgtgcacagtggtggctcaataaatgttagtggaannaagtcaaactgcagcataggcattggaattataaaagtaaatcagaataatgactttctcaacagcagaatcagatctactgtgatcggaagcttgaatcaaagtcctgattctctaatgcactgctggtaagagtcaatcctggatgcgtacttttcaactttctctagacacacaaagtgtggtggagttagttgtgtttagaaannnnnnacnnnnnngagcacctggatggctcagtggttaagtgtctgcctattgctcaggtcatgatcccaggaatcct

SEQ ID NO: 5066 - DNA, 125 bp, Canis familiaris
  misc_feature (1)..(125): n = a or c or g or t
ttaatgaagatnnnaaagatgctttgcttcgccagtttcagaaagaaatagaagaactgaaaaagaagcttgaagaaggggaagaaatatcaggttctgatatcagtgggtcggaggaagaggat

SEQ ID NO: 5067 - DNA, 657 bp, Canis familiaris
  misc_feature (1)..(657): n = a or c or g or t
gcatttgacaggaaagatgatagaaagaaggtagatgggaaattgctgtgnnggctgtgcacactttcatacaaacnngtccttcaaaagaccaaagagcagaggaaacatctgagcagctcttcccgtgccagccaccaggagaaggaacagtatcgactgagtggtggcagccattataacagccagaaaacactttctacgtcttcaattcaaaatgaaatcccaaagaaaaaatccaagtttgagtcaatcacaactaatggagacagcttttccccagacctggctctggactcaccaggcactgaccactttgtcatcattgcccagctgaaggaagaagtggccactttgaagaagatgctgcatcaaaaggatcaaatgattttagagaaagagaagaagatcacagagttgaaggctgattttcaataccaagaatctcagatgagagccaaaatgaaccagatggagaaaactcacaaagaagtcacagagcaattgcaggccaaaaaccgagaactcctgaagcaggcagctgccttgtccaagagcaagaagtcagagaagtcaggagctataacttctccatgagagaccataaggaggcttccagccacagcaaaggggtttcctgggttagggttggtggcc

SEQ ID NO: 5068 - DNA, 498 bp, Canis familiaris
  misc_feature (1)..(498): n = a or c or g or t
tcntgctcctctcnctcccagggggctgcctgggccctnnagagccacccgaagaccttgctctnnaaagagatctccaacaccaagtactcctgatggatgaggacccccacccctggggccgcctgctccaaccccaagtactcctgatggatgaggacccacaccctgctccaacctcaagtactcctgatggacaagcgcccccatcctgctcctctccctcccagggggctgcctgggccctggagagccacccttgctcttggtgcccccgtcttcactctgccttccagccaaggacaggaacacaggagctggaggcctggcctgctccagcatcccgaggcagttcctgtgaccctcctgcaacaagccagggaagccctgtgtagtcccccctcaccctcgttccccagcttcagatgccaagaaccctgacagagggcctgcagagctggaccaggagaggctagaaggggatagggggcaggaggg

SEQ ID NO: 5069 - DNA, 510 bp, Canis familiaris
  misc_feature (1)..(510): n = a or c or g or t
gaangcagattcccccagcatcgactatgcagagctgttgcngnactttgagaaggtccagaagaagcacctggaagtgagacaccagcggagtgggcgcggggaccacctggaccgaagggttgtcctctgacgggcctggcaaggagaagggccggaggagcggccccacggagcattcagggtcttcaggccccttccccaggagctcagagacctgcctggggggcggggtggggcttgtccacccaagctcccttcctagcccagcccccggggcccccagggcaggcagctgcaccctggccttcacacagagcgggcgccccaccagggtggggccgaagcctcaggtgccgccccattctctggaactggtctctttctaatatcctcttgtaaaggagctcgacctctccagccgctccagagcccacagctctggccccgtgctgacgtgtgcacctgctggtatgcgcacctgtctgcaccgagggaccagcacggaag

SEQ ID NO: 5070 - DNA, 544 bp, Canis familiaris
  misc_feature (1)..(544): n = a or c or g or t
tagctcgagttannntnngnnnnnnnnnnnnntccatgggagcgtgtccccatagggaccctcgggtggcttctgggcagcgagggggagaggcncgggttcctgccgcagagcaggacgtggggaggcctgacgtgaagaggccaaggcgggggcctgaggtgcgcggtggctgttcttcctttnnncttcctcctggtcgccctaagaaatgaggccggaaattcgtttttcaagacctctttgaaccccatggggcgggggggtgcnngtgttaaatgtacctgccccccgggggttcttcacacttgaaaaaaccaatttcctggtcacccacaacctagaagggccaacgcgggggccggtgtannnnnnnnnngacatggaaccattaaaatggcaggaagtgtgagcagtgaattcaagggttggcttctccgtgagacagtacgtggcactttngaaactttcctttaatacgtaaaattttaagtcactnnnntgcaaagtgcatttaagatcttccaagaaggtagatgtttcc

SEQ ID NO: 5071 - DNA, 408 bp, Canis familiaris
  misc_feature (1)..(408): n = a or c or g or t
tnnntcagattccgagttgcctnncngtttttttttttcttttttgaagacnnnnntaaccacagnnnatatnnntgtagctatttgtagtgttacgtacatacatatcatagcnctattctctccctttgttttgtnnnngactttttttttttttttttaataaacgctcataatctnnactggtgaagaggatgaaaaaaaataaattgacaaataaaaccagtttgtggggaaaagaatttttaaaaaaagcgggaaaaaaaatcacnngaatgcagaggggcnngcctcctgtttagcattttgtacctgaggaaataaaaaaaaaagaaaaaaaaagccagaggatctcacnntttattaaaaaagtgaagattgctgtatactatttattnnncttataat

SEQ ID NO: 5072 - DNA, 679 bp, Canis familiaris
  misc_feature (1)..(679): n = a or c or g or t
tacntataaggcccatctcactcccatctgaacctttccctgccacnntggtcagcatccccattctggcagccgggccccacagccaagtttcctatcactactatcttcaccctgggctccccgtctcacccttctagaacatgggtacctcttttccaggcagggtccccacgagggctcatttagactactgtttttgctgctgacttgccctaggactggcccactgcttgacctctctggccctgaggaaccagggaaaagctccctccccacaggacaggctagttccctggcaggtgagggcttccaactgaggcagcgtacaagtggtagagagaagtagggagctggtggccagcaccttttgggtctaggagagtgtgtgggtccctccttccctgtctgggatgttggaggggaggaactgaggccttagcttgcccccttgtcatccttcccccttgtagatactgccttaacactccctctaccctcagctctggctgcctatcagccaggtttctccgtgctcactaatttatttccaggaaggtgtgtggaagacatgagccgtgtataatattttttttaacatttccattgcagtattgaccatcatccttggttgtgtatcgtgtaacacaaatnnnnnnattaaaagcatcaaacannn

SEQ ID NO: 5073 - DNA, 633 bp, Canis familiaris
  misc_feature (1)..(633): n = a or c or g or t
aagcatgcagggcaagtttcannctgctggactctnngtgtccctggccatggccctggtgggcggcatcatcgtggggattattttgaaattaccgttctggggacaacctgctgatgagaactgctttgaggatgcgatctactgggagatgcctgaggagccgaaaagcacggtcttacatcctgaggactctaccctcaagccctcagaaccttaaattcccggggcaggtgagaagcaggctccacagactgtcctggtgctcccaaaggagcggtgctgaccaagctggggacacaagagcaaggcgagcagcaccccacctgatggcctggcccagggtgcctcccttcccttccccttcatcccagggggcctgcctgagaatggagaaggaagagttatagacaaaatgggcatccaagccaggttctggctgcaaggaggcctgccatcagtggtcttggtggccacatcttgaggaaagcaggcaggagagggactgggagctggcagtggatccgggccctcctaggagacaactcagaggccagccaccaactgctgggctcttccactccctgcctgcccctcagccagcacctcccttgctccctgggtcccccagac

SEQ ID NO: 5074 - DNA, 493 bp, Canis familiaris
  misc_feature (1)..(493): n = a or c or g or t
tgnnnagcaagcaaccnnntgcctactaacatgaagagnngctaaataaaacttcattttccttgaaaggacaacttctaccgtatggatataatatttatgtattatgctttgtacaatagttgatcttgaatacagattttattttgtttatatttttctgtgacattacaaaatgtgtagaagttatggctttactttcatcagggtcttattaggtggttggcaagtaaggtgaactgtgtgcatttttttccatgctgttttaacttgtaaatatatatgtgcataagatacgattattatctggatgactttaggccttttaactcccacattatnannnnnnaccatgttgcttattctttcataagaatggttctcaaacattagtgtgcatcagagttgagcatagggcttatcagcacagctggtcccactcagtgtccccttcagtaggtctgggtggggcccaagaattgtatttctgcca

SEQ ID NO: 5075 - DNA, 167 bp, Canis familiaris
  misc_feature (1)..(167): n = a or c or g or t
gtgcttccatttcggagatttgggaaannntgaaccggtccggtagtgtcaccgacaagactttgtccgaacctgtccagccacctggagtctctttcaagatgctttctagggaaaatatgacaaaataaagaaacagaatacttggacctggtgagcccaccttt

SEQ ID NO: 5076 - DNA, 660 bp, Canis familiaris
  misc_feature (1)..(660): n = a or c or g or t
aaagtgttcagactacacggngttgtncntcntcgtggcccagaagaacgactaacgcagggtccttngaagcgtgtgggtgtgcaggggcaggacttccagcccgcattcggccacccatttgcttttctctccctttagctgaccttatttagaacccttacctgcaaatgcttttagagcctcattatacatgattgccagataaataggggtacttatctcacacggagaggtttacaatatactccactaatggcccagggtcagggaaagaattggaccagagaaatgaggatatgcctcctctagttttgagggtgcctcggggtggcacagggtgacgaaggtagagtccctcaccatctcctaatttaggcatttggggactgctcaccttctgagctcattccccacctgcatcttcgcccctgctgagactgcagccccatcccatgaaatgaaaagaacagaggttttggcgtcggaagacatggactttggtacttggctcttagcttagttgctcttgtgatgtcaggtgtgttgttaataccacagagccttgtccccatctctgaaatggaaataataacccacctccccagggcagttgtgagaccccaaagagagaacataaatacacctgatagatnnnnn

SEQ ID NO: 5077 - DNA, 564 bp, Canis familiaris
  misc_feature (1)..(564): n = a or c or g or t
gctactgggatttcagatctgtctaannctgaagtaaaattatgtgcatttgnnacntggtcagactgggacttgggggtttgcctggagtatgagtgtaaaagaaaacagctgttaaaacctgtgttcttgaattcttggattgatctcagagtaacttacaagattttctatagaagaaaaccaaaaggactaagtggtgccctacaggaagtaggaatagaattcttaggacgagaacattctggattggatgattctcggaacactgccatgcttgcttggaaaatgatcagggatggttgcttaatgaaaattacaaggtctttaaacaaggtgtggttgtcactggcgtgtctacaaaggaagaactacaatgattctgcacattgcacatggcatcataaactattaaccacagaaaagaattcaagaaaccatctactcggatctcttcacctcatggatcaggcccccatgatttaggttgaattccaaggtaaaagtcatctctttatcttcttacatgctttctggaattaaactaaatttgtcatcaaagtc

SEQ ID NO: 5078 - DNA, 519 bp, Canis familiaris
  misc_feature (1)..(519): n = a or c or g or t
ctttnnnctaggattggaaagactggccatgatcctctatgacatccctgacatnnnnnnnntctgnagtgaggatgagcgtttcctgaagcagttccgcgtgtcagatatcaaccagaaggtgaaatttcagcctcttagcaaataccctgctgtgataaatgacatctcattctggttaccctccgagaattatacagaaaatgatttctatgacttgttacgaacagttggaggagacctggtggaaaaagttgatctgatagacaaatttgaacatccaaagacgcacaagaccagccactgctaccgcatcacctaccgccacatggagcggaccctgtcccagagggaggtcgggcgcatccaccaggctgtgcaggaggccgcggtgcagctgctgggcgtggagggccgcttctgatgccaccgcccggaccaggcccgcagcctccggggctccaggacttgggagacagaacaggatgttgctcgtggaccgcggcatccgtaacgttt

SEQ ID NO: 5079 - DNA, 75 bp, Canis familiaris
gacacacattcattgatgcataggctgtcacctgaagaatatgtattagctgccatcagcctttatttggatgtc

SEQ ID NO: 5080 - DNA, 550 bp, Canis familiaris
  misc_feature (1)..(550): n = a or c or g or t
ttttaagtaataaaaaatgaataaactagtctagaaccttttaggaaaaaaaccctgtttgacacttaatcatgctaggactatgagaaaattgccattgccactaccaagtcccactaccatccattaccctgtgtccattataatattcaagagggccttgaattcatcctgaaaaagtggttttttcctcctgttttctggaagaaaaaaaaaaatctgtgttcaggtgatttgtttggtaacttacttttttttttccattttggtttctttagttttgttctaaagctctagttttttcatttaagacttacagtgtgtttattaaacatcaaaatgagatttttttagagatttttttttaaaagaagccaagtttttcatactgttttagtcagctccaaaaaaactttctcataaaaaagtactgtttatttacatcgatttatcttgattctattgttaaattacctgactttataaaaaatattctaactttttcttgcctnnnnatgtaaccttttcnnnnnnnaaactgatgtaacat

SEQ ID NO: 5081 - DNA, 586 bp, Canis familiaris
  misc_feature (1)..(586): n = a or c or g or t
tgaaggatggtatttaggagaaaagaaggaatttgtggccacttgannngaaagttgaaagcaagtataaatatattttttttactagtatgtttgaagagaactactatttggtaagctttaccaaagaaaagtgagtgcaggtttctgtgtgtgtgcacttttnnntaggcgaattttgaatgaacactctagctggcaattggtgataaagttttaagttttccttgtttgtacactaaagatttatatccagtgcctctcctanntactgatttgattttgtactgaaatgtattttcaaacaggagagcctttaacaacaacaacaaaaaatcncagtgnnntcagcgggagtatgaatgagccaggtgtgtgtnnngcccctcaccctccacccctttgaggtttatttcagaatgttccgtttttaaacagaaaaataagtggtaaaattaccttttggaaactgagccttaaattttttaaagggagaaataagtgtttcccaactcacacagcataagcaatgtttgatagcaatataatgccatgttaagctctgagagtnnnatatctcttctgg

SEQ ID NO: 5082 - DNA, 589 bp, Canis familiaris
  misc_feature (1)..(589): n = a or c or g or t
annngnctcctatctctannnctgcaggccccggccagagcccccacctcactctgcctccccctcaagacccatttctgtgccacccatccccagagcccagcaggtcaccgtgccctcatgggctgcccaacagggagctatgggctgtctcttgaggcacctgggtaggggcaggggcaggggcaggggaggagagtccttctgtgcctcctcacctgaaactgcctggtccaggcccggcttgctgccagggcccgaaggaggaaggagagtggccaggctatttgaggaggagactggggggctggtggactgcaggagccagactggggagcctcatgcattttaggagtttgggaccctcctgtcgagagtctcctgctatatactccctggtgggttaggatatagcctgactccctgttatccggtgtgggggtgggagggaagggtggggagggagctattcaatcttccctgcccctgcccactgcctggatgactgggcgccggaggggcaggatgccacccctccatcctccagctctggcctctgggtctccctnnnnnnctacctgtgttagta

SEQ ID NO: 5083 - DNA, 527 bp, Canis familiaris
  misc_feature (1)..(527): n = a or c or g or t
tttaaagagagattcgggnggtgggggtggcggctccatctcacaaccaggagatcagacttgaggtgaaaccaagagtctgacgcccatctaatgaaccacccaggcacccctgtttttttttaaagttagactccacagacagcttggtcctcaacaagggtcttgactctggaccctaagatcaggacccgagctgaaatccaagagtcgaaggcttaactgactaagccacccaggtgccccgacacttttctctttttaatttcagaagtataaataagtacatatttaaccatatagatgcacacacatagagaaatagcctataatatttatataatagtgggtatcttagaatgggcttttattttaattttgttgttgtttttttattctctacaattcacctaatattctttgtatagaaaaaaaggtaaggtatgtacattcccttttaatgaaatgcatttattgggctcaagaagagatgtggaggagggcacaatttacaaggattcatcaaa

SEQ ID NO: 5084 - DNA, 544 bp, Canis familiaris
cccccgcagtgaaacatgaccccccaccccctgggggtaaagtgtcttcttgtgtgcgtggtcctgagacaggcacctgcccgctggggagggaggagggagagccaccctcttctggcctccaaggtcagcaggtggtcctgcagcagaaggcttggccggaccccccactgaaaggtgtccgtgtctgtaattaggagatggcagggtgtgctgcctgtcacaggacgcttgtacagtgagttcagaggcatatgaaacactaggaaggtgtcaccaaagtctgtttccctgtcttctgtggagctgtgtccctctgtatgtcctggaggtcctgtctgtgagtcagcgttactcagatccttccagcctcaccacacaccctgttgcgcatcggcttcccaccagcccggctcagccagggaggcgagtttctagcacctgacgcacttccctccatttagcagcctgagcccgagcaactggaaacccccgttttctcattagtgcaatgttatgtcagctcccaggggagccttggaaa

SEQ ID NO: 5085 - DNA, 618 bp, Canis familiaris
  misc_feature (1)..(618): n = a or c or g or t
tcctcttggacccccagctggnncnannaggtggggnntctgaaatggctgtggcccatgccttgacagaaaaatcgaaggccatgactggtgnnnaacagtnnccgtacagggctgttgctcaggccttagaggtcatccctcgcaccctaatccagaactgtggggccagcaccattcgtctgcttacctcccttcgggccaagcacactcaggagaactgtgagacatggggtgtaaacggtgagacaggtaccttggtagacatgaaagaactgggcatctgggaaccactggctgtaaagctgcagacatacaagacagcagtaganacggcagttctcctgctgcggattgatgacattgtctcaggccacaaaaagaagggtgacgaccagagccggcaaggcgggactcctgacgctggccaggagtgagtgaagggcaaggtgacctcaacgcacagagccggcannggcttcctcttccctgagccagactgccagggacactgtggacgtctctgtttggaagggatcaggttgaggggcagccctggcctcttcctgtggtagctcagtttgcaaaaggcactgacatataattcttctctattgt

SEQ ID NO: 5086 - DNA, 558 bp, Canis familiaris
  misc_feature (1)..(558): n = a or c or g or t
agctccattttaaatccatgccaagaactctcaaccaaggccactacttcccagacagcccaatcattggttaaaatggtctcaaccagatgtctgccaccaaggtctccgatcccagtttcagctatacctctgtcttttcccgaaaatcagagagaagaaattaaggcaccaaggaccaaaaagaaaacttatcaaaaaaacattgaattaaacaaatcactctatattcagaagttaaactgtttatcaccttcctttacagctaaggataagtgttcacccattgaccaaaaataacttttctcctcctcttctcaacgtgagcaagtcttatttccaagaagcttggctaaaacatgcctcatcattctgagatgcaggtattacacacatgaagaacttgatgtgacgtggagtggaactcgtgaaaagcactgctgagatgtctaatgtataaatccaagggcttccatactgacgtacttggcaatcttttgcatgttgtgtttcaaagnnnngtttcacttagtaaannagtcaaaagactattctttt

SEQ ID NO: 5087 - DNA, 317 bp, Canis familiaris
  misc_feature (1)..(317): n = a or c or g or t
actacaactttttctctgcagtagataaatgaacatggcangttgacgctacatgacatacccggtaagaatcttgctcnnaaagcatcttgtcctcttaagaggccggttcctatttccaaatgcatcacattaaagccaaaagatgaatctgcctacctttatttccatcgtatcagctctcaccttgattttgatacttcctgacaaccgtatcatctcttcattatcaaatactcaagaaaaagctaataggacttgttaaatttgatcttgtgtaaatcaaagagnnnngaggggcagcagagataaaatat

SEQ ID NO: 5088 - DNA, 577 bp, Canis familiaris
  misc_feature (1)..(577): n = a or c or g or t
ttctccctggtttcaacagtgnnngtgtccgtgaaaagacaatattctctctaaagcaataagggggtgatgggccagggggaaatgtcttgctgctgctggccccccagctccccccttcctcacgccagtatttggcggcagtagaggtgtgggggggatactgttgtgactgaatgtaaccgcccacactcccacccctgccgcagccaatgcaggggagggggggtgacactcttccctgtctcttccttccccttctcccccagctaaagagactttgaatttagggggcccttgagcctggagaggccttaaccctgtgaggaagtgtagggggagccctctcccacccccatccccttctgagagtggtcaatgtttacaagcccctgagcccccggggcccagggactccacccccattgctgtcctttcccacccgtcttcctgggccccagctgctctcccacccttcctgggttggggtgggtgcaggggctgttctgtactccttgtctgccttggacccacaatctccnntactcccaccctatnnnactcccctctcttctac

SEQ ID NO: 5089 - DNA, 472 bp, Canis familiaris
  misc_feature (1)..(472): n = a or c or g or t
agccaggatgaagggagactgggcaaggctcttacgccccacactgcaatttggtcttgttgctgtatccatctacgttggcctctcccgagtttctgactacaaacaccactggagtgatgtactgactggactcattcaaggagccctggctgccatattagtcgtggtgtatgtatctgatttcttcaaggagagaaattctccttttaaagaaaggaaagaggaggactctcatacaactctgcatgaaacaccaacgacgggaaatcactttaggaacaatcaccaaccctgaaggtagcagagtgcccagataaagctggcccgctttctaaaggaaaatgattgcaaccagaaggccaagaggatgagttttcttcttggtnnnaagcctttaagggaccgctgctgctatacctcttggacgcccactttacctgtgtgtatatagtcacatttaacaatggtt

SEQ ID NO: 5090 - DNA, 602 bp, Canis familiaris
  misc_feature (1)..(602): n = a or c or g or t
acgacattcctggcgtgcatgtcacaagtcgctaggatcaagaaccaaatccctctccttctgtgaataatcgctgaggaagacaatgaatgaggcaaaggagtcccttcngagcatcgagcagaaatacaaactcttccagcagcaacaattcaccttcatcgccgctctggagcactgtagggagaatgcccacgacaagatccgacccatcgccagcattgggcaggtgcagagctacacagagcactactgcaacaactccacagaccggcgcattctgctcatgttcctggacatctgctcggagctgaacaagctgtgccagcactttgaggccctgcactctggcactccagtcaccaacaacctgcttgagaaatgcaaatccctggttagccaaagcaatgacctaagcaaccttagagcaaagtaccctcatgatgtggtgaaccacctaagctgtgacgaggccaggaatcactacggaggcgtcgtcagcctcatccccatcgtcctggacttaatgaaagaatggatcgcccactcggagaagctgccccgcaaagcactgcagcatggggcgacttagcttctgtatt

SEQ ID NO: 5091 - DNA, 625 bp, Canis familiaris
  misc_feature (1)..(625): n = a or c or g or t
acgacggatctgcagctgaccatatcagagctnnaacacgagcttgtnnagctgagnnagcgggagcggctgctggtggnnttcccagacctgcacagacccattgaagcccagatcccaagctccggcaacgttacagacgacatggagaggcaggtccaggccaacgacatccgcatccgagtcctgcaggaggagaatgggaggctccggtctatgctgtccaaaattcgggaggtagctcagcaggggagcctaaagctgatcccgcaggaccagctctgggcccctccaagcaagggaatccagagagcagtgcctgcagctcaggcccagaaagcatccccagggcccctgggcaggcggcacctgcctagcagcaggacacccagtgcgggccggaccctaccatgccagctcaaggcatccccacttcagcagtcctgcagtcggcccagcaagtcctccctggaggacatgacccactcaaccaactgtgctcagaaccccatccgggccttggccaggctgaggaggagactgtcaccaggccagggacaggccagccctgcataccagccccaggnncggcccacatagcnnnntgtgcagtggggctgggagg

SEQ ID NO: 5092 - DNA, 628 bp, Canis familiaris
  misc_feature (1)..(628): n = a or c or g or t
ctcaagatacatatattctgtccctgcttgtcactatcccatcccnnggccnntaagggttagttggttccagtcagtagtatagtgtgttatctctcggccacctgcaggggtcctggcaagagaaancgcagataactaagtggttttcatagctttatgtttatagaaattgaagtctcttctaggaggaatgtctcccacccagccttcatctagtatagaacctgattgcatagactctaatgttagagggatgggaagtatagattacgccctgggtcactgaacatgatggtgagattggccactcttaaccaccacccttggttccttgactcatgtatttgagctccagagatgcaggaccattgatgcacaggactccagccccactggtgtcttttccaagctggccatctcaccttagctgtaccttaatgaagcccttccaaccgtccagtaaccactgggaaggaactctcagggtgataaagtacatactagaagcaggtcatgctattgtcacgggcagtctggagttctccaaagcatccgctcgactgtcccctgccagatctcagcatctcagtgtcttttagcttgggcagcttgctgcagctaggag

SEQ ID NO: 5093 - DNA, 690 bp, Canis familiaris
  misc_feature (1)..(690): n = a or c or g or t
tttttttaagttgataatattgttgggcacattcacatgnctaanannagcatnctgagtnnnnnnaaggtaggctaagaaatgtatcatggcagtgtcttgaaataattttcaaattacatggattgttatgagcttctgagatttttttttaaaggctcagaagagatatttgcaatttcagaacaatctagcccctttaggtatgattttggaccctagcccttttctgtgtctctaaagaaaaagtgtggaaagaattgcactgatgaacagatgctatcagaaagccctcacattggaccccctgtgttttcttgctcagcctctcccattccctcccacagccccaggggtgagagagatctaagagctgaggggttagtttgtatctctcatccaaatttactgaaatgcaaaagttgaacaggccagtaatggaactcagtgcaaattccaagacggatttcagagtccatgcagagcaagtgacttgaacagatgtcatgtggcattgacttacctattcatttcctattcaaaagcctgtcagaaagcattctgtatcaaaaaccaccttacattgtatgttaaactcctgatagctgctcttaagaatatgtatgtgtgtattcatggggacatttttactcaatatttgtatgatttgcttattgttcatgtgctgag

SEQ ID NO: 5094 - DNA, 58 bp, Canis familiaris
ccgcccaccgagggaagtgcccctcaggggctctgggaaagcatggcacccttggacc

SEQ ID NO: 5095 - DNA, 615 bp, Canis familiaris
  misc_feature (1)..(615): n = a or c or g or t
agaggaagctggggaagagaacctgttcatctnnggcatgagagtagatgatgnnnnngctctggacaagaaagggtatgacgcaaaagaatattatgaagcacttccagagctgaagctggccattgatcaaattgacaatggcttcttctctcccaagcagcctgacctcttcaaagatttaatcaatatgctattttatcatgacaggtttaaagtcttcgcagactatgaagcctatgtcaagtgtcaagaaaaagtcagccagctgtacatgaatccaaaggcctggaacacaatggtactcaaaaacatagctgccgcagggaagttctctagtgaccgaacaattaaggaatatgccagggacatctggaacatggaaccttcagatctcaagatttccctatccaatgaatctagcaatggggtgaacaaagccaatggaaagtaagttgtaaaatgtctctagaaaacaataacaacaacaaaaaaaaacttcttactggatttaaacacttttacaacattctttgattttgttttgttttgtcagctcataacctaattaagaatttctgggaattgggaaggaaagtatgtgactgtatttag

SEQ ID NO: 5096 - DNA, 427 bp, Canis familiaris
  misc_feature (1)..(427): n = a or c or g or t
gatgtngagatgtagaagattatgggggttttcagccnnattttttttgtcaaatcttttcatatattttataaataaatttgtttttgaaatctgtggaagctttgattctgttcacgtaacagtagtaataaggccaacaccatcacttctttgctttatgaatgcttagtaagtacctcgtgatccacggtttcatcgtgctcacgggatctttggctcggctcagaggcattcactttgtcacgccttccttaagcctcccgttcccccccaccccaactcaggagtcggagcacctaaaacactttaatatgtaagagtcctgtgactttatgggtgcttggaaactcagtgttttggagtattaaattcagaaaattgaccttttaaaaaaatccccaagaggtttttttgctgtggtcat

SEQ ID NO: 5097 - DNA, 431 bp, Canis familiaris
  misc_feature (1)..(431): n = a or c or g or t
catctgcaaagccagactgctcgaattgcttttatatttgaaattgtaggttttagagnnnnnagatcnntatggcataagttttattaaatgttcaggtaacagttttgaattcatgtgatgatggtggtattatatgatgaaacacttcccaaccctttaatgttatcaggaaaattttgaggggacaattatattgtattttctcagataagaaacatgctttttaagagtattattttaatcttctgttttatgcatctcttggatttaaattgttaactgtataaaagcagtgaatcaagggcaatttaagataaagctaaaagttggaacattttatttcaaaatcatgtgaatttgaagtttgaagttgtcagttaagcctcattgtttttgagtttttgttaatctnnnnnncgtctttatat

SEQ ID NO: 5098 - DNA, 643 bp, Canis familiaris
  misc_feature (1)..(643): n = a or c or g or t
agcttcanannagctctgtangagnnaaatgctctgtgactctctnnnnnctgaaagtcnnnnnntgcaaaataatttctagtagacatagagttgagagagaacgtgaatgggatttccttgcttgttctgaaatagcatgagagcagtagatgcccttataggaatcacattttatgagactcacgatgggttgcttgcaggccatgttcgttactagttactattccgttttatagtgcgattcctcataggagttttctagatgagcttttccagtttttactgttcaagcactccagtcaagcttttcactccactgaaaccacatgtcaaggtcagcagtgatgagcagattgagaggtccagtcttcttcctactggactttcagtcctgttggacagggttgactagttcttcttgaactcactttgttagctttgttctgcagggatgtgctactttgctcctccgtctcttgctttagttctgattcttttttccagggatttgttcttagacgtctctacactcatttccttgttgaaacccaccttcttttcatggctttaaatatttgtgctgaagatccaaaatttatatctagcctctctctcctgaactctagagttgtcaattgct

SEQ ID NO: 5099 - DNA, 575 bp, Canis familiaris
  misc_feature (1)..(575): n = a or c or g or t
gaanngtatccaagaaatttggagactnngttccttgttctggtgagttatggggnngtctcctagcttctcataagactcatagcataattaaccattatgtatgagcttttgcctgttagcatatcaaattcttaaagggaattcagctttattactatcagtacatgatcaaacttctgtatttgtcctgggaatgacggagaaagggaaaacctgttaattcataagtaaagacttaaaattagtgtttaatttttgaaaattgccctctctgttcagctgataccggttactgatggttacatgtcctagggaaagtttcaaattaggaaatactgctctctgacattattcatttctaagtcctgggaagaagagcttggaaagcttctgagtatggagaagttccatatcgggaagaggtcccctcatagaagtatgaaagtattatagattctaaactgagacttaatcctcaaatgtgtttattttacttgtcctaaaataatctgtctacgaatataaaaaactgtaagtaattgttattttnnnnnntgtaggaatctttaatg

SEQ ID NO: 5100 - DNA, 458 bp, Canis familiaris
  misc_feature (1)..(458): n = a or c or g or t
gtggatccgcattttcatggnaaaggganncatgatcactctnnnngcagggatttatnnncncttcannntngacgaaannnannnnnnnnnnnncntgcggctgttcgtggggcaaccnntntnnnnggcnnncnnncggcccgccgaccacnnngaggcccggggccagtncgtgnggttcctggcgcagnncgnnnaggcccgggcagcctcgcctcgngggccgggcttccccgcgnngnnnngccgctcccggggtcgccntnntnnccaggcnnccnnccgcgccggacccgtcgcctgagccctgtgagcnnnnncgcccntcgnnnctgggtgngannnagacgnnnggctgccagcctgccctgtagacncnnnnccgccngacccagannntcttnnnnnncccggtgggccgggtggctgggccagtgcacnnnnnnnngtcatgn

SEQ ID NO: 5101 - DNA, 700 bp, Canis familiaris
  misc_feature (1)..(700): n = a or c or g or t
gctatgagaagacccagagctaccccactgactggtcngatgatgaatctnncaacccgttctcctccacnnatgccaatggggactcaaacccatttgacgaggacaccanntcggggacnnaagtgcgggtccgggccctttatgactacgaagggcaggagcatgatgagctgagcttcaaggctggggacgagctgaccaagatagaggacgaggatgagcagggctggtgcaagggacgcttggacaacgggcaggtcggcctgtacccagcgaattacgtcgaggcgatccagtgacgggccagccggctggctggcggaggatggaggcaggggccccaggagctccgttggccgtcggccccgggcagcggcactccggtagcagccggccgtgcgagcgtccgctccttttcctgcaaaacctgatggctccgttgcccttggcttcatggtgtctctcagaggcagacgagctgggtcatttcacctgggactcggcacctttccatacgcggtgtagccggagaggtctgagtgcaggaaaatagtacaacagaactcgccccgttcccccgtcctgctcactgtgcgtgtcggcttatcatggatctgtctgttcttgaccttgcctttcctcctctcctgagtcatggtgggttccactgattcttgttccactgattacttcctct

SEQ ID NO: 5102 - DNA, 575 bp, Canis familiaris
  misc_feature (1)..(575): n = a or c or g or t
gctgccccctgtnnagcccattccccccagagagctgattcagaaggacagcaggttggtctctcacctgcgtgtggacctgaagcccagacctccggaggtgcttgtccgaaacggcaagggagaggctgccaacggggaggccaccccggccaacgagggcaagcgcttcagcaagaggttcttcagtcggcgggccaagagtcccacggcgcccaacggcatgaccagcaccgtctccaccgagacctttgcagaagtggagtttgtgacaggaaagaggcccaaagacggttccagtgctgacatctcaggtaaaacaagtcccagtcctgccaaggccagcaattgtgtgatttcctgagccatgggccagcggtgggtaggacctgtggatgcccccggccctgtcctaaggagaacacaggtcaaaccctgtaccagtttgcactttggacccttgttcgcttcctgcccatcagcctccatcctggccttaaggcccctcaaccccagatgtgagagtctgcagcatctcaagatgnnnnnngtgcccctacaagactgtcggtggc

SEQ ID NO: 5103 - DNA, 331 bp, Canis familiaris
  misc_feature (1)..(331): n = a or c or g or t
agcgctgggcagtgtggtggggagtctgggaggcaaggaccccagcacctcccgacccaggcctcnnaagacttccaagagctctgtgtttgctcagcatagaagtcccctcccnnagccccactcccccaccccgtcccgcccgcccctcctgctctcagcttggctccctaagnncttggagcctccagacacgcccacgtgctgtccaggactcaggacccaccactgtgctgctctcacttgtgtcgatgagcagcattgataacaggtttgaacttaagcagcttttaagnnnnnncttcagaatttctcannaagttatatacag

SEQ ID NO: 5104 - DNA, 610 bp, Canis familiaris
  misc_feature (1)..(610): n = a or c or g or t
gaagtatgtnnnnctactgtnacagatacannnnnggcatgnnacgtgtnntgaagacttttgggcccattccagacttttccagggccaccactgaaaaagttaaccaggccatgtgtgtgaatgttcctgatgacccagagcacttaggcgccagaaggcagtggagggacgagtgtctcctgagactggccaagttgaagaggcagatgcagtcccagtaaagcttcctgctgagctcccatccttcgttattgggagtcctcgttgggagaatcacaagcacttaattgaacctggaggccaggtggtcttcatgcagattcaatggtggggccacagcggtggggctgagaggtcctctgatcactccctggccttgggtgtcacagctgcactggaatctgagggctgttggctccctgcaacttgggcaagcaagagaacaaatcgtctgaagattttcaccttttatttttagagattccatacagcggcattttatagccaatgattgtggtttcaagtttattttaatctgtagcaaagttttgtaatgattttctaatctctttctgagtactctgtggccctgcattatgaggcacct

SEQ ID NO: 5105 - DNA, 589 bp, Canis familiaris
  misc_feature (1)..(589): n = a or c or g or t
acagagtgtccctaatggtagtcctacccatgatgagggcgnccactcggaagaggaaggctttgctgtggatgatgaggattctgatggggacctgaatacctgggagctgtcagaaggggtgtccaactgtccgcccaaggaatcggctgctgatatttttaacgaggactgggatttggagttgaaagcagatcaaggcaatccatatgatgctgatgacatccagggttgcatctctcaagaggtcaaaccttgggtgtgctgtgccccacaaggagacatgatctatgaccctagttggcaccatccacctccactgataccccattattccaagatggtcttcgaaacaggacagtttgatgatgctgaagattgagtgtgcagcttctggcctggtgggtgggcatgcctttccaaatgaaggtctctcttcctttcatggaggtggaggtcacatttgatgacacattcccagcgatccccaagtcgagcacacagactggcattagataaggtcccaatgtcctccagttatgctgttgttnnnnttaatgagcttctnnnngggacatgtgagtgtttg

SEQ ID NO: 5106 - DNA, 554 bp, Canis familiaris
  misc_feature (1)..(554): n = a or c or g or t
gctgtacatgcgtgtatatcgttccagacttaacttattctgatttccgggcntggnnctttccttcttcctcccccgggagggcaggttttatttccacgttctctgtgaaaccatccccgtctgggcgctctgtgaatggtgcgggcgtgtccccggctctatctgtgtccgtcacaggccgtgccggaaggtctgcccgcgtcactttctttgatctgtagcttttttttaaagacttttgaatgtttaataattttgtaaatcatactctttacacggagtaccactatttaataagacgggatgtaaatttacaatgacaaatgtgtattttaagaaagaaaatgacattattttgatggtactttgtggaaagaggtggagaataaatttatgctgtgtacatcacttgcaaatcaccaaaaaacactccgccgccccccgtgagggccggggcaggcgcctcctccgggtgtcgccgtcctccccgtctgcctccagcctccgcccgcctgccctagccttccacgggtgtgcctcccagcggatta

SEQ ID NO: 5107 - DNA, 204 bp, Canis familiaris
  misc_feature (1)..(204): n = a or c or g or t
gagaacactgtggtctccgagnnngnnncangaaggacnnnnnncnctggcccagtgaggctcangnnnnagcttactcctggtcagggcatctccctccagaggcctgcaggagaccttggccaaggnnnnnnnnnngnagnnngntgccccaccccatcccaagcccagaannagcaggggcnnnnnnnnnggggctcnnnn

SEQ ID NO: 5108 - DNA, 554 bp, Canis familiaris
  misc_feature (1)..(554): n = a or c or g or t
ggcatatgagannntctttaatnnnggctctctgatttcttgagcatcagcgagttcagaagtgactgtcttttgtactccattagttccctggtaactacacacttactcccattccacactgtgcttaaatgacaaagactcttctgagaagccaaattctgtccaagatgagctctagatattgttaattaaaggaaagcctagaactggggtggaagaggagagttacttgccagttctgagagtcttccgatgaaataaattacttctttttggggagatgatcttttataggaaatgggatattttaaatgctttaattgaaggcacaacagttaatgcctctattgttgctagtctgtggctgacatggttttgatatggctttgaaatttctgctaagcttaagtagaatgttacaccagtttttaatgttggctgcagcttttggtaattctttgctgatttttgcagtgtaataacttcatgagctaaattttcaggaagaattttgtttccgattatgcctcttgtctatttgggagcaacat

SEQ ID NO: 5109 - DNA, 592 bp, Canis familiaris
  misc_feature (1)..(592): n = a or c or g or t
atgccccatnngncnnaaggacatcnngtncaaaacccactccctggttctggacaattgcannaataagatggtagataatctgagctcagaagtgaaagaccgacgaattgtcctcattagggaacgaaaagcaaagagactgtcatgaagaccatgctccagggacatttgagggattgccaggcaacaggagcttgagatagtctggagaattccctgtggccaggtcttgggccgctctgagatagagcatgggatggaaccacacgggacagagactgagttaggaagtcctcatgagcctccatgttggccggcggagctgccaccattgtctgaggtgccaccggtcctcgccgtgcagactgcttcagggtacttgatagactctgcttcactgtgtgttgaatgggttatgtatttctgttttgctttttaagtttattgttttatcgttttggtacctcagaagcacctctattggcatttgttttggatgggttgggtgtaccgttgtggctgcccctagaagttaaggcagcctcttttggagaggatggcctacctctttgtgaaaacaagatgtcat

SEQ ID NO: 5110 - DNA, 436 bp, Canis familiaris
  misc_feature (1)..(436): n = a or c or g or t
agccacacagcgctgnnngccaaggacggggccaggggacagggatggannagtcccagnnagccgccaagcaccagccaacaggcggccttgctgcaggaaggaccagggtctgcccacagtatgtttgcgaagganntctctccccagagaggttcttctagaaccttccaaagcagcgagcaccaaagcccgtttgtcctctcaagtctgtgccaagttgtcaatttgcaacaaactccttttcatcttgcttctgagaagcagctgtgtggccgtgtccccccctgaccctccctcctttcccacacnnnnnnacaccctaccccttccttctccccagattagggcccagactgtccaagagagccgagcgggagcgcagggtggcaataagccgacttgggttctaggaagacaaaagggaagaatgagc

SEQ ID NO: 5111 - DNA, 606 bp, Canis familiaris
  misc_feature (1)..(606): n = a or c or g or t
atnngcagaaacataatgtgatttaaaagccgagctttttatcagaaagcttttttgatgttttaagtgttatgtgacttgtcgaacttttaaaagacaaaagtgctacttttaaaatcccagatatnctgaattttagaaaaccaaccaattctgattcagtgtcgtgcccaagtacctttttttttataaacagggaccaatgccacattgctttttatatttcttttttttaatgttgccaaaaccaaaagtagcttttttccccccttgtattttgctactttgcagtatttgtgtgtggtttttttttttttttnnnnnaatttgaaagggacagcactgtgtatgtttataaactaaatgaagataagatattattttnnnnnnacattcatctgagaacaatcagagcannngccacatggtgctggctcgtttgcagcacaaacctggtcatcctcatgactgtacagaaggaagacttgaaaaatcacgtgggttcgatcaccaccctctcctttcatggagtcttctgatcaaaaaagctcctattgtattgttttctttctttctcttttctnnnaactgggtggttgtaccaga

SEQ ID NO: 5112 - DNA, 211 bp, Canis familiaris
  misc_feature (1)..(211): n = a or c or g or t
ttattagaaggaaattctcaggagcaaaggccagataattcaaacagnnntaagtttatcaccatctttgnnnnnnacaagaatattcatggcagtgggtattcctcaaaagaagtcatttcagaaactgccaagcccagtatttccaaacaaggannnaaaatgctggcgaaggtatcttcagctctgtcaaaggtgttttctcgaacta

SEQ ID NO: 5113 - DNA, 435 bp, Canis familiaris
  misc_feature (1)..(426): n = a or c or g or t
atgaaattttcaggttgcattnnngattgaaacnncatcatcanacttgtgtnnnanacagagccattctttctatcnnngctgttaggaatatcagcaaagaagtagcccaaaaggctgttgatgaagtttttgaatcttgtttcaatgaccaggaaccttttggaaggatcccacataacaagacttatgcaagatatgcacatagagactttcaaaatcgtgatcggtattactcaaatatatgnanacaatgacattttatattacggagcttctgtgatcatgaagaaaatatggttcttaagtggacaaacatataaaatataaatgatcaattaaatagaggtaaaacacagaagatactgattctagcatacgatcagaaaaagtaactgtggtaaaagggaaactgccttaaactcnnnnncaaaa

SEQ ID NO: 5114 - DNA, 500 bp, Canis familiaris
  misc_feature (1)..(500): n = a or c or g or t
actgcctnnagaactgccctgtctgtacacagcaggcgtcaataaatgctgaataacagacaagttacagaaagacaagataggcaagagaaggagacacataggcacttgcacaacgtgatgactaagactgagtccagattgcagagcctgcccgccccctaggatgttatttagatcaagtttagcttttagagtctaggtctggttaattgccagggtggcaaagaatcgcatgcatcaatataagcaggagtccaaatgcattattagtcgaagatcgaacttcacatgtagagatgaagtagctgtaagctgcatatttacgctgggaaatgactaagtggatgactagtataaaagtcgttgtccgttacgtcacacctctcatccgcttggaacatggaactttcttctaaactatcagccattggggtcttgttcactacaagataaattcacactccaccgaactttnnnnntgttcacaacttgacgag

SEQ ID NO: 5115 - DNA, 521 bp, Canis familiaris
  misc_feature (1)..(521): n = a or c or g or t
ccaagggaagcagaagcncttcacacagagnngtaggctctacccacctaaccacatggtgtggggagtatcgagggctggctcggaccacctgtgaggcaggaaagaacacaggcaggtgggaagtctgtctgctgtccctgggccatgtcaggtcataggaagggacatgtcccctgcattccttcgccaggagagaagctggagaatgggagagctgagccttgaatcaggagacaggctgaactctgggcttatcacaaaccccaaacctctctgtgttctggctccctcctctgtcagaagcctggtaccttaccggctacctcgcacgtggctggaaggacacaccagtgtgcaaagtacttggtaactagaaagtgccttcaagatgtgaggaggcggggaaacctgggtggctcagcagtttagcgctgccttcagcccagggcctgatcctggagacctgggatcgagtcccacatcaggctccacgcagggagcctgtgcctgtgtccctc

SEQ ID NO: 5116 - DNA, 613 bp, Canis familiaris
  misc_feature (1)..(613): n = a or c or g or t
tgtgtntctgttcctgtggtnaggagaaatttcagtggnnnncttttcatcatgtaaaatatgtgaacgttagntatcgcagccatttccatgtatcccattgggctttggcttcctctgagttgttggtctttcatccttagagtcattggttaccttttcatctttgatgtcagttctgattatttggcatcaaaagccttcatggtaggaagagttttaggtaaaagtggatccaagaccactgtcttcttattgccacttccctacagaactaattgagagacatgtccttgggttaatttgtatctgatcttatggtgccctgccttctactagctgattcgaaatacagaatgtgaagagtgaacatttattcatctactcctttggctactagaactcatctgcagtcctttcttactcatactgaatcccgattctacttctgcttcttctaaataggtcagagcatcccatttgtctattgctgagctgtagaactgtttctctcctgtaggtataaagcagagtgtgtgggatattcagggaacccaccctaatgatatattgccattctctgggaaaggttgggatcataagtatttctgtg

SEQ ID NO: 5117 - DNA, 532 bp, Canis familiaris
  misc_feature (1)..(532): n = a or c or g or t
agcctcaanntgcgctcctgcgataacatcagtgacacgggcatcatgcatctggccatgggcannnngcgcctctccgggctggatgtgtnnnnctgtgacaaagtgggggaccagagcctggcttacatcgcccagggcctnnacggcctcaagtccctgtccctctgctcctgccacatcagcgacgatggcatcaaccgcatggtgcggcanntgcatgggctgcgcacgctcaacatcggacagtgcgtgcgtatcacagacaagggcctnnngctgatcgctgagcacctgagccaactcaccggcatagacctgtatggctgcacccgcatcaccaagcgcggtctggagcgcatcacgcagctgccctgcctgaaggtactcaacctgggacncnggcagatgacggacagtgagaaggtcagggattgctctgattttgcctggtggagttgcctgtgccaacccagcacacttggtactatgtaaagtcgagtcttccaggtgcaagtaagcttgagatctt

SEQ ID NO: 5118 - DNA, 600 bp, Canis familiaris
  misc_feature (1)..(600): n = a or c or g or t
ggtnntccatttcaactccagnnnaggtcgctcntgtgtttngtctgatctggtgcttcctgnggtgtctgtctctgcctnnngggtctttccacacccccagcctcctctctctgtactttggccaatggggtgatggtggtggtgcagaaccacttggcttctcattcctattagagaacatcccgtcttggtctagatacctttctgaccttttctaaaccagaccctactcctccttctctgagtctgagctcatcatatcttgagattcctgttgtctccagagaatcttctcactggggacagaactagctatcttcctctgccacaacccccagcccctaggcccaccatgaaaccactgggttctaggtcctggttgctgactctagaaccttatcactgtgcttcctggtcctttgcccctggtctagaactgaacccactaggttctagaactttcatatttacctcaaggctcttctgtccttaagctgtgccctgcccccagctttggtgaaagggaggggcccttcatgtgtgctgtgctgtgtctgatgcacttggtnnnnnnntgggagggggagggcagaatgg

SEQ ID NO: 5119 - DNA, 541 bp, Canis familiaris
  misc_feature (1)..(541): n = a or c or g or t
accctgtctgtnnncgtgactccngtgcaggcggnnntcttgctatacttccaggaccaagctacctggancttnnaggagctgagcaaggtggtgaagatgcctgtggcactgctgcggcggcggatgtccgtgtggttgcagcagggcgtgctgagggaggagcctgctgggaccttctctgtcgttgaagaggagcggccccaggaccgagacagcatggtgctcatcgacagcgacgaggagagtgactccggcatggcttcccaggccgaccagaaggaggaggagctgctgcttttttggacatacatccaggccatgctgaccaatctggagagcctgtcgctggagcgcatctacagcatgctgcgcatgttcgtggtgaccggccccgcactggctgagatcgatctgcaggagcttcagggcttcctgcagaagaaggtgcgagaccagcagctcgtctactcagccggcgtctaccgcctgcccaagagctgcagctgatgtgcccaccgggaagatgggtgggtgggtg

SEQ ID NO: 5120 - DNA, 612 bp, Canis familiaris
  misc_feature (1)..(612): n = a or c or g or t
ctctcagcgcccctnnagntgggtagtttggtgaatggggtttcatanaccctccagccctcatccctcccttctccatctcgcttgctgcccaacaccatggccctcacaggcccgactgacctgcgctggagctgctctttatctaggggggaggggggtggcacagcagcttgggtcccccctcagcctccaggagctcgtggaggggtgtgtaacagggtcatacccccttcctcttgtccgccctacccccagggtgaggggagcctctctccttccccatcagactggatgtgcctttatcctctaatgccccaatctctctgaacacccccgttctccgcctgctggtgcggggtgctccttgacccacccagatttgacagttcaggggggctcccctgctatccctcctcccatcctgtaccccccatttctggggcctcatcactgtggaagacggggatagtaagggtctaagtgggtgggaggcatggggaaggttttggagtagaaccaggggtgtgtgtgaagggggnnncaaggtcccccgggggagggggaccaaacttgtctggtggatgagaaggcgtatttatttttcactgt

SEQ ID NO: 5121 - DNA, 422 bp, Canis familiaris
  misc_feature (1)..(422): n = a or c or g or t
acaagagagnaggtgagacagattgatagggaaaatcagaggcttttgaaagaactctcaagacaggctgaaaaatcaggaagcaaaagtacgattcctagaagatctattgttcatccccctaagttatatcatagtgccctcaacagacagagggaacaacaaaggattgaaagagaaaatttggctttattgaaaaggcttgaagctgtgaaaccaacagttggtatgaaacgctctgaacagctgatggactatcatcgcaatatgggttatctcagttcattaccgtcctcaagaagagtgagatcaactcttggccagtatagccccttgagaggagcttctagaacatccagtgctaccagtggtctcagttgtaagagtgancgaccagtttttgacacatccagtggcctgtt

SEQ ID NO: 5122 - DNA, 569 bp, Canis familiaris
  misc_feature (1)..(569): n = a or c or g or t
agtacnnnnntacagctctcaaagaaagtgnnnaacatagagacaggctgggccttgggggccacctttcacctgttgcagtctctgggcatctcccactgaggccaaccccccttcttctaaggacttcatttgccaacaagctttttaaaagtaaaagaagaaaggactcagaaatgttctgagctagtctgaggatagcctggactgaagcccaacagctggattcatcaggtagaaggggcttttggacacaggtcttgtccttgcatctagaaatttgggtcaaattaattttatacatctaatgtgaactgttgatctaaccactctgcttgcacagctggcaccagagtctaaatctttgagattctttgtgtgtcacagagccaaaatgaatagctttgaaacttggagaatccaaggactagtccctgggaaccaaagaaaaatctcatttcagccctttgagtgcctcattcctttgaacatactaattttcctcttacatgtgaaactaagcccactgattgctatcccatgacctgtcaacaccagtatttttctcc

SEQ ID NO: 5123 - DNA, 578 bp, Canis familiaris
  misc_feature (1)..(578): n = a or c or g or t
ggcctagannagccactncnctnngnntcttgnnnctgaggctctggggacctgctgccccccaccgcggggtgaggaaaacaacttgggtctgagaacccagagtcaggatgtggtctgacctcccccaggcatctagttccctgtttgacggcggccgaggaaacctcccaacacactctcagttatcagtggcccgaatcagaggctgaacagctctgcccacccctgggtgccgaggccgtggtgtcccagcacagaccaggccacagtgctctgtgcttagcgctcctgctggattgaccctcagacgcggagggaggcacacacagcctcagtcttcctctggaacccccttccctgtgtgcccggtcctcatgacccacctgcccacttggggccttgccccttccaccccacccttctccagggacccttctctggccacatcacccccatcccttccaggccccaggtcgggagcagcaggaggaaggggaggggctgggcctcgctgctcccagtggttgacaggacaacactgtggggagctgtcgcctggaagggctgccggcatg

SEQ ID NO: 5124 - DNA, 572 bp, Canis familiaris
  misc_feature (1)..(572): n = a or c or g or t
catgtcagttgggccactgtcctgtccctgtgctggtgaatggtaactccagtttcctgggtcctgtgaatgtgggtgacaaaatcacttttgagtgcaatgagcactatatcctcaagggcagcagttggagtcagtgcctggacaaccacacctggatgcctcccttgcctacctgcaaaagcagaaactgtggccctcctgagaatccagctcatggctattttgaagggggagatttcagctcaggatctaccattacttatcactgtgaagacggataccacttagtgggcacacaggaccaacagtgcattgatggggagtggaacagtgcacttccagtctgtaaattgatccaagaaactcccaaaccgacttcacagactgagtgtgagaagacaatttttgcctttcagaaggacatagaatattgcaaagccatagaagactttatgcaaagactaaaggaaaatggcttaacaatggaggagctaaaacattctctggaaataaagaaagctgtgttgttggnnnnnnntgtcctgacattgtagctgagcagactgggt

SEQ ID NO: 5125 - DNA, 175 bp, Canis familiaris
tgctggcggggtgcctcccaacacaacctgactggatgagcattcatcctggtggccacattctctgggttcctccaacctgaagacaagcggggaaatccagaagaaaccagaggataccatggatgtcccaggtgtcccacctgcatgggatggcgaaggtggttgtggatat

SEQ ID NO: 5126 - DNA, 348 bp, Canis familiaris
  misc_feature (1)..(348): n = a or c or g or t
agaattnnnnnnnatggatccattttcnnagcctttannnnnacctactnnnnntcggttnannncagnncaaaggttncnnnnagaagggaatatagaagaagctgaaanncaaaagcagaggattgnnnnncnnnagcgagagannnnncgggtcttggaagaannnagcgtggagnnccagcnncggtttttcaggaaatccagtgatgactcctgggtgagcaatngcacctatttagaacttagaaaagatcttggtttttccaaactggaccatcctgtcttgtggtgaagaaggaaagannnnnnatgcacccttagacttctcctgtgtttgctttccaa

SEQ ID NO: 5127 - DNA, 410 bp, Canis familiaris
  misc_feature (1)..(410): n = a or c or g or t
tcctcttcctcttcttcctcttcctctccttctcctccttccccctcctcctcctcttnctttctttctttctttctttctttctttctttctttctttctttctttctttctttctttttcttcttcttcttcttcttcttcttcttcttcttcttcttcttcttcttcttcttcttcttcttcctcttcttcttcataattttgtgaaagaggttaatgttttcccacagtaagaaatttcaaagttttttgttacttttgaaacttatgctgtggtttttccctgagtcaatgaagtagaatttacaaagtcaactttcttcttgtctggccattaatgtaatttgttggatgcatgtttttcagccaaagccttgtttctatttcttgttgatgtgtacttttgct

SEQ ID NO: 5128 - DNA, 644 bp, Canis familiaris
  misc_feature (1)..(644): n = a or c or g or t
cntgcagacccatcnatcntcacagtgttganngccaaatctgtnngtcctggagtngctgttgctgattttgtcatcttcccgnntcgatggggggttgctgacaagactttcaggcctccttattaccacaggaactgcatgagtgaattcatgggacttatcaaaggtcattatgaggcaaagcagggtgagttcctgccaggaggaggcagcctgcacagctcaatgaccccccacgggcctgatgctgactgctttgagaaggccagcaaagccaagttggcacccgagaggattgctgatggcaccatggcatttatgtttgaatcttctctaagtatggccgtcaccaagtgggggctcaagtcctctagttgtttggatgagaactactataagtgctgggaacctctcaagagccacttcacccctgaatccaggaaaccagcaggacctaactgagactggagcatttgctgccaaaattgaaaatggatctgtgtggttttgtttagaatttcatgccctctggtagtatggggtggggggggggtggttaaaatgagaactcattttttcacagtcaagtaattcagacatttgtcgaaatgtatttggaaagttcagttctgtgtcagctt

SEQ ID NO: 5129 - DNA, 581 bp, Canis familiaris
  misc_feature (1)..(581): n = a or c or g or t
acagatgaaaannaatcagctgtttagatttagaaatctactcttgnnggtctttgtcagttgcatgaatatttgagaaatatcttaaaacnngaggcaaannncgcaatctaaacgatggtagcctttactaatgtgtatggaaaggtgttcctcattacctgatatttaaatgtgttacaatttttggatttttttttgttgttgtcattaaaaaagacaggattataaagagatatcaaagcacgattttagataacttaaatggcccaacctatatgaagttgattatatctcgatgtctgtaaaagattgctgtttttggagtcttgaggtcnnnnnnnnnnatttcctgctttctttctttacattttttttatttgagtaaaaatacatttgttatattccttttagtgtaagtttctatttggacaattttatgggaacatgtgcattctgtatgtgagcttctatcatattcctgttgttttatgagcagactcttaaggaatttattttatgatgttgtgaagttactgcttttnnnnnnttcctttctcttttatttcatatttgcattt

SEQ ID NO: 5130 - DNA, 643 bp, Canis familiaris
  misc_feature (1)..(643): n = a or c or g or t
ggattcaaatgtngactnngtcttgannngcttttctctantgtgcttngnagtgannngtttcattaaaaatgnngtcttttattagntccaacactagntnnagntgaattaatcgtgtgtagcacagtgcttttgcagtaagattgctgtgaaatgccaaacactgtggattttgtagtcaggttaaatggtcgaaggatacctacctaccataagtattatattatgtatttgatcagatcatcttcttttctgttcctattcactgaacatttaccttacctaggttacagttttagaacagccaaagttcactgatgtcagttagtcctaatctccacactgggccccatatgtgagacttgtttgaattttggtagattggaggatgctagttattatttcactgaagcattttggatgagtgcagctctcataaaaggggaataagactataatttggaagagaattaaatacgtgaatcctcctttaaatggtgctttttgtaacctttaagtgctgaggtacagagctgcttctcagtattccacaaaggattggcatacaagaatggattttaaagcttttccccaaatgtaatttgttactggactatgtgatgtaacacatacagaaatg

SEQ ID NO: 5131 - DNA, 619 bp, Canis familiaris
ctgcttccaacggtgagcaggggtgtatgtcagatgtggcactaccacagcttcgggcagctgccctgattagtcgtggactgcaatgggtagccagtggccaagacaccagagccctacaggacttcctccttggtgtgcagatgtgcccaggtaatcaagatgcttcatttcacctgcttcagactctgaggaagatggatcggagggatgaggcctctgctctctggtggaggctagaggcccaaactaagttgccacaggagaatgctgcatggtctctccccctgtacctagaaacctgtttgggctggatttgttaccctgaccgtgaaacccttcttgaggaatttcggacatctctgccggagccttgtgacctgtagctgccacattttaaagagcctgagctggggctccagtgacccttttctccatggggagggctttctgctttaccattcttggggaatgtgggtgaaactaatcattcctgtataattctggcattggagagattggtagtagtcctgcaaaatttggcctagttactgccattctggttccagaggaagcccctttgtcaccaaaaaagcattaactttgcttatgacacctt

SEQ ID NO: 5132 - DNA, 657 bp, Canis familiaris
  misc_feature (1)..(657): n = a or c or g or t
gactgnnntgaagctgaaggctttatggtngtctgacaaccagtcccagnntctgctcacattccagacggacacagaccataccactnnagagaagattttgacctgtgtcttgcttcctcagctgccttctgaacccacttgccaagagaacctgcctcgctgtggggcactggagagcttggtgagcgatgtccccgatgaggcctggaatgagcgtgcggtgaacagagtcagtgcaatccgatttttggaagatgagagagatgatgaagacaatgaaacgaggacgctcctgcggagggccaccccgcacccaggagagctgaagaacatgaagaagaccgtggagaatttgcggaacgacatgaatgctgctaaaggactggattcaaacaaaaacgaggtcaaccacgccattgaccgagtgaccacttctgtatagaacttcacctccgaattttacctcccgtgtctccccctgctgtccagacgtccccgtctgctggcctggccgggagcctggcgcggcctgggtcttcccgcaacgcgggcacctgcgcgtcgctgccccgggcccgggccgcttgctgggccgctgctcacccacggaagtgccttatggggcccnnnnnncgccgggagccgccttgtccc

SEQ ID NO: 5133 - DNA, 567 bp, Canis familiaris
  misc_feature (1)..(567): n = a or c or g or t
cagagcacccatctgaaggaccacnggcgnntgcacacaggcgagcgacccttcgcctgtgaagtatgtggcaaggcctttgccatctccatgcgcttggcggaacatcgccgcattcatacgggtgagcggccctactcctgccctgactgtggcaagagctaccgctccttctccaacctatggaagcaccgcaagacccaccagcagcagcaccaggcggccgtgcggcagcagctggccgaggcagaagctgctgtcggcctggctgtcatggagactgcagtggaggcactgcccctggtggaggccattgagatctatcctctggctgacgagggggtccagatcagtggctgaccctgtccccattccctcttcagcactattgtgccctgttgctgaagaacctcctccagcgtccctttcaatctctgtagatactgtgccctttcctccacctctcctaactgccatgtaagttctgtaactggatttattctcccgagagggggttgatctggggtctttaatatgcataaaaggcaccccaccccctgaccttcc

SEQ ID NO: 5134 - DNA, 435 bp, Canis familiaris
  misc_feature (1)..(435): n = a or c or g or t
caaagattccgactgtaaggaggagctgctgagagactacagctccgagcagggcagcgccctccccgatagcaaagacaagacgcctggcagacaccgccgcttcacgggtgactcgggcattgaggtgtgtgtgtgcaaccggggccaccatgacgatgacctcaaggagttccacacgctcattgacgacgctctggatggacccctggacttctgtgacagctgccacgtgcggtccccgggcgacgaggaggaagggctctgtcagccctccgaggagcaggcccgagagcccgggcacccccacctgccacggccccccgcctgcctgctgctgaacaccatcaatgagcaggactccccaaactcgcagagcagcagctctcccagctagagcaggccctgcctgcacctgngaacttggcagagcaa

SEQ ID NO: 5135 - DNA, 441 bp, Canis familiaris
  misc_feature (1)..(441): n = a or c or g or t
aaattccctgaggtcagtgcaagaaaagaaagcggaagagagnncccgcccttctacgcccctgaggtcagctcacgagaacctcatggaagctattcggggaagcagcatcaagcagctgaggcgggtggaagttccagaagctctgcgataaaaacatgatctttagaagaggatgaagaatcattcgatggtattaaataagatgcattgtgagatgtttctatgatcccttcttcaatttganatgtttcctgactttaataatagccttacccgttaatcccagaaaagaattttaagaaacaatcggcatgtttcttctgtaaatatgaaaataaactactttttttttatgttatgagatttgtgttgnnaaaannnggtttatttaaagannnncttatatctctggatatgctgataactccgagctgtaat

SEQ ID NO: 5136 - DNA, 502 bp, Canis familiaris
  misc_feature (1)..(502): n = a or c or g or t
aaaggaaaacccagatagcatttgtattttatatncaanntatcttcactgtgctgatggtngnaatagnnnnaaaaagtaggtnnagctagancagcctatgaggcttgtagtaaaaggaattgttaggctgaaaacacttttgccatcactccaaggtcaggatcttaccctaccactgtttcagaagaccagtcagctgtaccaattgatgagaatgttagctctatacagctctctttggtattcatattcacattcaccactgctgctttcttacaagtttttaacatgcaagcagtctagaatctttattcttagtggaccaaacttaatgtctgtgacagacataacctcttagaaactggaaaaatccgtcattactagtttggtccaaatccatagaaaaaaaatcccactttcctatttaaaaattctagtattaagctgtaagcaaaagagaaatatgagcccctgggcaaagatacatgtaatcctgaat

SEQ ID NO: 5137 - DNA, 561 bp, Canis familiaris
  misc_feature (1)..(561): n = a or c or g or t
agtaggatttataaagcattttttcagactttcacttaaaaaaatattatcacatganatgaataagaagactggttagacagttttgtagatctttttggtgctgaactatgacatgagccttatagactgtaaaatagagatagttggaactaatgtacagaactaaattttttaaactttatttgctgttaaattctgtgaagtttcagttatctaaaataaacttacacaaacatgaactgtaatgtttcaaattgcaaggtaatatgtaatgtagtgtttgtaaaatactcttgtctaatattaactagtggtattttgatttgtacagtccatttgttaaaatgacttcattttaacatccactgatgtagattaataatgtaagttcacatttaaagattaatgggaaaatggtgcatgtaatactttcacaagtattgggagtttggtatgttttgaaaagagtaatttaacttttgggtgtcaggaaatgggtttttctcaaagtccattgccggcaatgggcaagcctcgtaatattggcacagagcatta

SEQ ID NO: 5138 - DNA, 575 bp, Canis familiaris
  misc_feature (1)..(575): n = a or c or g or t
taaaaagaaaaaatacagagggaanncagttggtnntgcatctannntaaannaagnngaagacaaagaannngagggagaagaagaggatgaggatgaagatctttctaaatataaattagatgaggatgaggatgaagatgatgctgatctctcaaaatataatcttgatgccagtgaagaagaagatagtaataaaaagaaatctaatagacgaagtcgctcaaagtcccgatcttcacattcacgatcttcatcacgctcatcctccccctcaagttcaaggnnnaggtccaggtcccgttcaagaagnnnttccagttcgcagtcaagatctcgttccagttccagagaacgttcgagatctcgtgggtcgaaatcaagatccagctccaggtcccacaggggctcttcttccccacgaaaaagatcttattcaagttcatcatcttctcctgngaggaacagaaagagaagtcgttctagatcttcttcatctggtgatcgaaaaaaaagacgaacaagatcacggtcacnnnaaaggcaccacangnnnnnttctggatcatcccnnt

SEQ ID NO: 5139 - DNA, 549 bp, Canis familiaris
  misc_feature (1)..(549): n = a or c or g or t
tgctctgagacgtacgagactaagactgcgctcatcagcctgtttgggatcccactctggtacttctcccagtccccccgagttgtgatccagcctgacatacatccaggtaactgctgggcattcaggggctcccaggggtacctggtggtgaggctgtctatgaagatccgcccaaccgccttcactctggagcacataccaaagacgctgtcgcccacgggcaacatcaccagcgcccccaaggacttcgcagtctatggactagaagatgaataccaagaggaagggcagcttctgggacagtttacgtatgatcaagaaggggannnnnnnncagatgtttcacgttccaaaaagacctgaaggagctttccaaatagtggaactgcggattttctccaactggggccatcctgaatacacatgtctctatcggttcagagttcatggagaacccatcaagtaaagactcccctgtcagttcttgtacatttgtatatacgaggacagcctcaaacactggaacccttcccgcaccagggcacc

SEQ ID NO: 5140 - DNA, 524 bp, Canis familiaris
  misc_feature (1)..(524): n = a or c or g or t
aagaaacnntgccnnnnnngggatnnnnntgttttnnnnngtgttgccatcccaggcttgcgataggggcttnnnnnnncattgtgatgtctgggccatatttggggagtcccagccacctgccccagccatggactagccacccccttgaaaannnnnncatttctttnnnatgatccaaggcacagnnngcatcacttctcaaaaccccgccttcaggggctgtgatgatagcacatgcatcagtgannntatcnctgggctgcctaccctaagccnacttctcccacagtcctgtgtaggnnnngcataaatgggatgnnnnngagcccttgtccccaaagggccggccaaggnnngcccgnnngcctggcttcatcaaccctgcgtgnnnnnatgatannnggtgggnnnngcaggctacccaggcnnnnnnctacctcccaccttgccagctggcaagggatgggcccttttctgtgaattgactacctgtggaaatgtgaccaattagtgtgaaangc

SEQ ID NO: 5141 - DNA, 695 bp, Canis familiaris
  misc_feature (1)..(695): n = a or c or g or t
ttctgctccctgaagctggaacagtgccactcagaggccatcntgcagcggcagctgtgtgacagctcccacaaaacacccttcatcagccccttgctcatagcccagagcatgtccatcggtacccaggtaggaaccccaacatcaggccgcttctacgggctggatatgtatggcggactccgcatggacttctggtgtgcccgactagccaccaagggctgtgaagatgttcgagtgtccggctggctccagacagaattccttagcttccaggatggggatttccccaccaagatttgtgacacagactatgtacagtatccaaactactgtgccttcaaaagccaacagtgcctgatgagaagccgggaccggaaggtgtcccgtatgagatgtctgcagaatgagacttacagtgtcttaagccaggccaaaagcgaggaccttgtacttcgatggagccaggaattcagcaccttgactctaggccaagctggatgaactcaggtccatgctacctccaccccagccctaccttcccacattctccattgcctttagaccccatctgtcagtttgctttcctggctgccacttgtgggtctctcaccttgccctgactcacatttgccttgggttggagcagcagtcccagagaggtccatgatgggcactccactcgccttaaagga

SEQ ID NO: 5142 - DNA, 488 bp, Canis familiaris
  misc_feature (1)..(488): n = a or c or g or t
atcgnntctcaaaatctgaagacaaagccagatcggagnnggaatatgcactgtaaatcacatttttcttatctaccaagattaatgtcaaaataagctttttcttctgttgaatctgattaaatgaatataagtatgtttgtggtttttaatgtatttattgatgtgctttgggagaaaagtattttttcttgatagaatttaccaaagcaacgctgtgctgttcacaggtcaatgagaacggggtttttgtctgattctgtgaacacacgacttcactgtgcaaagggcgagtggtccgtgtgcctcctactgtgctcacttcgtaaaggacagtgactggcttcgaaggaggtagaattcattctnnnnnnctgaggtcttaaaaaaaaaataaaagtattgttcatttcctcttttgttattagtttgcatggttattggcatccactttggggtgaatgcttccggggacttttgtcactaaa

SEQ ID NO: 5143 - DNA, 598 bp, Canis familiaris
  misc_feature (1)..(598): n = a or c or g or t
tgaccccatcgtcatcnncaacacgcatcnnntcntgaaaggcgactataaaacaccagccaatctgaaannatattttcaggtgaaccagaacagcacctcctcccacttannnngctcatgatttccagatctctgcagattgttgctgagagaagacactttgcattcgagtggaaatcggacctctaatccaagcatattgcttgctattcaccgccaaaacaggactgctaatgaggaatgtatttgcatctgtttgcaaaagctgaatcactgacagcttacctggagactccctccctacctttgggcactcctaggggtggagaaccaagagtgtggcagtagtccagcttttgaaatttaggtattttttaatctttcccctcaagaacttttttttaaagaaatggatttgccatttttcttaatttgcaggactgccttggtggctttgtttgcggggacaagacccacacctgtgcctctcctattgacccttttaaattcaaaggatctatttaagaatttaatatatgagattttctttgattcttcctcggttctactcagattcagagggaaaaannnnnnn

SEQ ID NO: 5144 - DNA, 695 bp, Canis familiaris
  misc_feature (1)..(695): n = a or c or g or t
gaatgctatcaagaagannnaaattccaanntggtcagtnnnaaatgactagaaatacaggcttttaggagtttgcatcttttagctatatttgcaaatactgagatttaagcagctgagaaacagcaaagttgactaaattttttatattcttgtcctcacagttttttgattctttctggattgatgcagtgatgtttttgttccttccgtatttattaatgaaacacttttttagtgtttctaaacataaaatctacttggtttgaaatcaagtggttggaacacaaattttgacttttattttaagcatgttgatttgaggtttcatttaagaaactttcagtcaaatggatcagtttgattctgtaattagcacacggtacctaatgtttcggtactgttttgaggaccaatgctcaaagtggattttgttcttgaacagtgtcccagtagatttgatgacatttgttggcttgaggtctgatttttttttttttctaacagatttaagatttctatctaatgttgaaaaactgcacaaatttgtatggaataaagcctagaaaaattaaagctagattaaatagtaattgaaattaatcctagtgtgtatgatagaggagggaaaattttggtgccataatttctctcttcatggtgttggacttaattgaaatgtatttctgtatcac

SEQ ID NO: 5145 - DNA, 557 bp, Canis familiaris
  misc_feature (1)..(557): n = a or c or g or t
cacagcgtnnaaaggctggtnnngnnnctgggctnnagagaagagctgcaggacctcatccagcaggaaaccgaaaagctcgatggacgggacggataggatcatggctggtcccccacccctcctgggaacagaaacggttccaaggagtcactgcccacctctgagtaaacaattttggctgaaccaggaccggtggcctgaggaagagtgtgaggctgcccaagtcgtgttctgctcacgctgtgggccaccccaatcatgggtgccaagctgccggcatctttctgctgtttgactcttcaatctgaagctcttgatgccaaacaaaagctttcttctgacagtgaccctcttgaactcagaccagcaggaagcccagactgaatctgctcagtgtccaggtctccatccgaagggcagactcagcctctgtcccttagacctggtcttgggctgagtggccacagctgttcccaaggcgtggtcctgggtccgaagtaatacaatagggtcctatagcctgttggcctcttttgtggggttatctttaatta

SEQ ID NO: 5146 - DNA, 543 bp, Canis familiaris
ccccccccacacacacacacaccatgctcttgccctcagtcaggtcaaatgagagcagtggctctgcactgaggcagttgttcagctcaaatgggggacaggtgaagatgtggcatgagctgccagtatgttcacgtggcacacttacctataggatctcaggaaccgagtgtgccaagttagaccgcggtgtattgtccgcggtgctctgtcatggcataagggctgataaatgtgaaataccaggcaagtcccaacagaagtagtgatcgctaaccctgggcggcccaatgcctccggtttcttaagatcaaaggacttttcatctgtagttaattctcagctatgtgtacaagggaaggagccggcacacaagtttccccaaacactatgtttttagttaggggtgtactgtatttaatgcctattttggtcacaccatcaggtcaacctcctgagctgttggtctcaggcttgtggtaaagcagtttgtccatatcctggacccctagcagcctcgtgtaaggggagtggcccaccagt

SEQ ID NO: 5147 - DNA, 633 bp, Canis familiaris
  misc_feature (1)..(633): n = a or c or g or t
gaggcccccacttngcaatggnntcacgcaatgacagtgaggnnnnnnnnatgagagaaacaaagaaacgagcagtaaagggcaacacaagnaagctgggaaggaggcccntggcccgctacagtaagagaagnntcctggannaagccaagcgccatggccagggcctggctacagatggaatcgggggtcaagccccagtttctgctcaggcctgagaactttgttcgacgggacattcaaacaggagatgacaccaaattcgtgtatgaggatggggttgaagcagaagaggcctgtttgtggggtctagggggtaatagagcagggacaggctcagcagagaagtggcctccccaggttgggaatggggtagaaaagcaggatgggggactatggtctcccctcctatgtacacttcctgctgtttccagctcttctgtgttgagcacactcctcggagagacaaacactcaaggcttcagcactgacctttactggctgggtgcctggcaggcacctaagtcagcagagatggagggagatactgcttgcagaatactgcaggcacaggggaagtagttcttaaacatggatgtgagcatttatgctggagtgacttttaaagttccc

SEQ ID NO: 5148 - DNA, 497 bp, Canis familiaris
  misc_feature (1)..(497): n = a or c or g or t
ccccacccnncccctacccgcagnntcaagctcctccccgagcccccacccagctctagtagctctccgttagggtnnagggggaatcatgcccaggtgaggaggctgtcttcatttggaaagaagagaaggattccngaggtgtttgaggaaaaagcttccttgagcagtccttccctgcaggaatgcctcaactcttcctgttccgctgcttttgtcgggcctggaggccaggatgcaaaggagaacctcccagtccagcctcccagctgtgggtcccatgaacccctacctgcctttcagcacttggatgaacacagacccactgatccttctgtgtagttttcctctctcagacacacacatgcacacacacacacacacacacacacacaggcccacggatgggcagacacacccagagccccacccacagcatcctgtgtgggaaagaagcacaggccccctggccaagtccccgcccctgctgcatgcat

SEQ ID NO: 5149 - DNA, 575 bp, Canis familiaris
  misc_feature (1)..(575): n = a or c or g or t
tacatcaagaattcaaaccnggcactcaatgataanctnnngaaggggctcctgaaagccctgaaagttnnagacaannacttgacatcccccctcccagaagaagtggatgagaccagtgctgaggatgagggcatctcacagaggaagtttctggatggcaatgagctcactctggctgactgcaacctcttgccaaaactccacatagtacaggtggtgtgtaagaaatacaggggattctccatcccagaggtgttccgcggagtgcatcggtacttgcgtaatgcctatgctcgggaagagtttgcctccacctgtccagatgatgaggagatcgagctggcttatgagcaagtggccaaggccctcaaataagtccctcctgaggctccgtctctcctctccattttctccacaaagacaccagctggttttcacgtggctacccaaaggacacacttcaaaatggccagtgggcagagaatcctgaagcgcttctacagggctggctggggggctggaggggatgatggggaatctaggtaagatttttattgtggggtggtgcgggt

SEQ ID NO: 5150 - DNA, 544 bp, Canis familiaris
  misc_feature (1)..(544): n = a or c or g or t
ctttcntgttcactcacaccccttnntctgccctgtgcagcctccccatcctgcctctaacctcttccttccgttgccctacagggcattcacatctcctactcttgcctcttagaccacagatacttccatgcccacatccatgcttatgcatttagagccatccatgttcccaaatatgacccttcacttgggagcaaccacctacggacaggcaacttgacagacatgcacagtcaccagcaggtttgcagtgcgtgcactcacacacatgcattcttgtggttcatttgcatgggcacatgcaccctcccaaccatgcagaaccctaccgtccaggaaggtggggaccctatgggagccagccctaaactccattcacaggttgcagctggccccagactagaattgtctcccagaaggtgagggccatcccttggaacctctgatctccttgcttttccccctctttccgggtgctccctgggttattaggcctggatctgctcagccaagcttgtttcctgctctgaggtttgggggc

SEQ ID NO: 5151 - DNA, 671 bp, Canis familiaris
  misc_feature (1)..(671): n = a or c or g or t
cttcatgtcattgtgactgttacttccagaatgctaggattaaataagccannaacaccaatgtnnntanntaaatcattatacttaggtattttacaacacctacatcattacaagtgcccaacacagaatgtattgctttagaagcagtcattggtaagatgaaaagaatacaaatgaaatgacatttgtcatttgaagttctcatttaaagcactgctatcattcctgtcattaaaatttatagaaaagccacattaagctcagattcacaagaagatggggaagcagattaacttctggtgtttgttagagtggtcatgttaagggagcatttaaaccacggacttgctaccgctgtagccagcaaagtggcttgtgggtttatctccaaactgtgatgatcacagggcagctatcagtgaatgagcaagttaatgtatacttactctatcacatgtttgtacagagcagggtgtgtcaggtgaggacacctgagctcctggccagctatgtttcacatacaaggttaggtcagaccactaaggggaaaggttgggcctctgtcattttgtgaggagcagtctgtgaactgtcttcactgcctggtacaccgagagcacaaactgtgctagctcagacctattgccacactgctctttgctgtattg

SEQ ID NO: 5152 - DNA, 658 bp, Canis familiaris
  misc_feature (1)..(658): n = a or c or g or t
accccagaggtgaagcacttctgccccaacgtgcccatcatnnnagtggggaacaagaagnacctgaggcaagatgagcacaccaggagagagctggccaagatgaagcannagcccgtgcgatctgaagagggccgggacatggccaaccggatcagtgcctttggctacctggagtgctcagccaagaccaaggagggggtgagggaggtattcgagatggccactcgggcgggtctccaggttcgcaagaataagcgccggaggggttgtcccattctctgagaccactgaggcctcccctgttcacccccccccttcatgggggtgcagaagctccccacttcctggccccacacttgttgaaggaaggcttccttgtcattccctccagcccaggactgcatctgagtttcccctgccccaccagaccccagggtggtggtaggctggccctccctgcccttccagagcaaagtcccttgtcctgttgccttggtccaggggtgaggctcttgatccctcagccttccccagaggatcatcacacaccagcactttatatactttgggctcacaggagtgtctggggtaggggacttggagggtgtatgtcacccagagccccgggtccctggcatttatgctttggttgggg

SEQ ID NO: 5153 - DNA, 543 bp, Canis familiaris
gcataagtgaaatataaacagcttgaacttgagtcagctaaagaagagaataacgaattgtagggaacaagaaaatgtgttcagaatgagtctggcttgactctattgtccatcagttcctggtaacctatcttcatttgacagttcttgggaggccttcacttccagactaaaccagagtatgctggaacggagccatcctatcttcgtcttaaagtggtgcatttgtctctgtatatgactccttcctctggcagaagaagccccagtgtagctttggagctgggctatgaaggctggcagtacaattgtcacgcaagccgccttgtgtatcactgaggagggaacgtgggctgctgtgccaccatttcctaaacaggctgaagctctgtcccccatacctggggcagctgatgtttaacttgcttcctggaaaatatttcttatcaagcatttacttggaaaaattattaaccatgttcattaatatttgctgacatttgtattttaagctgtatagcaatgttcttatttgacaatgat

SEQ ID NO: 5154 - DNA, 518 bp, Canis familiaris
  misc_feature (1)..(509): n = a or c or g or t
gcagtgacattnnagtgaataggctgttttgaacacttgtgccttggggtgtttactgaagctttatgaaaactttgatgttttaccagtatccttaaaagtcccgtccatgctttaaaaagtatctctgtaggaaatgcgatttataatgtttttaacttctcaaaggtgagatatcttagctgctttctgggctttcagacaagttttaaattcagctttcctgttacttttgaagtttgtgatgtggtcatctaaaagcccttttggagaaacttcagagtcctacagtccttgccatacagcttcatttgacttcttgaacacagctgaaaagaacctattttttggtcgtcgctcctcccccaataccacttagaactttaataataaaggtggcaggtaaaaatttaaggagccttttccattatcttatgttgcaggaaactttgtagttttgaagtttaatgatgtgttcctaattttatattcatcatcatgctaataagtatgtaaaa

SEQ ID NO: 5155 - DNA, 606 bp, Canis familiaris
  misc_feature (1)..(606): n = a or c or g or t
gnctgacctcccacttctngatatnctgaagattgaatatatccancaagagactaccactgtgctgggtacagagattgtggactttgaagagcaggaggtgaaaagcaaagtgcagcactatatggcctactggatgggccaccgagagcctcaagggattgatgtagaggaggcttggaagtgccggacatgcagctatgcagatatctgtgagtggaggaagggcggtgggatgcccagctccattctagagccccaggccaaaaaaagtgaaatgaacagaaggatatgccttcaggaactttgatccttcctgctcctaatatactcagcagaataaaagagggccagtctttgagcttggctctcacggagagtgttcttattttggatctttttatatttcctcaaactctgatgactaaaatcatgaccaagattcaggagtgagtgggaggaatctgggattatatggtctctggaactgtgtgtgaattgccaagaagacagttgctcatcatgactggaacaaaaggtatcctttagccatcattgctttcctaagaagattctaaaatttctattaagtctcttccctatttt

SEQ ID NO: 5156 - DNA, 619 bp, Canis familiaris
  misc_feature (1)..(619): n = a or c or g or t
cncagggnntatgannnnnccagtaagttgcaggtcatcgactatgtgctcntggtnnntagcaatgatgtgagttcctccctggccctgtgagaagaggttggtggataaggaagatggggccagagccccaggggtagctaggccctttccaagctttggtggggtcggcatgaagggagaccttagggtgcttcctccctgtgttttcctgttgggtgtgtaaagagaaagtcctgggtgttctcaggagttaagggccagggcaggttgggagaatgcagggccaagagcctctctggggccctgggctctgcgataaccccaacatccagtgtttggttgctttgaggaagctctccatgtttgttcttttgagatagaagttttctgcagcccagtgtgagtgacatgcaccccttcccattcgtacttccccagttcaagagttaagagttttgtcatgtcctggatacaagttgggagaccttccctccttgtttgggttctggatgaaatcacagggcattggcattggaatttgttggaaaggccaagagtgcagcaggcaagtgctggagtgtggaaataggaaaataaacagtgttcacttnnnnnn

SEQ ID NO: 5157 - DNA, 541 bp, Canis familiaris
  misc_feature (1)..(541): n = a or c or g or t
cttcaagaagcacaacccttcccattctggagtgagtggaacaagggctggccccaagccctggctggtccccccaccccccannnnnncattgacaagagctctggatgcagacagggcagaggcaagttagcacttcgtctgcaacctgtggggggggcccgggcacctgagccctgaagctccctcctcctcggggccgacattgtgggactttccaaggtctctgcctgcccgctggggggcccccctgagaggctgtcatgtgatagttggtggtgtgtattcttgtgtgttggttatacatgtcttgaaatctagcatcctttcgcacagaattgncnatgtgtcggggagaaaatgggccnnnagcccagncttaggttctcgccctgtgataccatttaaaattgacatttaatttttcaaatcactgttggtgcctaatcacttaagttattaatttattctgttttctttaaaaaaaaaatttgtaacnnnnnnnnnctnnngtannnnnnggtagggnnnnncgtgtnnn

SEQ ID NO: 5158 - DNA, 578 bp, Canis familiaris
  misc_feature (1)..(578): n = a or c or g or t
gtacgagtgcccaggcatnnnntannctngacagcacctgtgtacnnnntagaaggctgnntaaatagtaataagagctacatcccttttctgagcctcaaagaggtagacaaaggttaataaaacactaggctgacagaaggttgggtctagaagactgttccctgcacccgcaccctccaaggcatgtggctgttggcaggtattagtgcaaggacgctggcaacagctctcgtcccaggatacacagtggaagttgtgcaggttacacaggacggggccctggatcacctggcttctgtgctccaccctcttgtgactgaccggtgctgggtctctgtgtagcttcctaatgagtggactcccagatgctgcctggggtgtcactatttaatgtgtcgcccagatcaacaggtagtctgagactgaaaatcagaccctgacactataaaaagccctgccttgggcagcccaggtggctcagtggtttagcgccgccttcagcccagggcctgatcctggagacccgggatcaagtcccacgtcgggctccctgcatggagcctgcttctccctct

SEQ ID NO: 5159 - DNA, 523 bp, Canis familiaris
  misc_feature (1)..(523): n = a or c or g or t
gacatnactggtttgattctgtccaactctgtatttaggccacttgttactgtttcttcatgcactacttactgttaaactgtaccttttgcaatttcacagtttgtacctctgccatgaggaattggcacctctacgggaatagagagctaatgcaacttactttgctgcttgatagcactttaaaagatttttgataatgaagaaagtaaaanagtaaacatttattaaaattcacgccccactattaacactgagtaagaattggttgcattggtttagtaaggcagatacttggaaggattcttggtgtaacttaaaatatttgaaaactgccttttaatgcaattgcatatgtttattctggaaaaatgttttaatatcagggcctgctgagttgctttctcttgtggagatttttttnnnttttaatctcctaagttgtataaaagttgtactgcatcttagtttactggataaatttaaaacnnagtattgtagaaagcttatacaaagctatcct

SEQ ID NO: 5160 - DNA, 619 bp, Canis familiaris
  misc_feature (1)..(619): n = a or c or g or t
gaccagtacctgcaccgctttgctgcctacttccagcagggtgacatnnagtccaacgggaagtacatcaccaagtccggcactcgtgtggaccaccagacgggccccatcgtgtggggggagccagggaccaatggccagcacgccttctatcagctcatccaccaaggcaccaagatgataccctgtgacttcctcatcccggtccagacccagcacccaataaggaagggtctgcatcacaagatcctcctggccaactttttggcccaaactgaggccctgatgaaggggaagtcgacagaggaggcccggaaggagctgcaggccgcaggaaagagtccagaggacttagagaagctgttgccacacaaggtctttgaaggaaatcgcccaacaaactctattgtgttcaccaagctcacgccattcattctgggagccttgattgccatgtacgagcacaagatcttcgttcagggtgtcatctgggacatcaacagctttgaccagtggggggtggagctgggaaagcagctggccaagaaaattgagcctgaacttgatggcagtagcccagtcacctctcacgactcttccacgaacgggctaatcaact

SEQ ID NO: 5161 - DNA, 606 bp, Canis familiaris
  misc_feature (1)..(606): n = a or c or g or t
gnttcataagaacaagcctcgtatcagttttaatttttgttccaaagagtggttggagagcttggacttcatgtggtttctagaaatgttttttggctatggaacctaagtttcaaatacaattaatagtttcaatgtgacttagtcttctggcttgatggtgttaaataaaacctaaaagaatctatccttttggaacataacactttaatatcatggggaatgtggcactaccaaaagaagactactagcacatcaaatgttgactttggaagcttcaagaagaaccccctgccaccctttttggccccttttattgtagcaaatctatttctctatattttgtcattcaatgaattgaagtcctgtggtataatgcattcattaggagaaaaatgtttttaaatgttcttttaatgatggcccaaaaaggatttgacacagcaagatgcatgtgtttttgtactgagaatatagaataatacagtgtcactaaatttaagacctcttcccagtcttgctgttcctagcaagaactttggcctgtgactgcacttactgtttgtgctcatcaaaaactgtcaatgtctgcttttcttttaactt

SEQ ID NO: 5162 - DNA, 433 bp, Canis familiaris
  misc_feature (1)..(433): n = a or c or g or t
atctcatnnacatggcatattttnnaggnnnntntttttctctcnnnnnnannnntgatgnnnngccccannnnnnnnnnnttatcannnnngatatgttttcnnnnnnnnntantaatatatgaantgnnnatgtcaaacttaagacttnnggttcattaatgtgtnannnngccctccctgggtggtattttctaaattannnnnntcacaattgatgtannnnnggctctgtttcccttctccacagnacaatcttgccatgttaaaaannnnagatccttnggtggatcctnnnngntttatttantngggctatgagcnnngctttgctgnnnntaagactaaacatctgtgtggattggtcatttgtagtggtgtnnnnncatnnnnnngcgtgtgcnngcttcannnnnnnattttgtganngnnc

SEQ ID NO: 5163 - DNA, 556 bp, Canis familiaris
  misc_feature (1)..(556): n = a or c or g or t
agagntatatgctctaccaactgagccagccagattccctgcttgtgagggcttttattcaacctcagaacacatcttacacagcattccgaattctggcctttaatagctgtctgcttgtttctttaaccaattcaggtgccaattttaggaagcctttcctactactgtcacccatcctgttgtccctacaccccagacttgcttagcaatacataccagtcataactgccttttcatctgcttgatgtctcctaccagactgggcttgagtgcaggcaccttccttgggaatccagagctgagcccaaggcagctgttgggggaatgttccatcctaacttctggctcccagggatggggcagccaggtttggatacctcccaaaagatttggagttaggccaaaacccatgttccttaccacctcacttccaggtacactgaagggctagggcactgggatttgctgttgacaaatgattgtgtcactggaagtatcctacgaccaccctccttacctgcccctcactggaactgtaatactcaaaatcaga

SEQ ID NO: 5164 - DNA, 635 bp, Canis familiaris
  misc_feature (1)..(635): n = a or c or g or t
catgctcatctctgccgacattctggcctgcctgctnntctgccggttggtgtacaaagagatcctagcctggaagtcattcctgaacagagacagagggtataaagaaatatgaagtcctgattgaaggagaagcctggaggacctcagtcaattccccaagtgcttccccgaccccaccgcctcacaggggagcgggggcaagaccacggaaaccacccccaaggactgtggcagcctcttgacctgacaccagccagcccggggtgggggggactgccaacacgaggactgcagggctcgtggcccaggactctggaagctgtgggcagaagggatggggagcagagcttgagtggtgtctccagcttggtaaggggagggtaggctcagatcttgcttgttcagattccaagagggaaggcagaggcctgacctggccgaggcctggcaagggcgtgtctctccttcccgtgttaaatctgaacctcagcaatcggcctgtgtgtaggggcggatttctgaccctatttcagagctgcccagcctcgctcccttcctttgtccacgtgccggttttctcatgtatttccccacgttggaaccccttctcccctgcactgggtcctgttctt

SEQ ID NO: 5165 - DNA, 598 bp, Canis familiaris
  misc_feature (1)..(598): n = a or c or g or t
aannaacaactatatttgaagacctctatgattatatgaactccctgaaagtgctgttgaaagtcaaagctgatattatatatccaggacatggcccagtaatccataatgctgaagctaaaattctagaatacatttctcacagaaatacccgagaacagcaaattcttacgttatttcgtgataattttgaaaaatcatttacagcaatggagcttgtaaaaagcatttacaagaatgttcctgacaatttacataaaatggctgaacataatgtcttgcttcatttgaaaaaattagaaaaagaaggaaaaatatttagcaacacggatcccgacaagaaatggaaagctaatctttagtttcagattaatgaatgcttttgttggtttgttttgtttttagtgaatgatatgttttaactattaattatttacagggaatatagagcatagaacattgaaaataaccctagatatactttaaaataatgtcatgtttcttgtcaaatatatattacactttacatgtataatgtaggttacttatctaagtcttacaacattttaccaaaaattcagaatccaacaatttatgc

SEQ ID NO: 5166 - DNA, 498 bp, Canis familiaris
  misc_feature (1)..(498): n = a or c or g or t
agtgagcaagatctgcgcatgcttcgcttcatgacgannntgnaggtgcannnagtcanctttcccagtgcctgccgcaggatnntgctgttctnnnnnaagaactcctacttccagaacgaagtcctcgtgaaggagtatgtcgtcagtgctgctggctacagatcgtcgcactccactcccatccagtggtcgcagcactacgaacgggaggcctaccgccgccagacccacgacaacggccttaacttcttcaactggttctgtggccaccaccttgccgggtcaggcaggatcgctgagctcatcatggatgacctgtggcccaatgtcctcaagtactacgagaggaagaaggcgccgggagagggaagccacaggaggacagggagcttcaagatgccgagatgaatatgaggcgacggcacacttgtccacagccgtcgcacacatacagatggatgccagcggtcaacacggctctcctgcagagnnnat

SEQ ID NO: 5167 - DNA, 630 bp, Canis familiaris
atcctcctttcatgatagctttagcttgtctacatgtagcttgtgttgttcagcagaaagatgccagacagtggtttgctgagctttctgtggatatggagaagattttggaaataatcagggttattttaaaactgtatgagcagtggaagaattttgatgagcgaaaagagatggcaactattcttagtaagatgccgaaaccaaaacctcctccaaacagaaattccctgagtgattctccactagtggcagggcctgaagctgcaagatgatgatggacaagataaggcaataatcctattgccacagttactggtattttcagttttagttaattttattttaagtattcggcatttttcaggaaattgccatttttctttctgacttatagtttgttgtatttatgtgtgattttattatgtctttggacagtaattttttggaaagaacacttcttgattatcacatttagtagatataagattttatatgtaagatttaattttacaggaaatttgttcaaaagaagttcttatctctatgttgagtgatacctgtaatgacaatgaaatcccatacccttatttaaattttttgagtgtatatggacactaacttccagaa

SEQ ID NO: 5168 - DNA, 569 bp, Canis familiaris
  misc_feature (1)..(569): n = a or c or g or t
gaaccnagcagggctcctgtcccatccaagttccagcatgccttgcctccgcttgcttgggctgcatatgcattagctacacacannnctagcttcaagtttcattttggagtgtgcagaggcagccaggttcctggaggcagggagggaggcggggtggcagtggccagcttcgctctgacccaggtatagctcagctctgtgtcctctttgctccctggcctgaggctgaccccagcagaagctgtcctcccccagccctcctgtctcccacgtctgccccccctagagccgtggtgggggctgggaggacagctctacccagtgccctgctgtggctgttccaggagtgctgcttctaaacccagaccacgctttgtcccatgtagagagcatgggggacaactgcaatgtcccggtgtcctcagctccatctccccactctgtggttctttgggggttcctgctaccccaaagcaaacacccccccatccgacagcccagtggcttgactattgcctggcattcccctgccctccaatgctggaatcaaagattgccttcccaag

SEQ ID NO: 5169 - DNA, 557 bp, Canis familiaris
  misc_feature (1)..(557): n = a or c or g or t
ggagtctgtgcggattctgaagagtgctgaggggcgggcgcttcgccgccagcaccaacgcaatgtcaagctcatgaggcagatgctcatggatgcaggcctcccggtcgtccactgccccagtcacatcatccctgtccgggtcgcaaatgctgctaaaaacactgaagtctgtgatgaactaatgagtagacataacatctacgtccaagccatcaactaccccacagtgccccggggagaggagctcctgcggattgcccccactcctcaccacacaccacagatgatgaactacttccttgagaatctgttggccacgtggaagcgagtggggctggaannnaagccacattcctcagctgagtgcaacttctgcaggaggccgctgcattttgaagtgatgagtgaaagagagaaatcttacttctctggcatgagcaagttggtatctgcccaggcctgagtgtgtcatgacctcagttactcacttaaccccaggccacgttgtatccggatagtctccagagttnnnnnntatatgtgaattaaattat

SEQ ID NO: 5170 - DNA, 649 bp, Canis familiaris
  misc_feature (1)..(649): n = a or c or g or t
aaagattttgacagcaaaaaatatgntctgaggtaattaaatgggtnnaggtagcttcaggctagcattgctttaagtctgaaaataaaaaggggggactattacttttgtggtttctgaaagaattactttttaccggaagnnacttgccttgcatttctaagtannaagacagcccatgagcttcctcagcctggaatggactgcnnnnnatctggctcagcccccannntctgcactctgaagagagcttgagaggcgatgatgcacagagagggctcaggatcatgtagcagagctttcagatctaagtggccacaaaacccaggttggaggtgaagatctatggaaatgatctctggtccacacaccaaacagccaataagtctatagcagctgagatgaaggactttttctaagactctgtctgacagttatacatttgtaaaccaattccaattttgacctaaaaaatttattcatttttgaattgcccaatagtatactcctttacaataaccacactgtcaagcagtccacctaaagttaaattatctgtacctgtcgagccatgtctaagactgctaatttctaagttcctgtgttggtcctagaggctactcttaaattantctttttaagttttttc

SEQ ID NO: 5171 - DNA, 650 bp, Canis familiaris
  misc_feature (1)..(650): n = a or c or g or t
tctatctgttttctctgcccatcaaggaatctgagatcattgactttttcttgggggcgtccctcaaggatgaggtcttgaaaatcatgcccgtgcaaaagcagacccgtgctggccaacggaccaggttcaaggcattcgttgccatcggagattacaacggacacgtgggtctgggcgtcaagtgctccaaggaggtagccactgccatccgtggggccatcatcctggccaagctttccattgtccccgtgcgacgaggctactgggggaacaagatcggcaagccccacactgtcccatgcaaggtgactggtcgctgtggttctgtgctggtgcgtctcatccctgcccccagaggcactggcanngtctcggcccctgtgcccaagaagctactgatgatggctggtattgacgactgctatacttcggnnaggggctgcactgccaccctggggaactttgccaaggctacttttgatgcgatctctaagacctacagctatctcacccctgatctctgnaaagagactgtgttcaccaagtctccctatcagnaattcactgaccatcttgtaaagacccacaccagagtcnnnntgcagagnnnnnnngctccagctgtggccaccacatagttnnnncaa

SEQ ID NO: 5172 - DNA, 658 bp, Canis familiaris
  misc_feature (1)..(658): n = a or c or g or t
ggtagnatttccatagatcaccctgtgtgaggtgatcccaacatgtatgttactgaatcccagaagggggcctcaaaaggccacctgggtggctagccttttggcatgacgtttttttttttttggcatgacactttggacctcttgtgtcttgtgaaggtctcagcgccacgcagccttctgggatgtgtgtgccctgagcctgaaggaggtagattgtactcaaccagattggctagaacttgctcttcccaccgtgacacagttctagattaatctctgcaaggagtacaagttccctgcagcaataatcatatttttatgacttgtatttttttttcagattcttcctctgagacttcagttttcattttattgtatttaaggttgcacatctcagtaaattacagctaattaaagggctatgtgccaggttattaaaaaccagagtttattaaaaaaaagtccagagtgtaatgggctgcattgccttccacatacattgtgcactataaaaacaaatggagcagcaaactgtatccttaatctgtttttctttttttttgtcttgaatttctttggatatgatcccctgagcaccacttccatcacttccattattcttgctcctatatgcttccccgtttcaaatgttcat

SEQ ID NO: 5173 - DNA, 601 bp, Canis familiaris
  misc_feature (1)..(601): n = a or c or g or t
gnctgcagcagcgccccaggccctagagcagtgcggctccccgcacntggcacagggctgcttcaggaccaccgccatccggtgtctcgaacagctttngactccaggtgggaagaaagaagaggctgcttgctgctcccccggcccatcccatcgttaacaactgccgagctcttcctcctccgcccaaggtgctcagacccgagtgccattaactcccggactgctgactggcctgccctgggaccggcgttgttgaggactcgcctcggctccctttgtcccagctcttcctgctgtcttggctggatcccccggggcccagatgggataagctgtgcgtgtggcctcctggccaagggttggtgggttggttagatggctttgactccgtgggattccacttgagtcttcccccaggagcctccatctggaagcaggcttaactttggggctggggtgagccctccacctccaggctctaggggatggagggagggaggggggaggcccaaagctgtgtcccagggcctcaagcgctctgcctcctacctgcttctagccaaaaaggagcaggctctcagaggcagactccttcagg

SEQ ID NO: 5174 - DNA, 641 bp, Canis familiaris
cttcatcctattcctcttcttctgactccagatatgtagaccccattggtaagcagagtttctttcatttgaattaggactcctccaggagagacatcccaatcttaataggagctctcccactattatctacttccagttttctcctgcagtatgattttctggtcttaattgcttactttgtgctttctttcaattcccttgtacttctgcttcactttgggtaagtgtggttgtctttacttattgtaaaaagtggtctcttggtgatgtacccttttccctccctgattcctgtttactctttcatccctgctttctccacacacgataggatctattagctctgcccagcttccacaggtctagacatgtttttaagaagcattcctccctttaggtcagttggactgggagactcacgtacaccagaatctgcctggactaatgcaaatggatcaggatgatcaagttgtttggcctagagattcactcttccgatattttgagttgctagaaaagcttcagtataacctagaggagcgtaagcagttgcaggagtttgcagtgcaggcgctgatgaactttgaagacaagtaaagctgacgatggatggcttcaatttctttggcaaaaattaa

SEQ ID NO: 5175 - DNA, 697 bp, Canis familiaris
  misc_feature (1)..(697): n = a or c or g or t
gaaacctattgtgttgactcacatccatcagtccgttctgacagagcttttcctatcaaagccagtgagcctgcttgacaggttgttcgtagtctcagaccagccctgcagtcccaacggtactnnaagaagaaaagggaagatggctttttccccagcgtggaaacagggaggggcaagtaggtngcaaacaaaacgtgaatcggtgtgataaaatgacagctgtgtcagctgggccttcgtggaaccacaaaccagcagctcctaacagccagcaccattcacctggacactcctgagattgtggtccggtcccgtagacgccctgtccgtcgtacgtccgtgtgcctgacgccttggtgtctgtgcgttgggaatgcactgagagatgatgtacctctgatttcttcctatcaaataaactgccagcaaactttctaacttgtattttaactgttgaaaaagagattcagaacttttgcttaggttatgtccaaagcatggactgtacttcttatttttagaaaccattctttacatctaaaattttaacagaagaatcttcccccacccccaactctgaggtattgataaagtcctctgtgtagatgtgttctcttcaatccatgctgccaataagccaaattaaaagctgtgaaaaaaaattaaaatgtgctcaagaatgtgtgtagacaaa

SEQ ID NO: 5176 - DNA, 541 bp, Canis familiaris
  misc_feature (1)..(541): n = a or c or g or t
caccaacaacancttcgtgaactnnggcgtcggggacttgaacgcggtgcagagccccgggattccgcagggcaactcgggagtgtccacgttgcacggtatccgagcctggtaggaaagggccctaggacctggggcgccccgaccgatcccagctctagagagggacactgagtctcgggggagggaggaccccgacgtgtctccacgtcccttggatttcacattcactcccgcaggggcctcagagctcttttcgccccgtgcgcctttgtccccaagcgcgggagagtttgtggccgcgtttacagagcttgcggagaatgatcccgcagcctggtgccttagccatcgcccccagagtggcctccaaacgcccacgggcacccccaaccggctgaacctgggccagttgggactgggagcccgggtgcacctttcctcgagcctgggcccggcgcccgggcccttgccgccttgccgccgcccacccagcccacccagcccacccacccgtatttatgtttttacctgttgctgt

SEQ ID NO: 5177 - DNA, 382 bp, Canis familiaris
  misc_feature (1)..(382): n = a or c or g or t
ccccccgccttcccctgcactccgagccccgccagagccttcatgggggagcggacagcctgagctaggggcagatcactccctccctcttttcccgagccctctcccttgaccaaggcaggtgacccctaactggcaatgtcttcnnnnnnngccaccagcctttccccttttgtcccctttttgaagtttctcccctttaatttttcctgtttgctttcagtttaaaaggttctatgggtaaaagaagttctccccctggatccatcagccccctcccccagtttgcttctctggtttgtaggggatgggctgggggaccgcctcccctccaaaggtgcagaccttgnnnnnngggaaagggccagggacnnnnncaggg

SEQ ID NO: 5178 - DNA, 571 bp, Canis familiaris
  misc_feature (1)..(571): n = a or c or g or t
atgtcatgagacttttatctcatctgannattgtggaagaggccctggaagctgtcaaaaatgctacaaatgagcaanaccttgcaaatcgctttaaagagtttgggaaagaaatggtgaaacttaactatgtagcagcaagaagacaacaggagctgaaggaccctcactgtcgggatgagatggcagctgcccgaggggctctgaagaaaaatgccacgatgctgtacacagcctcccaagcatttctccgccacccggatgttgctgccacgagagccaatcgagattatgtatttaaacaagtccaggaggccattgctggcatctccaatgctgctcaagctacctcgcccactgatgaagccaaaggccacacaggcatcggcgagctggctgcagctctgaatgagtttgataataagataatcctggaccccatgacgttcagcgaggcccgcttccggccgtcgctggaggagaggctggagagcatcatcagcggggcggcgctcatggccgactcgtcctgcacccnnnacgaccggcgcgagaggatcgtggccgagtg

SEQ ID NO: 5179 - DNA, 483 bp, Canis familiaris
  misc_feature (1)..(483): n = a or c or g or t
caatttctacncgaagacttcagcttncaaccaattccatggaggaaacccaatgttcctgagccagtgatgtcaaagcccatcannnaagagnnnnggccagagcgggaggccatgaannngcagncncannnagagcgcgagaatgctgcnnnatacacttctttggggaaaatgcaatttttcattgagagggaaaaagaaatggaaatttctcaatnnnatggctatgcaatataagggctactaggagtgttggtacccagaggggtttattcatattatagatagatataaattcatattattatagataatatttattcgtattttagatataaattcatattattatagataatatttattcatattatagatannaattcatattattatagataatatttattcatattatagatannnattcatattattatagataatatttattcatattatagatataaannnatttgg

SEQ ID NO: 5180 - DNA, 607 bp, Canis familiaris
  misc_feature (1)..(607): n = a or c or g or t
tgggtgaatggggaccgctnntctgccaacctgctcctgggaggagggatggtgctggctgtggccggtgaccaccttggtgctgagggtcgctctgtggctggccaggcagtggtgctggtggttgcagtgactatcctcatcgtggctgttttcacaaccaacacttatggaatgtgggggggtgcgatgttgggtgctgcaggcctcctgagccggctggaggaagacagactgctgctgctgccaaaagaggacatctgtcgctgggcccttgctgcaggcagttgggcctaccaccgagccctgcacacacagcgcctgcagtgggagtgatgcttagagacagcatggtggggcttccgtcctggctaccgcttccctctcccacaggcctgctcccttaaggatggactctcgggtctcccaaaaagagcttgctgcagggtgatggatgccttggttaggaggctgagtccaggcaccaccgtccctcctctgcctgagtgtgggaactcgcctagaccagaatgaaggggatggggccccaggcacattttggggcctgctgctgggcaggccatggttgtggatccagagagannnn

SEQ ID NO: 5181 - DNA, 462 bp, Canis familiaris
  misc_feature (1)..(462): n = a or c or g or t
tccaacacgtatgtgatcaagctgtttgaccggagtgtggacttggcccagttcagcgagaacacacnnntgtacccgatnngccgtgcctggatgcgcaacagcccctcagtgcgcgagcgggaacgctcccccagctccccgctgcccccgctgcctgaggatgaggagagttccgaggtcaccaacagcaagagtcgtgatgtgtacaagctgcctccacccacagccgctggaccacctggagatgcttgcagatcccgaattccatcccccctgcagcctgagacccagggtacccctgatgatgagccctcggagcctgagccctcaccgtccacactcatctannncaacatgcagcgctggaaacgcatccgccagaggtggaaggaggcatctcatcggaatcagcttcggtactcagaaagcatgaagatcnnnnnnnagatgtatgagcga

SEQ ID NO: 5182 - DNA, 500 bp, Canis familiaris
  misc_feature (1)..(500): n = a or c or g or t
tnntcagctgacngagtctcagaatgctcaagaccaaggtgcacagaaggacacaaccagtcannaggtccagcagcctgaggacagaacacattaaagctgttcttggtgcagcaggccacatgatacttttgttatgttgaaattaacctgctaggcaactctgaattggggaagcagctaaagatcctcagttgtagtcatttctaactggattaagagctttacaatttttggcattagcagatgaattcttgtttacctggctggtaagaaaagagtgataggttggtcagcctagccaggactcccagaaagtttcaatgaatttatggcctcatcctgttaacattgttgctgtttgtttgtattgaataaaaacaccctcatgtgagctgtggtgtaaactggtatctgttcctgtctggtctgagcaggcttcatctcactggtttgtctcacaaagcatgcctgtatgactttaggggttttgttttgtt

SEQ ID NO: 5183 - DNA, 562 bp, Canis familiaris
  misc_feature (1)..(562): n = a or c or g or t
ttggggagcntgctcggtggggggggggatcagccacaggctcactagcttccctgtgnnnagggtaataggtgtgtgttcaacctgtgccggggctnntgcaagnagcgagctttcagagaggctgccgactgcccaggtgaggggcacctgctgccatcaggccctggagggcagtgggaccttcggcctcctgagtcccacctctttcctcctctgccaggtcacggattgctttttaaaaccaaactggagaagtctctagcctggaagggggcccagtcccggctgcaggagcctcagccggcaggatctggggagccgggtggctttcctgaggttgtgggcagtgccctggcctgaagggcagttggcgcccggcacactgccccccagccctgggaccgctgccgagacctcaacacatcccatttaaggaaatgccttttctcagggaacctcccnnnactcaacatnnnaggatgagctggtcttccccttggcctccgctgggagcccggaaannnngcaccagggagcaggctcccaggctggacctgtc

SEQ ID NO: 5184 - DNA, 539 bp, Canis familiaris
ttaaatattacactatgccacttactataattgtttgttttagacgctctttgaataatagtttgaattgtagccctcataacaatgactcttacaagttcattatttcagtcttccagtttttgagtcaaagacatcctatcctgtacataggatgccgtgtacatcctacatgggcaggatgtaaggaggatggattattataaggtactcaacatttagcatacatagcctgggaagaattggggtggttcagcttctttggatagatgtcacttacagctgctgccaggatgttctgcgggctgcaaagtccagctcctactccaaggtaactgaagtgccataagctgatgtgagaagaccaatgaataatcagacttttgttatatctttaaggctcttataaaagggattgtgtcattactgcattataaacacagtgggaatcaatgaattactacagtagagtgagtctcatacactatcaactacgtgccagatttaaaacttgaaataaatgttaactgttaattttt

SEQ ID NO: 5185 - DNA, 587 bp, Canis familiaris
  misc_feature (1)..(587): n = a or c or g or t
tctgcttccagtcctttctcccccgactgcctccgctcctgtnncggacaatctccttgtttcccggtattcctggatagctcagctttgtatgtgtgtgtttggggggtgggggtgggttccggctggagtgggttcggcgggggtttgggaagggcgaggggagagatggaggataagtctcctgcccccttcctcaactccgagccacagaagcctgggagggagggagcctaccctcgctgccgccacgtgtcttgcagatgtgccaaaatgggggtgggggagggagggaaggggagggtgcctggcagagcggcccccagggtggctctctcaaagcaatacagttcctcctgcctgggggacggcaagacaggggagagggttgggttgggggccnnnnngttccctgtgtacagctgtgtatattcaggggtgttctctgtctggtacccgctgtgggtgtctacgtgtgtgcgaacctccccttccccgtgccctgcatgacctgtgatgctgcagacaccaccatcctgnnnnnggggtgtgtcgggggcactgaggggcannnnnngtgtcctgtt

SEQ ID NO: 5186 - DNA, 655 bp, Canis familiaris
  misc_feature (1)..(655): n = a or c or g or t
tccatgggctatgtacaggcaatgnngccacctggcgcccagggctcccagagcacctacacggacctgctgtcggtcatagaggagatgggtaaagagatccggcccacctatgctggcagcaagagcgccatggagcgcctgaagagaggcatcatccatgcccgggccctagtcagagagtgcctggcagagacagagcggaacgcccgcacgtaacaggacgcaattccaccgccgagtctggacctttcctggccactgcagagcacctgcttctccctggccttcaccccgagttgcacttcccaacctgggcttcctgtcctgtgtcccctggtgggtgccctccaggaaccagggggcggctctcactccagccgacaacacttgactgggactctttcaagagttagcagcgaggtcactgtgagtcccgcccatgacctgccaacagtgttgatccaactggagcttgctcctttctgtggcccccaccactcagcacttacccaggacttgtcaccacctttcctagactcctcccctagcaaggcctccctaggcctgtcacctccctgccttgtctcctgggccatagcgactcttttttcagtcagtgtcttttgctaaatatgccctttttgtataaata

SEQ ID NO: 5187 - DNA, 658 bp, Canis familiaris
  misc_feature (1)..(658): n = a or c or g or t
agaatngaaaaaacagaatataactnnccagctnnaaaaatggatgaaactcaatgtagaagagggactgtatagcagaacattggctggcagcaccacaacacctcctctgctgatcgtattttatcaacaacactctacaatcgaccccatgtggaatgtccgccaccttggttccagtgctggaaaacgatattcaccccagtttgtaaaggctgccaagttactccactggaatggtcactttaagccatggggaagaactgcttcctattctgagatctgggaaaaatggtatattccagacccaacaggcaaattcagcttgatccgaagacatatggagatctcaaatataaaataaaacataatttatgctgtaagcatttctcaggaaatcctggaagacagtatgtgtgggcagtaacagttgcaaggcttcaaagcctatctgcagcaacccatggaaagagggatgtttcagctgggtaaagaggacagactaccccgtctatcagttggcttcccagatagactataaatgtctccatctgccttatcaacaagtgtttgcttactaccgtgctgaatgaccagaggtaaatggactgacaggattggtacagctagttcaacnnngctgcttggttttaatttt

SEQ ID NO: 5188 - DNA, 622 bp, Canis familiaris
  misc_feature (1)..(622): n = a or c or g or t
tgtgggaaagcatnnaatcagccatnntcnctgaggagtcatgtgaggactcacactnnagagaagccctttgnatgcagtcagtgtgggaaagccttcagggagcactnntctctgaagacacacctgcgcactcacaccagggagaagccatatgcgtgtaaccagtgtgggaagcccttccggacaagcactcatctgaatgtgcacaagaggatacacactggggagaaactgtatgagtgtgctacctgtgggcaggtcttgagtcgcctctcaacgctcaaaagtcacatgcgaacccacactggagagaagccctacgtgtgccaggaatgtgggcgtgccttcagtgaaccttcctccctcaggaaacacacaaggacccacaccggcaagaagccctatgcctgtcaggagtgtgggcgagcctttggtcagtcttcacaccttattgtgcatgtgagaacccacactgcagggaaaccctatgaatgcaaccagtgtgagaaggccttcaggcacagctcttcactgactgtgcataaaaggattcacgctgggagagagaaggttaggaatggtggtctgcctttaacagtgtcccatccatttgatgggc

SEQ ID NO: 5189 - DNA, 536 bp, Canis familiaris
  misc_feature (1)..(536): n = a or c or g or t
aaagnnnctcanggatccctatccctcnaggtgncttcagaccactnnnnaagaaccaatggnntnnannatannttaaggtaaaggatgtaaaggatcacctgtggattaaagagtttagctgaaatcctagatttatatctacagtgtcctagaactaagatatcgtagaaattgcttgatagcacaagctcagtgataaggtagtaactgaattcaaacatagtgttttatcttacaagaagggctatctccatccaaatcatctcttgaagagttaaaataggaagtcacaatagctcctgtggaataaatccaccagttcaataactctgtgagggataattgcagaaatattttagagacatctgaggttccatatgataatccatagtctgtaagactgttcagtgaactcatcatgacagatgttgtgcctccaaagaattggaaattactatccaattttgcatttttgcttttgatggaatttannnnnncaatctgtttcctccatttctgctgatctttttttc

SEQ ID NO: 5190 - DNA, 517 bp, Canis familiaris
  misc_feature (1)..(517): n = a or c or g or t
taggatcatcagccaaaatataacatcaaaaaaataatctcagtgcggttgattctgacattgctacaattactttttgtcctatttttcatgccacaaaaatgaggaaaccaaactaagtagccaaaaagaaaaaaaatagattcatggcttggaaaggcaaattctaggcattccttccaaaactgatgtgctaaaatcagcactgatgtttgtttttttacacctaggatttttagcctgggtgtgtaggttgaggccaagtccctctgcaggaaagaacttatttttaaactcagaaaatgtcaatcatgaaaatcgacttcaactttagcaaaaagaaaaaaaatcaacaaaaagtatactctgtatgctgggattccaaggttccaacgtgccgctacaaatctctggggggtttctttcttctgataattctagagcctgttaccatagaaaggcatttcttcaatggctggttgtagttagttcatgnnnntcaatcaaaatttgcaaa

SEQ ID NO: 5191 - DNA, 463 bp, Canis familiaris
  misc_feature (1)..(463): n = a or c or g or t
acacacatacacactccaccccctctcccccacccccannnctcagcacagatgcctatggcatctccagcctatcttttttatttttttttaagtaagcgctagctctacacccaatgtagggctcgaagtcacaaccctcaaaatcaagagttgcatgctctacctactgaaccagccaggcgctcctctagcttacttttaactcaggcaaaacaccctgcagacaaagcatccctcgatgggaaccaaaactacccctggagcaataaggacagccctaaggccagcaggatccccctcttgattggacctaagacaatgatggacctgccctttactgcccattgcacctacctttgtcccacattctccttatataaataaacctaaaatagtcagcattttgaagacagtcttttttttttctttgaagacagtctctgagtctagtctgctgtct

SEQ ID NO: 5192 - DNA, 389 bp, Canis familiaris
  misc_feature (1)..(389): n = a or c or g or t
tgaagtcannnnaataanntactcagcaatgcaggtctatgatgaagagaagccagaagtttttgtgatcattgacatttaagataccaaaaaacaaaaccaaaaatcccctctgagacccctttctgatgaagaactgttttttctcttcctttttagaagatcccatggtagaaactttacagtgtctgttgatgtatggagatttgcagaacaaaacttttaaagtgtgactgtcagaaatggaacatcaagttgtggccttggtccatgctacccaaatactcagactttaaagaattcttcaggtggcaattatggcttctcatctcttagtctgtagcagcaggtgctcagacccttccagtggaatgcctggtcccaaaagg

SEQ ID NO: 5193 - DNA, 617 bp, Canis familiaris
  misc_feature (1)..(617): n = a or c or g or t
acaatgccaaatcactnntaaagnaagctgaaaaacgtgatggtcttttgcccacctgttgtactgacagctgtcagccaagcacccaaagtccccaatctagttctagaagcccctgactagggggcagcatctggcattgaccagggctcctgctgtcctgggaccacaccaggtactcccacacggctctcctgcaaaggtgcccaggaggcccactctgtgggatgtggctccaggcctgcaggccagaactggctgggaaagttggttatttgatatgtagtaccgtttccccacaaagctgagacaggctgtttaaaggacattttctcctggcttgctatgttgccgaaattatcatacacaacagctgggtaataagactatcatagctcaaactatcctgccaaatgctatcatctgactttcctcctcccaccccaccacctcgagtcacctgtaaattcatttgtcatccgaagcggaataacaaattgtccctagcaaaactgctgagcgctttataattttgtggtgtatttttgtcagtaggtagcagaggctgaagtattttttggtgtaattcttgaatttttctgacaggaaacannnnn

SEQ ID NO: 5194 - DNA, 592 bp, Canis familiaris
  misc_feature (1)..(592): n = a or c or g or t
ctccaagatcatccttattgatgaagccacagcttccattgatatggaaaccgatagnntgatccagcacacaatccgtgaagccttccagggctgcacagtgctggtcattgcacaccgcatcaccactgtgctcagctgtgaccgtgtcctggtcatgaacaatgggaaggttgtagagtttgacaggcctgaggtcctgcaacagaagcctgagtctgcatttgctgccctgctggcaacagccaattcttcactgagctaaagagaactggtgactgtgggagctgatggcagagccaagtgcagctgggaagtctgcagtctttgactttcttgaatagagatggctacttctcctgaaagcagggctgaaatgtgctcagaggtgctgtaaatgggatagagaagaagattgggggagcaaaacctagaataggccacttgatggctccccaaatctgggaacccccataccatttgagaccatgtggtcagatcagcatgtgtctctttttaattgatatgttgagtaatttcataataatgtgaaagcctattacagttnnnngatctgtgttaaaagaattgc

SEQ ID NO: 5195 - DNA, 438 bp, Canis familiaris
  misc_feature (1)..(438): n = a or c or g or t
gaacttcgtgnagtgggagatngaggtgtgcaaactgnnnnggctgtctctcaacggtgtnngatttangcggatatcgggcacctcnatggccttcaaaaacattgcctccaaaatagccaacgagctcaagctttaacaggctgccgggagtggggggcgacggaggcgggccagctggacttagctgctggggccgggctccaacccacctgggcgagactgtnnagatggatcggtgtgtctccccctgctggcacttcttcccttccgcccttctcggttctttcttccatgtttgttgggtgggggggggacgggagatggttcttcccctcccccaacatttacccctgcccagaaagtcccccttcccccctctccccaacaggaggcaaaggaaggggagggannnnggggggcagggctccccctcgg

SEQ ID NO: 5196 - DNA, 594 bp, Canis familiaris
  misc_feature (1)..(594): n = a or c or g or t
acagttccacaattccacgcccaaagagttcaangagtcgctgcataataanccagccaacaggcgcaccacgcncgtctgaacttgacctctgccctctggcctccaccccagcacagcgtcggggggcagcgtacagaggcggttttgaggttgcatggcatggtcttcgtgatggtattactttttacaaagaatgaaaccaaatggactcagccctctcccacactcggcccctggccctcgggtcctaacccccccacccctccatacctctccgcccctggttcctccccgacttttcaagccaaccccacgatgtcatttctctctctgtgtatctgtgccagatgttctcctctcttccttctttactggaaggacctgcacattcttccctccttggaagaggactttactcaaagtcacgggtggtggctgggggggatccccgattccccaggcgcgtgcaattgtccccattgcccactcacacaaatcctcgggacaccaaccgcccaggtggccctgagggaggcattcacctttacgtgttagaaaaacatgaccagaaatcaaagatgtcagagcccc

SEQ ID NO: 5197 - DNA, 676 bp, Canis familiaris
  misc_feature (1)..(676): n = a or c or g or t
aaagacactcccagcgaagnnagcatcccttgcacgcgtganntcagtnnnagaganncattcacttatggagagtgggaaagagagaaccnnncnnngccccagcccctttcactcctcagcaccctggcagcctccaccaggccacagctgacctcacacataggaaattctatttgagccacccttttgcactggggagaatctatgcagccctcaccaataccactctgcagcattcagctttctgagggactctggatgtgggggaggagaaagctacaactaaggaaaaaccagaatcatctcacgctgacagcatagcctttccttggaaaaccatttgggagcatggctccgggtaagaagcattattccagcatgtaactccaggtccacgccaccacctatcacacctcgcctccgttaccaccgcagggtgagcatgagaagatgtgctctcagaagggctatggccaagagatggagagaaggaaggaaatgaacgtaggaccgaaggacaggtgggagagaacaaagcggaatgaagaggaggtagagggaggaagtaagacaagaggggagatctcacggagaggtggtgacagaagaaaacagaacagccctgaaggagaagctgaggaggacaagagaagaaatagaccattgacagatg

SEQ ID NO: 5198 - DNA, 547 bp, Canis familiaris
  misc_feature (1)..(547): n = a or c or g or t
ggcccacgcnnccgaccccgagcgcgtggtgcgggagagctgcgaggtggccctggacatgtacgagtacgagacggggccggccttccagtacgctgacgggctggagcagctgcacgccccctcctagagccacccgccgcctccccggcggggcccagcgcacaagctgcccatacaccgagcgtgcgggtgggatctgacctcgcggggctgtccgcttggccggatctggctgcttttgcatctttcctcccccagggccaggctgaggtgtcctgtgacccccacccagtggcatggcgcagggctgtagctcccgggttttgggtcacgggggtgggcacgggggtctgagggtgcaggccagggctgtgctcaggggagcggggttgccttggcccagcttctcgaggaactaggggtgctgggaaaggcgctacgggcaaacccgcccccctcgggcctgggcagcggccggggctgccaagggctgttcctggggcctctggctccccagcctgggactggctgggtgggtgggcat

SEQ ID NO: 5199 - DNA, 625 bp, Canis familiaris
  misc_feature (1)..(625): n = a or c or g or t
aatgtcgaatctatgagctccgaaacaaggaacgcatctcngtagcagctgnntnnaagctgcttgccaacatggtgtatcaatataaaggcatggggctgtccatgggcaccatgatctgtggctgggataagagaggccctggcctctactatgtggacagtgaaggaaaccggatctcgggggccaccttctctgtaggttctggctctgtgtatgcttatggggttatggatcggggttactcctatgacctagaggtggaacaggcctatgatctggcccgtcgagccatctaccaagccacctatagagatgcctactcaggaggtgcagtcaacctctaccatgtccgggaggatggctggatccgagtctccagtgacaatgtagctgatctacatgacaaatatagtggctctaccccctaaaggagggtggatgtggctcctaccatttcttggggtgactgttgctgataatgtggatacagttccccatcctctaatggaggggtcctcagttgtattgataatttttttacgctctggtgccgttgacctctatgtgttactagttgttaatgacctactgcagaagtgattatttgttttactttcttgga

SEQ ID NO: 5200 - DNA, 499 bp, Canis familiaris
  misc_feature (1)..(499): n = a or c or g or t
ttcacgcaagtgaccaagtnnnaggatgcagatgaagtaaatgagcgggcaggacaaggatgctttgtctcaggactgtatnnagaaggcgctgactgggatatagaaaaaggctgtcttatcaagagcaaacccaaggtgctggtgttgacctgccgatcctgaagatcatccccattgaagcccatcgcctcaaactgcggaacaccttccggacgccagnntacaccacctccatgagaaggaatgccatgggagtcggcctggtgtttgaagctgacctcttcaccacgaagcacatttctcactgggtgctgcagggagtgtgcctcaccctgaattccgattgactgggcgaagaaacccaccctgtgagctccatctgggctggcggtggcaaatgggaatttgtcaataatggtcatgtccccggtcccctcttggggcctggaaaggctggaggtggactctttccatataaattaagctgntggtttta

SEQ ID NO: 5201 - DNA, 696 bp, Canis familiaris
  misc_feature (1)..(696): n = a or c or g or t
ccaaagtagtgaaatcagtactaagagcaagtctgtagattccagccttggggggcnttcgcgatccagcactgnnnnnagcctcgatacggattctaccaaaagctcaggacaaagcaacaacaattcagagacctgcgcnnaatttcgaataaaatatgttggtgccattgagaaactgaaattctctgaaggaaaaagtcttgaagggcctctagacctgataaattatatagatgttgcacagcaagacggaaagctgcctttcgttcccctggaggaagaatttattatgggagtttccaagtatggtataaaagtatcaacatcggatcagtatgatgtcttacatcggcatgctctgtatttaatcatccggatggtgtgttacgacgatggtctgggggcaggaaagagtttgttggcgctgaagaccacagacgcaagcaatgaggaatacagcctctgggtttatcagtgcaacagcctggaacaagcacaagccatctgcaaagttttatccaccgcttttgactctgtattaacatccgagaaaccctgaatcctgccctccagtgaaagctggctccatgcagacgtgcagtggcttccggtctggagtgttgaactgttgtggaaatagaaagtgatcccttgctctaggttttctgaagagatgcaatgtagaaagtattg

SEQ ID NO: 5202 - DNA, 617 bp, Canis familiaris
  misc_feature (1)..(617): n = a or c or g or t
gagcanctngnctacgtgctcacctgcccatccaacctgggcancgggctgcgtnnaggtgtgcacgtcaagctggcgcacctgagcnngcaccccaagttcgannagatcctcaccngtctgcgnctgcagaagcggggcacaggtggtgtggacacagctgctgtgggctcagtgttcgacatatccaacgccgatcgactgggctcatccgaagtagaacaggtgcagctggtggtggacggtgtgaagctcatggtggagatggagaagaagctggaaaaaggccagtccatcgacgacatgatccccgcccagaaataggcgtccagcccgcccgccgccgcctgctggagccccagccaatgggaggactcggcccctcagaggcccgcccctttcccgcagctccgcccacaggggggtgggccacctgggggctcttttcacccatctcggaattccaggtccaaccagagttccgaccaatgggcttcggcctctgagttctgtttggccaatgtaaaacctccctcacaccttcctctccttgccccggagctccggccaccaccaggagctcggggtcgcggggagctctccaacacatctggagc

SEQ ID NO: 5203 - DNA, 608 bp, Canis familiaris
tatcctgaattttgtggatgatttggaacatttagacaaagctagtaaagtctctgtagaaacgctggaaaagaatttgaagcagatgggaaggcagcttcaacagcttgagaaagatttggaaacctttccccctcctgaggacttgcatgataagtttgtgacaaagatgtccagctttgttatcagcgcaaaagaacaatatgagaaacttctaaagttacatgaaaatatggagaagttataccagagtgtgatgggatactatgccattgacgtgaagaagatgtccgtggaagacttttttaatgacttgaataatttcagaaccacattcatgcaagcaagaaaggagaacatcaaaaaaagagaagcagaggaaagggaaaaacgtgcccaaatagccaaagaattggcagagaaagaaagacttgaacgccaacaaaagaaaaagcgcttgttagaaatgaagactgagggtgatgagacaggagtgatggatagtctgctggaggctttgcagtcgggcgctgccttccgcgaccgaagaaaaaggacgccaaagccaaaagatattcggcaaagtctcagtcccatgtcccagaggc

SEQ ID NO: 5204 - DNA, 664 bp, Canis familiaris
  misc_feature (1)..(664): n = a or c or g or t
aggctatgagaagactaggaagaagagaaatgnctgagacatctgagctttggcagataaagttggtgttagagtttttcagctccaggagccatcannagcgactgcagaaccaccctaagcgaggactctttatgaattctgagttcctccctgttgtaaaatgcactattgataatactctggaccagtggctacaagctgggggtgatgtgtgtgtgcacgcctacctcagtggacagcccttcgaagaatctcagctgagcatgctggcttgtttccttgtctaccactcagtaccagctccatggcacctgccatctataggactagaagggagcacaagctttgctgaactcctcttcaaatttaaacagctgaaaatgccagtgcgagctttgctaagattggctcctttacttcttggaaatccacagccaatggttatgtgatcatgtctgttggtaaacctaccctgaaacgtgacttctgaacaaaaacatgaccaaacaacaaagctaaagaaacatttataaattttataatataactagggggaaaataagctgcacaaacctcaatgtattttaaaatttaagtgttttaaatattccagaggctctgttgctgtcagcattaacattatatgatatataaaagtgag

SEQ ID NO: 5205 - DNA, 609 bp, Canis familiaris
  misc_feature (1)..(609): n = a or c or g or t
attttaagctaggtangaccaccctttcttcttaaattcatgtgtgtccaacaatgaatgtccataatgtctaaaggtagaatgtgaacattgccacaaaagttcattgctctcagtataatatacagaagaaatatggatatatttctttaaatctgcagattttttttattatggtgcagcttttaaaattatgttttaaaaattatacaaagaaaattatggcatttcataaagtctggagatttccatcaaccatattgaaacatactggtgctttcatcattagaggtcaaattattatgattattcagttaagtttgctaaacactagtcatgatttccagtgcagcctgtcaaattctatttgacacagctttggaaagcttttaattcctcttgacttttcaattttgttttagaatgactgttacagtttttatttggctgtttaaagccaaattcagctttttaattatggtttcatggacactgttgggcaatgtacagtgtatggtgtgcttacctgtccactctagagcattgcttacaggtttttttaagatgctgtgctgtaaaatactgtcatatttgctatttcctggtaca

SEQ ID NO: 5206 - DNA, 694 bp, Canis familiaris
  misc_feature (1)..(694): n = a or c or g or t
ccagatgtgnncntggggctggtagtaaagannaggtgaaactngataagaaggtagtttgaccctgnctacgtcacacttttcttgccgtttcnnngtctgcccanctgagccaactactttactaatccctctttttcctccctcaagatgaaatgtggcaactgtggtgagatttcagagnagtnnnagtatattcggctgatggacactgtggcactgaagggaggtcgtggcagcgcctccatggtccagaagtgcaaactatgtgcgagggaaaactccatcgagattttgagcagcaccatcaaatcttacaatgctgaagacaatgagaagttcaagacaattgtggagtttgagtgccgaggccttgaaccaattgatttccagccccaggcggggtttgctgctgagggtgtggaatcggggacagtcttcagcgatattaatctgcaggagaaggactggacggactatgacgaaaaggctcaggaatctgtgggcatctacgaggtcacccaccagtttgtgaagtgctgaaccttcttcctgcacacttgcctctaagaactgagaagggacaacatgccccaagcagcagagccattgaggctaggccccttgtcccttgtctcccaggagctgtccaggccctcacagcctgcatgctgggctctgtcacagcccccca

SEQ ID NO: 5207 - DNA, 614 bp, Canis familiaris
  misc_feature (1)..(614): n = a or c or g or t
ccagctgcccgcaagtccccatgnnnnngcgcatctctaanntgcgcnnnnnccccnncccagcctcctgccattactacttggagaagatccacccgcctggggaacgcagggctccccagtatgccttcggccaccggtgcccgtacagagtgctggaccccaatccagcccccaaccagtaccagctgcccctcttgttggggcccagcaaccctgtcagccgagctgctccttgctatagtctttcctcggagcacaagagctggttctacaaggagaacgtggcagggggccctgggccagccgcgcactcccggcccgagccctccgtctaccagaaccgcagccccacgtacagcatggccaagcgatttgcctaccccatggaccgcacgcctcggcccggccctggctcccacaacgcccagcaggtgacggtgcacaagccctgcgcccccgctttctccatgggcatcaagcactcgccccacttgtgcccgctggtcatcgacattcaggactagggccctcccgctgcctgcacccgcccctccccgcagaaggtatttttcnnnnntgaactgagcagctnnnngaggtctcccgtagca

SEQ ID NO: 5208 - DNA, 674 bp, Canis familiaris
  misc_feature (1)..(674): n = a or c or g or t
aanccatacgtgtttgttttccaatggttttttatatncagatgtatatatggtgctcactctaggatcagcagtgttgaccgtctatgctgcatagctgtattatagncttattagttgtgtgtggttggttggccctctgggtatacagatgttagtctgagtggcgtcttactcatttgttcataagtgaatgattgtgcatgtgttgtatgtcatagtatgtcgtcacataaaagggagggagcaaataaccattacattaagataatattggaccaaactatttactagctctaaagtttcttgtaccccttaacctgtcttcagaagttgcatagagttatagtagtgtgtaaattcaatattgtggaaaaacaattagtcttgtatttttctgtacgtgtgtgtacatatattatatatatatacacatatatatatatacatatatatatataaaattatgtacttctggcaattctatctgtatttaaagatgtgacaatcttgacaccgattttaagaagagctgtgagactgaatcagaataaagctatccctaccaagtaagaattgatgtgttaagagggtacagaattatcagctgattggtcgattgcttccactgctggttgatttcctcattgtgtaaacattgacaggtatgtgac

SEQ ID NO: 5209 - DNA, 635 bp, Canis familiaris
  misc_feature (1)..(635): n = a or c or g or t
agactatgagcacgttcagctctcagattcctgnaggaagtgtcccctctgctgaccaagggagtagccacctcagactcttcggggtaccagggagctgagggtaaacacatccttcaagctaagaggcagtagcattcagaaacccagagatcctgacagctgtgccaggggctcagttccaactccccaaggtctcttcagggtggtggcctcagggggaaggtgtctttcacccacagggccccccaagtatgacatttaaaagtccctgagactacagctccatctttctgagcatcttcttggtatgtttatggtcattgggaacgggcatgtgacagagcttctgttgactcatttaaaaaaacgtgatgaagagacatttctgtaaaagagtttgggccgtggccttccagcacccccgtaagccaccagtgtctcagtcacccggtcagcgttggcatctcctgggtccacagagcacgaggctgggtttccctcggccaccttctcacctggctacaaaaagtagaagcaaacaggaaagttaagctctgccccatgtcataatgtctttattgatctgatcgcataaattatttttttttaattcaccagaannnactttaann

SEQ ID NO: 5210 - DNA, 702 bp, Canis familiaris
  misc_feature (1)..(702): n = a or c or g or t
tgaaaaaatgnngcnaantttnaagaagactatagaagannnnnnnnnaataatatcgaagaaacnngnnnnngctnnagtctgcgntaccatagagatggnnnnnnctgccctggaccagctgcgaggtgctgtgatgattgtnnaccccatggggctgcctccctatgatcccatccggaaggaatttgaaaataaagaagacttgtctggaactcaggcaggactgaatgtcattcgtgaatcagaggcccaactgtggtgggtggccaaggagctaaggagaacaaagacgctttccgactatgtgggcaaaaatgaaaaaaccaaaattatcgtcaagattcagcaaagaggacaaggagctccagcccgagaaccagtgatcagcagtgaggagcagaaacagctgatgctgtactatcagagaagacaagaggagctcaagaaattggaagaaaatgacgatgactcctgtttaaattctccgtgggcagataacactgctttgaaaagacatttccacggagtaaaagacatcaagtggaggccaagatgaagttctccagctgacgacgctgtcagaaatactagctcacctttcatttgagcaaaataatacaaacttaaaaaaataataataatagtaatggtagtaaggtgttgaatttctagttttcttaatttttctttcagtttgaa

SEQ ID NO: 5211 - DNA, 577 bp, Canis familiaris
  misc_feature (1)..(577): n = a or c or g or t
cacgaagagttctcatctcaaggcacacntgcgaacccacacaggtgagaaaccctaccactgtgattgggacggctgtgggtggaaattcgcccgctcggacgaactgacgaggcactaccgcaaacacaccgggcaccgccccttccagtgccagaagtgcgacagggccttctccaggtcggaccacctcgccttacacatgaagaggcacttttaaatccccaaacagtggatgtgacccacactgctagaagagaattcagtattttttttttgtttttgtttttacctttcacactgtcttccctcccaccctggggaggggaggaacccagctagaaagcactacaatcatggtcaagttcccaacaagccaacttgtgagtggataatcaggagacacaggaaaccagaagacaaatcaaagaaacagatggggtctgtgactggatcttctatcattccaattctaaatccaacttgaaatattcctggacttacaaaacaccaaaggggggtgactggaaggtgtggatatcagggtataaattagatccatgagatggggggaggg

SEQ ID NO: 5212 - DNA, 638 bp, Canis familiaris
  misc_feature (1)..(638): n = a or c or g or t
cagcngctgacgangactttcagccactcgcacggcgcccngagcagccacgnnannnaccnnncaccccgaggacctggaggacgagtgggaggtcatctgaaggagcctggggcagggctgctcaggagggaggaggccgggatggtggcggacacagtggtttcggagtcgctcgctctcggccacgcctcatcagccctcgtccagacatgccgggccggctcggacaaccacacttgctttcatccatgtttgtttccgtctgttccagaacccacagcctcggccgagtgatgtggagccgttgccagagcggcagtgcctctgagctcctgccgaggctgcgtcccctggcgctcctggcccgccgtggggacaacccgggggtcagtgctccctgccactgaggggggtcctgggccagcttgtggtcatcacagggacacgagttccggcacacattccgtgctggacaccccagtggggaaaccaaggccgtgtcggagagtggggtgctggtctgtgccaggctgcagcacccacgcgcacacacaccacaacatgcacgcccacaccacgcacgccctcccggcccacacacagggcacagcacactcgcctcctggagaacacac

SEQ ID NO: 5213 - DNA, 638 bp, Canis familiaris
  misc_feature (1)..(638): n = a or c or g or t
acgccatgataantnntcacagattatccaagtatcaacannnnnnatngtnnnaaccaaggcncagaaaagctgtnctagggggactcaggcacatggctgtgcactgctgcacctcccactgtcaccaccagtctccgagtctagtctgggcacctggcagtgagaagggctggctcaggctccagcagcaccctcagagtggtggcctcaggagtcccaggcagctccggccctccccagacaggagtgggagaggcttcggggatgcaccttcatgtccacaacgtcaggcagtttaagcaagtgtggaagacagaagccacaggaaaccctgagctcctccccagcagtctacgcggagtgtcccccaatcctgtgtcctgaagaagtggactgctgaccctcctcagaccctcctgacgggcagtgctgggagaggctgtctccgttctaccacccaccaccaggcaagcctcaaaatgcaggttcatgtgctcccaggcctaggccgacgtctgtgccctacccagtgcctgcgggggggcggggggggtggagtgcgttaattcagcagctccataggaggtgcagctcttactgctcctcctccaccacgtgctcttctaaaattaagt

SEQ ID NO: 5214 - DNA, 612 bp, Canis familiaris
  misc_feature (1)..(612): n = a or c or g or t
cttccttgacacagtttcaacattcacatcctatgaacttatggattataagacctttgtgacttacacggtctatgtcagcatgattgctttagaaagaccagatctcagggaaaaggtgattaaaggagccgagatccttgaggtgctgcacagccttccagcggtccggcaatacctattttcactctatgagtgtcgttactctgttttcttccagtctttagctattgtggaacaggaaatgaaaaaggactggctttttgctcctcattatcgatactacgtaagagaaatgagaatccatgcatatagccagctgttggaatcgtataggtcactgactcttggctatatggcagaagcctttggtgttggcgtggaattcatcgatcaagagctctccagatttattgctgcagggagactacactgcaaaatagataaagttaatgaaatagtggagaccaacagacctgatagcaagaactggcagtaccaagaaactatcaagaaaggagatcttctactaaacagagttcaaaaactttccagagtaattaatatgtaaaaccacgtaaacgagggatttcctttagagatannnatttg

SEQ ID NO: 5215 - DNA, 587 bp, Canis familiaris
  misc_feature (1)..(587): n = a or c or g or t
tcaaatcctttttttnncagtgccagtnngcacggcgtgaggannaccataaannagaacagatcactggtttacctcggcctgagattattcagtggtttggtgacacacgctatgccttgaagcatgggcaactaaaatggtttcgggacaatgcagtacctggtgtccctagtttccaggacccagcaattcccacacccccaccttcaacccgatccttgaatgaatgggctgagacaccacctctgccaaaccccccacccccaccggatatacgacccttggagaggtattgggcagcccaccaacagctacgggaaagtgatatccctcaactgagtcaggcatcaaggcttagcacccagcaggtactggattggtttgactctcgattacctgagccagctgaggtggtggtttgtctagatgaagaggaggaagaggaggaggaagaactgccagaagatgatgaggatgaagaggaggaggaggaggaagatgacgatgacgatgatgatgtgatcatacaggactgagtcgaggggactaggggagggaaggtctgttactaaaagatgaaccaa

SEQ ID NO: 5216 - DNA, 521 bp, Canis familiaris
  misc_feature (1)..(521): n = a or c or g or t
gaaggagattnnnnntgaaaagttcaacaccacggctgttcctaagtactnnnagtcgccctgggaacaggccattagcggtgatccggagcttttagaggctttataccctaaatttttcatgcctgaaggaaaagcagaactgcctgattacaggagctttaacagagttgccactccatttggaggttttgaaaaagcatcaaaaatggttaaattcaaggttccagattttgagctactacttttaacagatccccgatttatggcttttaccaatcctctttctggcagacggtcctttaataggactccaaagggatggatatctgagaatattcctatagttataacaactgagcctacagaggataccactgtaccagaaacagaagacctatgaaaagaaagttgtatgtgccacaaaaacctctaaacataaatgttgctgttttattattctatttaccggcacagtcatttacactcttcattagtagcaataattttgtagcaattta

SEQ ID NO: 5217 - DNA, 591 bp, Canis familiaris
  misc_feature (1)..(591): n = a or c or g or t
gctctgtgctcccaagaagatattgctgataaacttggtttngacatctctgcnncaaaggcagtccacattagtaatnctaaaacggctgaatttcaggtggcacgcactacccttcttcctggcctcctaaagaccatcgctgcaaatcggaagatgccccttcctctgaagctgtttgaaatctctgacattgtagtcaaagattctagcagagatgtaggtgcaagaaactacaggcatctctgtgctgtttattacaacaagaatcctgggtttgagataatccatgggctactggacagaattatgcagttgcttaatgtacctcctggtgaaaagaagggcggatatgtgatcaaggcatcagaaggctctgctttcttccccgggagatgnnnnnngatcttggccaggggtcagagcatcgggaagcttggggtccttcatcctgacgtcatcaccaaatttgagctgaccatgccctgctcctccctggaaatcaatattgagccttttctgtgaagatgggtctctgctgtgtgaccttccccgagtatcccctcctcnnnnnctgctgtcctatagtcc

SEQ ID NO: 5218 - DNA, 556 bp, Canis familiaris
  misc_feature (1)..(556): n = a or c or g or t
gataaaataaatgtttagaaannaatctgtcttgagtgagaaatttcagaccatggaaataaaatagaacactcaatgatgtataaaatcctctaagttggcaactgaatttttattgttttctactttttaaatagctactgaattgtgtgatcttttggcttctgcttgttattaaaagtacttgtcagatcttagtaagagccatgtgacatgagcaagtggtgaaaattggatattaaatttgagaatggcagttctgtgtaagaagaaggaaaacaggaagagagagaagtactgaagaaggaaatgagcccttgagagagacccaaggaaacctggaacccacactcaaacgaataaacagacacccagagataatatcactcaacaaatatgtatttaacttctaccttaagagaacaaagttgggtgtgcttttatgctgtaacatgttatatatataagcatgttatgtatataaacacaaatacaagtctttaaaccatcgatattgactataacttaagatattctcatcctgtatctatgcttt

SEQ ID NO: 5219 - DNA, 453 bp, Canis familiaris
  misc_feature (1)..(444): n = a or c or g or t
acacaactactaccagttttgtcttttcacgtgnnnnnnnnnnnaannnatgttgtnnntannnnnnnnataactttaatcttttnnaggtnnnnnnncatcataatgatttttcagtattacatagtcttcatactaccctttcctttttttttttttttttttnnnngngnnngattacaggtgcatggnnnagggcnnngnnnnngnnnnnnnnnnnnnnnnnnncnagtnnnnagcttgaannnnnnttccatctnnngacccnnnnnnnntgaccnnnnnnnaaatcaagagttagatgcttaactgagacccaaccccataccaccttttcaaaacttgtatagtatttcnctgagtgaatataacataagctaattaatcattccagcatggagggttttaagatggtttttagttttcaaatgagaagttagttntcttctaaaa

SEQ ID NO: 5220 - DNA, 584 bp, Canis familiaris
  misc_feature (1)..(584): n = a or c or g or t
catgtattacttgacaaagagacactgtgcagagagtgaccacagtctgcaatcccccacttcaacacaaagggtgtcgttcttctccaacaaaatagcaatccctttgagctcattgcttttgacttttcaatgggtgtcctaggaaccttttagaaagaaatggacttgcatcctggaaatatattaactgttaaaaagaaaacattgaaaatgtgtttagacaacgtcatcccctggcaggctaaagggctgaaaaacaaaagatagcctttggtaaaattggaggtagctacactgaggtaaaaagataatgatctcactgtttattaacccacattgtgtttagatgtccttaaagcagcgttcctaaattgtaagctcaggttcaaaaggttggatatgcctagagaaacaggagatttagatttcccaacactgaggagtcagctcttgatagaattgtgatgagttggtggtaatttgtgactttctagatactttttaaccccctgacttatgctacttctttgaatgtagatttnnnntcctatctttagtnnnngcatatatctgaatgtttt

SEQ ID NO: 5221 - DNA, 598 bp, Canis familiaris
  misc_feature (1)..(598): n = a or c or g or t
atcaaccccaacaagagaaagaagtttgttcagttttaaagatnagnaaccacttgctggtnnaactgnnggnnagtagaaggtactcagctattctgtttgtggctccaactcttctaattaggtcttttcttttcaggttttgtagtcannntctttctcaatggcagaaaataggtgtctgacaaaatacaggatttgtgtattccttccagccctgtggctttcttatcatagcctcttactaatctaaatgggcagaattaaaaaaaaataaatttatgcagaggaaaaattgagacaataatagactactaaatcttgagacactccaggtttcttctagagaaataccttttattactccatatttggcaggctcagttattaaccaaaacaatctcagttgacatggaagatgaaaatttttaagtttaaaacattaagaatcttgactttttaaaagatttgtactttaacacacgttgaactttttaatcagactggttgtactctaatttgtaatatattaagatatcatcgagatcactgtagtatatgtattgtgtatttttatatataaatgttaacttagttc

SEQ ID NO: 5222 - DNA, 463 bp, Canis familiaris
  misc_feature (1)..(463): n = a or c or g or t
tntgttctgaagaggacatttaatgttacattgccaaatacttcnntgantacaagagaaaacacttttcctatagatcaaaaagccaaacaaaaatactcaggaagcaaagtaaaatcttctaaatggtaatgaactggaggagcaatctgaaagaatattttggcttaggttgagaagtacaatagagacagcacttactgaaacagcttttctttccctgcagatatattgtaaaggtattatctattaatataaagataagctgacagttctctgacaaagaagtaattccattttgatgatgccctccaccagctactcaaaggaatataattgttcttctaaccttgagagatagaaaaatctgttcttgtaagacatttaattctctatttttttctcaaaaatttcctattaaaagagcagtatatatattcattgcattctttctaaacatgta

SEQ ID NO: 5223 - DNA, 503 bp, Canis familiaris
  misc_feature (1)..(503): n = a or c or g or t
gcngatgcgtgnnnggttgccagtgnnntcaggtcaccagcagnnnngtgttggagtgatgagngctgatctgtctccaggttttgtgtgttgaggnnctcaagaatggtggtcagcagtggagttttnaagctgcagcccaagaagaggctatgttcctagagcatgctcagccttgctgcagcaggggaagaacttcaaaggttcaaggaccagtggtcacccatcagtttggactgaaaacccagcttcaacagtttgtggaaacactgcttaccttgtgctgggattcatagaggccattttcttatcaacggcagagccaacaaatgtgtttggcaacatttttttaggataggcaatgttggttgtcattaaattgagttttctagtaatgtattacaaatattgtagccttcttatctcccttgtgcaaacagcttttgtgtttacttgtaagaatttgttnnnnnngtaaggtctcttaagnnnnnnacttacta

SEQ ID NO: 5224 - DNA, 580 bp, Canis familiaris
  misc_feature (1)..(580): n = a or c or g or t
ccccagtttgcgggtgcacatttctgtgatgtgctgcatgtctnnagacaattcccngnacggcctgnnncgtccccttgannnngtgaggaaatcactgcggcgggctccggtcccnnnaactgacctaaatagtggctttgcccctgatgaagtagtgctgattgctttgtacatgtagcgttcatcatcatcagccaggcccagcttccctgctcagagaccgagagaaaacacannnnnctgagcagagagagctgaagagcacgattcagccaatgatcacgaggatgcgaagagaccgcaaggtacaatgagccaaaaaccatgcacctgagacccagcctcccaggcagcaaacacccctgcccatccctccctgcccgtccaggtcaccgccacctcctgccccatcagcagcaagtctttcctttcacatgcatctgggggaggtagcctcccaacgtcctattttattaccaggtggggagatgaatggtcctatggtaaatccagaaacacagagtgaccctatcaaatctttttttaaaattgtaatnttcgtcttcatactcctgct

SEQ ID NO: 5225 - DNA, 216 bp, Canis familiaris
  misc_feature (1)..(216): n = a or c or g or t
ttacgtatcctccatagacagggtgggccacagggagngaacactggtttcctcatgcttggggtcatggtgagcacaccatcagtcttctacataaatgctttaaatggtgtaggatatgaaccagcacaactcaaaacagaagctgatccttcttatattcaatcagaaatgtgatcagaagaaaattgggatgcctgggtggctcagcagtaa

SEQ ID NO: 5226 - DNA, 551 bp, Canis familiaris
  misc_feature (1)..(551): n = a or c or g or t
gccnntcntagtcactttctacagattgtaatgtctcnntccagctccagcntactcacagacattcctgagctagagattctaactgggagctacttactacctctcctactcacctgactagacctttttactactagtgactggcaaaatgactctgtcacctaagggccataagggttccttttctggaggaccacctgcctgccaccttctnnaggcactagaccttatttcccatctgtgatgtggtagggcatgttctctgccttaagcaaacatttatgagagacagtcccctccccccaaaaagagacctcaagtaaaactacaagcctgaaaggttatggattatgggttgtttctggtggagatcactttctacaactaaatctccatttttcctgtttcctcttgtgttgaaggggttgccttttggtaaagaaaaagatttttaatcgtagagttaaatatcatggaaatcccagacagatttttttaaaagcatggtcctctggaaagagaaatagtaatgacggtaatgttaacgg

SEQ ID NO: 5227 - DNA, 205 bp, Canis familiaris
ctccacgcacagcctcccaaggtgctgggccccctccttcccggcctggacccctaagggcttggcccctcccaggggcctgtaactaagttgggtcctgccgggcaggggtcccgggttcttctccgcccccttgggggacaggaatgggcacgtccaggtggggtgggggcagcacagactgttccgccgttttgcatattgt

SEQ ID NO: 5228 - DNA, 620 bp, Canis familiaris
  misc_feature (1)..(620): n = a or c or g or t
tgacaagggctatgtggtgnnnnnnnnngtgtttgataataangtaaaggttcggncngatacaatcattcaggtatggcgagaagagatgccagtacactatgtgaaggagatnnagctgatcaccaaagctggcttccgtgccctgctctctgccccctggtacctgaatcacataacttatggccctgactggagtgaaatctacatggtggagcccctggaatttaaaggaagtcctcagcagaaggctctagtgattggtggagaggcctgtatgtggggagagtatgtggacagcacaaatctggcccccagactctggcccagagcaggggctgtggctgagaggctgtggagcaacaagttggtgactaacctggactctgcctttaaacgtttgacacaattccgctgtgagctactaaggcgaggtgtccaggcccagcccctcaatgtaggctactgtgaacaggagtttgaacaaacctgagcaagcagccccaggcactgaggagggtgctggccctaggagagcagtaatggggccaggcttccactgcatcccgcccgggggacggagccccttgctcacgtgcccctgtccatggagagaaggg

SEQ ID NO: 5229 - DNA, 50 bp, Canis familiaris
  misc_feature (1)..(50): n = a or c or g or t
tccaaatactgctgatatcttatagtgaaaannannagggatnnntgggt

SEQ ID NO: 5230 - DNA, 703 bp, Canis familiaris
  misc_feature (1)..(703): n = a or c or g or t
agcatgttgggtactgtacccagataggggncntccagaaaaacgaagcaaaggcaactgaatcatgcatttccacaccagaggaacatgtttatgaaaccgtttttacaacagcatatcccagtttacaggagaagaaaaacctcctgttagtcctgagtgcagaggtgttaagagcctccaactctatgagactgcggtttatcgtggatccgaagaagaaaaaggtgaacggtagattggtgccagaagacagttgcgtcccacggtacggattaatcgtcaccgacgctcaaagggcccaaattgagagctcccccaagccttactgtgtgggaaagaaattctacgtgcccctggaaagactcattacttttccaaaggtgaaccgcttggttgatagtgttgagcggctgcgcagcctcctttccgaggcgctgaagctgaacagggatcagagtgccctccaggtggacttgcatgatcactactcgcggaccatgctttcctactgaagccgcggaccttaatgataggcctagttcgaaaattgtacgtttaggcaacttagttttgaatttccctatccttgtgtgttttcatatgctttttgggggtggtgtagggttcacgttcacacgtttctgttgtacctgtgttaaatgacttaaatttgtaaactatgaaataaaacttttcnnnn

SEQ ID NO: 5231 - DNA, 566 bp, Canis familiaris
  misc_feature (1)..(566): n = a or c or g or t
gccntggcatcaggaaaatggcccagcggggtcagcttcaagcttccnnnncannagcccaatgcacagggtcgctcttcannaggctctcactctccttcccagtagcatgcctcttctgctgcaaaaagagccatggaaggaacagacccagaagttcattgactggctcttcagcatcatggaaagccctaaagaagtcctctcagcaaaatccagggatcttttaaaagccaccctgttgtccttaagagtcctcccagagtttaagaagaaagctgtatggaccagagcatatggttggtgaaggtttgtgatagcagcagcctcagctggatgaggacaaccatagaaatggaagaagtttttcagagttcacatctgggattgccgagacaggatgcagagagttaagtggcaggaaaacaggtggatacaataactggcagcttgacatgtgcctgcagagagaaggggtgttgcttcggtgcccaggcagtggagactgaaagaacttgaattannnnttatttggctggagnnnnnntctgaagattttctttgtg

SEQ ID NO: 5232 - DNA, 562 bp, Canis familiaris
  misc_feature (1)..(562): n = a or c or g or t
tgccgctcttcatgctgtgccacgtgcccgagaggtcccgnctgcccatcctcttcccacaggatgcctacttcatcannntcatgctgctttttgctgtttccaacggctacctgatgtcccttaccatgtgcctggcgcccaggcaagtgctgccacatgagagggaggtggctggcaccctcatgaccttcttcttggccctgggactctcctgtggagctgctttctccttcctcttcaaggcgctgctctgaagtgctctgtccagggctcacccacagctctcttctcgctgcccctttgaacctgagacccaccacagggggaatggcgagccaggcttaagcctctgctgggctgaggccccatggtctgggggtgccaggaggaagtgggtgccactctccttccttgactggtgtccatctgggggctacgaggaagattcaccagcatcattctaaccctcacccaggaatggagctgacacagacagactacttagaggcacacaagacctcatcccaagggcgctgatcagggaagagagggccaaggg

SEQ ID NO: 5233 - DNA, 622 bp, Canis familiaris
  misc_feature (1)..(622): n = a or c or g or t
atctccnctaaacgctcttcattcatanntcntgtgtgttgatgcnnnnnnntggaagatgagnnnngtgagctttagggctccttttctccttccccnnnnnnngnnnnnnnnntctctctccttttatttctttcacctaattcttctctgtcagccctcccctttatatgccccactgataacactgggaccaccccttacctgataagggatgaatggatcaaaggagtgaggttgctgaagaacatccttttccctgccatcccaaccttttctcttcctgattgcttctagagttgctgcagttctgacaggggcagttctatctcccctgtcccttgggggaaagaagttttccactcttcctgaagagggtatcagcattaaacttcttttgccccctttttgtcccttttgggggcatttaagatggagaaatctgttttggtttcatcgaatcacgatcacctgtatttattgctgggagaaggctgagggtggggggagatgatcatgtgtgcccagggttggtgggaagctctgggtgaggggtgggggaagactgactggggacaagggggaatatttgtggcaattttttttacttcctcttggcccc

SEQ ID NO: 5234 - DNA, 612 bp, Canis familiaris
  misc_feature (1)..(612): n = a or c or g or t
ttatcagtatggatnntgaggtangatggnnagctgtctactccctatctgaatttgtacatcggtttnnnagtcagaactactgaacttgacatctggatggagaaccgtggagaaattctaggacactaacagttcatcccttcatttgggacagcaaacactatggtacatttggcttggaattatattttcctcttttaattcagttgagttgaaacatgagtaaacaacaacaacaataacaacacattttttttgatatgtcacgttgaaacttgatgtagtgcatatttgttaagatattccaatattcatttgttaaaaacatgtgatgacttatgccagtaattccttttgttaagatagatgtgtggactttgttctggatgttttgtttctttccagctacactgtaagctccttgagggcaaggctgtggctcattgctctgtgaatcccttatgcccctaaaaggtgcccataaaatgtttgctagtgattgtgctgctgcttaaagggggctggtactgtgagctgaatcagcaataagtattagtctttttggacnnnnnnngttcttaagaaaagnnnnnagccctctcaggtttg

SEQ ID NO: 5235 - DNA, 598 bp, Canis familiaris
  misc_feature (1)..(598): n = a or c or g or t
cactcacagaccaggnntctgtcatcanggtnnagattcatgaagccacgggtatgcctgcagggaaacagaagctacagtatgagggtattttcatcaaggattccaactcactggcttactacaacatggccaatggtgccattatccacctggccctcaaggagagaggcgggcggaagaagtagaggagagaaacctgctgttagatctcagccactgccgtttttgcctctcctgtctcccactgccctattctctgccccagccccaggagaccctgccttgcactgccctattctctgccccagccccaggagaccctgccttgcacatttgtttctctctcaactaaatttggaaattcaaattgtcctgacaagttttcttcttcacatgggtaagggagagctttctaagccagtcttctccccagtggtctctggaatccttttgtgtttgagtcttgacttgaggggattcatttctttgagtagcatgttaggagatgtgaactcagaaatgtcctgtgggatagtgtcatagtactaagtggcacgtggctgatagaatatggttgttctcattgttaatcatt

SEQ ID NO: 5236 - DNA, 678 bp, Canis familiaris
  misc_feature (1)..(678): n = a or c or g or t
cgacgacgacgatgacgacgacgatgatgaagatgatgatgatgatgattttgatgatgannnngctgaagaaaaggctccagtaaagaaatctatacgagatactccagccaaaaatgcacaaaaatcaaaccagaatggaaaagactcaaaaccatcaacaccaagaacaaaaggtcaagaatctttcaaaaaacaggaaaagactcccaaaacaccgaaaggacctagttctgtagaagacattaaagcaaaaatgcaagcaagtatagaaaaaggtggttctcttcccaaagtggaagccaagttcatcaattatgtgaagaattgcttccggatgactgaccaagaggctattcaagatctctggcagtggaggaagtctctttaagaaaatagtttaaacagtttgttaaaattttccgtcttctttcatttctgtaacagttgatatctggctgtcctttttataatgcagagtgagaactttccctaccgtgtctgataaatgttgtccaggttccattgccaagaatgtgttgtccaaaatgcctgtttagtttttaaagatggaactccaccctttgcttggttttaagtatgtatggaatgttatgataggacatagtagtagtggtggtcagacaaatggaaatggtggggagacnnnnatataca

SEQ ID NO: 5237 - DNA, 560 bp, Canis familiaris
cagctcggcgcccctcagtgaaggctggcacctgctcttccctccccatcatgggaaggcctgttttctgggatttgacagctgatctcggccaaagtcacttggcacatggggtggtttttttaatgacctcaccttcactctccatggaaaaatctggaagtttaagttaagctggactttctgagaatcccctcggcaggggtgaggacctgagtggagggtgggtcttggagcaatgtcccccctacttggatgcctggcttcctgtccccatcccactgccttccatcctgcggtgacgtgatctgcagagacctcagggagctcccagcaccccacagggccatgatggcgtgtgcctgcccgggagcccccatctgcatcactacagcctctgccctcctctccccaaagcacccccacagaacaggactggcaccctgtggacacgttgccctcccagtcacatgtagaggagcctgaggtgtgtggcccgggggctcagtcagtccctctgtccccccatgagcacctgtttcacaagcctgctgtatttg

SEQ ID NO: 5238 - DNA, 657 bp, Canis familiaris
  misc_feature (1)..(657): n = a or c or g or t
gatggnnnatgaagaagccatnnagaaggtannntggatcccantngacccactggctccagatnnggcccggtaccccaannacagtcaggcccgggccctttgctgcacggtgcaggccggtgagatgctctacctgccggccctttggttccaccacgtccagcagtcccatggttgcattgctgtgaactactggtatgacatggagtatgaccttaagtacagttacttccagctgcttgactcccttactaaggcctccggcctcgactgatggagctctggtgaacattgccaatgacaatggtgggaaaggtcgtagccctccctggccaggtcacgtccagaggcaacctggagtcagagggtgctggctgccagcccagcttgccttgggatcatcgctggggaatttggggccagacaggtctgggtgtgggttcccaggaagttgccacactggtgaggcagcagcctgtcctggaggaggagtggagcttcaggtgcagtgctgcctctcaccaacactgtggctttgggcgacttgccaccttggagcactggtgtcctgtctgtagaacagagaaaatggtggatcctaccccacggttgtgaggcttggagaaagatctttaaggaccataagggctggca

SEQ ID NO: 5239 - DNA, 59 bp, Canis familiaris
  misc_feature (1)..(59): n = a or c or g or t
ggttttcaagatnagttngggtatggtatcaggtctttgccttagctatttgatttcta

SEQ ID NO: 5240 - DNA, 543 bp, Canis familiaris
  misc_feature (1)..(543): n = a or c or g or t
ctacagatacttttatgcnntgcaagaaattcaggaatctgcagtcnagacacgtgtggtgacatcatgggcgtcagagnnnnaggattttcctttcttcaccaccgatatggnntgcaacagagctggaactccagccatcacatccacnncgcaagctgcaagaaaaggggaacaacaaaagtatattccaactgtgtttccctcctaaggagcaattctagaagtcctgaaagaggacttcgttggcctccattttgacctcaaactttctagtggggttctttccagcttttcccttggctcaggtggaagagcctgaaggcaaagcatcccctgatgagaatcagaactaccccctgaagcaataaggactgccctgagccagcaagtcactacccatgatagactcttaagactatgatggatttaaaccttccttcactgcccaccagcacttacccacccacctttgccccacatttcccttatacatacctggaagtattttcaaccttttggagatggtctttgaacccctac

SEQ ID NO: 5241 - DNA, 674 bp, Canis familiaris
  misc_feature (1)..(674): n = a or c or g or t
tcagagatgaactcacccagccggacccagactggggacagcagtagcgtctcgtncttcagctaccgggagattttgcgggagaannaaagctccactgttccagccaggtccttatccagcagccctcaggcccagcctccacggccagcagagctgtcagacgaggaagtggctgagctctttcagcgcctggcagagacacagcaagagaaatggatgctggaggagaaggtgaagcacctggaagtgagcagtgcctccatggcggaggacctttgccggaagagcgccatcattgagacctatgtcatggacagccggattgatgtgtccgtggcagcaggccacacagaccgcagtgggctgggcagcgttctgagagacctagtgaagccaggcgatgagaaccttcgggagatgaacaagaagctacagaacatgctggaggagcaactcaccaagaatatgcacttgcacaaggacatcgaagttctctcccaggaaattgtgcggctcagcaaggagtgcgtggggtcccctgacccagacctagaaccgggagaagccagctaaagacctgcgggctgtacctgctccctcccctccccaccccccaggacaccatccccttggnnngtggtgggaaaatggggctgccaccaaaatcaaat

SEQ ID NO: 5242 - DNA, 535 bp, Canis familiaris
  misc_feature (1)..(535): n = a or c or g or t
tccttgcacataatgccatggaacatgtgttgagtgcttaccatgttctaggcactatgttatgtgctttagaggttttatctgatcttcacaacaattttttggagtaggtaccacttttgtcctccattacaagtgagagaaatgaagctttcattaacaaggtaactaatccatacaatttgtgggtgcggtgccaagatttgaaattgaacttgataatcaaatacagttactgaatttccacgttatattgcttcctgtttaacatctgccatttatttcctcagcctgtgcaaattctctgttttctctctaaagtgtgccttgaaagatgaatgactatatttgtgttgagagataaccctgccctcatgggcaacaaaccctgattactctttatgttttatagtcacctttcatgttctacagcctgcttctttccagattaagaaagaatatttttgcctatttatctcttacatcttctcaatcatatctnnnntttttaagtatattnnnnncctgtcaaaca

SEQ ID NO: 5243 - DNA, 578 bp, Canis familiaris
  misc_feature (1)..(578): n = a or c or g or t
aggnnngcnnccagaagaangaggccaannagctggnnntcctnnagtnnaggnnnngacagnaggcgcagnnngagacggagcgactgtgacctgtgagcgcagnacgtcccacgcccggcccgctctgctgcccagcctgcaggcctcagtttccacggttcttaactgcggcgctccccctcgccgcccagttccgaggtttccaaggggcaggcgctgcccccaccccctgccgggtggtcttcccacccagcacagaggggtacccagcacagcggggtggcccagcacaggatgagcacggggtcccttcggcctgggggcaccgccccgtgcgccacagaaggcctggctcccactcctcccccagcccctgcagacccaggacgcccaactgcccagcactttctgccctcccagcctccctggcagccagcttcaggggagcagagacctggaggggacacccattggcccttcaggtcacagaccatgcctccttcgcgtgggcacatctcctgggccctggcccgctccccccacttcctgggccttgctggtctccccacagactg

SEQ ID NO: 5244 - DNA, 550 bp, Canis familiaris
ccaggccccgctgtcctccctcgtggtcattgtctgcgggggcagcaacatcagtctgagccagctgcgggccctcaaggaacagctgggcatgaatgggctgcccaagtgagggcccccgcctgcctgcctccactcccaggggacctctggaggggctggagttttatccaggcctcgatgcaaatattattcttgtgtctgcctgtgagcctgtggcccggaccagccggttccctcctcgttcccatgagcccaccctgccaacaggccgcagctccgaggcggagccgggtcggcagccagcaaagctgtgaactgaacctctctggtacctgtgcagcggctctgtccctagccaccgtggctaggtgacagccacccgtgtgtcccataccaggtccccggagcagggagggcaggagggacggggaccactacaggatgggcctcctccctggaaggcgcacagggcagtgggcccagactgagaaccatccgtcctctccccacaggaagcccagcccggccccgccctgtcatttttcta

SEQ ID NO: 5245 - DNA, 545 bp, Canis familiaris
  misc_feature (1)..(545): n = a or c or g or t
ccatccccacggcatggtcatgtgatggtggcagcagggacaaagctcttcatccatggaggcttggcagnnnacaaatnnnatgatgatctccactgcattgatatacgtgatatgaagtggcaggagctaagtcccacgggggcacctcccacaggctgtgctgcccactcagctgtggctgtagggaaacacctgtacatctttggagggatgactcccacaggagcactggatacaatgnnncagtatcacatagaaaagcagcattggaccttgcttaaatttgataattttctaccccctggacgattggatcattccatgtgtgtcattccatggccagtgaggtgtatgtctgagaaagaagattcaaattctgccncnctanactatgatactgaggaaggggattcnnncgaccaaggagtgacacaaggtggtgactcacatgaggaaagccagactgacacactgctctgttttgtgtttggcgggatgaatnnagaaggggaagtctatnnnnnntgtattgtgactgtagt

SEQ ID NO: 5246 - DNA, 484 bp, Canis familiaris
  misc_feature (1)..(484): n = a or c or g or t
tcactcaggagcnnatccgcgccgaagnnnnnctaggggcgatnnngngaaccgtcaccttttagcgttcgtccgccctgctccttggcgcccggggaagctgtactttcaaggtcaaaatgacccggcaaaacttttcaaagcagggccacgatttctgccccgagcccacggtgtacactggcctcatttaaaaaataataataaattaaaaaatatatatatatataatacccaacaaggagcattccccgtataaagataagaaaaaaaaccacacctccctagttcctataaagatgaaagtcacagaacctcacacacactggaaacgtaagataaacacctgcacctttcaggaatgtcctttgtctcaacggtttgtgcntagctccttatgtaggagacctaggtgaccctgcgccggatgttccatcccgggagcacgctttgctttgcggagctggagtgttcggggcagnng

SEQ ID NO: 5247 - DNA, 520 bp, Canis familiaris
  misc_feature (1)..(520): n = a or c or g or t
catcatcatggggatccccatgaacattggaactgggctcttcaagctgctgcacaaggctgacagggacccaagccctcccaggagacccctgatcttcgacacaaacgaattccacatccctcttgtcacatagtccagggaagaggagaccattcctgacctcggcagcttgtcccgtctggaaagaggccgagactgacatctgacatagagagcttgtgttccccacgacaaggcctgacatccccattgtgctggcggaggcctccgtgtccctgagagcagctcgcccgggcccctgatcacaccacaggccctggttgggaggactgaggtttgtctgtttgaaaccctagccttataaggagaccctggccaggcatctttactcattctcacttcacccttccaaccatccgctttcaggaggatcacaccatgacccagagccagctnnnnncccaagaccagggcatagccttggtttttctgttcctcagnnnnnttagaatctcta

SEQ ID NO: 5248 - DNA, 613 bp, Canis familiaris
  misc_feature (1)..(613): n = a or c or g or t
gcatcccttcacttcgcgttttggnccagaagctacttgagctgctctttgatcacgaggtnnagaannagcccctgctcttccatgtcttcagcaacgcgggggtcatgctgtaccggtacgtgctnnagctgctgcagacccaccggcgcttctgccgcctgcgcgtcgtgggcaccatctttgacagcgggcccggcgacagcaacctggtgggggccctgcgggcgctggccgccgtcctggagcgccggcctgccgcgctgcgcctgctgctcctggtggccttcgccctggtggcggtcctgttccatggcctgctcgcgcccctcacggccctcttccacacccacttctatgaccggctgctcgacgccgcctcacgctggcccgagctctacctctactcgagggccgacgaggtggtgctggccagggacgtggagcgcatggtggaggcccgcctggcacaccgggtcctggtgcgctcagtggacttcgtgtcgtctgcacatgtcagccacctccgcgactaccccacttactacacgagcctctgcgtcaacttcatgcgcagctgcgtccactgctgagccccctgccccacccactc

SEQ ID NO: 5249 - DNA, 609 bp, Canis familiaris
  misc_feature (1)..(609): n = a or c or g or t
ctcgaccacccgttcctgtttgccatttatgagcaagagtccaccgccctccacctgctnnnnnntgtggccaacccgctgagcggggtgtgaggcctggcctgcccccgggacgcagctgtcaccgtgagcaagggcagcagcccacagcaacgctgattcgccaccagtcgtctactttgccttccagtgagtcagcgtggagcgggaaagaagccgtttctccttagcaagtgtggcgctgtgtataatgagcagcagaacctgcaggcagaaagacctcccgggttctcacggttatcttgggccacgtgggggagccacgaacccgaggtcagcacagggaaaagtctgaacagaccaactggttcgtgaaaccaaaaattgttttttatcagagaacagaaactgagttttaccatttcacggttttcatggccttgggtgtatatccggcgagggcctgtgagcggacggcctgctgtccccaccacgccttagctttggttgctttcccggtcttctttcccaggatactgttatctttgaaaaacacattgcatctgaatttatgttagaatgtaataccatggctgattatcccttgtg

SEQ ID NO: 5250 - DNA, 588 bp, Canis familiaris
  misc_feature (1)..(588): n = a or c or g or t
gctnntgtttttggnnnnnaggtnntaannnggggtnnnggaatggannnttgcatcannnggctccctgcncagtggagaacctgtttctccctcttccctatacccctcccctgttcatgcttnnnatgctatctcactgtctctcaaataaataaataaaattgaaaggaaggaangaaggaagcaagcaagcaagcaagcaagctcacttgcnnngagggcggcctgggtggctcagatggttaagggtttgcctttggcnnnggatcctgggatcaagctccatggcgggctcctgactcagcaggggataataatagccctattatcttaaaaaaaataataaagtaagttttatacccaatgtaggacttnnnctcnnnnctccaagatcaagaatcacatgctctaccaattcagccaaccaggcaccccctaaagtatatattttttaaagagggtcattatctgaatggatggatgaaacatctgtgatttacttcatgaaaatctatggaaggaaaaagggagagtgaatagctgaagatggggtcattcaaggggttcgtgggtatttgcactatt

SEQ ID NO: 5251 - DNA, 708 bp, Canis familiaris
  misc_feature (1)..(708): n = a or c or g or t
catccctnnagggcttccccctgtttcccacataccccttctgaccttgaagtgcagctgtgttttcaagaggtcactctagtcttagacagcccatttctggagcctgnnatgagtcccaagnnannctgncacacatcagagctcnnnnnnatnnnnnncaagaaagggctggtcnnnnnnccccagcctgtccgcctcagtggagtggattctgtgtttggcagggtcatcacagctcagccaccgaaatggactggnnnnttcagagtttcagacaaatcagccttttgcaaaatcatcagccgggagaaccagtggcccactggacttaaggaacctcagattcagatgacagtgaccatgtgtaaacagatgctgcgctctatccttttactgtatgcaacgtacaagaagtgcacctttgccttgcaacactccaagtaaaggatccccatgtgattccgtttcttataacacatcctatgctgtgtgcctgaagcttacagaaacctgttcatgtaaaggaaactgacatcacctgagccatcttgcttttctgtcaagcactgacaattcaggaacccctttcctcctttcctccccaaaggccagtgacagagcaaaggagagcatttccattgtaaagatgaacaacatttaaaagagagtcaaactagtgttgacatgtacatnnnnnnagaacca

SEQ ID NO: 5252 - DNA, 560 bp, Canis familiaris
  misc_feature (1)..(560): n = a or c or g or t
tgcagccgtggtcnagccttggnaagctctangnntcagctgtaacctgtgaaaacagcttcctggagacaacattcctgatcagaagctatagtttgtactttaaaatccactaaggagtaggtctgtgtttcatatcgctctaaaattggtcactctcctattatgcacagtgtgctaaaaataagctttttttgggggggaacatacagaatgttccattgttactgtgaaatttttctttctagctcagtgggggttggaagggagtttttttcagtagcagattaacttttaagccttttctctggattgtggtggtttggacagatgagtgtgcttaaatcctgaggcaaagcagtgagaaatgtttttcatcttatcaagaaaacaatttggctgttttttaagtttttgattctactcttctatgctggaccacactcacacgcagcatgaagtcagtcaggttcttgacaaatggtattttgataggtactggattgtatctgtgccatatttgtgcccactcttttaaggacaatgttgcattatgttca

SEQ ID NO: 5253 - DNA, 610 bp, Canis familiaris
  misc_feature (1)..(610): n = a or c or g or t
ccttgtgagcagttggtcacagcactgtgtgatatcaaacaagcctatacacagtttggaggaaaacgtccctttggtgtttcattgctttacatcggctgggacaagcactatggctttcagctctatcagagtgaccctagtgggaattatggaggatggaaagccacgtgcatcggaaacaatagtgctgcagcggtgtcgatgttaaaacaagactacaaagaaggagaaatgactctgaagtccgcacttgctttagctatcaaagtcctaaacaagaccatggatgtgagtaaactctcggctgaaaaagtggagattgccaccctgacaagagagaacgggaagacggtcatcagggtcctgaagcagaaggaagtggagcagctgatcaagaaccacgaggaggaagaagcgaaagcggagcgagagaagaaagaaaaagagcagaaagagaaggagaaataggaggagaaccctgggctctggcggctccggggccgtgtgcccgctgcccggcctccctcgcccggtgggcagactggggcgggcaccagcgcaggcctgccntctctgtccggttgagnnnnnnagtgacgctcggtcg

SEQ ID NO: 5254 - DNA, 693 bp, Canis familiaris
  misc_feature (1)..(693): n = a or c or g or t
cacattcaaactggtgnngtcccgcttggtgcgtgagggcttcaatgtaggcgtaantactgaccccttgttcgtgttggacaaccaagccaaggnnntccggcncctgacagtngacatgtaccaggctgtgtgcaatggaacctggagactctgaccatctggccagtccacaatacatctgaagtggtagtgcccaatgctgactaccactcccattgtgcagggtcaccttcccctcaaacctggtaaaggtcatcatgaatcccagcctggccataaccccagctccagagtgagatgatgctaggcccagtagtggagtgagaataaacttggatgtgtacacagatatctatgtgtacaggggccaagggcagacagccccaagattggtcactttggcataaagatcattttgtgttaaaagcattaaaacctgagcaaattcagaagctttctctcccaaaaataactatgttgataggaatctagcaagggctctttgatcacattcttgtcttgtttctgaatggcccaaagaccatttgtttaccgagtatttactctttcatcttcctttaaattgcattctttcctataaaattcctagacctctctcagttcagtatatgtatgccttattttgcctgtctttagaattttatggttgtatgcattcctcanctgaac

SEQ ID NO: 5255 - DNA, 543 bp, Canis familiaris
  misc_feature (1)..(543): n = a or c or g or t
gagatgctttccgagaatttgacaccaatggtgacnnagagataagcaccagtgagttgcgagaggccatgannaaactnntnngccatcaggtnggacatcgagacatagaggaaattatccgagatgtggatctcaatggggatggacgagtagactttgaagagtttgtccggatgatgtcccgctgaggccacgggggcccttccaggactgccaagctcccgggcgggagaagaggagccggagctcgcgtcgccccgccgcagccgccgagagcccaggatggactggcggacggggcctgcctgcaccccggacccccacccctccgcactgtgaaagactcacaactcctgcaactggaaaggggggcgcccgccaccgaggaggccccagtgccaagccggcagaggtgcgccgggcgccaagtgccaaggacccagctgctgctggcggggtgggccagggagccgccagcagcccccgcacagcatgtccgccccggggcaaagcctctcgccgcctccttcgctctctgcc

SEQ ID NO: 5256 - DNA, 575 bp, Canis familiaris
  misc_feature (1)..(575): n = a or c or g or t
taagacagccaatgcctcttcctgcagtgactccgactatccaccgctnnaactagaacctgagccgctctgtctcagccttcctcagccaggagcctccttccatactaactggccgtgggcaaggagccttggaactgaggtttaaaggaagaggctgctctgaacatcccagggctaaaaccggcctggaagaaaacctgacgtttctctgctcaatcctctagagccccttcttgggaagaagaaagaaaagtctgctgtcttggagccaaggacgatgcaagagcagagagagggttcagagtggtcttagcaggggccaatctagcagatagactcctgccctgagtcactgccagaagctgccaacacaaaccaagagnnnntgggctttttgaaactgaaaagaagcaatttgcgtctacccagggagcctcttgtctggagccaggagacagaatagagagacccaggaagacctgcttcccagagccagaagaaaacagagagaagagttgggtggcaccaacgctgagnntcatgtgctccttcnnnnncagccctttctgccc

SEQ ID NO: 5257 - DNA, 422 bp, Canis familiaris
  misc_feature (1)..(422): n = a or c or g or t
cccgagccnnctacaaagggttcatgccttcctttctccgtttgggttcctggaacgtggnnatgtttgtcacctatgngcagctcaaacgggccctcatggctgcnngcacttcccgnnnggctccnnnnnnngnatctcnnnctgctgaccccaccacctctagctttggctttgcctccagccgggccctgcttcccctccctctctcctttccctttccttgcactccctttcccaccacctccctttcctctccctacattctcaccccctcttccctacctcatctccccactgcctctcaatcccagtagagttgatctcagttaacactgtgggaggcctggcaccagccaggacccaagacttcagtcccttgaaaagttaagcccagctctttgttctgcccccaagcccag

SEQ ID NO: 5258 - DNA, 625 bp, Canis familiaris
  misc_feature (1)..(625): n = a or c or g or t
catcaactgtgtataaagaaatattaggtgtttnntcnatnnatngntcaaataaaccattgctcnnnanngtcttagcatgaccctcacgctaacagtcaatcccatccggaaagaagtctgtgtataaggcaaatgtccccaaagatcagacttaaagtattagcatgttgttgtgattttcactttccagatagaagactaagtttagggagtgatacagaggtgatctagtcttaatgggagtgaaatgtcattttacttccaacctgccttcaggccataagtgaaagccaaattcattagctttggttagacctaagtagtttccttcctcacttttacaatggacttgggtcttgctatagctcacagcagctccatacagtactttgatcccaccgaggtgggtaccgctaccatgaccaccatttaccaataaggaaacaaatgcccaagcctttacctactagatgcccagctaggtgcccagccttgctttgtgactcaaattctcccattaaaatcaatcagtcccacctccctttcacatttttaggtgctaaggggattactcaatctgacgtccccaaacttgaagtaaataaaaactgttaataaaact

SEQ ID NO: 5259 - DNA, 592 bp, Canis familiaris
  misc_feature (1)..(592): n = a or c or g or t
agaaccccatcacatccaggtgagaagaatgggcttgtgcaaagtcttggtgaatgagnnnnnntnnnctcccctgctcaatcccatctctgccntagtncnnncagaggnacgcctgctcaggaacacatggcctcctggcatttcttggtatttagttgtttttcccaagcccctaatgaaatgacttgtacaacaatctgtctgtgccttatgaaagtgtctgtgcactttttatcctttttaaatgcaactttaaaaagtgggcaggggactagcatacatagtagtattctagaaatatgtgctaatcactgaaacccttctgcattatgtttttgatgtaggagtgatgaagtgtatgtctctcatcccatccccccacaacctgtgtacagacctttttaaaaatgtctcttattcttatttttctgattcaatactgtgacttctccaatacaatctaatctttggggatatgtaatacaggttttaaaacttggggggagtggtgggttgggaagggtttgcacccgtcctgtgtgttgtgcttttgtgtgttgtgtgtttttggttatgtctatttttatct

SEQ ID NO: 5260 - DNA, 668 bp, Canis familiaris
  misc_feature (1)..(668): n = a or c or g or t
antatgatcagaaagatcnntgaatcaatctccaagttccagaacctgcgnnngnnngaccttcacagcnactacatcgacaagcttcctgaatccatcggccagatgaccaccctgctctacctcaatgtaagcaacaataggctgaccaccaacgggttgcctgtggagctcaatcagctcaagaatatccgtaccctgaacctaggcttgaaccatctggacagtgtgcccaccactctgggtgctctgaaggagcttcatgaggtagggctacatgacaacctgctgaccagcatccccaacagcatctctaaactccccaagctcaaaaagctcaacataaagcgaaacccttttcccaagacagaggagtcagatatatttctagataccatcaagaggctggacaacttatatctggtagaggataaggatttgtgttcaaattgcctgaaaaagtgccaacaggcccgggacaagctgaacaaaatcaagaatatggccacagcaactccaagaaaggccatcttttccaatctggtctctcccaactccatggccaaggattcccaggaagattggaggtgacctgggaccctgaccctgaggcaggaagggaaaagggaggaagggnagaaggcagggggctatnnntacagggaatt

SEQ ID NO: 5261 - DNA, 548 bp, Canis familiaris
  misc_feature (1)..(548): n = a or c or g or t
gagttactgggaaagaggagtcaggactggggctggnnnnncagctgcaggtgaggtgactcagggnnagtcatgggccacagggtggttcccccnctcncagnnnnnnnnctgggatcggtgctgggagtcccccagctgctctggaactgtccagccctcttctgagaccgtcttgaggggaaaagccatgtttcccagaaagtgcccaggaagcaccgggggaggtgcttggccgcgcccctcctgggaaatccccggcgggcgctggcgccgtccagcctgcccactcccccaagagcccctgcgcttggcgccaccgccctccaccgtcctggccacagctggaagggacacacctgctgcccactgggcctctccagctgcccctcccgtggagggtctgtccgcgtggggcgggtgtagggagcttgagcccgcccacccgacgtgcccgccgcgcccccccgagcccgcccacccgacgtgcccgccgcgccccccacagacacggtttcacacgacccctttcgcaaaacagctttata

SEQ ID NO: 5262 - DNA, 675 bp, Canis familiaris
  misc_feature (1)..(675): n = a or c or g or t
aaaaaataagtacttggttttgttggtttaaagctgagctgagagcataatatgccattttcattgctgatgacattagcaaatgtgcagattcttttatacttacaatgttctttttactaaaactcttgatttattaacaaccacaaactaaacccagattgtcgcctgtagctcttggtactttggntgatggctnnnanacttacagaatcatcagatcatggtcaagccatgtaaactcccatctcaangtctgcctgctaaagctttttgcgntcctgattgagatttttgtgacattttctctcggacaattgtactttttgataacttagggaaaacaaaattacttgaataagggatcgcctgacccgatgtgttgcagagatacaatctttgtaaagaacttaaataacacttgtgaatattaagatgtgattatcttttcctgtccgtgtgcttattaagcagggagatagtgaacaaacgattatatgggggatttttttatttataagagctaatgtaaaatcaccacttgcaactttttagatctgtatgttgcctgtttaatatatttcttttaaactttaaaagggttttctatccactgttaatttcaattggataacattttgtcaagtgtttttttctgattgttatttgatgcta

SEQ ID NO: 5263 - DNA, 428 bp, Canis familiaris
  misc_feature (1)..(428): n = a or c or g or t
gaaaatgaganacttcataaagaaattgaacaaaaggacaatnaaattgcccgcctgaaaaaggaaaataaagaattggcggaagtagcagaacatgtacagtatatggcggggttaatagagagactgcatgaggaacatcaggatgactttgaatcactgaacagtcaggaatttgatttggaagaggaaactggtgagggctctgatgtggaagatccagatgttggtatgtgtgctgaagaagctgtgtcttcctctacagacacaaaaccacatgtgtgaaagtcattgatatctgactcttgagaaaggtactgccagagtttacctccactagagttctttgtagcttgtttgaatcctgggacccctgttgtattaaaatacaaatactatgtttttttaatctataatgttttatgtta

SEQ ID NO: 5264 - DNA, 291 bp, Canis familiaris
  misc_feature (1)..(291): n = a or c or g or t
caagtgacattcctggtgagctggacagaatggcatttnnnanggctggggtaacaaagagccactggccatatcagagctgtcctctgccaagggagtgggaactctacgtgcagaatccaaatggcctttgttctatccgnnngagaggcattaaagaaaatcatgtttccccaaatctgtttttcaactagcaaaatcaatagtcgtcacaaattatggcagttggttaaagaaaacccttttgtctcttcagaatacagcgtgaaaagagaaaactagagtttgact

SEQ ID NO: 5265 - DNA, 489 bp, Canis familiaris
  misc_feature (1)..(489): n = a or c or g or t
aacagtcataannncaggcagggtatataacagcatgnngnnnatcttacactnnnnnnnnctctnnnnnannnnnnnntatatttctgtgagcagaaaatgtaattaggaggagtnnacntgtatcactgacgtgttgcacaatctggacgaattacagaaactggctatctcagatgatttataaaaatattgttcgtaaataaatgtacatcacaatgaaattgactgtggttgttttttatttgcatccattagatagagatagtcataactaaaagctgtatatcgtttggtgagcattaaaccttgaaaaggaagaggatgaattcctcctcattttttctctaaagccaattgaagggaatcacaaccccccaccagcagtaacaacagcaagtctgcctttgaagtttctctctgcttcaacagctgagctgggaaaggggtggaagccctgccaccacacttcaaagccacgccagctga

SEQ ID NO: 5266 - DNA, 423 bp, Canis familiaris
  misc_feature (1)..(423): n = a or c or g or t
ccatctcatanntcancannnngcaatttacttcatcagtnnnnnncccaccagggtnnnnttccccaaatgncactcagggagggatcacnttaaagtccccagtgcctttcatcttgttgctgtggagaggatgggactgccagggcctccctgggcaccctgcccagtctcagccctagttgtgataatagccctagagattgtgacactttagagcactgaaaccaacagcccacagaatgtgaaggaacacctttgttccagaagagatttagatcaaagttcaaggtgaggctaccctccctgaggctgtcattggtaaggggcatggtcatctcatggcatcgagattatgggcattggctctggagttaagagtagcctgtactagggatgcctgggtggctcagcaattgagca

SEQ ID NO: 5267 - DNA, 541 bp, Canis familiaris
  misc_feature (1)..(541): n = a or c or g or t
gaagactnntcaaagcaggggctgaaacgacttccacaccannagcggttgagacatacctctagatattttgaggtatttactatattaactacatttagaaagtttttaggttcgctataagtgcagtaaacattacagacattggatacagtgggattttctgtagattttacttgagaggtgagtataaagcaatttgcagtcactgaaatgacaagaatactgctcaagtgtgaatccaaaacaattaaagcttttaaattttaaagcatttggtaaaactgttgctgagtcttttctgttgccaatagcaaactgcttttccattaatggagaattcatgcctttcaagcattttaaatatgacaatatttataaatgtgtggtttggaggaattgtttaaattctttttcctaatttcctttctcttcaggatagattctttcaacaagtaatttgtagtaatgactgtgttgacttcaattttggaatgtcgtagctatgtcagagattaactaatttggtcttattgaagcc

SEQ ID NO: 5268 - DNA, 445 bp, Canis familiaris
  misc_feature (1)..(445): n = a or c or g or t
tataagggaaaaaaaaaaaaagtgaatcatcatgcatnaaacaaattacggaattccatccattttgctggttttgtggcgtgcagggggtgtcttcagtctccgcggagggggctgaggcccctaagagcagcgggagtggcccacgcattaggacagtgagggacaggctggaggccagcgtgcgttgccgggccgcctcctagggcctgcggggggctctcagctcaccatctgcttctcgacatttcagtctgagacacagacgagacgggtgccactgatgacaaccccacctctcggaaaccgggggttggggaggtgaccatacagtgcagcccagctgaagctcaaacagccacatccttttggagttctttgccaaatggaacagaccaaactgcatccatgttcggggtcacatcttgatggaaggagtggagaa

SEQ ID NO: 5269 - DNA, 612 bp, Canis familiaris
  misc_feature (1)..(612): n = a or c or g or t
atcagagacaagcagggggctgcngtgtnnnnaggaccccgtcannngagnnntcatctctcccatttgtggtgtgtcccttggaatggcaatgagcactgtttgaataccactgactcagtccaactccataatnctccagactgctaatgcccagggtgggaaagtgatttgcccagggtgtcggagccaggaggaagactagagctaggacttctgatccccagactggctcttnnctaaccattagcttttcacctataccatgccgcccctctcgtattaccactgagataactgaggttcaaaggcataaggtgatgtgtcctgggtcacacagaaaggcatgggtgtgacagaaaagcatgggtgtaagcaaaagtcagannnnaatgcccaagtcctggctgaaggtttgaagaaagagctagtatcctatcgagccctgttcccatggtggaaggcaaccaccatctnnnaaagctggtgttccttcagtccatggaccccagccccatccatcgcagtgcagcagacatttggctcttatatctctggtcctcatcttcccacttcccactctgttcctagnnnntctcttctcactagttt

SEQ ID NO: 5270 - DNA, 665 bp, Canis familiaris
  misc_feature (1)..(665): n = a or c or g or t
gattactcactgttgtngccatggatcgatacctgaccatctgtattcctgacacaggaagaagaatgaccaccaacacttacatcagcatgattctgggggcctggctcaatggtctcttttgggctttgatgcctattatagggtgggctagttatgccccggatcctactggggctacttgtaccataaactggcggaaaaatgatgcattttttgtttctttcacgatgacagttattgcagtaaattttattgtgcccttgacagtgatgttttactgctattaccatgtcactcgatccattaaatgccatactactagtaactgcactgagtatctcaacagagattggtcagaccaggtagatgtaacaaagatgtccgtgataatgatatttatgtttctggtggcctggtccccttattccattgtgtgcttatgggcttctttcggtgacccaaagaagattcctccctcaatggccatcatagctccactatttgcaaaatcttctacattctacaatccctgtatttacgtggttgctaataaaaaatttcggaaggcaatatttgccatgttcaaatgtcagactcatcaagcaatgcccgggacgagtattttaccaatggatgtatctcaaaacccactggcttctgga

SEQ ID NO: 5271 - DNA, 626 bp, Canis familiaris
  misc_feature (1)..(626): n = a or c or g or t
tgcatcactgagtgtttatattgacttctctgnctctatcatgttgttgccaaagaaactatgaatttggaatgaaaagttttngccacaagtataaagctcttaagctcattaggcttctaacgtgtatgatagtataatatctgccatatatactgtacttttaagaacaagtctgcatttacctaatcataatgagttttgcagtgttggaagagaattagttgccctcttgttatgaaggaggaaactgagctaatcagatgttaatgacttacctagggtcacagagctaagcatagacaatttctaatcctttagccttagggttcttccccaccagaatggggactgatgaagataactaaggttgtactcagggaataggtctgttcttggtgtaaaaatcggggaattggggacttaatgagctctccggcctgctagtgtcgaatttaggtatttattaaggtaattctgaaatgctggttttttatgaaggcgtgccatgaaggcatagatgctttcttttgtatcctaaaagtaatcacactatatgcttgctttttcggtctgtatttgcaatgtatttatacctgacatctttcccaaaagaacttgaagca

SEQ ID NO: 5272 - DNA, 524 bp, Canis familiaris
  misc_feature (1)..(524): n = a or c or g or t
caatgaaggggaggnagaccacgaagcacctgcaggtgcagagtccatnnngacccccgctgccgccgctcccggccccaccactgagctaccagagctggccccagagcccaaggcgggggaggactcccagccgctgccctctgctctggctgcgagcgaggagtctctggaagtgcctcccggcttcctctacaaggtggaaacactgcacgatttcgaggcagcaaattctgatgaactgaccctgcaaaggggtgacgtggtgttggtggtcccctcagattcagaagctgaccaggatgcgggctggctggtaggagtgaaggaatcagactggcttcagtacagagaccttgccacctacaaaggcctctttccagagaacttcacccgacgcctggattagggccaaaaacatattgtagaaggagcctggttattgggtgtttaatccttcctgaaaacccgaagagttcacttttgctattacacttttaatgatttacaggctggtgccagac

SEQ ID NO: 5273 - DNA, 351 bp, Canis familiaris
  misc_feature (1)..(351): n = a or c or g or t
ttccctattcanaatggtctnnaggcaataaggaatgtaagaannnnatatttgttatataatgggancagcccagcccttctatttaattggcactgctaactgaaagtgcatggctcaacatcgtgcacacacatttgtgtgtatgtgcatgtgtatgtgtgtttctgtcttgaatttctaacacttccaaatgccattctcttgccactctctatttcttggcacagtgccttgaatttgctaagaatgttcaccaggtaaaaacccctatcctggtagtttaaaaaaaaaaaactagacaattaaaannnngacatcaaatgaaaannncccatnngnacaacctca

SEQ ID NO: 5274 - DNA, 585 bp, Canis familiaris
  misc_feature (1)..(585): n = a or c or g or t
tngggctgtttaagctgaaatatnnncatttcaattgacattatnctgagttttagctctcacaannnagtggctccttaactggcttctcttgtttttagttnnnttactagttaaaannatactcnnnnagcatggcaatgaaagtgattatttgattatttctgactgctgtaaaggaagtctacatcatgaaagcaatgatactgaactacacagaagagacatannnaatcatcttctcaaagaataaaagcactgatgggtggatataaggaaccagacctgcaagccactggatcagctctccctctgaatacacttatgggagaaataagaaaattattggaaagaagcccacttcagaaacttgtcttggagctgactgttagaaactatctgcaatgtctatatgctcagctctaaacttccaggctttgagagctgaaaggcatttcagatggtgccaattccaatgccctcatttcacagatggaggaactgagactctnnnggtagaaaaatttgcccannnnntagggagaataatgtcagagtagtggccccataaaggtcnncaannnn

SEQ ID NO: 5275 - DNA, 397 bp, Canis familiaris
  misc_feature (1)..(397): n = a or c or g or t
cctcctccccggtggcccccagtggagaaccccagagtacttgtgacatggctcagggccccccacaccaggtggaggtcccttggtgtaactatggcctggccanctgctgtcccaccagcaacggctccagaattcgttcagaaggccatctgcacgtgcacacagctgttccccagctctgctcccacctccccactcccgagggagcagagaaacctccttgccgtatgaaccagaggatcacggcacttcgtgaacacgctctcaccatgccgtccagatgaccatgtgcnnnctgcatcacnctgcatcattaccgggcagtgtttcctttccttgtttacttggtctgtccctgcccaggttgtcagttgtcagaggacatggcnnntgc

SEQ ID NO: 5276 - DNA, 604 bp, Canis familiaris
  misc_feature (1)..(604): n = a or c or g or t
agnactatncnctagaagctttngatttactactgacaagtgctataggttgaaaagaaaaattatttgtaatttgaacaagaaaaaacttatttttgtatgtaactttgaaaatattagaagtctttttaaattccagtacagtgtatggagggttttcaggaatggtggctggtttggtttgtttttaaacgtatattgataaaaacaaacattcgtatattgacaaaaatccatttgtgtccacaaccttgtatgtaaataagattttaattttctctttataccgtctcagaagctgagtctcatttaaataatttgttatttggctagatgatttcaggtagattttgtactttgtggatttataattttgttaaatacacacaggttttggtggtcacttgggaaatactgatccttgagtttgaaaattttatttgtcttttagaaataatatttaatatttcatgccttagtgtaggaagtctaggaagtcatcaaatatctaaaagatgaataatttcaaagaagctggtcaggttcttgttgctactttttcatttgtttactggcttaattctgtttaggttttattttttta

SEQ ID NO: 5277 - DNA, 595 bp, Canis familiaris
  misc_feature (1)..(595): n = a or c or g or t
cagtggtgtgttcattcccaaagggacattggtggtggtgncaacatttactcttcaccgagacttggatctctggccagagnnngaggagttccaacctgaaaggttcagtaagaagaacaaggacagcataaatccttatacatacctgccctttggaactggaccccgaaactgccttggaatgagattcgcaatcatgaacatgaaacttgccctcatcaaagtcctgcagaacttctccttcaaaccttgtaaagaaacacagggcttcattcctggctctcatttgctggtttaactgttgcagattcccctgaaattaagttctcaagggttaattcgaccagaagaacccattgttctcaatgttgagccaagagatgggagtgtgcgtgtagcctgaatttacctaaggacttcccttttgttcttggagaagctatatcccagaataccacagacctcaatttcctatgtgagtaaaacccagaaatgaagatgggcttcgtttactgcccatgacggatgactagagattctgtacacgccttcagctttgtctggtgtctgtgtggagcattatatatngtgg

SEQ ID NO: 5278 - DNA, 590 bp, Canis familiaris
  misc_feature (1)..(590): n = a or c or g or t
aatggtggtnnagcttttacttgtagcttgaaaggggagagattggaggtcaannagaaaatgaaagataaagcactgctcttggactctgctgtccagttctcaaggactagtcttatgcagcttcctatcagagttttacccttatttttaagttaagaaataatgattaacttatgaggaaattatctgggaacaagagtgggattccttcctgtgggttttttggcagccttctgatcccatcttcctgccccacaatgtgagcagctattcctacggtttctcttcacgtattgataaaacttccaactgtatgaacaacctgtagatgatagtgagagttactgattcctggaatgccatctgggaaccaaggatggacatggcaggtggggctgggatgacccttccctcccactcacccctaggaaaggaaagtctctgccatttgggagggtggcatctatgtcatttcttgtgggcaccagttctgagctttagtttgaggactcattcctgagtgtgctttttcctccctcttccctgcccnnntcaccttgagtttaataaatatggttgtacttttc

SEQ ID NO: 5279 - DNA, 552 bp, Canis familiaris
  misc_feature (1)..(552): n = a or c or g or t
ataaattcaataatgactttagtatgtgtcntccggaatattcaagattgagaattccagatgaccatgccatctcagacctatccatgtacaactatatagagatgcgagcacatgtcaactcgaggtggttcatcttccaaaagaacatggagcaatttcttcatgctattatgccatctacctttatccctctctataccatgatcaccttttccagaataagataccatgaggcactgctgcactggcattggcagaaaaaggtgataaacaaaggactctttttctttggaacacttatagccattggtagtacatacctacttatgtgcgccatgtcactgagacccctacactacttcagaagaccatgggactggcttgctcacttccagaaaacaggacatgtttccctgcaaactccatggggtcactagagaaaattcccaatgtcattagcagttaatataaagattctgaagtggcaaatagttggatttcttgtaactaaaactaagggtcaaaaccatgtttccgtcatcatattta

SEQ ID NO: 5280 - DNA, 471 bp, Canis familiaris
  misc_feature (1)..(471): n = a or c or g or t
gcatggccttccgtgtccccacccccaatnnntcagnnntggannngacctgccgcctggagaaagctgccaaatatnncgacatcaagaaggtagtgaagcaggcatcggagggacccctcaaaggcatcctggnnnacnntgagnannaggtggnnncctgtnacttcaannnnnacacccacnnntccacctnnnacgccggggctggcattgccctcaatgaccactttgtcaagctcatttcctggtatnanaatgaatttgnnnanagcaaccgggtggtggacctcatggtccacatggcctccaaggagtaagagcctcctggaccaccagccccagcaagaacaagaggaagagagaggccctcagctgctggggagtccctgccccaacttaatcccccaacacactgagagaatctcctgacctccaatttacatcctagnnnccaaggaaggggaaggg

SEQ ID NO: 5281 - DNA, 570 bp, Canis familiaris
  misc_feature (1)..(570): n = a or c or g or t
tacttactggtcnntcttcaccnnnnnngnnngttcagtggcgtgtgagcatgtgtgtctgtgtgtaagatggacagagagagactggtgtagggcacagaacggtgaaagtagttcagaacaaaagagcttctccgaattggcttatttcctcctaagtacaaggttataagacagaagtcttgataccattagtgtaaatctactacttaagctcaatattagtttagctttagtctcctccatttatataaatggaagaaacatctaatacaaagcactttaccattttcccaaactcagtattaaataagcacaagaaaaaatttaagtctctacatttcttttcaattgatatttgtgacattaggtgaattgactgcttaactggccatattcaaatgttgatatggaatcactgcccattttgatgatatggaaagtcacagagcctcatcttctacttccttaatgacttgcattaaaatatccaaggctggaaactgaggtcaacaaagcnnnatggataacaaagctggattcagagaatcnacacatggaaaaagttta

SEQ ID NO: 5282 - DNA, 487 bp, Canis familiaris
  misc_feature (1)..(487): n = a or c or g or t
gaaaaaagaatatccagnnncagaagacngganngtgctgctacagaaaggggacgccaagnnnaaagctcaggnngaggctgacaaacgcaagaaggagcaggagagaattatgttacagaatttgcaagagcgattagaaaggaagaagagaattgaggaaataatgaagcggacgaggaagacagattcaaatacatcaaaggctgcagaaacctttgttgacaacacatacgaggaggacgaggcggatgatgaggatgagtcgnnnnnnnncgatggttcttctgatgacccgcatccatcagatcgnnnnnnnaaagaatgaccagccgtgcagcaaaaaccagaaagatatgtaaacttcgcacagcccagaagagaattgatcatctgctgtggatctccacttctagtcccatctcccctagtctttctgcctctaatttgaacctggccaagaaaatgatcatcaaaaaaagggaaa

SEQ ID NO: 5283 - DNA, 537 bp, Canis familiaris
  misc_feature (1)..(537): n = a or c or g or t
cttggtannagcgnctcataaaatgaggtgagtngaaattaacttttagaaactaatttgttttgctaaaataatttggtctacacgattgnnaaaattacttaatagggcaaacaggaattgtctgagctgatgtactgggtgatgtgattagagagtaaaaggaagtgacctttttcattgcttctgttttcctacttgtaaaattaagtatttaccttgtagttctgggaaagaggaactaaagtcgctatcccaggatttgaaaattccttgcacctttgaacatctaaatgttttaaaaatcagaatgttgcacttgtagccaggaacgtccaggtccaggaattcctatttttggtctagttgattcttccagactaaattttactgtgtatctgctcattaacgtagcaactgtgtttctccttgtggcagagaacttggataggacccgcggatgttgtgtcagctacgatgtagggtctttctttgaactgagccagataacacaggagtaatgactacgttactacc

SEQ ID NO: 5284 - DNA, 477 bp, Canis familiaris
tgagcggggcttcagtgccatgaaccggatcaggaccgatgagcggaccaagctctccaatgaggtgatcaatatgctcatgatgacagcagtgaacggggtggcggtcacagagtacgacccccagcctgccatccagcattggtacctgacctcctcaggccggcgttttagccatgtctacacgtgtgcccaagtgccaccccaagcccatgcaagagcagggctcaggaaggagaagatgggagcgctttatatggaggaggctgtgacccagaagccacctattccatcctacagggagccagaggagatcctgaaggactgcatcatgaaccctcccgacagcctcctgtagccctgtaccagccaaggggctcctgagctgtcctgatagagagttcatgcaggagcaggagtcctagggattgccttggagatgaccctgctgccatgccccttggaatcatggtgaca

SEQ ID NO: 5285 - DNA, 450 bp, Canis familiaris
  misc_feature (1)..(450): n = a or c or g or t
agaccanggtnnctgnagcagacacgngcaaagnnaagaaggaaatgcnngagacagcanntgcnngcacaatgacctcgaggacattgaaaacaggtctgggaagaactgggcaaacaagacgtatttcaagagtaccctctgcccaaggcctgactttgaaagcccacctgcaggnntgcctcctgaaatgagaccgaccactgcttcatcgaaccgacctaatttaccttgttatgaaatgtggaacaggcgctaagactctccaggagaggtcctaaaggatggctctccgaagggtggggctcaacttaccactaggaacatctgcaattggatggaagacagtttcattgctcaaatcacgattgtgccccttctcagctggaagtagctagagtgatcgtcactccnnnnngtcaagaaggaggnnnnnnnaaagccaggggt

SEQ ID NO: 5286 - DNA, 498 bp, Canis familiaris
  misc_feature (1)..(498): n = a or c or g or t
caggttagggggagtcctccacatttctacctcgactgtccattggtgnctcagcagggctgtaaaattactcctcatgttctgaatgaattgatctaggtagtggcttggtggttgggactttgaaaagcttccaggtgattccaatgtgtggatgagtggaaaaccatcgggtgggactcctgtgattgggttccacctcaagcgaggggcctcttcccaaatcctgcggtggtggcagaggtgaacaggtgtggccagggctccgctggagtctgttacaggactgtggagcaccagagccccaggtggaaggagccagactgggaagtaggaaagacaaggacagggtggggatacttggtactccagcaaggtctccaacttctgtgataattaggtctgtgctagtgccagtccagacttgggtttcaccgactccaagatcccttcagttnnnnnaactctttatgtgtcnnngaggaagaaaaccctgcc

SEQ ID NO: 5287 - DNA, 630 bp, Canis familiaris
  misc_feature (1)..(630): n = a or c or g or t
cagtcagcannntcaagcctacgcagngnctcagggatagacggcgctgtcaaagaccaaagcctacagcctgggataaagaccagttctgaagcactcccagagaatgttgggttctcattagagaacccagaatcgggtcacgtgaagaggaaaactgtcgagtttaacctgacagacatgtcggggacccctgaacatcatctcagagactcagatttgagccagtcaactagcaacttacacactatactcaagggccacggagatccctattgggccttggaaaacagggatgaagcacattcttagcctgtttcccaagggagacgcttcatcggcctggtcctacctgcacgtacaccagcggtacactggtctagtcacagccatacagccgtccacactgaagagtatgttcgtaggacagcctgaattaaatggttagcttagtggaaaacaaagtccatagtgtcaggtctacttaagcccttaagatactttttgtacataaaaattgtaaaaagctggaatcaaccactggaaacatgtaattcaaaaccttcaattcagaatcaggagtccttaagtcctgtctgaattcagcacacccagcctcaattatcattt

SEQ ID NO: 5288 - DNA, 645 bp, Canis familiaris
  misc_feature (1)..(645): n = a or c or g or t
ttcccacgaatgactgannatgagataagnacagtgatgtacntgtannnnncagatgcagttttnntgnnaccaagtcaactatagttgataaattttgtttcannggttaatttttagactgggaaaacttaacattatacatctattgaactgtgcataattgttccatttttttgttacctgtatgactttatacagggttggcataaattattgcatgttgttcaaaagggaactagcagatcacatcagcattgttgtcaattccttgaaagtggtaactgtagatggataacttttgccataaagctaaatgccttcttaaatcagaccttttggtcaagtactttgactctggaatataggcagggagatattaaatgtaaaatacagtaaaagaagtctgaatattgagagtctttgtttagattctgaaattatctaatgataatctgcaagtaatgaaaaattgctcataataggtctctgccatttattttatttgtatattttccatattgaaaacatttccaattatttgattttaatttgttgtagaactcgaacctacaaagctatgtatattgccactgtttaaattcctgtgatacagaactcttaaattttttttatgttttataa

SEQ ID NO: 5289 - DNA, 421 bp, Canis familiaris
  misc_feature (1)..(421): n = a or c or g or t
aaacagtcctgagntggttcagnnaaaaggatatgactgacaagggccggcagttgcgcaagaaccaacagctgcagaggttcatccagtggctaaaagaggcagaagaggagtcatccgaagatgactgaagttgcactgtctgcttctcttggtgtagttgatagccctcctggcttctggttgccgaaggatgaatgactgccatctaagctgaggcttaaaggagcagaggnnnnnnnnnnnnnnnncgtcctaccaccagcaaccatgtgcctcccatcctgcctggggacttgggaaaaggaaagttgggctggaacaaagctctgcctaaaaaggagcaaggcaggctccgcagttagaggaagtctagaggaacaattttgtgctctggccttccctcnnnnaacagcagaga

SEQ ID NO: 5290 - DNA, 454 bp, Canis familiaris
  misc_feature (1)..(454): n = a or c or g or t
tgcagtgaatattgcaaaaattacataaagctccaaaagctattctatgtaaagttcttaagtggggattcttgaccataatatttggcataataactctgataattctgtatgttaatgggttttatgttctgatattttgactggtttgggaaaaacggagttgtcccaaagctgaactcagagttgtcccggtaaatgcttaacaaccgactttttgggtggaaagccctgatccatagtgtttgtcaatttccatgacttaaacactttcactatggctgattgcaggctgtgagagtgacatcactgagagcagaatcggggatgatgtatgcagccgacccttgtaagttggtgtacccacnnnnnntccatgggcatgtgtgaaattgcagtttttttattaaaaattctgccccatagatatacaaaggcactagtggaagaacaa

SEQ ID NO: 5291 - DNA, 466 bp, Canis familiaris
  misc_feature (1)..(466): n = a or c or g or t
agccaccagcagtggtgggggctnnccgatgaatgtgtggttgactcccaacctccagccctttgtggggggcacctactttccccccgaggatggcttgacccgagttggcttccgcacagtgttgctgaggatacgggagcagtggaagcagaacaggaacaccctgctggagaacagccagcgtgtcaccacagccctcctggcccgctcagagatcagcatgggtgaccggcaggtgccaccatccgccgccaccatgaacagccgctgcttccaacagctggatgagggctatgacgaggagtatggtggctttgctgaggcccccaagttccccacgccggtgatcctgaacttcctgttctcctactggctcagccatagactaacccaagatggctctcgggcccaacagatggccttgcacaccctgaaaatgatggctaatgggggcatccgagac

SEQ ID NO: 5292 - DNA, 476 bp, Canis familiaris
aagaaaaaatgtacaacacagcatcaaatacccaagatgcttcaagaaatctcattggtagtgagccattgtagactccttggagaggaaattgagtttttaaagagatggggaccaaattataacctaatgaacatagatgtgactaatactgaattgaggcttttattctccagctctgcagcatttgcaaaatttgagataactttgcctctctcagtccattttccaactgttccattacctttctccattcaaaagcaccttggaaacattggccaagatgaaatcactgcaattctatctaaagtgccactgaagaacaactatctaaagaatgtagtcaagcaaatttaccaagatctgcttcaggactgccatttctatcactagacccaatggactacagttataacagccaaaaacagtgtacttcataacgatattatgtcagagtatccattgctgtttaatct

SEQ ID NO: 5293 - DNA, 413 bp, Canis familiaris
ttccccactcacagtggtgagaagagaacagtctgtcgtgtttttatgctgttccagtaattcccagcacgctgctgggcccacgtatcagtggatgactcttgaagatgtgaggcaatgcagagcctgggcactggggagggtcctgcccaggaatcagtctaccattgatatatccccctggggaccatctctaaccagcttctcagagtgcagtcctgaggccgccagcagctgaccaaagaggaggagtagggctctaaaacaaaggtgattttcaggggcactggggtggctcagtccgttaagcatttgactttttattttgtctcaggtcatgatctcagggttctgggatcgccttcagtggagagcctgcctgagattctctccctcttgctctccctctgccc

SEQ ID NO: 5294 - DNA, 483 bp, Canis familiaris
  misc_feature (1)..(483): n = a or c or g or t
tgccacannngggctggcaagggctgtgagtggtttgccttggtgcgcctcctgtctcccagaggtggcacaaagacgtgatcatcatggtgctaaggaagaggccactggccctgcttgtccagaggcaaatgnnaacttgaccgaactatccaagaagcccccggtcccggccgccaggtgtgagaccaaactgaggggcatactcggggtccagcctgggtggcgtgggagatttttacccccggggtggggggtggggggacgtgtctcttttagaacgatgtaacttgcctttggaccgcggctgtgctgaggcggagcagtgggctgccctctccgggctgcgtctccaggcctcatgaggtcccctgtggggatgctgctatttctaagatgcaaattgcacatttcctagattttgtatctgtggatttggatgagggagcagagccaaactgcttatacaatttggtatgggcc

SEQ ID NO: 5295 - DNA, 431 bp, Canis familiaris
  misc_feature (1)..(431): n = a or c or g or t
gcgcagcccagannnagtagccagaaggggaacagctgcaggtaccagcagcanctggagcccaccaggtctagccacctgggcaatngaaaagtgcatatggagcagctacagaanntgcggacagcggaggcgtagccagagctgctggttgacagcagatttggtgaagatgtcggggcagaacagcttgtggctctgaattaaaaattgtgtttgcatggacaggtgcttccaggcacagccatctcttctgcacctcaggatcctgctacgagctttttgttgtgtgtgttgtatgtgtggcggggagcctgctaggggccagagtggctcagatctagaagagaaggctttggagaagcaagtgggggaaggccagaggcctgggtggtattcgagtgttttcatttnnnnaagaacctagttga

SEQ ID NO: 5296 - DNA, 657 bp, Canis familiaris
  misc_feature (1)..(657): n = a or c or g or t
gtgtgtgtgtatgtatnnacatctatgtgtatnngtacatatgtaagtcagatgtattttannngtctccacttgaagtaaaagtatgaagtacttttnnnnnancctgaagtgttgatacnagtccacagcactttaactctgtgacctcccaagcgtgctgccagatgaaaacaccaagaacaaagtcactctttccctctgtnnagcctcaggacccgcctgtatctaggcagtactgtgaattttgaagtaaattttggtacagtacaactggaatttaggttttgaaaataatgttacaggactatttattgcaagagcaaacgtgcagatagattattattataaattgttaaagaaaatttgttaattagaatatgaaggaaaatgctttattcataaaattgacatgtttattaagggattataaatcaaatatgtgcagttaattatgaaactaacattttatttagtaaaatgaactatttttttcttctctaaaatatatataactcaaaactcactatgttattagaagccctagtgttggctggtgtgacatggaacatgaacataggggaccagctcattaccttggggtgatttcatggtatctctccaggctcttgagagggttcatctacttttaagcca

SEQ ID NO: 5297 - DNA, 494 bp, Canis familiaris
  misc_feature (1)..(494): n = a or c or g or t
tgatgatggcttatggtatagagcaaagattgtgtctgttaaagaatttaatcctctagctgtcnnggtacaatttgttgattacggatcaactgaaaagctgacaataaacagactacgtcaaattccacttcaccttatgcagtatccagcccgagccataaaggttctcttggcaggatttaaacctcccttaagagatccaggaaagacaagaataccatattgtccnnnatggagcatggaagcattgtgggctatgatagactgtcttcaaggaaaacaattgtatgcttcttccatggctcaggcaccagaacaaatagtgacctnatatgaagatgaacagtatccagttcatatgtcacttgtagaaatggggctggcagaccgagatgaatgatgtannnagtgcagaacatctatacggcagcccagaagaaagttttctgttatatgtaggccatnncaggnnnnnttttcttgacttgttc

SEQ ID NO: 5298 - DNA, 576 bp, Canis familiaris
  misc_feature (1)..(576): n = a or c or g or t
aaacttatccacctagaatgtcgncctggtttcttatcccacatgnnnntccannaaacagcangtccaggaaaaactcttacttaaaaactattctgaagtaatgaaaaccacaaatgcaattccgcgcctggaaatgtatatactcatgcacgtacaaaatgatgaacgcacatcagatattcactggtgcatggttgaaagttgtccaggtggcaggggtctggatcctgaaatccatttaatgcagcaaactcctaggtagacaaagtgaatatataaagagaacttggacatcaagtgtcctgagtgtactgatgtgggatgatctccaacatacattattattaggtgcaaaaagcaaggttcaggatggtgaatataataggctactgttcgtatataaaaagaatagatggcaagtacgtaattgagcatatatgcataaatgagctctgggaagttacaaaagaagctgagtaccctgattacctctggggaaggggaagggaagtgggtggctaggggtatggaaccaggagggagacaactgtatgtcctttcataacttttgaa

SEQ ID NO: 5299 - DNA, 329 bp, Canis familiaris
  misc_feature (1)..(329): n = a or c or g or t
annnggtttttttgggcaaattaagttgacattttaaattattatgaaacaacatctccatgaaagaacatgttaattaataataagtattgctgtgggaactgtccactgtagaattcatttttttatttaaaactttatttaaaactcaannnnnngatttgtgattgtgaaattgacaacacatggaagcattctggctatcacagaattggtgacatgctttgagttttgtcacatgtcgacatgccaatgttctatgaaccttttataaaggaatatatttttaaagtaaatatattgtaatgtactgtgannntgtagggtgc

SEQ ID NO: 5300 - DNA, 378 bp, Canis familiaris
  misc_feature (1)..(378): n = a or c or g or t
tattgagtgtcnnntggaatgagccaccaaagnnnnggcagagagggcgaagaatggtcagtattnnaggaacttgttttgtgatgacagatgnnngatagacttcaggtgtacatgttcaaacacatgcctttgtnnaggtggacaaggcatgagagnnncatgagtggtttcttcattcaatatggttttttttccttgtctccctgaggtcaagatctttgtctatcctcacatttnnncacagtgccttacacactgataatgcttggaaatattgctgaatgaattacatgcttcagggnnnctgagtgtnncagncnnnnnnnnnnnngactnnnnntttcaactcagnnnnnnanctcagggtcatgaggn

SEQ ID NO: 5301 - DNA, 309 bp, Canis familiaris
cctccctctcctccccttcctctggaggaagagcctggcacccaaggcttgggcaaccagcagctgtgctctggcatcagacgtcaagaaccctgcagggaccctcttagggtccacaaaaactcaagaaaaaattttagaagaaaatacaaataaataaataaatggttgtgaggtacctttttctttaaaatatacaaaaaaatcttaaatgtcacgcatctatcgatcaaaattaacaaacgttaacctctttcttatatgcatcagagtttttcttctaacagatttttttagggcagccccggt

SEQ ID NO: 5302 - DNA, 408 bp, Canis familiaris
  misc_feature (1)..(408): n = a or c or g or t
gatgatcccttttaannngactggaaattcttcacattttaatgttactatnnnnctgtaaatgggtggtgcatgtactagaccaaaattacagtcgttccgatttgagggcctgttctaaggctagttaatgcgcggcggtggagaacagtcacatccctcgctaccaagacgatggagcagccctggcctctgcagctgtttataatccttaagtcatgactcctccacctgtctgggtaaatctatccctgcaacaaatgcagacaacacttggagcgctcaagaatggctgtttacaagattctagtaggaaagttttgagcaaatcagagtgtaggccttcccatgtcattcatgtttcctcaaggcagacctttttcaatatttccataaaaaaatcgaann

SEQ ID NO: 5303 - DNA, 477 bp, Canis familiaris
  misc_feature (1)..(477): n = a or c or g or t
tgtttatttcaacccatacatgtgttacnnntgcnnccacancntctgtgagccctgcttacggactcttgccaaagacaatcctgcaagnnctccctgcccattgtgtcggacaattatttccagagtctttttccagacaganctgannnntgcnnnnnaaannntctttnnnaaagaatatttgaaaannnnanaaagctttcagaaatccagctctgcaaaatggcccctacnnngctgcagaaaagcattccatctttttggaggtttccacagacatgcagctnnngttacaagaaggcagttcccannnggtgcacataggatggattatctgcactttgaggatgatnnncgtggatggtggtttgacatggatatggtgatcatctatatttattcagtgaactgggtcattggattcattgtgttctgctttctttgctattnnntctttccgttttaggaattttc

SEQ ID NO: 5304 - DNA, 433 bp, Canis familiaris
  misc_feature (1)..(433): n = a or c or g or t
aagcagacctgcatttagggcacgctgtgtgccggacgctgtgccaaacactttgtattccttaggtcattgaattccccctgtgaccctatgaggtgtggggtgggtcttttcccaggattgtagaagaaaggggggctcagatcatgtgcctgaaacccccgatctgactgattccttagcccagaggggaaatacacaggaggggaaggcgcagaaaagggccctcggggtcaggtcacaaatcggatggctttnnnaagggccagctctgtacacctccctccctctcctccataaaaataaataacccttgggaacgccttggacagaatatcatacaaataaggacgagggacaagaggctggttagaaataaaatgggatgtcgggggagggagctatctaccgggttctttgtgattctagaaag

SEQ ID NO: 5305 - DNA, 467 bp, Canis familiaris
  misc_feature (1)..(467): n = a or c or g or t
tgtccttgtacctggcttgggtgcccacgtcttnngcaaggagtgnnnctaatcccctttatgggcttttggtgctggtgtttctgaccctgtcccaaggaactggatagatgttttacgatactagggccagagtataaacaaggactgggcgaattgccctgcatgaaaaagaaaaatggcattttgaatttatcagaaaaccaaatcaaaataggtaccctgagaatacattgaagattttaacaaaactaacatgcgtctaatgtgagagaggcctagggaaagggtggaaagccaaggcctacaaggaggactaagcagtgagaaaatcctgatcacatgacacagttcagggtttggcacttttcttcttaaggaccagatagtaaatattttgcctctgtatgccacccagtcttgctttctgtggcttccattcaactgcatatgaggactgacaataa

SEQ ID NO: 5306 - DNA, 389 bp, Canis familiaris
  misc_feature (1)..(389): n = a or c or g or t
agcagggtgtggtataggtgaggaagaggtcataagaccaggtagnnntnntggcccaccgctgcannnnncannnnnngctacacttcatactttannaagaannnggctgtgagcagcccannagcttgcacagtgaggagaaagactcctcattcatgttcaccagaaggcgacttgtgaagctccttggtagccgatggcaggtagctgcagtgaagaaagcctgtatgtgaggtctcctgctcagcaatgcacgagactcagctgtgaaggagctggggcagccccaaatgcaaggcatgtgtgagcagcttgcacagctgttggctttagcctctgagtgcattccaggtatcagtgtatgtctcttcanngttttgtattca

SEQ ID NO: 5307 - DNA, 647 bp, Canis familiaris
gtaccatccacctatctatggcagcatgcatgtgtaggtccaactgttaacatctccgatattccagagagaagccctcagaaactgcaagaaactaccctcctcttatgcctgaagtttcaagtgtgtttatgcaaactgataagaagtggatcacacttatttctttagagaaataaatgagaaagaattttgcattgtacagcaacagtactgttaacttgtaggaaaaaactaattgtaaagtatcaaggcaatatgagtaaatgaaaaaaaaaacctgttaaagtagatgtcatgcattagcctgttttaatccccccaagcccccagcatcctccaaaaatatttcctgggaccctaatatgtgcggtctaaactatttcagtttttattattattctttcaaaatcgaagacgatctgtctcactttgctgcctgttggacatgcagtggaaactggataaaccggtttttattttgtttacaagtataaagatagctgttgagaagaatattttgtcaaattttggtaaaattttgaaatgctagtaatgccttttcactagcaggtatttgttgcaacctaaatatcatcctttacggaggttatagctacatgccctatattattcttgacggtctt

SEQ ID NO: 5308 - DNA, 474 bp, Canis familiaris
  misc_feature (1)..(474): n = a or c or g or t
actaccgcgacggggcgtctgtgcacgagtnctgcatcaacntgcgtcagctgtatggggacagnngcaagttcctgctgctcggnctgcggcccttcatcccggagaaggacagccagcacttcgagaacttccttgagaccatcggggtgaaggacggccgaggcatcatcactgacagcttcggcaggtaccggcgggccctgagctccgcctccacctccacctgcactgggaacaggaccacaggcagctccgacgaccagtccgcaccctcggagggggacgagtgggaccgcatgatttcagatatcagcaacgacatcgaggctctgggctgcagcatggaccgggactcagcctgatggcgccgggaagggcccgccggcgctccctctactgtgaaggacctgccccggggcgctggtgcccgtggccccctccgggagggctcccgggggtcctttcggtttt

SEQ ID NO: 5309 - DNA, 558 bp, Canis familiaris
  misc_feature (1)..(558): n = a or c or g or t
gtnngtttacgtnaagaaaatcatgttccattttttnnaaaagcttcccagaaaatgctatnntcaagggataggggagggagaatgagaagtagatagtactgccagctactaaanncatgaaaacttccaagtcagcatttgttaccacttggtatacaagccagaattgatctaatgtttaaattacatgttgttaaaactatgtaacactctatcttgtgatttttttcttaaaacttgtgattagcatatctctgaaacctatgtaaatttgttgtttttcaatattttattaggtagaaatcagagaacaaattttgttgcactatgccttatttacatatgcagtttacatttggtctcaatgttaaaacgactggattagacttttcaacattcaagtagttgatctaccaccagaagttaacgtgccatgtcatagtaacattattttcctttcagacagctcctttagaaataaacctttttttagcctattctaccactctgttttgaaatttgacatagaatattttcctttggttacagtgtata

SEQ ID NO: 5310 - DNA, 566 bp, Canis familiaris
  misc_feature (1)..(566): n = a or c or g or t
agaatcaattgatgttttgaaatacagcaaatgtatgcacaacttgattaanctgttagtgccagatggggtgccaagtacagaactctgtcccctggaagaagtttggggttatttcgaagatgctctgagccttattagccacaccaaaggctacccagaaacagagattctctggctgatgatcaagtcctggaatactggaatatttatgtatggcaggaacaagtatgtatctgcagaaaaatggtgtggcctagcattgcgttttcttgaccgccttggctccctcaagagaagctatgaaactcagatgaatattctgtatagtgagctggtggaagcattagatagaaagaagggttcactttttaatgaagagtgagaagtgctggaacatggaatatgagcaagcaagctgacaacagcctgcaaaggatgcatggtccggagacactgaatatttaaattcttgccagacttcctcctgagcttttgtttgttttctnnnnnncccattttcatgttgtttaaatgacactttctaaaattaaagcattnnnnnn

SEQ ID NO: 5311 - DNA, 522 bp, Canis familiaris
gtgggcccatgcggagattattctggatgatgcagacaactttctttgattgggatcagagagatcggctcctcccttcccccaagaggaatcagcctccagtgtgagaagggtttagtgtgctgctggttcccacatgtagggacccaggcatgaggaccggaggcagaaaggtggcccctgctgactgccagcaaggaaaaggaccctcaatcctcaaccacaggagaccaaattcatccgagggcgtggatgagtgaacttggaagatggtcctccccacagcctcccagttaagagccaacaccttgaatccagcccacagaagctgggatggaggccccggctgtggcacgtctgacctggagactgagactgtgcatgtgtgctatttggagccaccgtgttggggcatctgggtggctcagtggctgagcgtctgccctccgctcagggcgtgatcccggggtcctgggatcgagccccacatcgggttccccacgggaaggctgcttctccctc

SEQ ID NO: 5312 - DNA, 492 bp, Canis familiaris
  misc_feature (1)..(492): n = a or c or g or t
tatagcaaataagtagctgattgcatgttgggcttcntgcaaggcaaagcaataaggaaaatgagaaaattttcatcacttataccagttcatcaagaacactcagaggaaataactgtgtgaggtgctaatgttagtattttttttctagacattttnncctgaaccactctgtaataaagtatgtgtgaagcaaaacatgggatggagttggtgttgcataacagttaaaagtacaggccagtaatgctggttccactcactgctggttgtatgaccttgggcaaattacttaattaaacctcctagttttcccttcttaaaatgggactgataatacatactccatgaggttattgtgagaattcaatgagatagcacaggggctggcaagtattcagttctagctatttttagtaacatttctactgaattgtctataggcacttannnnnnttcttttttaaaaaaaatatttatttactttagata

SEQ ID NO: 5313 - DNA, 456 bp, Canis familiaris
  misc_feature (1)..(456): n = a or c or g or t
ccctcccacctcaccccggggaagaggggagctgcccaccttgagagggaacagggcagccctggggctcctgctctcctnnnaaggggggaccccccccctcctgctgccgacctgcccaccttgctcactcaccctgaggacttggggaattttcttgaatatctgtgtggctttacctgtggccacaaagagttatgacttctgcagctggaaagagacctcccacctcacataaaggaaaaagggacaatgaaaatgagtctaactctaaagaccaggtttaaacatgggaacacatttgctgtgacaacggcagaacccaaaatgcagtcctgctgcctgccaagccgaaaatgtgcaaaaccatgggtggaaggaaaggcagctccccaggccagcagccatgcaggccttagtttattaaacagtatatggtcttttcaataaaaaaga

SEQ ID NO: 5314 - DNA, 647 bp, Canis familiaris
  misc_feature (1)..(647): n = a or c or g or t
tgagntngaccaaaagnncttnaaactgtggnnnctgagccaacagcatgagcattacctggaatcttcttnnnagtgcaaatttgggttcctggcctcagacctgaatcagaaactctggcagtagggacccagcagtctgttttaagaacccttccaggtgattttgatgtatactgaagtttgataggttgatctctgtagactgggtactgtccccattttacaggtaagtagactgaatttaagtcatccaaagtcctacaatcagtaagatgaactactgattctgtgtctataacgactgcattgcatcaatgcatcaatagttgagaactacgctagagaagtggtctccagaatttgaaggcatatgcttttgaaaaataatgtatccctctgcatgtttctagattagcatataaaatcttacatcataagtttaaacaatggtacagaatgtgatttcctatatgttgcaaattgtgacagttaaaaatatgttctatcccttctctatccagtggaatcttaagtaccatactgattagtattttaaaaaacataattttcctccaacatttgaaattttacatcctcttttctacctgaacttgcattttcattcccctaccccnnaaannnnn

SEQ ID NO: 5315 - DNA, 441 bp, Canis familiaris
  misc_feature (1)..(441): n = a or c or g or t
aaatcatccaacccagagaaattaactcttgaannncaggatcatgtgaaaaaaannnnngcaccttacaaatatccaagaaaggtggaatttgttccagaactcccaaagacagtcactgggaaaatcaaacgccacgttttgagagaccacgaatggggtcggacatagcctgataagaaactatggcattatgtagtcataggcttgctttcttttattccttgttttctgataatttagtgactactctattacaatgctgaagattttttctagttgaaaaaccctatactttgttctgtacttaatcaaaaattaaatcaaaaaagatctaaaaatatttgggaagaaaacagttataatgaccaaagtgacagaggcaatgattttaatgacttccagggtttaaaatagaaaatnnnnacttagaaaagcaca

SEQ ID NO: 5316 - DNA, 653 bp, Canis familiaris
  misc_feature (1)..(653): n = a or c or g or t
tgggggtgnnnctggggttccctaccgagtcctnnaacacaccaagaaggaatgagcccacctcgaaggagactgtccttccctccatnnatnactgctctcaagccgtcagtggttcaaccctgaatcctaaactttgcctttcacatcttaatctcttaaaccgagaactctctagaaggggaactcgaagagccattgtctctagcaaagaacacatgatcttggtctcggagatttcaggtgaccagggtggggtgagggggacgaaagcagtattccccgggggaagtgcggagttcagactccgcctggtactgcccagccagctccgggaaagcattcccgaggctgataactgagcttcctccgtcagtgaccaaaggttgccacattccttggagctgaagcaaggcagagattccgttctcactttccacatccagtgaaaggctggagacctctgaatctaatcttcccttgcctgatcctccctgtttcacgattcccgtacttccagtagcatttgtgtagtcatcacaaggcatagtaggccagccctgggaacattctatcatccacctgtaagaaatgcacttctgccttccaattctccctgcccttctagtgaaaacatgcttgatgtgcttata

SEQ ID NO: 5317 - DNA, 210 bp, Canis familiaris
  misc_feature (1)..(210): n = a or c or g or t
agatgcagatggcaannaatatgactttgggacacagctgccatctagctcccccggttcacttaaggttgacgatactgnnaagaagatttttgctgtctctggcctcatttcggatcgggaagcctctnnnagcccagaggannngaatgacagattctcacagagagagagagnacttaggactccagctnntgtgatactgcaccc

SEQ ID NO: 5318 - DNA, 486 bp, Canis familiaris
  misc_feature (1)..(486): n = a or c or g or t
tccagtntctgtcaaccttcaatgcatcatagacctnnnnnntgtctgtccagtcgnnctcgcccacagatccacctctcttatggctgtcagccacagaacttcatctcctgtgggtatcgaccactgaattttgtgtccagtgcctgccatccttnnagatatctatcctgtcacagtcaacctnntggttatgcctnnngcagcttcagaccccnnnactatgtgtctaacaggtttcaacctgttcgctacatttacaacagtttccaaccagtgtgctcctcctttgggacttggcaatctccatttattagaagatcttgctgaactgtcattcttgcatcttgctagtaaagaagtattttctttagattgatggattgtttttaggctgatgggtcatcgtgcttttagttaagttactattttaaaatgtactcttatttgatcagatnctaagtgattttaatagtttgcttattc

SEQ ID NO: 5319 - DNA, 559 bp, Canis familiaris
  misc_feature (1)..(559): n = a or c or g or t
aaatatagatgataaagacttcaaatggaaattnnncacaatattggagaatgtgcccaatttgttacacatggaatccagcaagctaaaggtacagaaggtggagccctggaacagtgtgcgtgtgacattcaacatcccccgggaagcagcggagcggttacggatcttggctcagagcaacaaccagcagcttcgggatctggggatcctctccgttcaaattgaaggggaaggtgctatcaacctggctttggctcagaaccgaagccaagatgtgagaatgaatggacccatgggagccggaaattcagttaggatggaggcagcatttcccatggccggtggtccaggactaataaggatgaccagccctgccactgttatgataccccagagtgtaaatgtgtcatcttccatgatggcaccatgccccaattcagagctgcaacccaggactcctcgccctgcttctcagtcagatgcaatggatccactcctctctgggctccatttacagccacagaatcatccctcaggatctttagcacccccaccc

SEQ ID NO: 5320 - DNA, 495 bp, Canis familiaris
  misc_feature (1)..(495): n = a or c or g or t
anngtaaaaatgaaacaaatgtacatattgatatttaaaatgcataatgaagaaaacccattggtnnnntgtttnncnnnnnnnnnaataannaancnnnnnntgttngnnntgtttggttttctattttnncactgaaggagtgaangtatttcctatatttatgaannnnctatgaaaatcttggcaaaaaaacaaaaaacaaaaaaaaattgncngnnnanaatgtgtgggtgaaaactgttaatcaagtgtgttnctactttttttccccccaagttggannccatctgtatacccnaggttgcttaaggggatttcactattatataaaatcaataaaattaananggagtagttgtatatatgcaacattgtgtacagaggggatatattgaatagtattaaacatttttgtcttcctnnnccttttatcccttaatatnnagncnnnttttttaaatttcagacttcagtactctttgaattgataat

SEQ ID NO: 5321 - DNA, 376 bp, Canis familiaris
  misc_feature (1)..(376): n = a or c or g or t
ccggtcgcgctggggactcagtccgcccggaggacgtannacgggcgggggcggcgggcnnnggccagcgtggacgtgcccagnnaggcagcccggctcctcccggcgcaggcccggcnggtggccccgncgctccctggctgtcctcgcggggacgggcccactgcgngctgcccgctggccctcggggcggacggccaccgggggcggtcggtgcggccgaggacggtgggccaggggctgggggcgcctcccccggctgctcggttcctgcggttgtggctggaggcctgtggctcccggtggccctgacccgctgccggcggcccgacgtcgcgcgctggctgcccacggcccactcgggcttgtacgttgg

SEQ ID NO: 5322 - DNA, 627 bp, Canis familiaris
  misc_feature (1)..(627): n = a or c or g or t
atnactgtattacatgctgacaatatttcttcagtagaaaacatctctgtttctcatcattatgaagaatcatacttttcatgttttaatactcaagaatacccataataaccagagacccaagcttcattatgaccaatgtgagagaatgcatcccttcccacaacaaaattaagagtcctcccttgagccatggaaaccaatgggcaccatttactgattgacttacacctggaaatttggaccagtgactatggaaagaaggatggatttatcctgattgcctgtggcccagttctttgctggagctggggccattttgctctaacccatatagtagcaaagaatggatactgggaagataatcacaatataatgctgcctgtctctaaactgatgtttatgctgcttctctggaattaaatgtggactcttcctttctttctgcttattgaaatacttctcatcttgtaaggataagataaggacttatttttcttctacaggctaccctctttgactgtctcatcaatactttttcctttctctgttaaacttttatttttgtaccccataatgtatgactggattacatgcttttatnnaaggttgaccatctctctctct

SEQ ID NO: 5323 - DNA, 594 bp, Canis familiaris
  misc_feature (1)..(594): n = a or c or g or t
cctgtggntgatcatgttcaccccctgtgccttcctttgttggtaccgacccatctataaggnnttcaggtccgacaactctttcagcttcttcgtgttcttcttcatatttttttgtcaaatagtgatctatatcatccagttggttggcatccctggcctgggggacagtggttggatcgcagccctgtctacactgaagcaagaccacttggctgtgtcgatcatcatgatggtggtggctggcttcttcaccctgtgtgccgtgctctcactcttccttctgaagcgggtgcactccctgtaccgccggacgggggccagcttccagcaggcccaggaggagttttcccagggcatcttcagcaacaggaccttccgcagcgctgcctcctctgctgcccggggagcctttcaagggaactagtcctgactctccttctctgccccagccttttctctcgcctgccttctagctgcacttgccgtgggtgccttaaacaatggttatgctcagcacagacccagggagggtcttgccggggtccttcctccttcctcagccaccagctctcccattttgcccaagggaag

SEQ ID NO: 5324 - DNA, 668 bp, Canis familiaris
  misc_feature (1)..(668): n = a or c or g or t
gtnngttacaaatctgattcntcatttttcagttccttgttacacnntggtcattttnnagttttttannagactcccccatctcacaataaaatgcatcaacannnnngacctgctgtcattcttnnattatcaagattttctnnnnnnatctctctgtgaaatggggtattgcacagtcatcctgtattcgatttatcttgggctgaatttgagtaagaaactaaatgttttagacattcaccattaagtcatgaacttccccatggctaaatgtttctgggaagatcagatttggccactaaaggcttcctcagaggttgctgcctcttcctgaaacccttacccacctcttcccactcttgattctaggacttgccatactcaggtcacttcagggaagcctgggttgtagatgcctttcctttgtacaccccctgttcattgtacctttcttgccataactcttacgcagtgacttatattccttccccactagggacaggaaccatgtctgccagtcactctcacatccccactgcctagcagagtgcccggacctaggaggtacaacaaactttgttgattgaaaatgtaatttgcatgttaacagagctcagctgtctttactactcttttccttctaatccaagaatatgtatgttaaa

SEQ ID NO: 5325 - DNA, 547 bp, Canis familiaris
  misc_feature (1)..(547): n = a or c or g or t
tggcttaagtggttttnctgtccagaaaatatnncagatnnnnnagtatgacctgncttcaactttgggcatnnaagaaggggaggnnagtttccagtgaaaaagaagcaaaaatgccttatgcagctcgatctgacttcatggcattttatattctgtagctccagttttctaaaaactaacgtttttcatttgacccaagatgggtacttggatgtttggtttatttttccaagtgaggtgtaatgttagactataaaggctgggactcaggtaactttccccagttggaactgaactttctcatcaaagagtggacttcattcgcaatgttcccaaatttgtagttgatttagaagaaattcagggtctagaaaaaaacctcgaacaagaaaaatagttcaataaaatgtggattttctttcttccccttaaaacctacaccatgtgatgaacagactatagtgtaaagctattcttgcttccaaatcaacagaggaccagagtatatgcattgtcagttctttacataaaaggaaagaannnn

SEQ ID NO: 5326 - DNA, 612 bp, Canis familiaris
  misc_feature (1)..(612): n = a or c or g or t
tgaagcaagccaccaacaaaaatnnctccacgttcacaccaatgacctgctattagnnngctcttgctgtgccattcattcttgcactttctgcaaatcaaatccatgtgggaagtgttctacttgtagaactcacagaattcactgagtgctcatgtcaaggactgccaagtaaatgagggcccctaataatctgctttcctttgaatgtaatgcaaagatgacacatgttcatttttctatgcctaatcagtttctagacatattatcaagacttatttactttgcatgagatttaagtttcctattatttgaaaatgtgctccttttaaaccacctgaattagaaaaacttgctggaatgtactgtcagttattaaagcacatgtgactaagtttgcatttgtcagtattgttctactgtttgtactgaaagtctcattttaaagttgccccttaacattgtactataccttgtaattttttagattcttcacttgtatgctttaaatgtttccagatgcctttagtttttagccgctgtaaaatagctactttgtgttatttgatataggattgttttttaaaaaannnnatttatttatacagagac

SEQ ID NO: 5327 - DNA, 594 bp, Canis familiaris
  misc_feature (1)..(594): n = a or c or g or t
aaagtngaccagctggatacacctgggagaacctgctggccttgttagacagttcctgggncttttccagcacagaggtgaggctgcactgctcgaacctgtcccactccgtccccttctgcccctgcccctgcataggcacctggactcagacccatctactgttagcgctcagctccactccacctccccaagatcagtgcaccaccttcccggtgcttagagcatcccctggctgtcaacagctctgtgtccaggcttttgtctgaacaccccaaccttccactcgttccagaactcaacgtggtgggaaggactgccccagtgataatggagggtcggctgacagcatgaaagggacaagtttccttttcaacatttctaggttatggatgcccagcctcccccacctccgtccacctccacacttagttgacagggagtccccacctcctgaggccctggttctattgtaggataattctaattgttagaaattcttcctcataatgaatggaatctgctttcctgtaatttctacctattgggcctcgttctgttctctggaatgaaacagaacaaccacttaccctc

SEQ ID NO: 5328 - DNA, 637 bp, Canis familiaris
gtaatgtgtccactttattccgtagaagcatggtagcatacaaatagctcagagagaagagaagaggggcactatgttcccaacttactaggaagaaaagaaaaagggggaaactgtcaaaatgatatgagatcatatattatttctttcttggtaactttgattatttgaaaactatatcaaaacaaagtttccatccaagtgtccatcaacagatgaatggggtataggtaaaagggattattagtcaacccataaaaaggaattaagttcaattcatgctatcatattgttgtgatactattgtaagtgaaataagacagaccctaaaagacaaatattatatgggtccatttatgaaatatctagaataggctaattcatagaggcagaaagtagactggagtttaccatggcagccattttttttttttaatttattgcatttctttactgcttaaagagaaagcctttctgtttggagtgatgagaaagtcttggaaataggtaattgtactcttaaaatggttaacatggcaaaaattttgttgcacttattttatcacaattttaaaaaactaatatatcaaaaaccactgaattgtacacttcaaatgagtgacttatatggagtatg

SEQ ID NO: 5329 - DNA, 266 bp, Canis familiaris
  misc_feature (1)..(266): n = a or c or g or t
tgaggtttcaaccctttcttatgataggtcattagtgctttaagcaaatgatattagcagctttgactgcagcnnnnnnaattaggaaaaaaattaagtcccctgcggacatgtaactttgccatcagttttgatgtggaaacactgtgatatataaatgttgttggacaacagtagttttaagagtaagatatgaaaggtttaaaaagttgcaaaaaaagcaagcnnnntcctttacttattgagacactttagctttttccttt

SEQ ID NO: 5330 - DNA, 539 bp, Canis familiaris
  misc_feature (1)..(539): n = a or c or g or t
tgcgagcctgtcaagccgaactgtcagccagagtgaagcagnaggtgtccacccgagggctccccctggccgctgccctccccacagctgactggcaggcctccctgcaggctctgagcctccctgagctgtcaggagcactggaggatcgagtccaggaaatggggcgagtgctatgctcagtgacccagagcttggagaagctgcaggtgctgaacgggaaggagaactggcgggagccttagctgggagggacgactctgacgttgggtgactgatccaccctgaagctgtgtgcctggaagacaggagggcagagtgtgggcgctgccgcaggccgggccccactgggccggaggatcaggccccaggagcagccggcagaagcaggacagggctggggccagggcagcaaggcccacacggaggcaggacgagggcctccagcccagaatctgggggtgaggcccagagtgggcagggccctggggagagaggatccccatacaccgcaggtgccccacagaaaggactgggca

SEQ ID NO: 5331 - DNA, 559 bp, Canis familiaris
  misc_feature (1)..(559): n = a or c or g or t
aactttttgtttggtttttaaattaaatattaattgattagactttatcntnnntaatcatgtgaactgaaaatgggggtatggtggttgtggaaagaaanntctagggaaattagattacatacagaagtataggcgtgttctcctcttttctacaaaaattttcaaatggttcctggttttgtttggggttttttttattactgttgttcttgtcattggatttggatttggtcttctgcctctctttccatttctcctttcactaataggcaaataagcaaaagcctcatgtgtgtttgttttcccctcagactgcacgcctttcacctcttgtagctgctctgtcctagagttgcacagatcttcatggtgaggaattttaagaaattttcgtgaaaggtagatacgatttcagaaatcatcttctctggtcttttaataatattgtttggcttccctttgcttttttggaattgttgattaaatatgtgtttttganaacctcctcattagagtttcttaaatgagtactggtttgtaaaggattatcaacatt

SEQ ID NO: 5332 - DNA, 654 bp, Canis familiaris
  misc_feature (1)..(654): n = a or c or g or t
tnacgaatacgatgnnntgagattcaggnnnntgnngcagacgnnagaatctttcatcccacagnnnnnggtagatgtaattaaagtgnctgaattnnacggcagagacctgngagatgcgcagccaggaacgtttgacaaggtgttagttgatgctccatgctccaatgatcggagttggttgttctcttcagattctcagaaggcagcctgtaggataagccaaaggaggaatttgcctgttctgcagatagaactcctaagattacaacagttggtgccctaaagtagtgcatgtttattatgtcgcacttctgaggttctgagttcaagatcaaggtcctggaaggttctgagttcgagatcaaggtcctggaagagctgccgctcactctggtccaggtctgcaatcaaggccttacgccctggagggttacttgtgtactctacatgcacactttccnnngcagaaaatcaagatgtcatcagtgaaattttaaactcctacagtaacatcatacctgtggacattaaggaaatggcaaggacttgctcccgagacttcacgtttgctcccactggccaggaatgtggactcctggtgattccagataaggggaaagcctggggcccaatgtatatagccaaattgaa

SEQ ID NO: 5333 - DNA, 340 bp, Canis familiaris
  misc_feature (1)..(340): n = a or c or g or t
gnnggtttcctgcctgtgcggagnnnaannancgcgcggggtgngtccagagcnnngcggagcgggcaggagcagagggcgggcggcccgaggcgcagagcaagttctccggtggggtcctcaagaggagagcctgggcgatcgaaggccccggggacaggagagagagagagagagagagagggagaggagggggtggcgtggggggcatgatctgccaagaagggtccccaagcccccagcccaaccgcctggctagtgggaaggtctggcccgccccgcgcggtgtcccgcttcaaagacctgggcaaacttttcctcgctgccgcagaccctcttc

SEQ ID NO: 5334 - DNA, 629 bp, Canis familiaris
  misc_feature (1)..(629): n = a or c or g or t
gagatacatgctttnntatctcacccctccagactcctaacaagccacctgtctgnnacccttgctgtgtacaccttcctgaggtcagatggttccacaggctacaatgaactctcttctgaaataccttatttttaacactcttaaacagaaggtcaaccaccttgtactacaatgggaagatgcagcccagcgtccaagatgcccatcaaatcaattactgagcttggttcgtgctggttatcgttatgaaatccacccacaatggcctggactaaagtgggccactgcaaacgcagctcaatttacttgcttgttttgttcatacgagtattaggtgcccttacaatgcaccagggaagttttacagggcttgtcatttattctcagaataaaaccaaacaactgcaagtggtataccttcttacctcactttgcaaacagggaaacaacagttccagagatgtcagtgtgaccaaagttatagaactcattctttaattttttaaagagccaagattctaactcaaatctattggactttgaagctgctcctttttctacttggcctcctatttatagacagttgaggttggaaaaggaacatctaaaaatcatttcatatctgc

SEQ ID NO: 5335 - DNA, 645 bp, Canis familiaris
  misc_feature (1)..(645): n = a or c or g or t
tcnaaggagaaattgacnttcnnnnncnacagngnctgaggctnnagaatggcantanngctgtagaaagatctcttngacnngccaccaaacgattacaggacaaagaacaagaactggagcagttgactaagnagctgcggcaagtcaatctccagcagttcatccaacagacagggacaaaagttaccgtgttgccagcagagcccattgaagtagaggcctcacatgcagacatagaaagggaggcaccattccagtccgggtccctgaagcggcctggctcgtcgcggcagctccccagtaatcttcgtattctacagaatcctatctcatctggttttaatcctgaaggcatatatgtataacattatctgcctttaggggagagacccaacaaaggtaccaaggacatttaaaattccttctttgatttgtgccaatgatgaacagaggatctatttcacaagccaccgtatcttttttctgtcctaaattgcataccacttggagccataccctgtgcactgatgctaaagaacaaagaaactgtgttttcacacatcaacagtgttgacgtttctgtccagcagctgtaatgcaaagnnntcatttttatttgtngcatttgagagcgttaagaaa

SEQ ID NO: 5336 - DNA, 103 bp, Canis familiaris
  misc_feature (1)..(103): n = a or c or g or t
gtggcggggcctgggcgaggtgctgcaggcccagggccagagcgagnccgccgtcgactgcttcctnnnngccctggagntggaggccagcagccccgtgctn

SEQ ID NO: 5337 - DNA, 608 bp, Canis familiaris
  misc_feature (1)..(608): n = a or c or g or t
aatttggtgacactttttatccagggtacaaaggctgagactttggtatagacaccaggtgaatccttgactccacagccatacccccacgaggtaaccccatatacaacccaactttctcctgaccgagcacacatgagtggtcctccgctgtctccttggcagctgtcaacacgtttgtgttcatgtagatttccagcacaaagcatccttcttgtaaaccgactcctataacgttcttcacaaaacctctttggaagtaaaggaatggctgcttgttgtagagttcttgaataggcttgtcctggtcaagaccaaataatctgaattagatgccactaaagataaagaccttacagaaaacatttaaacagttcagtgaacacttaatagtcttgaaaataaaacccttatgatagaatgtagtttgagtgatgactaaatggtataggaggacagtggcaagaactattctaaatagaaatatagtatttcataagggttgagaaacaaaaaccttcctatgtacctaacaagcctgttaggccattagaggtgagtgtactctgnnnnnncacccagtggctaaaatgtataattgataatgt

SEQ ID NO: 5338 - DNA, 571 bp, Canis familiaris
  misc_feature (1)..(571): n = a or c or g or t
gacactgnngcatctgcacannagtcaagacccttgccctgtgcataccacgtgacgaatactgtgtgaaggaatggtaacgtgctttgagaacattcctgatgccctgtccacatggacggtgcgcacggcaaaacccctctctcaccgagnnnggctnnggnntcctcagcctgggccagtcaccaggtcttgaacacatgtctcggatgctgtaattccggacactgtgtcagcaaacctctctgcttgccagggaaaggtgagaccgggcctcccaggggaccagggaccatcagttctgctggaaatggctgtaaaatgagtcccagttcccactcacgttcaatataaaatcagtgctgtcgttccaatgagaagaacccccaaaggccagctgcctcctgttgtcccttgtaacgagagtgacagggtccccaggccagaccatttcctgggcgggaggctataagctgggtacgtggggcctgacttcctgaggagcctcccttctttctctcccattaggcaccccctctcccttccaggagtcagaaatccatctttcaag

SEQ ID NO: 5339 - DNA, 233 bp, Canis familiaris
  misc_feature (1)..(233): n = a or c or g or t
agaaataaatcccnnnnntgcttatccacttagggttgcagcttaacatttcaagagggattgtgcgtgctccanntcagatgcgcagcctttatggcctgttnnnnnngcagccgggactccaggagtgggcattactgnnntagtcacaggtcaccagcctctttgcacacnnnnnngtaaagcatctgcactgtccagannngtctgacataataggatatgaattnnna

SEQ ID NO: 5340 - DNA, 412 bp, Canis familiaris
  misc_feature (1)..(412): n = a or c or g or t
tcccactcccaggaacccnnttccctactctcnntcttatctcattnnaaacggaccggttttgtgcctatcaactttgggaaaaccaggcttcttgggctttgtcagagtaggacgcctcctgcagctgagtgcaatggcaagagcagaagggtgctcagagacttgtgcctggctcgggcgcctcagagcagggtggctcctaagaatgaattggacctcctagtccgcgccctctaacctggtctctacagccccactcgctctggatctggtcgctacaatgagccaggtggcagctaaaagttcggggttctgaccagtcccctatcattctgagctggaaggcaggggcccgtgtggctggccacaccaagcaagcagcatgcactccaagctgactccccgtaac

SEQ ID NO: 5341 - DNA, 629 bp, Canis familiaris
  misc_feature (1)..(629): n = a or c or g or t
acctgcatccccacacgtcnnaccacanctcgtgacnnnnnctggctgnnnnnnngnnnggggtgcccaccacggctgcgctgcagggggatgctgggtgcgtggnnaggggaggggccgagcccccggcagccccacacgctcccacacggccctgcatgctcaccggctcacgtggaggccgtgctctacggccacatgtggacacccgtggacctgctccagcccggacaggccccagctccctgcggtgggcaggagacggcagccgggagcacaacggacattggaagccagggagggtctcctggctcggccagggtacccctacccggggctgggctgctcgagggcccccctgacctacaggggctccggcgacgaaggactctgtggctcagaacaagaagacgtccccctgctgcggcctcatgtgaactgctgcagccccgcaggcgtcaggcccggggtgggggggcacgtgtccacggcagctggatgcccgcgcgcacccgaccggaagcataatgcccactgggttgctggcccaggttcctgtctgcggaggaaggacgcagcacccgtcacctgtgacctgcccctgggcttcccttcgactgtggcaggtg

SEQ ID NO: 5342 - DNA, 235 bp, Canis familiaris
  misc_feature (1)..(235): n = a or c or g or t
tnnccatgctgggnaggtcagcngctctancctggttgtagnnnccgggggcgtggtgggtgtcagcagaccgcctgcagctgccgaccacctggccacggggatctgccgggtggtcaggtgtggttgcttcggacctgtgatgtggagctgccctcactgtccctgcgggactttattctgcnagnnnncatgtgccctgggcagggagagaccggcttgagacccnngagcc

SEQ ID NO: 5343 - DNA, 531 bp, Canis familiaris
  misc_feature (1)..(531): n = a or c or g or t
taccaaaaaactaagcaaaaccccaacagccccatgtgcctgtttggtactgtacaaacctcttccccaagtccacgggcaaattattttcatccttcgcctttcagaagccttgaagcttaaagtgtaaattagtttaagaagaaaaaccttctgaacgataaggtggcagtgtatatagcaagagactaagacacatacctcgatcacacaattccacttccaagaatgtaccctagtctttggaaaactgtggagaatgatttgtagccatgatttccaaccctacaggcatgtgagaatacggacttctaggcttcaccatcaagagagcctgatgtaactggtctgtgatgggtcctgggcacccatatcctgcagtcaagatagagaactctgggatcataatacaacagaaaacactctaaatactcaatggaaaggatgggttaaatccatcacactagaaccccacaatggaatcccaaacaatcttaaaataatgtggcagaaggaagatnnntcattaaa

SEQ ID NO: 5344 - DNA, 599 bp, Canis familiaris
  misc_feature (1)..(590): n = a or c or g or t
aatctcacttgctgggagtctgtggcctgtagtggctatggattctccgtcagcatctgcagtcctctaccccatgtccgaggcagcctggatctcccagtgggcaaatcccacctctcaatgggtccaggcccaccgcatccttgggaggcatctgggtctcacggtcctgagctgctgtcttctgggacgaccgggaatcgggcccactggcctgggtcttctgctaacagggcagcttccagcccaagcctaacagttgccaatcctgggagctctaccagacaccctcctcctcctcctgtctctgctctctccagctccatcctgtgtcccattccccccccacccccacccaaggcttggaccttattcttgaactttgagtgcccttgggctgcttcttcactccatttgctcaggatgtgcagaatcactgaagagaattcatgttgggtgtaggggaataggcgaagggaattaagagtacacttgtctgggtgagcactgagtaatatatgaaagtgttgaactgctacattgtacacctgaaacaactataccactgtctgttacctacactggaannnaaaaaaaaa

SEQ ID NO: 5345 - DNA, 267 bp, Canis familiaris
  misc_feature (1)..(267): n = a or c or g or t
antggattttctgtnacactttaactatcattcttttctcaagggttaaatgtgggtaagaatagtacacaccatttaagtggtataaggatcacctgtgaagcactatgcacatgtcacactataagtgaatatatcattatcatcacccatcttcatgactggagaacatgctgaatggaagaaggaagaagcctgggaaggagtcatcctaggacaccgatatccttactatgttcatctcctaatttccagttatttcagtaa

SEQ ID NO: 5346 - DNA, 429 bp, Canis familiaris
atttctgtagcatcttaaggcttattgtcattctccataaattaagtaaaataaacctctggcagttttcctttgcactattgtttgtaattattttgcgaataactttgaagactttaatattggcctttgtcctctcactttgtcctaatgtgttgaaataagcttgacaatttgtgtccctgtcagtatctctgtgctctatattgcaagtttgcatgatagatttattgggcccataaagagtttattaatattcctttaacaggataagtattctgaaattgagtttgtcctactagctcctaatttttacctataaccaaaaaagacatcttgagctgcacaatggcaatctatagcagtgctttacgctgcctctgcaaatacattaaaaaaaaaccaaaatgtctattatagatttgcata

SEQ ID NO: 5347 - DNA, 637 bp, Canis familiaris
  misc_feature (1)..(637): n = a or c or g or t
gtacatgtggttggtttgggtttttttcatttatatattgtgctgttgagaattatactgtagtttggctcttaatattagcaaatcagaactatattagcnntcttgtctctaggcagcaacctaatagatgttgactctgtgtgtgtaatttgtatcttaaactctcctagattccatattctaccagcagcacacattgtccttcttgctctgaccagatcatcaagaaatgttggccaagaaacagatgccaaccagtctttactgggtgcctgttaactttcaacatatagtgcaagatactgtggtctttttcctcaaaggaacttactgtctagtttgggatatagttagtgcctgtctgtatgataacaatatagaaaatacaaaggagtgtgttataagttacagaaggtattctatagaaatttggagaagaagaaatgttagggtggatctcagtcttgaattaggttatttttaaaagggtaaggttcaggcaattcatttatttttgatgtacaaataacctactattttatttggttttagcctatgatttagttgttggtttttgtgtattttgttttttcaagaaaaagccttgttcttagcttgggaacagtctgatctc

SEQ ID NO: 5348 - DNA, 607 bp, Canis familiaris
  misc_feature (1)..(607): n = a or c or g or t
tcgtntgttttcgttttccttcctttttttttttttttttttagtnnnagttnaagagngaaagtaccagtgttcagannngnannataatagtttgtatattnnncatttgnagtatattnnnnnnngttgtactcnngtttcaaagtgtattcaagtaggtttnnngaaatatngannnnnaatttatgttgtgttttggtcnnnggtatttnnnncaatactnnnaagtagtatagagnnnnngttttagttaagaagnnntattnnnccttccctactgtgtgaagaaattttcctnnngttttgttccattacatcaatannnggcaaatannngcatgttgccacttattttctatcatgaactataatgtnntatttaccataatgagtttattattttaatgttggccacacttaaagaatttgtatttcaaatcagnncagttacgttaagaagatcaagtaataccctagcccttttacaaatttagcaaatggaggtaccggagggattacatgaacttcctaatttcacaccaaattagggcctgtgactctacatcttaatgctctttctactacaaagaaaagttgtctattt

SEQ ID NO: 5349 - DNA, 396 bp, Canis familiaris
  misc_feature (1)..(396): n = a or c or g or t
ataaataatgctattgtgactccggctgtcatctcattctgccagagatggaaacttctgtgactgtgtatctattgcttgatatcctgagggtnntgattagctgaaggtaattcactgtttaagagaactgtcagtcccaaggcctttgttacttacggatccattataaaggaacatgcagcccaatacgtgagaatgcagaaccaaattcctgtgcttttgctgaactgtagcccactttcctgggccaggacccaatctacagccacacaattcctatccaacctagtacccaaggaaggaaatacactacaatactgggtgataagaggaggaccaacatttcccctatttcctatgtaagtgaaagcatgaattccttttggtatatca

SEQ ID NO: 5350 - DNA, 479 bp, Canis familiaris
  misc_feature (1)..(479): n = a or c or g or t
gtgnnactacgagtgcatcccgagcatcgacgagcggtgcnnnngccccaacagnaagaaatgcgacatcctcaagaaagccaagaaagtggagaagtgaccggcgggggggggccccccacccccggggacccggcggttcttttagagcacgaggacggtgtccacagacgcgcaccttatgtccgtggggagcggcttagtccatttgcacacgtgaacaccacccagccacaagtgagcgaggccctgcgcttggtctctccccctcccgactcctgtcctgtgtccccgcggggcagccgcagccggggagggcgctgagcccggagagtagaggggcctcaggagtagggttctccccttggcggcgtcccctgccccctgcgatttcaaatgcatattcagcagctctcctctctcccgttcctcttcccacattttacatcttccatttttattaannnnnnatttttttt

SEQ ID NO: 5351 - DNA, 540 bp, Canis familiaris
aagatttgttttctattcatgagcagattgtagaaaaatttgccttattttcagaagcacgtcttcattaaagacttatgtttcagcagaaattgagactaatcactggaagaactagctcaaagtagccaaatatctgggaaatacttcagaaatatcttagtgacatgaattttgctagtcaaagcaaacacactgcttcaaataaggtcatgtatgaatgaacttaaaagaaacgtacagttcatttttttgcatataatcaattctgaggttcttaaaattttaggggctccctgaaatcttatttaatactttgctgatgtgtacccttattctgtctctacagatacattttaggttagcccatgttgaattatcttatttccagtaagtagagcctgaaagaatggtttttattgtgaactagttactttaggcgttgcttccatttgatttttaattattacttttaagtaccaaattaaatactggtttgttggttgttgctttttaagtgattgttactttaacagtgtc

SEQ ID NO: 5352 - DNA, 633 bp, Canis familiaris
  misc_feature (1)..(633): n = a or c or g or t
ttccccagttcannngctagatttcnaaataagagaactagataanannngagggggacgagagttcacctgannaaatcagaggccaaagtgtgtggngcggaagaaacagtctcttccaannaagggtgctttctccacttctgtccaaaggcacgaccttcagatagatatatannngcccctccctcacacacacacactcacagatgcatacatgcacacacatgcatgcacccacaaacacacacatgcacacaacagaggcatgcatgcatgcaccccccacatacatgcacatgcacgcatgcacgtacaaatgcacacacatgcacatacacgcacttaaaggcgcgcacacacacacatgcatgcacacccacacatatttttaacttttggaaaccttatctcttgcatattgtaggatcttcatgggaagaacaagaagcagcatctgtttttcatcaaaactctcctgtcaagactcctggatggctcagttggtcaagtgtctgactcttggtttcggctcaggtcctgatcttggggtggtgggattgagcctcacattgggctctacattcagcatggagtctgcttgaaattctctcttcctctccctctgcccct

SEQ ID NO: 5353 - DNA, 520 bp, Canis familiaris
  misc_feature (1)..(520): n = a or c or g or t
atccccactcctaacccccctccccaagatacttccacctcgagcccagctgagcccgctgtatcnnnnttctagttgtattgtnnngaggagcatgggggtgggggtgccaaggacacttgtggggtactctcccctcagctgccccagaaggactttgctaaattccatggatagatggaagggacgttgcggtacaaatgaatatttatgtgtgtctgtgtgcatgtgtgtgtgtcagtgatgtgtgtgatcccctctccccaccatgctcccccagaatggatgctattgtggtctcacatgtgtgttgaagctgccaaagaggggtctggtccctgcacaggccccctttgtaattgctggctcatcttcccccttgggagctggggtacagctcttggggacggaaacctcacgcctcaaagtgatttcttgtgaatgcaaaggctgggggagggggtcttggggggcaaggagccagtcgggggtttgtctcccccatacagctccccagatg

SEQ ID NO: 5354 - DNA, 516 bp, Canis familiaris
  misc_feature (1)..(516): n = a or c or g or t
atctgggattgctttatccactcantggggcnnagagaacaaagagcccagtacacanncagagacttggggtgctcagcagcagcccagatttaggggacgtttgagggactcttgggggccgcagccaaaaactgtctctctcctggctacacccgcttaacttcagttccttttcctgtcgatctgtccctgcccgctgcctctcggtgttgcctccatgatgtcttgtgtgtgctatgtgtgtcgacttgtgtagtagtgtgtgagccctgaggggcagggcttgtggctctggtgttaggttcagggggcttcagatccttctgtgagccccaggctatcatggcgctttcccctgtcctttcctcttttccccacaaccagggcatggagcatgtggctgtcctgaggttcttaactgatgtgcctccctcccacctcttcaagtagtgactttgtgtgccctttctcctccgctgtgtattccttctcaatgctttccttggtgttaac

SEQ ID NO: 5355 - DNA, 537 bp, Canis familiaris
  misc_feature (1)..(537): n = a or c or g or t
ggnnctggagactttggtggtggtcgtnnaggtggttttggtgggaatgacgactttggtcatggagggaacttcagtgnnnnnnntggcttcggtgnnnnncnnagtggtggtngatatggtnnnngtggggatgactataatgatttggtaatgatgtgcnannnngcaactttgnaggnnnnnnnngctgtnncgnnnnnnncannnnnnnnnatcaatcctcnnattttggatccatgaaaagaggaaatttnnnaggcagaagctctggtccctatggtggtnnnnnaaaatactttgnnnanccacaaaaccaaggtggctatggccattctggcagcagcagcagcagctatggcagtggcagaaggttttannnnnnnnnnnnnaacaaagcttaacannnnnnnagagccagagnnnnnacagggaagctacaggttacaacagatctgtgaactcaaccaagcacagtggtggcannnnnnngntgctacaaagacatatttnnnnnaatactcatgtgtatgggca

SEQ ID NO: 5356 - DNA, 657 bp, Canis familiaris
  misc_feature (1)..(657): n = a or c or g or t
caaaatatgttcttacnnnntcatttgccctttgnnngattcaggagtaaaacaaggagctnnnnaatcatcattattcataaatcctctgcaaatgtgtccgtctgcaaagataacatgtccccccaaatttttcatatctacttctgttaagaaaaatgatggacaaggaagaagattggtaactggggcgttgttttttaaaataaactggcaacccagggacaccgtgtgcgagttgttaattctaaatagcagtaagtctgtacctcaatctgctcgggctcctgtaacaaaatcccgcagactgagtgctttataaacaatacatgtttatttgttatagttctggaagccggaagtccaagctcaaggctctagcagattaggtgtctggcaaaggctatgccttggtgcatagatgacctttctcactgtgtcttcacaaggaagctctctgggctccctcttagaagggcacaaatcccgttcatgatgaccctggcctcatctcccctccccatttccccccccacccaagaccaccattctagggggtatgtgtcaacataggaatgttgagatacagacatttagtctgtagcagtctaaggatgtttagtgcctgtgacctttcatttgtagaagttaagagtg

SEQ ID NO: 5357 - DNA, 554 bp, Canis familiaris
  misc_feature (1)..(554): n = a or c or g or t
cctannatacaaactttcctgctnntgcggcagacatagctaatcagttgtaacattctttctccactgagccttcctggatatgggctcaggctcttttctcaatgtnnagctgcaaacagccacttctgatagattgtagatagaaagatagatgtgcaagataaaaactctttgctctttcaaacctgagtagttaagttcctagtataatggattattgtggaataccagaaaccactgtaaatctcttggaggaaaaaaaacagtcaatgaaaacaaaagaatattgtttaattggtaacctgttcttaatcagaactatcttattgactaataaagaatctgcataattctattcaaggtgtttatctctgttctagagttatttttcaggtaagtttattaatctgccacagtgacattttgctcaggatgtcagcatactaagaaggatgggatactttcagaaaatgagcatagtgttttttgatcacttaatgcctgcagcgcaaatttttaaagataaatttaggtgtaatactgattttcat

SEQ ID NO: 5358 - DNA, 60 bp, Canis familiaris
cactatatggttatatcacagcttatccgtttaccagttgatggagattttgggtttcca

SEQ ID NO: 5359 - DNA, 74 bp, Canis familiaris
  misc_feature (1)..(74): n = a or c or g or t
cnnnactnnngagaatttattctgtcatcattgttggtctagctatcaaattacgctatacagccagcatgatt

SEQ ID NO: 5360 - DNA, 604 bp, Canis familiaris
  misc_feature (1)..(604): n = a or c or g or t
agaaagtattcaggatggcaacagctttattttttgtatcctttatgtttgtttctctccccacgtcacangtgataaaaacaagatgtccggtgcagagcttaaaatgatctcagaaagcaaacagctcccctcttggggactcgccttaaacttgcccggcccgtacctgttctgtgggactcctgaggaagcgatccgtgacagagtccgaggctctccttccagcctgcctgcgcactgagaagagttggtgtttccttcctggctttgacgccattccgttcatctgtgaaccattttgtttctgtttttaattaatccatatcctatcctaatcagggcttctgccactgctgatgcagatccacagggggacctacctgagacacagctgctgcccggcgagcagagctgtgggatgtcttggaaatggaccgagtctctgcacacacgtgtaagccatgggaggggggccgtgtcaccaccagcgggacaggcccaaggggggccagacacgacgagtgtccagaggtcgtgttgcatactcatttgcacatctgttgtctggggtggacgtgtgttcggcttcnnnntnaggctt

SEQ ID NO: 5361 - DNA, 424 bp, Canis familiaris
  misc_feature (1)..(424): n = a or c or g or t
cnnggtcccctgaagccagacggcaaggatgaggaagatgaagaggaagaggaggagaaggcagaggaaggtctcatgttgcctccacccaaggcnctcgaggacgacatggagtcccagctggatggctccctcatttcacggcgggcgatttatgtgtgaccccgagatagacagagacagaaacagagccagccacgccagccaagggttccagactggttggactcgtttttctggacgacactggagctcaaatgctacctcccacttccctggaattgggagggagctggaatcacacacactggacttctgtctccagggctgcatggggaaggggaggccccaggggagctcggtaatggggacccggagaggaccccccagagaactggtttttggctctggcctgccccaaccc

SEQ ID NO: 5362 - DNA, 494 bp, Canis familiaris
  misc_feature (1)..(494): n = a or c or g or t
ggcaccaccaactccgaaagccgtcggctgcganngtgccccgnnannagagccccgagtctgcgagcagagcnnagggcaggnncgcccgccaggccaggccaggccgagaccgcgcgacggggaggctgccgcgccgggccgcgcgcgcttgctcgtccgtttggggagggttcagcagccctgacggcgtggcgggcgctctggaccagcgaagagcgcgggggaagatttttgtggaccgagacgaaagctcgtgtctgctgtggatgcgggagggcagacgggttcagcacttggaccgggaatggcacgggggctcacgcttggtggccctggggtgcttgctgtcttggctgagcctcagtctcctgaaccccaagatggggcaccaggagaatggacatgtagcccgagcctggcaggtgcctgtgttcagtaaagcgaactgttattcttgtggttaataaaacaaaagggagggcagcccgggt

SEQ ID NO: 5363 - DNA, 557 bp, Canis familiaris
  misc_feature (1)..(557): n = a or c or g or t
tggccccgctcagcactgacagcnctaccctgccaggggtnnngctgggagaggncttccaagaccttttcctcgtggcggccggccctgggccagcgnctgctcccctggtgaatgcaccctggcagcacccgcagcttttgccacctccagctgccaaacagcagcctgcagggcagtgagcagccttgagccagagacctcctggtccaggtcagggatgctcgggccaggaccccaggtccaggagaggtaccctgggggcaggaagagtgggccggggctgcccctccctgccaaggccccttttcctgtcccgctgcgctgagggtaagttgggggtggtgagggccctgccttgtcagcactcaggaatgtgctctgggagaatgctgaagccataatccccagctatttcccttggctgacgcccaggtactcagctggcccacgccacagccaggctcagccctgctgctcaaccgtggacgttctgagaagcagccatcaagagggtctgaatgggtttacagcagttttgctgtggttccgtttct

SEQ ID NO: 5364 - DNA, 527 bp, Canis familiaris
  misc_feature (1)..(527): n = a or c or g or t
gggaagaggtnataggataagaacgaagacaggactgtcaggggcagggctnnncacagagaagggaggtgatgannaaagaagtngcactcctgcangatgcatgttagtcacttaattcagctcagggatgccctgtcttgtctgctcctgaggctcctgggctggggccagaatgtctgcaggccccgccagcagataggagcctcctccctttgcaccagtgttttccaggcacagccttttgccaaggaccaggttgttgggctgacctggatctgggacaggagcaggggacacagatggctcagggcactgctcagagcaaaggtgccttggaagccaagcaaacagaatgggcttggaatggggggatggataaggaaggttggtcacctggggcatctgggtggctcagtgggttaagtggccagcgcttgatttcagctcaggtcatgagctcgggaccctgggatcaaaccccaagtcaggccctgtgttcagtagggagtctgcttgagnnnnct

SEQ ID NO: 5365 - DNA, 663 bp, Canis familiaris
  misc_feature (1)..(663): n = a or c or g or t
gatatgtccttccatgaaggaccaaggnnagagtgtgggcccagggctggcgcttctcttcccctcagccctgnntcagctctgaggtccctctgtatttatttctcaagcntggttggcttctcacagggcgtttagactgacacctgggccccatccccctgccacctgctgggcctggcgtggcaccccattgccccgcagctcccaccaccacctcatgagagccccagactccaaactcatggtgcagacctctacctttttttaaaaaagatcttttcttattgtttaaatgtattgtttctggcacttgggcaagccctccagctcatactcctctcactcctgacactgggcttcaggagaagggagactgcctggccctggtccctgtcacctttccctcttctgcccttgggccctttagccctggacctccactgtgggaatgggagtcccctgccccatagctccttgccctggccagaactactgccgaaggaggttaggccccatgattttaggtcacgaaggccgtaaggtggatggaagggaagggtctgcaggctggagtctagttgtaccctctccgtcatccagatgcttcctttataagcaagtcagcagcacagctgcccctgctgccatccagacttcttt

SEQ ID NO: 5366 - DNA, 501 bp, Canis familiaris
  misc_feature (1)..(501): n = a or c or g or t
aaattataanatcttccttacaaaatcatataattcacaaaattatataattaaaaataacagcagaataaaatcactgaaaaagaataaacaataacaacaacagaaagctctgatttactcagctttattcctctgaaggagatttatatcagagttccatttcatttatgtttggataattaaaacactttcttctaactctgtgaagcacatggatcaagggtaatatttaaaaatgttttttaaatgtcattcactggcgaggacattaaaagtaaatagaattaaaatatgtcagtcaacggaagtacatttcaaaaaaaaatgagactttgacttttttttaatgcaacaatttactcttgaagaacattaaaagaacaatgtgaaatgagcannngctttataagatggtaagattgtctctgttaccttactgtgattgcaccggaagtgccttttagaaggttcactgtaacgtgttcattgtgttactga

SEQ ID NO: 5367 - DNA, 242 bp, Canis familiaris
  misc_feature (1)..(242): n = a or c or g or t
cagaaaagagcaggtacacgaggacctatggcactccctttcctnnnnntggcccctgccctgttcttgaaaattctagaagctacgtgtgcgtcaaagcatacttgtgaaaaccactcccgtgttagtcggccataaggaaaccccacagacttgagagcttaagcagatcagttctagaggcggaaggttgaggtcaagattctgggttttgctgcatnnnnnccctctgcctgcttctc

SEQ ID NO: 5368 - DNA, 56 bp, Canis familiaris
acacactttaaaagaatcaggtttggggtgcctgggggagctcagcagttgagtgg

SEQ ID NO: 5369 - DNA, 485 bp, Canis familiaris
  misc_feature (1)..(485): n = a or c or g or t
ctacggtggatccattcaaagcttaacttctgtaggtttcaaagagatgcccaangcgccatcaaacccagacttgcctccaaaaatgtgcaggaggttaaggctagacactgcgtcaagcaatggctaccagcgacctggctctgttgtggcagcaaaagcacaactgtttgaaaatgctggttcacttaagctgatttcttctgggcgccaagccaaagccatgtactcatgtaaagcagagcacagccatgagctttccttcccacaaggggcgatattttctaatgtgtacccatcagtggaaccaggatggttgaaagcaacttatgaaggcaaaacaggactagttccaaaaaattatgttgtcttcctctaatactgtttagtggatggcagtatcttcatggtatccatggtaacaataataagtgctatgattttatnnnanacagatatgggannnnncccgctaaatgaaaact

SEQ ID NO: 5370 - DNA, 504 bp, Canis familiaris
  misc_feature (1)..(504): n = a or c or g or t
ataaatgatcatactaatgaaaagaatattgaaatgcnangaaacatccaatggcttcctgtctcatctgagtcgacaagcgaacctactgcagagtacaagaatccatttcaaggttgtagaacactacaggacttgacaaataccaattttgtttcaaataatgctgctaaagctgaaaataagtcagaaaatccatctttagagctaccaagccggagaagaaggtgtacgcctctctatttaaaggagccaaatctcaaaaggaagatnnnnnnnnnngatatatttatggattctggtttttttgaattcaannnnnnnnnagtcaaaacagggatataacaagattccagaagacgaaatgaatgcacaatggaagcttttttctgctcctccttttcatgagtattaatttatccattcttatgtttacatatatgtgtttaagatagctattttgtaatattaagcttctgaagtcatttggtcatcctataactt

SEQ ID NO: 5371 - DNA, 583 bp, Canis familiaris
  misc_feature (1)..(583): n = a or c or g or t
antcaagactgaagaatacgtcntagatttctatgataaatattacccgnnnnagagtacagagtgtaaacacgcattcttnntgaggctccggcgctgaggtgaatgcagcgctccagagacgcaggtgctgttccaggtggctcctcattccggcccacaggcaggtgctcctgtctcccagggccctaatctctgccatcagacggccattcagatctctcacccaaggctagatgggtggtggggcagtggaatcaagaagcgagcagcccttcagcaaacctgtcccttctgcacaggccttggcccctgtctcaggactccacagttcactggaactgaacaatgctgtctatccgacagcttgcaagaacaaaggagtatctaagctgataccctcctcgagagaatctcttcattgaaaggatgaggaagtgtggtagccatgaacgattgatgctctagccggtcagggcctatgggagagttagcgcacgaggggaggccagcactctcccagccatgagtgagctgttgttgaacccaagaggacttctctagggcactgagattctgctgt

SEQ ID NO: 5372 - DNA, 444 bp, Canis familiaris
ggagggaaggctctataggaagtcaggaagagcagggacatgggaaaaggaaagtcaatgtttacatggggcctttgtgactgcagggtcatggagggcacgtgctttccactccctgctggagtctgaggtgctatccgttcactctcttcctcagttaatctccaagcttcctattccgtcttggagtttgagtgcccaccccctagaggaagggcttgttctatattcagatgaattcctagaggcttttttctaaaggagcaaggggcctggggttaggggtgtctgaaggttagggcagcaacaggtaccttcttcccctttgtaaatagtatttttatactttctcctcaccatctcaggctttatatgtgggagcccctgaatggagggagggggggtgtcctcgcccccacctggagcaggtgagggtggggcaaa

SEQ ID NO: 5373 - DNA, 346 bp, Canis familiaris
  misc_feature (1)..(346): n = a or c or g or t
agcatgtcacttttaatcagattctcattttgcnnnnnctgttactttcctagtttgattgtgttttccagatagatttgtttannatnnnnncaaannnntgccagccannnanattaaagctttnnnnnnngtnnntgaaggccaannncnncccactagnagggtgatannnnnnnnnnnnagnaaagcccagcaattgtgttccccacccctgccnnnatataatgcaaattattgaccagctatcaagattcannngtggttgctgcnttccaangagcnggnnnaaannnaatactgtgcnntaatcacagcaatctgggccagaaggnnngcagggatg

SEQ ID NO: 5374 - DNA, 536 bp, Canis familiaris
  misc_feature (1)..(536): n = a or c or g or t
tcagagaattcatgatgcacgcactcagcccatggaatgaatgagctctnctnnnaaacnnaacacccattgagaagactgaggggtgccctggaagagttcaaagggnntgaaacaggggctccatttcctngaatccctcactcatcttcttcctctggtatcccttggctcttcttcaatgcagacattcactgcctggggtgtgctagaaactgagctggacactatgctggggatgtccctcaaggtgttgacaatctgatgagaaccaagacttgtacacaaaaagctaaaaaaattatacagctagactaaccagagacccaaatgaatgagaaaactgagacagaaaatttgccaagaaaaaatgccaagggcacaaagttcagaagccataaaacctctcctgagagcgtgctgagtctgcccagagagaagccacctcacagatgattagaatgagccacaggttatcagagagaaccagattcaacttcaaacctgagctggacatttcctttactgtttacaga

SEQ ID NO: 5375 - DNA, 640 bp, Canis familiaris
  misc_feature (1)..(640): n = a or c or g or t
gcaccccaacttcccagggcccannaaacatttgcaccatgtgcaatttgcaacaaagaatcctctctcggcatcctgtccttagaaaccccacctcattctccaagcctggtcggctgcctgcacagcccagaggcgccgttggcctggtctagcaacagaattttgccaatcaccttgacactagttgaaccatcctaactggaacggcgcctcctttccactcatttccccaaacttgtcgctttacactagagacatgtacatgtatgttttagatgctccaaaatggaacatgccaaatgagtgcctttgcctttctgaggctggggaggcggtgggccttggagtcctccctccagccgtccggggttgcctgtggctcctcaggccagcagagtggcttccagccgagggccagtccacaagcactttttcatgatgtcctcaagtcccattacgtggcacctgaaggagtaagaattgagggtgtgatctcagtggtgcttccagggggccgggggtgagcaggaggacgcagtgattgtaggcaacgaagtgtttctcttgatctaattaaatgcagtggtatggtttgctgcgtttattcctattttccattaaattaactttatttcta

SEQ ID NO: 5376 - DNA, 551 bp, Canis familiaris
  misc_feature (1)..(551): n = a or c or g or t
acatacatgtaaangnctaantaatgaaatanntgtttcctgaatataacagtncaaattttgtctttaatgatgacatgtatatacaaagcaagctcccatttgttaaaatattcttcaaaaacttcctttttgtatgtctctgcttttaagggaagggtcaccatgttaccagccccatactgattctttgaacttaaacgttattgcttctaatagcctagaaatagagcaaagcagcatcccgtaaaactcaatatgaaaagaacccagaatctcaacatttaaagaccttagtagagaaaaagaattttcttcatcttaaactgcaagacagaaaagtattcatagctccaagtgtatggagacacaccggttccatctctgcttttcttgctttgctagtagggatgcctttgccttgcccagcctttaataggtaaagattaaaactctacataatagaggattttcatctatctacaaaaggcttacttcgaaatgtgggtatcttcaagtgaaatacaactgactttgccattgatgaattc

SEQ ID NO: 5377 - DNA, 337 bp, Canis familiaris
  misc_feature (1)..(337): n = a or c or g or t
ttggtntggggtctgtctgtnaaacataatcctcaaaaagtgggtaaagaccannngttgnangnnnaggatgtcattnagattgtnnngaagnnnnnccnnnngcccatcnnntgggncnaccatnnnagctttnnnnntnnncaagcncnctatnnnnaaccccnnnnnnnnttgnnagccnnnggatcaggattcannnnagnnngatnnnggccctnannntggnnntttacttgtcttatcttggtgtccccnnntaaattcnnntgcataaaggnnntggtannnnnnnnngntatgtgcagctcatgtgtcattgtcagaatttgtttgg

SEQ ID NO: 5378 - DNA, 415 bp, Canis familiaris
  misc_feature (1)..(415): n = a or c or g or t
tttngnnagaaagtgacatttcctccatttcctatttcagtgtctgataaccttcacagccaggaaaccccctcacgtccacctcccctctccccccattgagacttactgtccttcactggcaaagcacatctcaatctctttctcatctgtggatgctaagctcttattaggggtccggtgggttttatccaaccagtaacagtcgggcctctgccggtggtgaataagacatcggagaagataaacatgccttccccgccacggtgatcagagatcccgagcaatctccatgcctgggtggagagtgacaggtgacctttaacagagcagagcccggggcggttggcatttgagtctggttctgatggagacgcccccatttttggcaggtgtgatgctccaccgttagctt

SEQ ID NO: 5379 - DNA, 478 bp, Canis familiaris
  misc_feature (1)..(478): n = a or c or g or t
atcctcagatcatcctgnngccccattccccaacttataacgacgagggtctttgatgggctgatgcctctgaacagctnnccagctggctttgaggaactgccaggagagaggtgcttgtttggcccagaaccctgcagaaagtggnctgaactgaccttcaaacagcatctgtcaaatatctggccccatttgtgttgattttcctcttagtatgcccagaagtctgatctggtggactatagtgctgggagaacccttagctcttctgaggaatccacccctcaggagaagcctggagcaagagctttccagcacacactcccctggtccctccagcaactacgtgattgacaacttttcctaaaggccccagagagtttgggataggttagaaaggggacacttccaccaagggcccgctgtggccaaggggcagtttggaatgctgctgagtcaagacgggtaaccatgctct

SEQ ID NO: 5380 - DNA, 584 bp, Canis familiaris
  misc_feature (1)..(584): n = a or c or g or t
accttgcactaacgtgtgtgtgggtgatactggccgggcaatcagtgtcagagtccggtgggagagttggcagttctgagcttttcccctattgattccaactacaattcaaactccagagttatttacttaagcttacaatagctcaagctaaataagccatcgcctaggggcccacagacctggttttcacaatcactttctggagtggtctagggaacaggaaaatgcgcctctctctgaaccacgcgccctggcttccagccttttccctttccactcgccacgactgacgactgaaaaagggactcaaagccaagacgtcaccaagttcttagtgtagccaccaggacattgctggtaacaggggcacccagttcagcacttgacaggccttgtctgtccttcagcctgcccgggagagcagcacccataaggcagctgaggggggagctggaaccagagtctcatctccaaggatggtgctgcctgaagctgtgtctgagaatcttcagcttctattatagtctctgatgaggaccatggnnngttctctgggggcnnnnnnncgtactaggagttat

SEQ ID NO: 5381 - DNA, 569 bp, Canis familiaris
  misc_feature (1)..(569): n = a or c or g or t
cattttaantatttttattgtnnaaatnnatacagtgnnagagtcacactttgtgtagagggttggatatctcagtgcccagatgaccagtgaattttaaacggggtagactagaattgaattggatatgtgatagtcaataatatttactagaaaaaaaaatatttactagagttcttaatatcagcaattccttttgtcagtgggtattctgtgtgtcgctaggttcttttcaattgggtgattacttaattttcacatcaaaggtgcttaatgagatactttgcacttggattacatactagaatcatttaaaatttggacctgaggtgacttttatataagaccactcctccagtttttttagaacaagaaattgaggtccgaggtgatttgttcagtcaacagcaagactaaaagggagtgttccagacagtgtatgtagaccatcttcccatgtttgatctcactgtttatattggccaactcgatgggcactcggaaaccaccttgcaaagtgttacatggggcaaacaagtacatttggaagagtccttcatatgtgggct

SEQ ID NO: 5382 - DNA, 473 bp, Canis familiaris
  misc_feature (1)..(473): n = a or c or g or t
gggggactatcacaagggactctttcctggggacagggctcacagagaaggnntcactnnagtccccaggccccctggggttggtggnctgagcaagggctgaccggtccacacctgcttggtcagctggactttagcctttaacctttatgctttcttggcccttgcgtccggtccaaaggagctggtatggccagcactcgcatagtgctgatggggaactcctgtttgcttctggtgactccccttgagacgaggcacacccagaacctgaggtgggggacctatgtggcttctttgcaggcccagaggaccagagggtgctgttggtggctgtcccagacttcagcaccacacagactgcctgccttgtgaatctgcgcagcttggcctgccagcccatcagtttctcaggctttggggcagaggacgaggacctggggggcttgggtctgagcccctgactcactgag

SEQ ID NO: 5383 - DNA, 215 bp, Canis familiaris
  misc_feature (1)..(215): n = a or c or g or t
agtccnnnattgaaaaaaaaaaaaaaaaagggaaaggaaaaagagaaaaactgcattaaattgtaatgttaaggaaaactaatggagnttatattcgtggcacaggaagcatcacataaatattangcgataatgaagaatatgttgatgaaatacaagcctaggtacaaagagcaggccagtcagccgggttctagtttagattccttgtttca

SEQ ID NO: 5384 - DNA, 595 bp, Canis familiaris
  misc_feature (1)..(595): n = a or c or g or t
tattattttttttacaaattgtatgcttccctttttatttgaactatattgagacttccactttnnaactaaagtaaatgacatttgtcttaattctgcccagttattgacgaaatcatatctagatatttgtatattttaattttacttatataagccatttcagtttaagttgccttattctgtccttcacattcttcttgtcaagtctaataagcttttgtcatgttggaattcttctaacactgaatctgtgatgtaaaaatgtatgatgtgctataaattttattcataattaacttatagcttattgtacctataaagcatttcttgtaaattgtctagtttattttttcatttatgtacattttcttatgtaaatttttaaaatacttgtggcctgttctgtaaacattcctgtgcccttctccttaatgcttatttgcatgaaagaaacttaggttttgcttgtttatattggatggccattaagccaacttctgtactctctgccttctttcctgtagtttaactttttctagttttgttcgtattctaaataaatgttaaaatcattctttttatttcctacttt

SEQ ID NO: 5385 - DNA, 560 bp, Canis familiaris
  misc_feature (1)..(560): n = a or c or g or t
ctgccagaggcccccctcagtnctctgggcagaggaggctcaggaagaaagcaggacgggaatggtgggcaggaaggatcccgaggctaaagacaggctccagttgagtcaataatcctttctcctggctgtgtgaccctgggcaaatgactttcctatttgggtgagacaggagagtaagacaatccattttctaagaccccttttagatcaaagtccccatggctctgtggagtcccaggagaagccatggaatgtccctgccaccctcgggcaaagagccaaccctaagtcctacagtggccccctgagtgtcccccccccccacctcagcccaagccccttctccatttctgcagccagagagggctgcctcagccctagcagcagggctcctatcttcttcaaggccatatctacccatgccctggggcttgggagacccccatagggccgggcctcttgggtcagcccggccgctggcttctcccttctctgtgttgttctgtgttgtggggtggggggaggggggccacctgccttacctattctgagttgcc

SEQ ID NO: 5386 - DNA, 355 bp, Canis familiaris
  misc_feature (1)..(355): n = a or c or g or t
ccccctaccccactcccagctggtccctccactctgagggtcagacccggagctactgctgagccacagctgggagagatcttcctcccttcccttccctctcacttatcttggcccagtcaatcccttgttttgtactttcttgagctcctgacccctaccccnnnnnnnnnactttgtaacttgtttctgatgtgggtccctaacctgttatagcttccctaccctgggccgaagggcacacccatccccccaccatcctcccattctgggggctctcgcacaagtctgagggctaggctgacacggtcttccctccccctccaggagcccccagcttgtcctgacctgtgca

SEQ ID NO: 5387 - DNA, 583 bp, Canis familiaris
  misc_feature (1)..(583): n = a or c or g or t
gannagcatcangatatggntacactgttcantaanagtgacnnagnnggannnnnnnantnnngtcttcacctnngccacatctnnacatggtgacactggttcccacctgggtctcacctggacatggtgagtcggatccccacctggtcctcacctgtaactgctgattatcctttccacatggacatcatgtggacctggtggctgtagtgtttctagcttctcatgtacctcgtgacgctcgtcccaaccagggcctcaccgggacctgggcctctcctgtacctggtgatcctggtccccacctgggcctcacatgacgtggtgactcttgtcaccaccggggattcacctggacctggtgactctttttccaatatggacctcacctggatctggtgactcgggtactcagtttggcctcacctggacatcgtgtctctcgtcccccctttgacctaactcagaactgctgcatcttgcccacctggccccacccagacctggtgactcttgtcccgatctatgcctcaattcgacctgatgaatctggtcctcacgtgggcctcacatggacctg

SEQ ID NO: 5388 - DNA, 610 bp, Canis familiaris
ttattattgttatttttattattataattattattgttataattttattttgttatcctggtcttaaactactcttggttgtcttccaaagagtgttgacctcaagcaagaagagtctgcagttcactgatatttcagatttctactgaagtcaattatgtatacttttatctatctttgtttgagattgagttaaatcatggcaatcaaatgacttttgaagctcattcgtcataagagacagcttagaagaatgttctcttggggcttaaagatgcaatatcgacttttattttgtttgttaaattcaatgtgatgcaaatatttactggtgaaaggtaccacaaaagtgctttatgcttcctatggggaagggactctgtaacataaacttgagttttgtaatttatacaaggacttaaatatatagacaataattttcttcatctttagaatttttaacgtaaatgaacacttatgattgtatgtttattttttaaaaaaatgttttaaaaactgaggagttctgttccacaggcaaccggtactggctaccctggtcttctgacaattatgtactcctcacaactgtctgctataaatgcgaacg

SEQ ID NO: 5389 - DNA, 528 bp, Canis familiaris
  misc_feature (1)..(528): n = a or c or g or t
cgtctgccatatagaagatgcttaataaatatctgttgattgaatgttgaannnntagggagaagctagggaaaagagttgcccaccttcctctcaccccaagcctcagacccctaagtctgcataaatggtcaggctgagaaggcagcaactgaannaaagggctggaagggagctcactgagccacagtgagcactgaggtggtggagggaggacagaccagttaggggcacacttggtttcagtcaaggaagggctgccacacttggagggctaactttaggggctgatctgaggagtctttggagagagaatgggaagaaaacatgaatgaacagtcttaggagcccaagagaaagaaagatgcggaggagggtagagaaaggaggtggtttccagaaaaggttgggagttgtttccaaagacggagttggcagatttgatttagcagtagcatctccaccctacccccttcccaatcatgaaaccacaactgaatcagccatactcctnnnnngccccccaag

SEQ ID NO: 5390 - DNA, 559 bp, Canis familiaris
  misc_feature (1)..(559): n = a or c or g or t
cagagaccnagnctcggtactcctgncagctccannacatgcaacagatcatctcccactatgaggatgaattgaggcagctgcgccatgannnnnagcgtcagcacaatgaatacaaggnnntcctgggcatcaagacccacctagagaaggaaatcgccacctaccagcagcttctggagggagagagtgaggggacaatggaggaatcgaagtcaagtgttaaagcaacaaagatcaaggccatcacacaggagagcgtcaatggaagaataattctttctcaagtgaatgagatcgaaaagtatgcataaggccaataaaagttttggcctattataagaactacttttccccaatggaaattcttgcccagacaaaggggtgagtcctaagaggtatccttgaagttatcaaactcagaatcttatttttttcctctgtaagacaatctcaccagacattccataatgatcttaatatattgctatactttttgaatcaaagtatgagtttatgagctttttaaagctctactttcctactacaatctttagat

SEQ ID NO: 5391 - DNA, 402 bp, Canis familiaris
  misc_feature (1)..(402): n = a or c or g or t
catacctgatgtgggccctaatgatatctctgtataacaaagctgctacaaagcccacagattttgtgcaaaagaaaatacaaaacaagnnggatttttcttctnnntattgaagaaatttctctgcacatatttttgtaggctccaagtggaaagcttttccctatttaaatatattattacaaggaaaaatttattttctaagtactctgaacttgtcaactctaactctgaagctgtcaactctccctattgaacttttataagagaccataanaaaaatttgtgnnnntctctagagtgcaggctctaaagacttggagcatgatactgaataattctcaggaaaactttnaataatttgtgcccctacaagtgaagannncattnnagtatgaattc

SEQ ID NO: 5392 - DNA, 576 bp, Canis familiaris
  misc_feature (1)..(576): n = a or c or g or t
ggctgtcatttgctgacagagnnctgatcaacagcatggaccagaacatgttcagaaacttttccttcattaacccagggatggagaagttgatatcctgaagcacatcccctgacacacaagggaatttgtcttgtgtctgtgaactggttccagtgacgctccttggattccttttcaccttgggaaagaaaagaaacactcaataatacaggctgagaccttttagctcctcactgactttgcatctacagcagaagccaactcctccactaataactacacccttcggtgcttctctgtcctctcctgtggccactcttgaagcgaggtcattactaaccatagttacttactggcacaatggttctctgcaatgtgaaaagacctgaaaagttaatactgcccgaaatcatggctcttcacatgggcatcaacagctgatgagtggccgaaggcagagtgagcacagacgtctcaagactgaaacagcacctcaccctctgcaggagtggacttcattcagccacagacaagtaaccactaacctgttttgttctgtttgcatctgtggaa

SEQ ID NO: 5393 - DNA, 480 bp, Canis familiaris
tcctgccacaatggcactgcccaccctgccttaccttggtaaagtctgccttacccagataagcactcatacctactgtcctgccctcagatccagctagcagcaagggcctcggattgctagaatcccagttcttaggagtctattgaccgccctgggttagggggagcttgggcgagagaaattgtggttgttgactttctgtctccccagaaatagaactttagggatggaaaaagccggacaagaagctgaaaccctgaagaggagttgggtctctcatggccagtccatggctgagctggtgtcaaatgggagggcccacgtagattcactgcccacaggggagggaggacagtgcaaattcagcacacgaggatgccccatggtcatggtagcaggaccttgtgttgaactcatcctcattctgatgcctcctccctccagaacctaccatctgtccctcagtggggggaaagg

SEQ ID NO: 5394 - DNA, 111 bp, Canis familiaris
  misc_feature (1)..(111): n = a or c or g or t
acaaccactaaggcntagaaatttgttatatacagaataacacttgtatactttgtgactgctcaggggaaattactcatgttattcagagtaaggacaatggcaaacatt

SEQ ID NO: 5395 - DNA, 632 bp, Canis familiaris
  misc_feature (1)..(632): n = a or c or g or t
gggggctcngngnacaccatcaatgggaatcgctttgccatggagatgcacatagtacacgagaaagagaagcggccattggagaatgagaaggaggcccaggattccaaagatgagattgcagtgctggccttcctggtggaggctggatccgaaaatgatggcttccagcctctggtggacacactgtcttctgtccccagacccaagatgaacaccacaatgaaagagagcatcagcctgtttgacctcctccccaagaaggagaaattgaggcattactaccgctacctgggctcacttactactccaggctgccaggagaaggttgtctggaccgtgttccaggagcgcattaagctccacagggatcagatcctcgcattctccaagaagctgtactatgatgtggatcagaaactgagcatgacagataacatcaggcctttgcagcgccagggccagcgcgtcgtgttcaagtctcaggccccaggacagctgctgcccttgcctttgcccaccctgctggtccccatgctcacctgcctgatggctggcttcctccaatgatagctcccttctggacacttgacctctgctctcagcctgtagaagcctggggcctccattcc

SEQ ID NO: 5396 - DNA, 326 bp, Canis familiaris
  misc_feature (1)..(326): n = a or c or g or t
gcctgccccgggnnagcaaggcctgnnccgcccccacccccagccccggccccggccccggggggctccagcnnnngggccnnnnncccacctcgcccccctccccggccccagcgccccannngccgctgccagggcggcgggtggctctgtccgcggtcccaccctctggcgcccgcggggagcnnnnncnnnggggnnnnnngccagcaggcagaggacctgggaancnnnggcgggattttgcnngcgtgcccgcgtgtgtgcnnaagtgtgttcctccccagtgcctctgtgtccccaggtgcgcnnnnntgcatactcct

SEQ ID NO: 5397 - DNA, 640 bp, Canis familiaris
  misc_feature (1)..(640): n = a or c or g or t
tccatctgcagaagaagacnnggcttctcatgaagattctgtttcatctgctatgaccacacgcntgcgcanncagagtgagcnnnaangagaacgtgagcttcgggatgtgagaattaggaaaatgcctgagnncaatgacttgctaccagnngcacaagcagagccatctatatggacagttgatgatgtttgggncttcatccattctttgcctggctgtcaagatatcgcagatgagttcagagcacaggagattgatggacaggcncttcttttgctaaaagaagaccatcttatgagtgcaatgaatatcaaactaggcccggccctaaagatctgtgcacgcatcaattctctgaaggaatcttaacaggatcatgaggctgtgagaaaacagcagttttactcttcttaaacagacttgtaaggtaaaggctcaagttggcctagaatattatcatatattgtggtggatagccaagcacattgggatctccacatcaaaagctgacatttcttctacagatacaattcatcatacattttcataattagccaacattggtaaaannnttnnnaggttannnnnacaatgaaagacttgatatagagggccatgatatttttcaaagaaacg

SEQ ID NO: 5398 - DNA, 545 bp, Canis familiaris
  misc_feature (1)..(545): n = a or c or g or t
acaattaccaagggctcagacccagtaggaatgagagtttgggtcacagcaccaagtatgtcatcaagactttccctcangaagagagatccacagttccacatatacagggagcaaaggatctgagcagcacaaaggggtggattgggacattcatcctcagagcctccttctcgaaaacctgctgcaactgtccaagctgggtcaatgctctccccaggctgcactggccagtgactgggtatggttgtactagagacggtccatttctgcctgatgcaggactcatctaatgggcaaccttctagtctagagttgactgactttctcagcactgtgccaagatctgagattcttccactccatctttcttccatgtctccttaaacaggtgttgggcctgcctctcacagcctggagtctctccctgcatactctacccccctctcccttttatccatcacaggcacttccccccaacaaatctcttgaaattctaattccatttggcatttgcttcccagaggacttgaattgatacatgg

SEQ ID NO: 5399 - DNA, 636 bp, Canis familiaris
  misc_feature (1)..(636): n = a or c or g or t
tacaaagnnaagttctcatgattagtttttannaangattaatggntaagcttatataaaatactggatttcaggaaacttcatattggccaacaccagggtgtatcctatgaatgtcactttgaattgggagttaatgtttaacgttcccaaattatgttttaaatgattgatttgtaagaaaggtttattttcagtgtttcttgacatttaaagcaaagcctctatttaaagcgtctgttttgtgatcagtgtgctatgacggcaataaccgattacctaacatttttaagctttttgagactgttcttgttttattttgttttctaagagcatttcagcagcttcggtggtatctagaaaaatagaaattataaaaagaaagtctcttattatattcccttctcccctttgacaataattgcttttttcctgtgcttattactgatatttaccatttttattaaagtatccttattatgcatagtattgtgcaattttccccctctttttaaaaaaatctgaatatagtattttggatgcttttctatgtcagtaattagaagtttatctcactctgtgatgactatcatatgtaaatgtattgtaatttcataatgggggacatttgagttg

SEQ ID NO: 5400 - DNA, 564 bp, Canis familiaris
  misc_feature (1)..(564): n = a or c or g or t
ttgtctatcatactctctttattgatggaatcacttacctatgtgctacagacaatgccttggataccataacaccatctgcatttctnacaaatatgaaatacaataaaaatcaagatggtagctcaatatctacattgaagagtcaagtaactgatgtaaaaaatattatgtcccaaaatattgatgaaattttggaaagcgaaaaaagattgaatatctacactgatagaaccagttatctccaaacaactgccaaagaatctcaaaaaccaagaaagattcttaggaggatatggtggaaacacttcaaaaagatcataatcatcactgtggtaattctcctttcaatcatcatcattcttttaagtacaaatgtaataccaacctgaccctttctctcaccatgcccagcagttaccaataaatggttatatgtaaacaactgccaaagaatctcaaaaaccaagaaagattcttaggaggatatggtggaaacacttcaaaaagatcataatcatcactgtggtaattctcctttcaatcatcatcattcttttaagt

SEQ ID NO: 5401 - DNA, 630 bp, Canis familiaris
  misc_feature (1)..(630): n = a or c or g or t
cagtntgcccaccccaccccacaggccnnttccttgggcccnntggggtgcccggagcaccaagggagcccatccttcatgtttcaatagctgttgttttgtttttcatttgggatggagtgggggaagggccgagcggaccccagggacccccgagttctgcagacagccgtgtggtgtgcgcagactgtactcagctggacgcgcagactcggccgaaggattatttaaggaggctgcagccacagggctgacccggtcctctgccctgggaaccagttcaagggactctcagttgaatttcctttttgttgttggctttttgttgttttttgttgttgttgtttttctccttttaaggaattatgaagctaagaaaagttttgtgctttgggggttgatggacaaaagttctagctgattaactatggtctaacttattgatactgtgtttttccccccttttaatattgtactgtggagaaaaactattttgagccatggagttggtgtttacaagaacttttcacttttgccaaaatgttacgattgaaaggcatccgcgtcttcagtttcctaatattttcttaaaagaactagtgtcctttttgtacactaaacaggtgaatg

SEQ ID NO: 5402 - DNA, 560 bp, Canis familiaris
  misc_feature (1)..(560): n = a or c or g or t
ggcgcgcnnggcctgccctcgccccccagctctgcaccgccccaataccccgcgtctccgcccgccaacttcagagnngtgcacacgaggcctccacgctttggtgttcctggaaattgaagtgtccgctgagttttcagtgtttcaggactcaaggaggcatcgcgtgtttatctgtgctgggagaaggggcctgccgcagagcaaggtggcatcatcatcactatcttttttctccccccaaagttctcccgtggcctccatcccttgtcaaacccggggagtgagaagggtccttctccgagttggtggcccaactgggactgcgcagccgggacgcccagctctgattcaggactcgccctccgaaagcgaatcacagtggctgctttcaacgccagggaaatgcactttagacgtacttgggtagcatcctactttaagtgaagggacgacgacgagagagggcaggaaaccttcttaggtagaagcattttaagtaaggcaagagattgcttgtaaacgttgaaccacaaaactgtactgcctgttttagtgtg

SEQ ID NO: 5403 - DNA, 643 bp, Canis familiaris
  misc_feature (1)..(643): n = a or c or g or t
gcgccatnnncagttcagccaggtgaatcagatccaacatgatagtgatactactgagtnnnnnngtgaagnannnnnntcannngnntnnncatnnnaggagagtgaaagtgaannncatctgtnnncagctagtatnaagaagagaaaactagctcagaggcaaaggaatgtgggaagttaccaaatcagggaaaggccctgcctccactgcaaagccatgagaaccaatgaatggctgacccgccatttccttcaaaatgcttcagcaacaaaccacatgaaggcagatattcaagaggaaaattgtgtacctgaaattaacacaaaattcagtaaattttgagttttatcaagtccttacttgcagccagatgaaagagatgaataaaacactcaaaaaaaaaaaaaatcaccatagctctaggtgcagaggcttttacaataaagtttatctactaacaacaaaaacatacttggaacccaagaggtaaaatttcagataatcctttgtcctaaaacaggccagtgaatttgtttatggcaccattgggacatcaaagatctgcttctactatgattttttaattcaaaagagcacaagacatattttattccttgagtgtatgtattttgtttatgt

SEQ ID NO: 5404 - DNA, 601 bp, Canis familiaris
  misc_feature (1)..(601): n = a or c or g or t
gtgaaggagacagaactngagctgaaggagaaagagagnnagctccatgagaagtttgagcaccttaagcggatccaccaggaggagaagcgcaaggtgnannagaagcggcgggagctggaggannagacgaacgccttcaaccgcagaaaggccgctgtggaggccctgcagtcccaggctttgcatgccacctcccagcagcctctgaggaaggacaaggacaagaagaaagccagtggctggtcttccatttacagtgtcactattccttgacggagcagttatgtgccactctagcgaaggccccagccggcgatgcttgacctaattgttcagcgtcaagatggcaactcacgcggtgccctaggtgtggtcgcgtggtctggtatacatgctgcaaaattcacccgattccccttcattttaatttttctaacctagagcttaatttcaataataacttttaagaaacttctaaatttttattttggcacaagcataaagacagataatatcctctcccattattttcataagtaacccagtttccctgatttttaaaaactaaaagtatctnnaaacctttcttatgtataaa

SEQ ID NO: 5405 - DNA, 482 bp, Canis familiaris
  misc_feature (1)..(482): n = a or c or g or t
catggactccaacccaagannnacctnnagatatgggcaggccatgggctccagaggtcangtctcagatcatggggcttgggatnnagnnaaccatcaccacctctacagcttcgggggatgacgaggagaccaccaccaccatcatcaccaccaccatcaccacggtccagccaccaggcccttgtagctggaatttctctggcccagagggctctctggactcccccgtggcccccagctcacctactgatgtcggcctggactgtttctactacatttccgtctaccctggctacggtgtagaaatcaggggccagttccacaacctctgctcctagctgggcctccaggccataccactcaggtcacttggggaccagaagaattaccaatactgcagaccaatacctatggagagctgggtaaactgaggccagcaaggaaagggaactgcctannnnnnctccattaaccactag

SEQ ID NO: 5406 - DNA, 494 bp, Canis familiaris
  misc_feature (1)..(494): n = a or c or g or t
ttcacactgtatcttccttttgcagcaaatgcaaggattgctctnctctggggacctccctgtcacccagtttcctgnnctgggctcctactttccatgcctgccccatggtttggtggttggagcctagagctcaccctgctgtgtttcagcagccntggcctgcaaagggttatagataggtcttacatccccatatatgggatttactcaacagccacatgaaaatagtgccttctgctcttcatccaagcatttatatagcatgtccccaagttggcactccctgaggactctggatgcccatttattctctggctaaagtcccccctttcttgtgcctcctatgtccaatttgggatttttacagagggggctgtctccaaacagctccgccaggaaccaagcaaaggccagacaggctggcaggcaggctagtggtattatgtatatgagcgggatgtgtgtgtcattgttatttgaattgtgctgtt

SEQ ID NO: 5407 - DNA, 460 bp, Canis familiaris
cgcacacctgcacacctgccgcctcgcacccccgcacacccccacacctgcccccctgcacacccgcacacccgcacacctgcacacctgccgcctcgcacccccgcacacccccacacctgcacccccgcacacccacaaagcagtctgatctcttttccatcggttaaagacttaactctccatggcaggcctcctcttaacccctctcacatcatgttctttcctcttggcgagttattttgcattaaccgacactgtcagcgacagacgctacctgaggggtcagcaggaccttcagcagggaagacttccgggccgcggaggatcatctaatacgtggacttataaactgactgcatgagcaatgaaaaggccaaattattcagaattttttttttggagtcactgtaaaaaaaagaaaacacacacacaaacaccacagactgatttcttttgt

SEQ ID NO: 5408 - DNA, 622 bp, Canis familiaris
  misc_feature (1)..(622): n = a or c or g or t
ttngttttgtccttccctctgagnnagcccttgaagccatggctcccagccagggtgaccatggggtggttctgtggggcagtgggcagcagcaggggtgcggccttgctggagagctcggagggctgtgctgctgctgctggcctgggcatggcctcagcagggagtggcccactcagatggctgtgacaagtgaaggtggcctggaaggttctggggtcactttcccccatgcacctgtcacttttaatgcagttgaaggaaccccctcaccccaccctgagtgcttctgagagcacctggccctggacagtcaccacagtctcccagtgcaaactggatggtgaccaccggcgctcgaggaccctggccatcaaggacctgttgcaggtggcagggctgagctaagtttggccacctgtccataatcactgcttcgtgctgcggctgagcgtcagcagggtgttcacccctgccacaccgccaccaccttcccccgacactgggagccagcaaggctatgaggggcatgtcccggagccctggcctggactggactgtccacttccaagaggagagggaaggactgacatgcgatgtgtatttaaattttttaaattgc

SEQ ID NO: 5409 - DNA, 466 bp, Canis familiaris
  misc_feature (1)..(466): n = a or c or g or t
tttgcaactttcaagcgcgtcctntagaccaacacgttatgtgnnnnnnnttccctgctttttgagatagcaggtgagttatattggtggtgtttccctcctaccccccttcagttgtatagtagttatagggaaaatctgggtgtttttctttattactttttttttttcctgcaggtcagtaaaaggatttaagttgcactgacaaaaataccaaaatgaaagcgtattttttagtttccatttgaaattgctggcgctgctggccggatgcattttttgagtttgtattagttgatnnnnnnacnnnnataacaagattgtatgaancgcatgnnnnnngcagttttaaatattgtggatatncntcctgcatcagaaacgagcttcggtttttacggattcaactgtgttgaaatcaaatttgctgcaacagaaatttgtttttatttcatgtaaaataagg

SEQ ID NO: 5410 - DNA, 633 bp, Canis familiaris
  misc_feature (1)..(633): n = a or c or g or t
gaatgggnncagntnnncacatgatagtcagaacgtttgctgtggtctgtgtccgaagtnngctcaggtgcatggggtaggctgggcaggtgcagaaggggctcagcagtgtctttggcacaagcaggcaggtatttcttccaaaataatgactatattggggaagaagagccttgagagccaatggtggatggcccgggcctaggggaggttagaggcatgcagtgccaggctgggtagggggcactgcttgggttccttctggctctaccaacacctggcttaagactcagcaaatgactgaactctcttggcttcctgctctcatctggaaaatgtgggtcacagtctctagcttgtaggttaaacgtgaaaatgcccgtgaagtgcttgcgatagacagtacgtggcatatagtaagtctctggtgaattatcactactattataattgaatgcaagagaggaacgtatgttagaaacacaacccacaggaagcaagctatgcttctgtcccgcgacaccagcaacgaagcagctcccagcatgagttccaaggcatctggctccagcagaaggaagggttccctggtcagaaagatttgggaaatggcaggctgttccatctcactga

SEQ ID NO: 5411 - DNA, 666 bp, Canis familiaris
  misc_feature (1)..(666): n = a or c or g or t
cnnngcaccagtcanntctcccacccttccccctctttaatcaatgaatctagaggctgggtgtgtgtatagtacacagatgtgcacattgccatgtccttcaagtactgaggattactgttagttgaggctgaattcagagtaccctaaaattagatttttttattactggggaaactgagtctctgagctgttgaatgccaggctcactcattaaaggttggatttgaacccaggccttgaaagctgctctcaaactgcctccacccttcccagcactggagagtagttcccctcattctgcctctcatggcctgtgcaccctgccccacaccttcctgctggagggtgcctggatcatagggagagcccccgacccagttccctcctggtctccagcccagggcagggacctcaggtcagccttcatctggggaaaccccagatacccccagtgacactggctccatcgccaacctacagaaggaggggtgggagtaggggtggttcacagtggttgaggccccctggggcaagaggccaggcctgcttcttccttctgcaccttttgggtcggtgttccatagggcagcctctcagccctgcctttctggggcccttaggggatggctggggggtggaagggaacacgggaggaccatacca

SEQ ID NO: 5412 - DNA, 601 bp, Canis familiaris
  misc_feature (1)..(601): n = a or c or g or t
gtnntaaataaaaaaattaggagcgttgtacagaaaccagantagaatgacagattaatngaacagaatnnatcagtcagaaataagtccatgtatatatnngcgtgcactatataaaaacatggcatttaagattgatgggggaaagaaagagataactggctcaaaataaagtaaaatctctccttcaaagctcataccaaaatcaatttcaaatggattacaaaattaaatataaaaaacccataaagatgttaaaagaaaattgagaataattttaccttattgacatgaagggaagacctttctgccaagagcaaaaaccttataatacaggcttctgacaaaaacaaattcgactagatataaatttgaaatatttggatttaaaaagaagaactgctataaaataccatagccttggttggagattttctattacaaagatgtcatttctcttaaaattaatctgtaaatctgctaactcttagaagctgaagttttaaatttgtcagtgcatgttttgtgaggttaagctggtagacctaataagattcttctggattctgagaacataaaagttggtttggttatttaagac

SEQ ID NO: 5413 - DNA, 601 bp, Canis familiaris
  misc_feature (1)..(601): n = a or c or g or t
gctggcttctgtgacggcctgggcnnnnncgacaacaccaannnnncagtgatccgactggggctcatggagatgatcgcctttgccaagctcttctgcagcggccctgtgtcctgtgacaccttcctggagagctgcggtgttgctgacctcatcactacctgctacggagggcggaaccgaaaggtggccgaggcctttgcccgcacaggaaagtccattgagcagctggagaaagagatgctgaatggccagaagctgcaggggcccctgacagcccgggagctgcaccaagtcctcaagcacaagggcatggtggacaagtttcctctgttcatggctgtgtacaagatatgctatgagagccagcctgtgggtgaattcatccattgcttgcagaatcatccagaacatttgtgagcaggcctggggcccaggccaggcagcttctctactccagcaaggctgggggtacctggcccccagaatctctgggaccctaaatggaactgcttcttctcatggaggacaggaggctgtggggtgcaactacctactgggggatcccaaaccatcaagcagcctctagcctcttgccacc

SEQ ID NO: 5414 - DNA, 488 bp, Canis familiaris
  misc_feature (1)..(488): n = a or c or g or t
attacgatcnncannntagtcgtgtcagattgtggtcaagaagtgaggtacagcatcacgtgacnngtcactgaagatgaaatgcgtcacatgtttgcagacacgctcacttgaccagaccctatggaatttgttaactctgtgcttgggaccaaggaagcaaaatcagaggacacgctgtcgcacagacatgctgactcgtgacatgacgcagaggcacagcagcagagccgctgcttcagcttgccagatccgcaggtgtattcccagctggccagaagcccttgggttgccgggaagcacccccgagtgcgggtgcctgcaggtcgggtctgctccaggggcgccagtgacggcatggaggtccgggaggggccctgctccatttcatacggaagtgcgctgcttggcaaaggacatggtttgccaaaagctagtgagctaatgattaaggaggagaaagggttgtgtgggtccctttatcttcc

SEQ ID NO: 5415 - DNA, 658 bp, Canis familiaris
  misc_feature (1)..(658): n = a or c or g or t
acnncntcctgggccaatnnnagcgcgcgcagcgcgagcaggcgcagacagcacggggnctgcannagctgcgnggacgcgcngacgagctgtgcaccatggtggagcgatcagcagtgtctgtggcttcactgaggagcgacctggagggcctgggcccagtgaaacctattctggaggagctagggcggcaacttcagagctctcgaagagggtctgacctctccatgaacctggaccggctgtcccaaggctcctgtgtccgctgtgccagccaggggcaacagctgtccacagagtccctgcagcagctgctggagcgagcactgaccccactagtggatgaagtgaagcagaagggcctggctcccgcctgccccagctgccagaggctacacaagaagattctggagctggagcgccaggccttggccaaacacgtcagggcagaggccctgagctccacccttcggctggcccaagacgaagctttgcgggccaagaacctgctgctgacggacaagatgaagccggaggagaaggtggccgctctggactatctacacttgaagatgtgttccctccacgatcaactcagcaacctgccacttgaggggtctacagggacaatggggggaggaagtggagggggaactcc

SEQ ID NO: 5416 - DNA, 517 bp, Canis familiaris
  misc_feature (1)..(517): n = a or c or g or t
tgttacatatacannagcttggacttagatattaaatgttagntattattaccagcatttgtccttttgtgaaatcaatatcagaaaacttgcactcttaaacacattctttataaaatgtataaattcttcaaaactacttaaagaggagtgttattgcatgcagataatcataactttgagtttgcctctgtagattactaaagcaaattgtttcatttatttttttaaatgccctttgatgtttcaaaacaaaaagaaactcttcatttgattgactgatgttaagatcagccataatcagcaatcttcaaaagcactttcaacaatggtcacctaggttctaaagggaagagtcagtgctattgacaatttcaaaagcagcactggaaccttcccagtctctattatttgttttagaataatcatattgatgaaatcataattcatggtttgatttcagaaaaagcatattcattgtacattaaccatttagaggtcatttaaataacaaaat

SEQ ID NO: 5417 - DNA, 678 bp, Canis familiaris
cattttagctttcctgatgctgctttatcattttttaaatcataatggtgtgcattgccgtataaagctgtatcagaagaaacactcaggggccctggggaataacccctggagacacatactctgattatactaatgttggaccacattcaccctgaaagaaaggtacattaagcctttggagaaccaacacggattctggtgttacgactctcctatacaaagaggaatgggaaggtcaggtttgagaactccatgacatcagcctttggatttagatttccaataaactattcacagcctttattttattttgctttgttctgttttgtttggtttgtgttcttaatattcacctgctaactttacagatgaggatttgagagctaaaaatgtatgtgtacatttaaccattgacataaaagccaaagtcctctgcatggttttgagtaccaaaatatttccctgattatgtgacaaaagcacctcagattcatctaattttaatgacatattatgatgataatggattgcttttaaacccctaatgttaaatataatatggaggcaaaatggagcttctgtagtcctgaaatattatgtttctgtgttgatttatcctagaattttgttaatgaaagctttccaagtgttatattttatatgaactctgaaatg

SEQ ID NO: 5418 - DNA, 631 bp, Canis familiaris
  misc_feature (1)..(631): n = a or c or g or t
taaataaatanataaataaataaataaataaataaatanntagataaatagataaatagataaataanntaatgctcagtgttnnnnagaccnnnnnntntaccttgtcggtcagctagcttgaacaacacaccccaggcctctacgcttgtatttcattgcgatttctgatttgtaatgaacttcttgggggaggcgtcaagtccttgatttctgttgtcattgttctcaagtgcaatataacaatataaccaaacctcgtgcattttcagagtcgctgttaacgtagtaaacctaaactaaacagattcattaaaattttggttcgtaggaaggagtgattctgctatggatgaacgaatgaagttacttacccctaagaggtgcgttctacgctttattccagggcatgaactattacctactagttttgaaacacttttgaaatatcttgaagtggcnnggaagctatatatatatatggaattaacttgctgcctaataacatagaaagtggttttctttgtttagcttctcttatgatcacccacattgggtgagacctaaagcgcgcgtcttctaaaacttgtcatttgctgacttgactggagttagtgaaaaccggtacggc

SEQ ID NO: 5419 - DNA, 383 bp, Canis familiaris
  misc_feature (1)..(383): n = a or c or g or t
gtagtngactgtctcatccactgcatnntgcagagaggtttgcccttcagtccagtcnnaaaaccagcttcaggaggctgnnnagcatgctcaaggctgtagaacaggctgcagggaatggagcctgactctggagtcctcactcgctgactgagcctcacagaaaccaggggcaggctccccactcgggtcaccggctcgcttcctcctggttttctgtggtgagaagggtagagagtgttcttactgccaggcaagatggggccttggcaacttgcagcctccctcagacatgagctcttgccctagcgtcccagagatgccacacaggccatcagccaagatcacccaggagtggacgccaggggccttcccttaaactg

SEQ ID NO: 5420 - DNA, 554 bp, Canis familiaris
  misc_feature (1)..(554): n = a or c or g or t
aagcccacttcccactgaccatnnagaacactcagcatctcttcttgattgtgacaaaggcagttttnggatcatgaaatgcttctaaagtagccaagagttaactctcctaacctttttatataataagcatgttaccatcaaggtaacttacccagtggaatcaactagtagtggaatcacattttttacacccttattaactcatgcaaattcaactctactaaaacacagtaagaaagtgaatgagtgagagataaaaatactttagatagtgcatgtttaaccttccttttcaagcaatggataaagtccaatttgaaatagtcaattcatgttggtgaaagctaccaaaagaatgtgaggatggttttaaaggtttcccaataattgataaagcatgttcaggtggccaggcaagtgagagagcttctttgatctttataagggctattgaaggttgttgaaaagtcatacttaagagttagaggaactgacaaaatcctttactttacaaagaatgacatgatgagaacaatttgaaatttttgtaa

SEQ ID NO: 5421 - DNA, 484 bp, Canis familiaris
  misc_feature (1)..(484): n = a or c or g or t
tgctgcancggtnnncgtagannnnnatctcgatctgcnnnggcgntaaggagggacccctggnnagctgcccagaaggggcggacgganntgcnnacggaggcctgcaggggagctggaggccgagctataccccccacccccgcaccctccgggcaagaccncagcagccccacagcagccccacagcagcccgagggccgagctggcagccgcacaccccatcagaagcttccgccccagggggtctaattacccaaccccaggacccttggtttcactgcaggcaagtgggagggcttcggtgctctggcttcagtcctgactccctgctcggtagcgatgtggcctgagaccaggcatttaacttgttngccatggatgattgcctctgcaagatggtggtggcagtaacagagtctcaggctgtctggggacgggctgaaataacacgtgaggcccgaagcacaatgcccggtactta

SEQ ID NO: 5422 - DNA, 665 bp, Canis familiaris
  misc_feature (1)..(665): n = a or c or g or t
agctannagaaagctgcagggaccatgagacgtttatatcatgagaacatggngccacaggtagcagaagccatgaagcagcaagacaaccatgnnncaaaannacacagaagccatgaagcaatannagccacaatgtagcannagccacaaggaacagaaaccacgagacaaaaccatgaatacgagatccacgaagcagcagaaggcttgaacagacaagatcacgagcagaagcactgagacttgtcagagccacaaggtagcgaggcaacaggaatcgaagaggctgcaggagttatgcggcgggcagaagctacagcacagagaagccctggattaactggaaccgaagcccccagaagccaggaagctgcaggagctaggaggccgagaagccgtgaggcccctgaaggccaagtgctagcgagggagggtagcagggggaaacatttttaaaaaaaggtagtctaagtagcagtaggaggagtataaatacatccagaaagaagttgagtcaccattttgggaagcactatagagaagggagcaacagatgcctgcagctgagggggtgacaagataagccaggctctagagctgctttggatcatgaaccattttcaagtttctgttcctccatgaggctgcctgtgtagctgttt

SEQ ID NO: 5423 - DNA, 268 bp, Canis familiaris
  misc_feature (1)..(268): n = a or c or g or t
tngnnaaaaaacaggcattttatnnggntatggcacnnggtgataaaggcttgtattannagnctattatatgtaacctctaaatacaggccccagtgaaaaacatactggggggattcaacctctatgggaaaaggttcaaacaccttttccccatttaaagtttgccttaaatgctctctgccacattgcctttgacagtcttgaaagtccaagtagttctctagggagagaaatttcaaaaagatgtnnnnntagcaaagactaa

SEQ ID NO: 5424 - DNA, 622 bp, Canis familiaris
ggaaccattggcataatttttctttattgctttactatgttgaaacttttttaagtgtttggattttttccccaacatttcctacttaaaaagaattggtcgacttttcaatagccaattcagtttacttggaaaattttaacacaggctcatagaaattcaacttacagaattcttttaacacccaaccccaaagtacaaagacatagatttcttcacatgttgtaagttttgtatcaagcatagctggtagaattatgaattttacctatccacagaatattctgaaaaatgaacaaaagtaaaataaaaattaagatccaggtgtgaaatatatattccttgaagattggttatgtgtatatgtcataagatgaatttgtcattcatgtgacatttgctgtagtctttattttaggaccttctgtatgtggttgcagtgttaagacaattgtactttaaactgaacatatgagctgtatatatttttcttatttatgtaacaaagtctgctgagagaatatgtatatttttgacctttgtgtgtattctatttgtataaggactttggcttacatttgaataatgtctcaattttgaaaaaatatttgtataatggaga

SEQ ID NO: 5425 - DNA, 571 bp, Canis familiaris
  misc_feature (1)..(571): n = a or c or g or t
gggcagcagtncttagatgattngcagcgagaattgacgaccacctgccatctgctgggagaacttgggatcagcagtttagaagaaaacgtgaaagccctggacctgctgagtgaaatcagggaaatgacccaaaagaaggatctggagctccgaaggagcttcgcccaggtgctggaactctctgccgaggccagtaaagaggcggctttagtcaaccaggaggtctgggaagatgcccagggcctagaagcctccagccagtggtacttcaatcaagaaggcgcctgtggggaggcttcgggagaggtcaggaccccgcttctgttaggcactggtgagccacacgcagtatgaaccatacacgagccatgggctcccacacgagtggggaccttcctgcaaactgcccggaaggaaacccatcccttaccactggctcagggcataagcgtgccaggcagtgcgtgtgtgatactcttggaactcaagcactttagacactagtttagcaatgtagctctttttgtatgagtgtgtcacttgatatttaaaaaataaaacttttgca

SEQ ID NO: 5426 - DNA, 545 bp, Canis familiaris
  misc_feature (1)..(545): n = a or c or g or t
ctatccatctgctgaagcagtnncacatgagttnnnnnaagantnnntacnnnnnnnngatgggctggtnnaaagaannnnnnnagncggcttcttccactcannntggtgcagggactatatcgaagatggtggatccactgattgccttgtaaacagcacattctgggaccttgaaccttgaacagatttccccttcctctcttacgtttacagattcaaagcttaccatctcttcccctacctcgtctcagaatagggctctctaaagagtaataccggatggagatgagcggtggactattctacctgaggcagaggaggaaaggcagctccctaaagggagatggaaggaaagggtgatgagggaaaggggaggaaatcacaaaggtttaagaaattgcccaagcagaggggaaagatgaaaggctaggatgtgggagagacctgaagaaagccactatgaagtagtctgaggtgaaatgaacaccttcaagctgaggatgaatagaaagaggacaagccactcaaatggccccactttc

SEQ ID NO: 5427 - DNA, 523 bp, Canis familiaris
  misc_feature (1)..(523): n = a or c or g or t
tccgatacactgcagataagatatgcangannnanncnnaaaaataatgagactctactgcaatatnnagnnnngccacaggatattgtacaggtnnaaatcttttctacagatccagatctatttccaatcaaaagaatacatggattaactgatgcctctcaaatcataactgtcaaagtacaaactggcattgctcagtaccaggaggtacctgttgagattattaaatctgactttcacaaaccatttcttggtggattcagacataaaataacaggaatagaatatcataatgctggaacacaaactgtacctaaaaagattcctgaaaaagacaatgtattttgtagagatacccagacagtttttctgagaaaaaagctccaacaaactacaaatacaacatccacacagatgactaaaattggtgtgtatgtatcaaatatgactgataaactggtgacaccaggaaaatatttttcagcagcagaataccatgctcaaagattacaggcggtaa

SEQ ID NO: 5428 - DNA, 617 bp, Canis familiaris
  misc_feature (1)..(617): n = a or c or g or t
cncgcagagcgaacagctctcggccnngtcctcatgggagacttcccagcgctgtngctgtgtncagcctcggtttgcagagacagctcatcccaaggcctgacacagctccagggtcacgggagccagctccggggccactcctcctggtctggagaggggtgcgtgtgcccggggaaggagcagattcttgcaatatcaagtataagcctgtggcaaagtaaacgtctgtaaatacatttttaaaggtggattttgtttaaaaaatctgaatgaacaggtgtgtccggggtcatgctgatgagggatgtcagaacatggctctgctcaccaccaggtctggcggcctgacctgcagccgccgggaccgtagctcctgagagcaaacccagggaaggcctccctgctgcctccgccaggcagcctctccggccttgccaaggggcagtgtcgtgtgccatccctagtgggcatgacctcagacatgccctgagatgttgattcttactgtgttttgtaaaaatagagtgtagtttacaggaaaaaggaaacttttttaaaaagttatctaagtgcaaaactgtaggtgatgaaaatgctgtatttttttttcattt

SEQ ID NO: 5429 - DNA, 430 bp, Canis familiaris
  misc_feature (1)..(430): n = a or c or g or t
tccagacttctgggtgcagcagtgtcctgaggctgctgggatgaatgaccactaaccagaggggcaaaagcaacagaaatgtgtttcctcgtggttctggaggctagaggcctggtttgcaggtgtcggccgtgctggttccctctggaggctcctgaagatacggtcaagtgcttttccagtggctgctcaggacacggtgctccgtttagttgtggccattctggagggcgtggaatggcttctccctgtggggttctgtttttttgtttaattgtggtggaacacnnnnnnnntgataccctctcacccacttttaagtgaacgggtatgtggtgttgattgcattcccagcatcatgccaccgaccccaccagccagccccggagcattcctcgtctggtgatggaaccctgctccagtccgtgct

SEQ ID NO: 5430 - DNA, 206 bp, Canis familiaris
  misc_feature (1)..(206): n = a or c or g or t
ctgcttgtgacagannnnnnggttttctnnnagccagaaccctggtttgtggtggtnnngacagtnancagtgccctcntnnnnnnnnnnnngggctggcnnntcagcaggctcttccaggggttggcccagatgctacanncaccannnnnaccagccnnnnngctgcnannnnnnagtatccaggnnnnnnnnnagtccnnnnn

SEQ ID NO: 5431 - DNA, 332 bp, Canis familiaris
  misc_feature (1)..(332): n = a or c or g or t
aacactgcttggaatggtggtatagnctagagnaatngacttcnnnnagaangcagtnntagncntagnnnnngntgtnnagagcttcagacactgtaaacataaaaatcttnnnagaaggcaaatcttgggggtcacttctctgttaaaacatgatagacttcaggtaaaccccctaancgcattcccaccggactcacctcttgcactttcctccctacatagatcttaagtttttctgccgttctctggatgctttatacacattcttacctctgtctggaccttttcttttttctttttctttctttctttttttttttnnnagtagg

SEQ ID NO: 5432 - DNA, 602 bp, Canis familiaris
cgccccgcctggctatccagggccccgaggattccccctcccgacagtcccgccgctatgactggtgagggccctaggccttcagcctctcctgtacaggctgagaggctgaagaatcatcccctgaaataacattttcctttccaactcccactcccagtttaatattaaattaacaggcaagctggcccccacctctccctgggggtctcagggaggacctttcattgccccgtttacctactttctccttctttaatcccctaccacgatgactccatttctcctgtgtctgctaacttgatttttcattctgctgctccatctttgaatctccttacctgccccattctacccttgccatgcattggaggggctttgggggtgagctctgggtttaggggcttactccatccttcacccaccctggatctttgcccacctccacctcagatcccctgctgcagggtccatagccctcatctagggctgtgtggagggagaggactggctccccacccttcctccctacccaccccctgcacatcacagaaatcttccccacacccttctctgcctttattttttgattcgtgcaactt

SEQ ID NO: 5433 - DNA, 426 bp, Canis familiaris
  misc_feature (1)..(426): n = a or c or g or t
cacatgacttccnnagcctgttgcctttgacttggggccttgggggcctcattagctctaggggtccctttgggctcntgattttcccagannagggatgcattttcctcctcctcttcctccacccaagtttagggnnnnnngannngnnngaaacnnnnnnagcnctcntnnaggacnnnnnnctctgcccngnnntttgnnnnngaggatccccttcctcctttccctggccantgctgnnncannntacatccnnnnngggccctggaccctnnnnncnnnnnggatgtggcccgttggcnnnncntnacctnncnnnagtnnnaaaaacnnnntnnngnganngggnnnnnnnnnnnnnccntnnnnnaannnnnngnnngnnnnnnnnnnnnnnnntttgntnnnggcacgggaatnnnn

SEQ ID NO: 5434 - DNA, 473 bp, Canis familiaris
  misc_feature (1)..(473): n = a or c or g or t
cagagnnctcatcgcagtnnntggctgcncagctgtaccccctgtcncagtcgccgcctatctccctgccccgctccccangntnnaagcctggagccccagctccgtgaagtgctgagggtgcaggcagaggcctgttgcccctggtggccagtggggcgatctgtgtggggcagctcgaggtgctcccgcggttcagttgagccggagacttgtctgggcggtggtggggagccctctcttgggggaggaaccctcaggagagtgtttttcctttgaggggggttcggtgcctaagaagggcccagtctcccattcggtagctcacgtggtctcacctggagcggcaggggtctgggggcacctgaaggtgcgcagagctctctacgccttcctgcgccgcccggaggtggtgctgagctgcgtgtctcgggtggccgcagaggcaagactgtgccgggtgggcgggggcg

SEQ ID NO: 5435 - DNA, 593 bp, Canis familiaris
  misc_feature (1)..(593): n = a or c or g or t
cagcaacctgtnaagttgtaaacatgagagaaaaagttatatgtgaatatgtgaatgtatgccaaatcagcatttgtgttttgcatctttaaatgaaaaaataaaaatactaatgtattcagattatgcatattttaactatgtagaaaatgtcagttctaaagtacataacttgaagtattctgatggagaaagtaccatctgataatgtggtcggtggtaataagggtacgttggtaaaaaaaaaacttgttaaggagataaattaaaaatcgctgctaaaaaaaaaaaaaatcgctgctgaaggatttactccgtataccaacttttcatttctaatccaaatattgttgagtgtgttaaggtgataaaactacattatttttcaaaatacttaagaacccaaatactgttttctttgagagaagccattccggtaagtcagaaaggtgaatcacttactcttattactagagtgttcatacttccttgaatttcaatgattgtcatttgtatggcttttgtactcaccagtnnnnnncaccaatttgttttttctttttgtaatatgatttagcaaatgtctatgaaag

SEQ ID NO: 5436 - DNA, 532 bp, Canis familiaris
  misc_feature (1)..(532): n = a or c or g or t
gagaagccaaagagatgcacgaannnnnncgacaaannnnnnaagaaattgnagctcaagaaaaagccnnncgagaaagnnagtggcagaaaaacntcgnnnnangtcgagatgnnngtgtnnacagctggcnnaacttccaagcaaatacaaaggggaagaaagagaagaaaaatcnnancttcctgagaccacccaaagtaaaaatnnnncagcgtgagtgaccacctggggtcacagccacagaaccttttcccaactgtctcccctcctgctttgaaggactcattctttcctcccatttccaccccaacatagagtagtagttgctttttagtccattttgttttcaatacaatttaatatcgatcagagtaattcttttgtacattgaaatgaggggctcagtttaaaacgaaaccttccccaccccctactcttagaccaaccaggattggaaggtgccaccactggtgttgccttctcttcccacagcctgtaacttaatgtnnnnnncttcactgaattgtga

SEQ ID NO: 5437 - DNA, 539 bp, Canis familiaris
ggccggtgccacgaggctcccggagcacgcggcaggtggatggcagcagtgccctgaggagggccgcctgctgcaggcccctccccgggcacgccccccagcccccgggcacgcgaggcaggcccatccattgcttccagcgaggcccggtgcgggcccaggtcgaggtcgttaatagcattgggatatagtcactgtaatggtgctattaacagttgacaccattgtattttttaactttgtgttctgtatctcctcagccacatatcttaaatatcttgtttgtcatcatatgtttatggtgggggcagactttgcacttactgcggtgcaacacgcgcactttacttttcctccagctgtctgaggtgagagcatgttgccaacacgcggcaagacagctgcttctgctctgagctacaatcatggcttttcatgttacttaccaagtggtgtttctgggtaggaatcacagctgtaaaactgatctcagttccttacacctcttcatgatgctgcccctgaattttgcacactct

SEQ ID NO: 5438 - DNA, 616 bp, Canis familiaris
  misc_feature (1)..(616): n = a or c or g or t
cactaacccagaagccntagatatctactacctggcttataagcatnntgagggaataaggtntcctaacagagcatcaaacaccagattcgaaggatnnagttgcatcagagaaacagactactgcccggtgaacaggagtgttgagttcgggaacctagaaattcttccagtgggcctgaagcttgctgtgtttggcatcttcatcattgtgatatttgtctacataacagtggaaaaggagccgttctttggctaagtgctttaggaacagagcaatgagtgagcacctgagcatgcctctaagccgtcctgctgcagggaaggacagaaaggctgcttgaaaaagggatgcccagccccatagccaggtagctttcctctctgctgctctcacaaaaccctacccaggctcatgatttcaaagccaatggggccttacatactgtctagttcaccacttatgtttcgagataagggaacaggccagggaggttgaaggaaatgccaaaagtcacaatgaactgaatccagaatccaaggtgcaaagaaacaaggtaaagaagcagacactctcatcaaagagcttgaggataaggaattccccacatgacgg

SEQ ID NO: 5439 - DNA, 531 bp, Canis familiaris
  misc_feature (1)..(531): n = a or c or g or t
cagggatganntannncaccccttggttgactaaagccagngtcgcaaagacctcaaaatttcccatcannaaaataaatcatctgcatgctttcaaacataactggattcctgcccaggtacagtacaaaggccaaattcaaacctgaccaagaactccagattaacgtgtgtggtcttccagccttgattcccgcctcccacatgtcaaggccctctgcccagcacctgcctaggcacatgctctgaatctaccaccgagtgtgattacctgagccgagaagtattgcctcggccttctagaatacccaatgaacacagccggatgcgggagcaggagaggccaggtggnnnnngggnnnnncctgtcctccctcaccagctcccactgtaaaggagaggccgctgggcagcccaccaggcagccggcctgctgcagggccacggccctggaggagagggacgggggaggaaagaaagatctctaccaagagcgcggggggcaggggggcggccagtgcnnnccatcaa

SEQ ID NO: 5440 - DNA, 467 bp, Canis familiaris
  misc_feature (1)..(467): n = a or c or g or t
agccaaggtctggagcctgggattggtggacactttctcatgtcccctatagtgcccntnngcactgagggacatgggctctcagatagggccttgaggggtcactgtatccatcccccagccccaagcagcgttctgtgcaaggaacaggatggaagtcttttctagtttctcaaaccctgagacaatttcatgtcatggtccactaggacctcacactttctactggatttatccttcccccatcactctttatctccccatgacctctatgagggataagggaatatccagggaatatgaggagttaaggatagggaaggtcaaagcagttcccatagtctttacctagcacactcatctttttttaaaaacaaaaaaattttttaatttttttcctttgggtttgtacaagaaatttacagtgtggaaaaatatacaagtgaaaatgaggccataaacctggg

SEQ ID NO: 5441 - DNA, 571 bp, Canis familiaris
  misc_feature (1)..(571): n = a or c or g or t
ctaaccctnggnnnncnnatgaccngnnntnngctggcatnntagacgccgacgtgtgtagagaacaggcttcnnagcgnntncttcccgccccgctgacccagaggcaggggccgggcctgggcagccctgggagccgagacaggggctcctccgaatcgtgccttttctaactggaactgacattccctgcacttccctcgtaacgtactgatccccccttttgattttagcgtgtctcttagaggccttccacggagcccacactggcatcgtaccccttagcacgaacacgaggagtagcctgcgtatcgacataatcccatcctaattccgatgtccagtgtgggtttaatataatgtctattaatctatagcctcaatgatgagagggttacaggggaacaaggaacaagatttcagaaacaaaacctccagttgcgtctcacacacacacacacacacacacacacacacacactctctctctctacatccttgagccaaccgtgggccgagcaagctcccctcgcagctacacccagacagcatgtgctgtgacggtggctct

SEQ ID NO: 5442 - DNA, 531 bp, Canis familiaris
  misc_feature (1)..(531): n = a or c or g or t
cccagcangacagnncacttacgnattaaggccacttgaggaccccatcatgtattttcaatacttttatgttcacttctggattcttagggtatcagtgtctcttcntangccttgagcgggctcaggcaccctttccctaccctggagctgccctgccttctgaaatatttatttatttattgcatggttcctgggaacatgtggcacaaggaatgggatgaagaggatggtgaggggttctcctgctctaggatgcttccctggcgtcatgggctgctggggacccaggacccataggagggggttcctgagcagggatccgatgaggcgggcaggggagacaagaccgtcccaggccagatttcttgccagtctggttagggctggtcagccaggggcctgctctaggccagggaggtgcatgtccttgggacaccaggcaggccttggtatactcccttccttgggctcctttgttaagagatgacagttaagtaccctgtgctttacttacactggagaggaatg

SEQ ID NO: 5443 - DNA, 563 bp, Canis familiaris
  misc_feature (1)..(563): n = a or c or g or t
ccgnacttcagnncactttcacacccactgggcaataaactttccatttccctannnnnnnngggtggnnatggtccagcttagccatgctcctcctcagcacccctccctcgttggcaaggcaactaccgtcccctnnnnnagacagtacgtcaaagctcatgttgagattttacccctcctccaaccattttgggaaaaaatgatggactgggactctccngaaattctgttnnnggagaaaaatatccctcccttacccccatccttactttgtaacctggcttataacaggccatccatttttgtagcacacttttcaaaaacaattagaacctggtcccatctttcttgggcccggatctgcttttacagcaggaagaacaaagccaccaacttttacatagcccggctaatcatggaagtgtgtncaggcttcaagtaacttgacttttaatttttttttcttggcagagtaatgtaaaattaaaatggggaaagatatttaatatttaatactaagctttaaaaagaaacctgctatcgttgctatgtatcttgat

SEQ ID NO: 5444 - DNA, 593 bp, Canis familiaris
  misc_feature (1)..(593): n = a or c or g or t
aaaaggccacctttgatgtctgcaagnnaagggccaaggcatgaggggctacttcatccagggtccctccctngnntgccattttgggnancttacagtgggggcacacgttccctcctcagcctacctacccactggccttccctcctgccctattcctggccaggcctcctgtttccccacctatacccacacctccagaatgccctaccctgcaatggctgtcccctaacaccagttggatggggacaagcagctcaagcccacaggtcaagcctggggtgagtctagggtctggttgggggtggtagcagtgcccacagcactgcccacccttttggcattacactggagctgtctcttacccccacccaccctggcccatcaaccacgtctgaatccactaatctcaacggcatgtctcatggagttgtgtatggggggcaggacctactatctcagtggcagacgtggctgtctgccctcctgtcccccatgcaacaggcccggccccttccccttcagagccacagcaagctctagaactgtgctcccannngagaaggggatgannnngacatagggagactcag

SEQ ID NO: 5445 - DNA, 351 bp, Canis familiaris
  misc_feature (1)..(351): n = a or c or g or t
caccccnnnnnnatgatttcccnnnnnccctgctggcttctctgcctcttccagtctctcaggggtgaagagtcccnnnnnnngcagttttcattatgnagnnnnnnnctatgtnnnnnaattctgatgnnnctgaggagttccaggggtcataatactaagtcttctctgcaggtagtgtggttttgaagaccnnagannaaagtannngatggggagcctngaatnnnnntatacnngttctgtcagagagatgaaggngnnnntgtgtctggtcataatnnnnnnngnnnnnnnnntggctgnnnnnnnaggagtttacnnncttttcttnnnnnnnnnacnnnnnnn

SEQ ID NO: 5446 - DNA, 596 bp, Canis familiaris
  misc_feature (1)..(596): n = a or c or g or t
gctgaattgatgcagcaggtcnatgtattgaaacttanngtcgaagacnnnnngaaagagagagatttctacttnnnanngctaagaaacattgaattgatttgccaggagaacgaaggggaaaacaaccctgtattgcagaggatcgtngacattctctatgccacagatgaaggctttgtgatacctgatgaagggggcccacaggaggaacaagaagagtattaacagcctggaccagcaaagcaacatccgaattcttcactccaaatcatgtgcttaactgtaaaatatccccttttattattcttagaggactcactggtttcttttcatgagcaaacagtacctcttcttaaagtgcactttgcagaagtttcaccccttttccaatgagtttgagttaggagcttttaccctgtagcagagcagtattaacatctagttgggtcacctggggaacagagaggctgaccatggggctcactgtgtggatgctggtaacactcactgctggagaaggtgcttttatgtcatacactgaggtggagtcctcagtagagaaatgtaaagactgatttgaattttaagctaat

SEQ ID NO: 5447 - DNA, 574 bp, Canis familiaris
  misc_feature (1)..(574): n = a or c or g or t
ttgtttnnggtgatgagagtnnnaccgtctccctggtnnacaccaagagtgcaagttgtgncctcagctcagnngtgaactcccagtgtgtcactgggctggtgttctccccacacagtgttccctncctggccgctgtcagtgaggactgctcactcgctgtgctggactgtggcctttctgaggtgtttagaagccgagcccacagagactttgtgagagatgctacgtggtccccgctcaatcactccctccttaccacagtaggctgggatcatcaggtcatccaccacatcctgcccacagagcctctcccagcccttggacctaagagtgttgccgagtagattggatttaagacaaaangcnnntcccccatgagtatccctttgcccctgcccnnnnngcntgtgagaccacacaggagccttacagtatgcnnnnnnncagatctgggcagttaataggcattgtctcttggcctgagggannntnnnnnnngggatcctgtagtcataggnnanaccagcgttcttnnnattnnntatgtaggtgnnnctgagtgtgtgtctgt

SEQ ID NO: 5448 - DNA, 547 bp, Canis familiaris
  misc_feature (1)..(547): n = a or c or g or t
acgttccctctccttttccctcctgtggattctcccatcatccatctggccttcctcnnaaggccagctgaagatggtccctttcagtttcccgagttaggttagtgatgtgaaatatgctcctgcccctggccctacctctcctgcccctacccctgcagaaggcaattgctggttttcttccccagttcttttccaagtaggttttgtttactccccaaatccctgagccagatgtggggtgcctacactcccaaacccgagtgtccagccttcccctctgttgagtttttagtctcttgtgctgtgcctagtggcacctgggctggggaggacactgcccctgtctaggtttttataaatgtcttactcaagttcaaacctccagcttgtgaatcgactgtgtctcttttttgacttggtaagcaagtattaggctttggggtgggggggaggtctgtaatgtgaaacaacttcttgttgtctttttttttccccctcccattgttgtaaataacttttaatggccaaaccccagatttgtact

SEQ ID NO: 5449 - DNA, 625 bp, Canis familiaris
  misc_feature (1)..(625): n = a or c or g or t
ttgctgcagcccaagaacgtgatggtgtccacaggccgggatcgccagaccaaccactgctacatcgccatcctcaacatcatccagnnnnnnnnnnaccccacccaggtgcacaagagtctgcagaggatccgggaacnnnngctggccaacttcatcccctggggccctgccagcatccaggtggccctgtcaagnaagtctccctacctgccttcggcccaccgggtcagtgggctcatgatggccaaccataccagcatctcctcgctctttgagcggacctgtcgccagtatgacaagctgcggaagcgggaggccttcctggagcagttccgcaaggaggacatcttcaaggagaactttgacgaattggacacgtccagggaagttgtgcagcagctcattgacgagtaccatgcagccacacggccggactacatctcctggggcgcccaggagcagtgagtaccccaggatggggacctcatctgccttaccggttggcccaggccctgcctgactgaccaccccctcagagaacagatcagggacctcacatatttctttctcagaaatacactcacacgtattctgtatcggcttggggatgtgtttanntctc

SEQ ID NO: 5450 - DNA, 456 bp, Canis familiaris
  misc_feature (1)..(456): n = a or c or g or t
cctagtttttcattaaataaattnnacttncttttctgtaattcaagtttttcctnacttttttttttnnnnctttttgaagttagtgtctttttgatatgcataattgtttatggtaaagtttatacattatgtgttcaatacgtattttcttttcccccattaatcagttcattagaaatattttacattcaagtcttttgagaagatacaagttccagaaaggaaaggtaacagcagaagaattatcagaagctatttaaagcagctgtaagatggtctctgtttctgtctgtctctctctctctctttctccagttgagtcatacctttaaacttattctttgaaagattagggaatactgattttttttttttgatactgaaaaaaaaaatcaggctttttttttttctttctttgaaatatcttggacaaatcacatgtttaaaatttgt

SEQ ID NO: 5451 - DNA, 446 bp, Canis familiaris
  misc_feature (1)..(446): n = a or c or g or t
gagngcgngggtaagattctgaactnnnnnnnaagaatgtcncnnggcagatggnnnnaagaatgaccgcgcatgacctggcgtccgccgcatcaaagttgtgtagtattgatttcatcttcttgtttcactagtgtggtcaggagctggatgtggtggtggaagagttttatggnctaaagctgggaagaagagttccttgaaggccctcgttggttgggtgtcgtcctccaggcaaacacgatgccaagggcttgcttacgttatggtacctaatcctcacggggacacccaaggacgcagatgggaacagactcttagggtagcaagcaatttacccgagggacagagctcactaggatttgactactgtgatccatanncttaaccactacctgatagcgctttcttagcttgaaaacgcatcacattcacattaggggaag

SEQ ID NO: 5452 - DNA, 511 bp, Canis familiaris
  misc_feature (1)..(511): n = a or c or g or t
ggtcaggagaatggaaaacacagagcagctgtctcaaaactcctcttggctgttgacgacatttcaatcaatggagtcgagaatcaagacaagcaagaacctgaactgtacagtgatgatgatgaaatccatggagtgacacaaggggatagacttcgggccctgaaaagcagaagacagtcaaaaacaaatgctattcccctcacagtaattcttcagtccagtgttcagagctgtaaaacatctgaacctaacatttctggcagtgcaggcattactaaaagaaccaccagatctgcttcaagaaaaagcagttttaaaagcctggttcctcagagggaaggaaggaaaaggaatgctttgcaacaaatgcctttaatggcattatggtactcgcattgctctgctgcttctgcccacccttctcgttttgtttttatcattattttttgcnnnactgaacctctttctgttctgcctttctctcccgtttgtctttactttatggttg

SEQ ID NO: 5453 - DNA, 385 bp, Canis familiaris
  misc_feature (1)..(385): n = a or c or g or t
ggatggggggctccatcccagggccctgaggtcatgaccccagccaaaaccaacagtcggaggcttaccccactgcgcccctgggcacccctccacgctcttttatcnggaacannngtgtgtacaacttaagaaagctactccccttttctaatcggatggctgccccagtttgttggtatatnnnaagttctagcagctgctataaagacatattctcattagcaacagtatcctctgctggtagtctctctgaatttttcgtaagaatgaaaaatatagcatgaacctcctgtcaccctgagatagaagataaaagtttgaaactgaagacttcaaagtgttatgagtcacgtaaaacaaccgcttcagcagatttcttcca

SEQ ID NO: 5454 - DNA, 519 bp, Canis familiaris
  misc_feature (1)..(519): n = a or c or g or t
accatcgatcaaatgcnccanncaccccacgngtgctgcttttcgggcccatnnnnagtnnnnnnagtctgcannctnnnntcctggcccagaagtacggnctcgtcaacgtccactgtgggcaactgttaaaagaggctgtagcaggcgagtcaaaattcggcgagctcatccagccctattttcagaaggagatggcagtccctgacagcatcatcatgaaggtgctgagnnannnnntgannnnnnnnnnnnnnnnnnnnnnnnnntnnnnnnnannnnncttccccaaagannnngacnaggcacacatgcnnnnnnnnnnnnnntaccagnccaacaggntnnnnnnnnngaatgtgncattcgantctgtcatngagnnnntgannnnnagaagactcgatnnngtcacngnnnnnaggtaccanntcatgtannnnnnnnnnnngannnnnnnnntccnnnnnngnntnnngcagaacccgaannatactgnngagcagatcaagctcaagc

SEQ ID NO: 5455 - DNA, 532 bp, Canis familiaris
  misc_feature (1)..(532): n = a or c or g or t
aatacgggaaagggaaaatttgatgggatcagtacgaaaggatattgagtcatataaaagtggatctggagtaaacaacagaagaactgaactatttttgaaagaacatgaccaccttcgaaattcagatcgtctgatagaagagacaataagcattgctatggcaacaaaagaaaatatgacttcacagagaggaatgctgaagtcaattcagagcaaaatgaatactttggccaatcgttttcctgctgtgaacagcctgatccagcggatcaatcttaggaagcggcgagactcactcatcctgggtggtgtcattggtgtctgtaccatcctattgctgctgtatgctttccattgatggaacatctccagggactcttaacaaccaccactttcacaccctgatctggaataaggaaaagtaggaaggagaagttgatgccctgatgattatcctgaccagcaggattaattcaagactggtagcggtggacnnngctgtgacatggtcaggttgagctgaagccac

SEQ ID NO: 5456 - DNA, 524 bp, Canis familiaris
  misc_feature (1)..(524): n = a or c or g or t
tataagtcnttgaaaatactatctacagaactggtgcnttggcataacttaaaaaggcatgatgaaaatgaaggtattagagttgaagatctgttgtttatagtagataccatgttagaagaagttgaaaataaggaaaaggacagcaatatgccaaacttaaaaactttgcaagctattgtgtctcacttccaaaagttatttgatgtgccttctttagatggagtctatcctcgaatgaatgaagtttatactaggcttggagaaatgaacaatgctgtgagaaacctccaagaactcttagaattagatagttcatcctcattgtgtgtgttagtgaacacagttggaaaattgtgtagggtgattaatgagaacatgaatgaacaggttatgcaggtattgggacctgaagacctccaaagcattatcaacaaattggaagaacatgaggaatttttcccagcatttcaggcatttactaatgatctacttgaaatcttagaaattgatgacttggatgc

SEQ ID NO: 5457 - DNA, 235 bp, Canis familiaris
atatttgtatattcccaaggggctgggtgctggcgactggccaattatgtgcagctgactgtctcagccgaaccactgatcttcccctggaggctcctggcctgcctgcctgaggcccctgctgccagtcttgggccctggagagcagatgctgtcttgttatgtacaggaggactatttttttttaaatcttagagtttctatttttttctagtagtccccatcccctatccct

SEQ ID NO: 5458 - DNA, 430 bp, Canis familiaris
  misc_feature (1)..(430): n = a or c or g or t
gcttagtnnagggacctgggcacagagcagcaagcaaagtcacatgtcctgccctccttcatggtagaccttctatggtagaaggcaagacaatgaacaaacatgcactgatagtatggagaaagatagatcagaggtgatggttcactagtctttatgagaaggtcaggaaagaaaggcatctctgacagcaaggtgtttgagctgagacccaagggaagtgagaatagaggccttataaatttctgaggaagaacatccaggcagaagagaagtcaggtacaaaggccctagggtaggagtgagctgctgtgttgcaggcacagggatatagccagagaggctggagaaagaacctgggaggggggagttgtggcgggggttccccagagctgcagctgggccctgtcaaccactnnnngcttttact

SEQ ID NO: 5459 - DNA, 490 bp, Canis familiaris
  misc_feature (1)..(490): n = a or c or g or t
ggggaggannagcaaggaagatgactagctggggcaggtgngggtgggttcggtcntggggtttttttttgtttttttgttttgccaaaaaagcctgggtacagtggnctggatcatctggtgccctcctgagtgggaccctgaagtatgtatgtcctgtgnnnnagggtccctggatttgccccagcccccaccctctccttcagccatgttgatggcagaggcagagaagatcagaacttatagcccatttctcactggagaggaaaacttgtcatctggctttgcggagaaggttccaccttatgctcatagtacattatctttaccatgtgctaggatatcacatttaaaaggacaaaaaaaatgtaaaatacttgaatgagcttgtattataacattaatattattgagagtatctgctttccaggctgaagtgattcattcattattctagtcctgctttagtcctttgtaatttgtggtaatt

SEQ ID NO: 5460 - DNA, 469 bp, Canis familiaris
  misc_feature (1)..(469): n = a or c or g or t
taattcatgtctcagataccagaatcttgggagaccctacaaacagaatagggtcatgtnnngagggaggagggccctcatctatggagaaaggtcgtatgttttgggtcttggatgggggcggtcaggacagtcagagccaagggcgggtgttcaagataaggcaagcataggggaagngnctaggtttccctctacagtggcttctgactcctcatacacactgggatcagggaatgcttgctcatggtgcagcaacagtgcctcagtgcctcctccaaggaggatgtccctaggccagggtctgtgtgagtgtaagcactggtccaggtctgtgccttgtttgccaatcaaagcgagggtctttccctcagttatttttgatgatgtgtgcgaatgtatgtaatgttttgtggcctcagctnnnnnncctcctgtggggaagggggtgggggtgacagtcatcatc

SEQ ID NO: 5461 - DNA, 524 bp, Canis familiaris
  misc_feature (1)..(524): n = a or c or g or t
aagattttaaagtacttctctagtcattgaagggtttttttttctttacataaatattgatatattctttttctactcaaagtgccaaaggctacagtttttaatgactgaaccaattgtatcacattgttaaggaaatataatgatagtcgctagaactcagacctctgcatgtatatttgataatacatcttttgtaaaaaaaattacaaaaaaatatttgtttacattccactggtaccttaatttaaaacaaatgagactaacaggtggtatctcttcttagtgttctatttatctgatttgctaatgagagcacttcttcctgtgttaggctgtgctttactgagaaaaccaagtattgaataaagagagtaattatctttttaaagtaaataaaattatgaaaaaatatatataatatatataaagtatcgtgtttaataaaatgttatgcaatgttttccaaactgataaagtttgtaaagtgctataatgtatttnnnnnagtacagattaaagct

SEQ ID NO: 5462 - DNA, 584 bp, Canis familiaris
  misc_feature (1)..(584): n = a or c or g or t
tttnaatcaccntatgtatcntctcaaatgagtacgnnnaagaatatnnnagagcagattaaaaataccctgtttatgnnnngntgtgttcctatnnctaatactaaattggactgatcatcacacccaccccagatccagaatctgtgacacatgcaacttaagtattaaattaaacttactctgaaaccaaaactaatctttctttaaaccaaaaagtacaatatgatttgatactggatgaaaaactgactttttaagtttacaggactcttagttttgagaaacaggatgcccatatggaatgctgaaacgcctcttagcatgacaaatgcctgcttctctctcttgttgactaaagaagtaactggtggtctgctaacttgtatttaacatatcggttggctggtttttattaattatttagataccttaaatctgtaatataaatgatactgtttctattggcaatgcattttataatcatttctatgaaatgtactttgtttaatcagataagctaataaatgaattggttacatcatttatatttgttagcctgctggacatgaactgtgcctggt

SEQ ID NO: 5463 - DNA, 588 bp, Canis familiaris
  misc_feature (1)..(588): n = a or c or g or t
gagtccccttcnaccatcatatggtggntcattcagttccatgatctgcnnggcanagcatgccaaagnntagtaantaagcgtatgattaagtttcaannaaacagagccccaattttttttcaaactgattccaaaggtgtttttggtcattgattaagaaagctagttgtttggcatgtgagttaaagaagcagttccaatgctttgtggttcccagatctgtgaaatgagtggaccattaattttacatgtaaaaattatctgagtaattaacaaacctaccaaggaacctttgggagtgccttttttcaagatgggcccgaaaaagtggaggaagacacttctttttgtgctctcccatctgtgaaacataattgtagtcctatacaaataatctcattcctccactaccagtagcatgcgaaagtgtacatattttgattaccaagatttggaaataaaagacctggagtctatactaggaagcggagatattttggtattgctttggtttttatggtaactagactttgcatgcaattttaaaatccttatttctggttctagggcttcccttagttaatg

SEQ ID NO: 5464 - DNA, 579 bp, Canis familiaris
  misc_feature (1)..(579): n = a or c or g or t
ctttcacttacatcaagaaaaccatccagttttataaaatancnnaacatnnnatagggccaagtctccaagcagatctaagactccttccttcctattggcccttcgaccccagacctgctgatagaccagctgggtacttaccagtgtcctccttggctttccaaaccccacctaccatcctctggccttcatggacctacctggccctatccccaggacacccatgccatgagcttgaagtacagcttttggtgcaccaacgctttaggttttcacagctgctggcccgtactcacaacctgctcttaggaataaacacttcgaaaacagcccatcttcagtttacttgtaaggatagggaatgagtagtgtgcacaaagaggaagagcagatgccttccttcccctgtgaggtctttagacttggaagtactgtagaggaccaagcggctgtcagtctctcatccctttggcagtctgacagggggtctcagccctaatctcttcatcaaacagagtggacctgaggtgggtgaannnnnnaggcttaagaaaannnngaggtctccaaattccc

SEQ ID NO: 5465 - DNA, 654 bp, Canis familiaris
  misc_feature (1)..(654): n = a or c or g or t
accagcccaacccccgaggtnnnnnncacgtcccccacgacacagccaagccctgcgccgttgacccggnnagccacaggaccaggcacacccgggacaccagaacaggtgctgcctgaaacatcacctggtactgcttccaccaccctgacacccgggagttcagggggctctaagatgccaaccacagactcgtgctcgcttagcacccaaggccagtacctggtggtcaccaccaagcccctttcccagtctctagtaaacaaaggcttcctcctggcgctgctcttgctcggggtgactctcttcatcataattttggttctgtttgccctacaagcctacgagagctacaggaagaaggagtacacacaggtagactatctaatcaatgggatgtacgcggactcagaactgtgaggagtctgggaggctgagcccacccctccttccattttgcctgagaccaaacccagtgcttccagattcttttggtgcaattcggagctatgccggacgcttcaacacatttacatgctgtcagacaaattccacgatcactcgagttgctgctttttcatatttatttttgtaaacagtcatgttcatggagcaggcagcgatccccccgtgggcggggctggcagggcccca

SEQ ID NO: 5466 - DNA, 480 bp, Canis familiaris
  misc_feature (1)..(480): n = a or c or g or t
aagaatgtgttcgtttatttttatactctttaagagagtttgctactgactgatgattttgccatttaaactggaagtagatagaagagaaaaccaaggctctttcaagagtcactgaatatatggaattgcatgagctgcttaacacagcaaactaactcaaaagaatttaatggaaggacccacacctatttgataatatcaataaatagaaggggaaaccagtgaagaatgacacagttagctcaagttatataagcatcttctgtctaccagaatggcaggagttcacatgtgttctcctgccctgaagttgacatttaaaaaaatctttctcggggcgcctgggtggctttggtcagttgggtgtccgactcttgattttggctgaggtcctgatctccagattgagacatcgagccttgcaaggggctgtgctcagcgaggagcctgcttgagatnnnccttctccctctgccc

SEQ ID NO: 5467 - DNA, 596 bp, Canis familiaris
  misc_feature (1)..(596): n = a or c or g or t
cccagcgtggtgcacgtgggaagatgcacagggnctgcgctaagcccccgggtcagggctggcagtggggggtgctctgtgtacccggcaacagggcgggggggcgcccagcacaacctggaaggggcatgtgtggcaatggggacgagaggagcccccgatgctcacccagcacccccccacagcgccactgcccccaccctaccacctgcaggaggtggaggtccccatcgtggggaacagggagtgtaattgtcactatcagaccattcttgagcaagacgatgaggtcatcaagcaggacatgctgtgtgccgggagcgagggccacgactcctgccagatggactccgggggccccctcgtgtgcagatggaagtgcacctggatccaagtgggggtcgtgagctggggctatggctgcggttacaacctccctggggtgtatgcccgcgtgacgagctacgtgtcctggatccaccagcacatccctctgtcccccggaccctagaagggacacacgtcagtcttccttgtctcatcactgcgtgttccctgcgcggtggcagggggagcggggagaagtccggggtctc

SEQ ID NO: 5468 - DNA, 658 bp, Canis familiaris
  misc_feature (1)..(658): n = a or c or g or t
ctcagaggccctgcttcntgtagtacatgagtatgtacnnnntagtgaaatgttaatgggtgttatgaaaaggagagaccaaatacangcagaactggattccaaagtnnnagctttgacatatataaaggcagatactgatctgcttacagaagagattggaaaacttgaagataaagtggaatgtgctaataatgccctgaaagcagattgggaaagatggaaacacaatatgcaaaatgatatcaagttagcatttacagatatggctgaggagaatatccactattatgaacagtgccttgctacatgggaatccttccttgcatcacagactgacctccatatggaagaatcctcagaagataaacctgaatcccatttaggacatctgtgtgatctttgggagacagcatctattaaccaaagttattctttctggatgggctgtgtccttgacgaggtggatgaaaaacatttcacactatctggaaaaccagcagctagaaactcaggtattccagataattgatatgaatttggaaatatatatatatatatatataaatatatatatatttagcttagtttttattttaaatttatgtgccaataattacatatagaaattttttgcccagatatttgtttgtggaac

SEQ ID NO: 5469 - DNA, 383 bp, Canis familiaris
  misc_feature (1)..(383): n = a or c or g or t
actgaaaattttggggccacttagtagcttctttaccaggaatttgcttgctagnnnacagaatgcaagacttgacaaacaaaatgacttgggatggaagttatttggaaaagtacnnntnnnagagaatgctcagaaagattcaaagaannnnnnnnaggtatacgagatacaaaaacacagaaatacgctgtgcagcatatatatgtgaaccttgcaaaaatgacctttgtnnnggctttgagattggaaaactgtgttgatctgcatgccaagttcttaaaatttaagccttccttgagaaaattgatgactttaaccttttccgtttcttttagctcactgcatatgtacaggagagagctggcttcagatctttgtaa

SEQ ID NO: 5470 - DNA, 671 bp, Canis familiaris
  misc_feature (1)..(671): n = a or c or g or t
cagattcagagaacatatgtactcaataggtttcaatcatatatatatatatatataatatatttttngtaactatgaacatatacagttttccagaagtagattttacactgtttagaattccaaaacctatggtgaaaagactgtttattgtagtaatgcatgacggaagcataaaagggagaaataattcctttatatacacaaacatacataaatacacatatctatatgcacacacatacctattctgcatcctacaaggtgcttggtattggcactaaaatcatgtagttatactgagcagcaataataattgggcatgaagctgattagttgttaggaaagtgagctcaatggtgagggtgggtatatgcatatagatatgcatgtatatgtatgtgtataattttataagtttcacacataaattaatacatgcctgtgtgcatatatatgtatggaatatatttgtatatacatgtacaggtaataaacatccccaaggtttgtggctggccatacacataggcattggtttaaaaaccatcagacctcaattgtaaaagaacttttttgtttaaaatcattaaagttatactgttctgcagcatttagacatggacatttgtcacatttcattagctttgacaaccatactgtaacattaa

SEQ ID NO: 5471 - DNA, 654 bp, Canis familiaris
  misc_feature (1)..(654): n = a or c or g or t
cggcttcagggacccagagatcacgcatctggtgaatgctnnagtcctcactgtcngagatgctgnnagttggtggctagctgtgcctggggctgggagattcatcaaatattttgttaaagggcgccaggctgtcctcagcatggtncnnaaggccaagtaccgagagctactcctatcagagcttttgggccggcgggcacctgcctcggtgcgacttggcctcacttaccacgtgcacgacctcattggggcccagctagtggactgtgtctccaccacttctggaactctcctccgcctgccggagacgtgaggattctgctcatcattgcatatctctgcagagtgggttgagaggggtccaggagtatgtccagtggtggatgagatagggtcaccttgggaagacgtaggagcccggatgagtgttgggcttgcatctgcataaagggtcagacgtgattgctgctgtttacctgggctctgacccagtggtggggtttgggcaatgcttctctgcccttctgtgggactggagccacaaaccgtgccaaggccatggctcttgcctttcacacagcaaagtactgctgtcgctcttgggataggaagacgggatttccgggaaggctggtgagggagggcagagtt

SEQ ID NO: 5472 - DNA, 510 bp, Canis familiaris
taggtcatgagattggtcaactctaaagcaagacagatatgtatctgtatcaatgatgtttaccatgctcgctcgtaataaaggatatatgctggcttgggaagaattctcactagattcattgtgtcagtgtccaaaataatgaagtcttctttgtcagtgggctaccaagagtctgactaactggcctctgtgagagagaagtatctccaaacttgaaaagctaatgtgtaaccttaaatattggacagaagcataaaaaactaaagaatctgtctagtggtttttaccttgtatcctgtgctcccaggactactgctcataggtaaccatgactctaaaaacaaagattgaaaaataagttatataactttctcaatcttgatttctaaggttatgaaatgtttttcagaagaggaagtaataaaaagttgaaatttcttacctgaattcaaatcaatgctttagttctttcttaaagacttacaaattgcttacaaataaaacaat

SEQ ID NO: 5473 - DNA, 564 bp, Canis familiaris
  misc_feature (1)..(564): n = a or c or g or t
aagaagttggcccagaaccgccgatctgcaccggccagctctcccatcactgtaggggacctgggcatcgtgcggcggagatcccgggaggnctcagagagcccccagcccacaacagagacccccatgtctggggagccatgggtgccagagaggaacacccaggacgggcccacatccccccaagactgctctgcagagacagctgagacccccaaaagcagggggcctccaatgcaggaggggaaatgtcaggacaggccccagtccccaccaggctcctcccaggaggcagccaccccccaggacacaccacagccatgcaccttcagctcctctcttgtggctgattactccgactcagagagtgaatgagcagctctggggaccagacctgctccagaggctgctacacgcccccaaggaggcccctcagactgcagccctgcttgcccaccacccctgggagagctcagacgccgcccccctccccagacctcaccttcctgcgacggtggagttatttatttggtcctggagagggtgtttgtgccttgtgggacg

SEQ ID NO: 5474 - DNA, 476 bp, Canis familiaris
  misc_feature (1)..(476): n = a or c or g or t
aagggtgncagcccctcgtcggtnnnggggggtgcagaaggggctggcattggtccccccaaagagacactatgcagagtcagggactttttcctgagaagagtcgctttgattgccttcnnnnnnnccnngcaccaggccaagcccagaggctctcctgaaaactgtggaagaggaggagtccagggccactcctctccctgccatctctccctgctgtggagcttgtcgtctctggcaccttcaaagctctggttttcccatcgtggctgattcttgtggcgggctgcagtgggctctgaccctccagggactggtggctggttccaggtcctgtcccagcattttaggttttcctgtgaggttgggttgggccagtggagaaaccaggagagttctggtttctcctggtttgtggtgtgtgggagagttctgggacctaaccttctctttcctcttcttttgnngtctctttg

SEQ ID NO: 5475 - DNA, 412 bp, Canis familiaris
  misc_feature (1)..(412): n = a or c or g or t
acaagaagctnnagaagcgatgaaaaacttaatnnnctggaacgaagtcttttttttaacatggaggaacgttttataagacctgactcctgaggctgatgaattgttaaaactcctcaaaaggaaactacgctggtcgtcctagaaacatccaacattggagtaaactggaggactgtgactactcctgaacttcttttgaggcagtatccctcagaaactcacacctataactccttaccttttacttgaaagtttcatcatccactcaggacagagtctctcagagctcaggataaacttgggcttgccagtagaatcaaatgagaggacttactttctctcatagtggttgattactacattattttcnnnnnngctggtttttgagnnnnnntgtcaacagtttttt

SEQ ID NO: 5476 - DNA, 607 bp, Canis familiaris
  misc_feature (1)..(607): n = a or c or g or t
gaagaaatattgaaggctttcaaattatttgatgatgatgatactnnnngcataacactnngcaatatcaagagggttgctaaggaactgggggaaaatttaacagatgatgaacttcaggaaatgcttgatgaagctgatcgtgatagggatggagaaataaatgaggaagaatttttgagaatgatgaaaaagaccactctttattaatactttttaaaattccttttggaaagttgttaacaactttatatttgttaaacagttccataatatctgaatgtattctttaaaatttttagtttatatgcacaaattggcttattgatgtctaagcattgtgagaagttacatgtttccaccaataatattgtttaatctgcagcatcaagacacaaagaaaatgtaatgatttctgtgaaccgtggatccaaaaccagtatttaattccaactgctactttagagctccaggatctaaagacttagaatttttttaagtttaatgaaacttaccccacatgcaaatggatttggcgaacaagcaattagtttccttattattttnnnnnnntgcaactctttaaaactgataaatatttgctttc

SEQ ID NO: 5477 - DNA, 585 bp, Canis familiaris
  misc_feature (1)..(585): n = a or c or g or t
agggtnnagggtnntgggccaaggnagtgggagcnnnanctgaatctcattagaacctccatttctgtcaataccccgttgccaacatacaaagttgggcttattgactcatggcagtgaaagagaacacacatcatggactgtggtggcgcctctcagtgagctttttaaaaattttctttcccgtaagtcctccttgattgctctggaaacttcgggaggacagaacgtgtgtgtgctgttcctcagcgtgtctactccatgtatgctcgcaggtgcgatttaaattagcagctgggggagaaaatgaagagacttaagcctcttaaagagaggcctgtcacccggcagagccgaaaaatgacagtcactcctctttctctgaggccaaaggggccgaaaggaagacaacagaatcatctgcgaggaggatgaagctagcactccagagacagcaaattccaaactaggactctccttccggttttcttctaagaatggaaagttgaacttctactcctggactgaactgggaccatggagactgtgcagggtgtgggactcttacgggacaagactggcaat

SEQ ID NO: 5478 - DNA, 515 bp, Canis familiaris
  misc_feature (1)..(515): n = a or c or g or t
cntggactgattnnaatactttttttggtccctgtgccatcgatcctcccaattccctgtcctgccttccaccacccttggatgaatggattttgtaattctagctgttgtattttgtggacctgttttttttttgttgttgttgttgttgtttttctgtgaagcacatttattggatgagggagataaaggagtatctcatctgctcctggtcactccctttatagccatcactgtcttgtttcttgtaactcaggttagattttggtctctcttgctccactgcaaaaaaacaagcctgaagagatgggacaggaggaaagacctcacagccagatctgctgggttttgaggagtgattttttttcttccccttgaaggggaaaaagcttttttcactggtacattaagttccccggctgtagggaggtaccagttttggacaagtgccactgcaacaccgaatgctcagagaacctgaacttttaactctggaggtctgaagtgtactgctg

SEQ ID NO: 5479 - DNA, 615 bp, Canis familiaris
  misc_feature (1)..(615): n = a or c or g or t
aagatgaacnnantgctgaaagannnncgctcaantaaagagagaaatccaatgccttatttccagatgtttcccattgatgcatccttctgctggaatgatctctcctggcttcagagcataactcgattgcccatcatccttaaagggatcttgacaaaagaggatgcagagttagctgtgaagcacaatgtccatggcatcattgtttccaaccatggtgggaggcagcttgatgatgttctcgcatctggtgaatatggcgttgaggaagttttgaacattataaaaaatgagtttcacacttccatggccctgacaggttgccggtcggttgctgagatcaatcaggacttgatccagttctccaggttgtaaagaaagagggctaatgaccagactgctgaggttgcccacaggaggaagacaaactcatagcatggtgtgtgatgcctcctgccttggctctatcctatccagaggctcatccccggaccttccaccactccataccttgtgcttcaggccctccaaacccctccttttcctcaaatttgacatgctcctttttgcctataacagcttgttatatgcacttgcttgaattcttcctcg

SEQ ID NO: 5480 - DNA, 630 bp, Canis familiaris
  misc_feature (1)..(630): n = a or c or g or t
aagagagtnnatngnntcgagaaggtggnctacaagggccnannnagcccaacacagccgtgacctgccaccctgcnntgggatcccttgcngagnntagctatgaagggcacaacacatgtgcttctgccagcccgcttttgcagttctgggctctgtcctcagtgtagcacccttaaggcctatgaggccaaagcctgctggcaacccccctctgtgcagtgaccctggcctgtcaccactggtccccgccaagtgcagccagctcaccgtgcaaaatcatgcaataaatctgtaaaatatgtttgtaaataccaaatcgggacaggtggtcgctttcctccacccaccagcatttcaatcagtagggtttcttatatgagtaggtccttgggcattgacataggtggtagacactggaagtgggaacatttggaaccggttgggctgtccattcagtctgtccttgaggtttgcagtcaccaggtggcagcaaggcctgagtgatgctgctgtgttcaacaactcacacccacttgtgactcctgagtttctttcacctgctttttaagaatgaaatgtaacttctttactataatcagctcgctattaataatcccatataccagt

SEQ ID NO: 5481 - DNA, 619 bp, Canis familiaris
  misc_feature (1)..(619): n = a or c or g or t
anagttgatgggatgttacntcnntgaaaatgtcatgtgatanngcatatacatttaaaaatagnctgacaatatacaaagcattaatagaagtctgaggagaacttgaaaatccaccaagtgaactaattcaacaccttttcaattattgagaactcacatatacaaatcaatagcatacagaagatttacacaacccaactcacaagccttaccaaatggaaatggaaatatatgcatttctgtttttaagaattctagaaataatccatttgaaacatttgcaacagttacaataactgattctgcattagatcagaaaaaaaattatttactaatgtaaagaattggcataggattcatgctgtcttacacactgcaattaagttatatattagtaaaggtaaataaaacatctatgtgtatttcataatttaaagcacatttctaaatacagtatttttctctgttgggtttatttcacttagcattatactctgtagctccatccatgttgaaaaggcaagatttcatgctttttaatgtctgaataatattccattgtgtatatatactacattttctttatccattcatctctggatggacactggagttg

SEQ ID NO: 5482 - DNA, 671 bp, Canis familiaris
  misc_feature (1)..(671): n = a or c or g or t
gcagtgtgctcattatcnntaactagcaaatcccantgtatacaaagctgttctcttgttctgccttttaaatgtacatgtagaaaattacattaaggatctataggaatagttctaggggggaacaaatgtgcttaatgtaaaaaggcagacagggatgtaattatgtttttaatgtttcagaagcctaactttttacacagcagttagacatttcacgtttcactaatgttgatacttggctaatggtttagcagaggtttctggagtacacatttagtgtatggaaattcaagacagctaaagggctgttgattaaaatctcatcttgcttcgtgatcaattggcaagaaaaagatttcaagattacatttctggatggtatcttttcaattaatgtatctgtaaaagtttctttgtaaatattatgtgttctggtgtgtctaagattccaaacaaaatgatccctgcatttcctcaagatgtttagtggcagtctggtaagcaaagcagtctgagcaagaaataggaaatgcagaaataggttttgtctggttgcatataatctttgctctttttaagctctgtgagctctgaaatatatttttgggttacttcagtgtgtttgacaagacagcttgatatttcnnnnnnacaaaaatgactttcat

SEQ ID NO: 5483 - DNA, 269 bp, Canis familiaris
  misc_feature (1)..(269): n = a or c or g or t
ccaacttaattgccagnncttttgtgctttccattaaatanntaatnntaccaaacattaggcattatttnnnnnnnntttttatacaaatgaaatgcagttcactttttaatgctctatattgatgtaaacagacatccatcactaaagtaaaaattacatagtctgatgatgaacaatgactggaatatgaatatagtgtggtggtttgtactgtttaactcacacccacttttcttgtaatgatgtaaattattgaataatgtcca

SEQ ID NO: 5484 - DNA, 578 bp, Canis familiaris
  misc_feature (1)..(578): n = a or c or g or t
tgaaggagcgggagcgcttgaagaaaagaattctgnatgaaattgaagaacataacatcaaaatctaccacttacctgatgcagaatcagatgaagatgaggactttaaagagnaaaccagacttctcaaggccagtataccgttctctgtggttggatccaatcagctgattgaagccaagggcaagaaggtcagaggccgcctgtacccgtggggtgttgtggaggtggagaacccggagcacaacgacttcctgaagctgcggacaatgctcatcacccacatgcaggatctccaggaggtgacccaggaccttcactacgaaaacttccgttctgagaggctcaagagaggcggcagaaaagtagaaaatgaggacatgaataaagatcagatcctgctggagaaggaagcagagctccgccgcatgcaagagatgatcgcaaggatgcaggctcagatgcagctgcagatgcagggtggggatgctgacggtggggtccacgggcaccacgtgtaagataacgaagacgctttgcaagatacagaagatacagagaacattccgcatgagtat

SEQ ID NO: 5485 - DNA, 485 bp, Canis familiaris
  misc_feature (1)..(485): n = a or c or g or t
tgacatatgagaagatgtgancgactagntgtcaagtgttcacagatgaatggaccactcgtgtaaataatgcttcaggaagaaatttgtatgttatggcttaagagcaattttcagttacagtccagcaggtctggttgtgggcaaaatactgggtctaccatagggatgnnngctgaggggtggagtaggttcaaaagttagaactaaaattgagaactaagaagccaaacccaaccctagactggaattaggaggaagagcttttatgaagggcagaagcagctgaaacatattcttctcctaggaaacaacgcgaatggtggtagatactgggccccagaggctaacgagtcttctagactctgtctccacatgagggggtggggagccgttgttggccatgtcttgaccaacagcagcgattgagttgtgcagtctgatnnnnttttctgtatccttatggtttactaccacaggcccta

SEQ ID NO: 5486 - DNA, 465 bp, Canis familiaris
  misc_feature (1)..(465): n = a or c or g or t
tgccaacgctgtgtgcctgannagccgcncngagccttgatttcagctcaactgccgaagatcctggagtcacttacattagttttgcacatgttccttgggagtattacttgaatttatctcgaactgcagaaaacactaagattgttagaaaaaggcagatgtggctgcttcctaacattaggatgaaaggtaagtgagttctgtacctcgggaaggagggaacaggctctgaaacacaggaaggaactgtgggccatcttcccacttcctccccgtctccaccctccgtcccccggtggcacatcggtctgtcagtcccgcaacagtggcagccctgtcttgtaaatacatagtgggggccaggtgattcccaagctcagtgctgaagggtcctgagttaacgttcttgttcccatgctgttcacctgtgtgctttannnnnnngtgtatgtttgatattct

SEQ ID NO: 5487 - DNA, 572 bp, Canis familiaris
  misc_feature (1)..(572): n = a or c or g or t
aaagagagatctgtactttatcaacacaaacagaacacagtngatgcatagagaagatccagaattttttaagaccagtccagactgagacacaggcacttcctaaaaagatgggacgcttcacgaatttgcatgtcatccttgcacaggggagacgctcatcctgtattgctccagttgtagtacgtgcgctgcagaggcaggtagaagcagttgggtttttcggacccgtaggctgccgctttgggcttccgtgcatcagcttcctacggggctctagagaaggccaaattcgtggagactttcaaaggaaacaaactcttccttcctgtcctctgcctgtagcagaaaatagacaagccaagcagatgtccagggatggcggaggagtacttcgggctgtagctgccttggacagaaaacaaaccttcaggagagccttgggggtgggaggttggggtggggagagggaaggtgatgcagtgttgtgtcccgattccgaatgcaggcagcccttcttgccttctttctccccctccgatgccctttgtgtctttccagctctttcctaa

SEQ ID NO: 5488 - DNA, 553 bp, Canis familiaris
  misc_feature (1)..(553): n = a or c or g or t
gaaatattcatatgttttcaaatgtgacagatgatacccactattaccgccggcagcatngacgtgagaggatgcagacacggaaggaagaagaagataagcctcagactacatattctgcatttattcagttacttcctgttcttgtgattgtgattatatctgtcattactcagctgctagctgctaatcccccatatagtctattctataaatcgaccttgggctacaccatctctagagaaacacagaacctgcaggtgccttattttgtggataaaaactttgagaaggcctacagaggagcatctctccgtgacctggagaagacgatagagaaggattacattgattatgtccagacaagttgttggaaggagaaacaacaaaagtcggagttgacaaatttggcaggattgtacagagatgaacgattgaaacagaaggcagagtcactgaaacttgaaaactgtgaaaaactctccaaacttattggcctgcgcaaaggtggctgagaggatgatagtcctatatagggttggggttttgctat

SEQ ID NO: 5489 - DNA, 545 bp, Canis familiaris
  misc_feature (1)..(545): n = a or c or g or t
agtannacagttctcacgatacgctccgtggaagttatgcgaatgtgctccctcccgctctctcttccaaaatcccttgtgtctgggctccctgtccttgtgctgacgcggggtggtccagagcctacgtggtgggaggaagtgaggcgagtagcacaggcatcgtgaccgagtgccaggctaatcctgacctgaggacaggtcaacaggagaagcgtgtgcttccagaccatggctcagtgtgggccatgccgcggggtaggcgagtccatctgcgtgttgggccgccgtgtgcgcgcgcccgtggactcaggtcctgctctttaaggcttatttcgcccaccccttattcccacggggctgtccgtggaagactggcatggtaggctgagcacctgtacctgcctgctcacggatcccttcctacatgggatacatagccaagtacgggccattgtctccagacttctctggctgagtttcgtgatgctgagggtggctgctaccatgtgcacttacacaacgtcatacggacgtttttaaat

SEQ ID NO: 5490 - DNA, 597 bp, Canis familiaris
  misc_feature (1)..(597): n = a or c or g or t
agtcctctctcatcaccctctacaccatgtacctcacnnggtcagccatgtcaaatgaacccgatcgttcntgcaaccntggnnnctggaccattgtgacgcatatgaccgcaccaaccttggctcctggaaattcaactgccatagttcctacctctgcaccaccctcaaagggtgggcattttatagatctagagaattttattgggctgacaggcttcgttctctgccttttgtattctagcatccgcacttccaacaatagccaagtaagtaagctgaccttgtcaggaagtgacagcgtgatcctccgtgatacagctgccaatggtggcagtgatgaagaggatggacagcctcggcgggctgtggacaatgagaaagaaggagtgcagtacagctacttcttattccacttcatgctttccttggcttctttgtacatcatgatgaccctaaccagctggtacagccctgacgcagagttccagagcatgaccagcaagtggccagctgtgtgggtcaagatcagctccagctgggtctgcctcctcctctatgtctggaccnnnnnnggctccacttgtcctcaccaat

SEQ ID NO: 5491 - DNA, 610 bp, Canis familiaris
  misc_feature (1)..(610): n = a or c or g or t
atcaaagacgcttttgnngtgtntgancacgnnncgaataatacagtnnntgtgagagagatcggnacaattatcaggtcactagggtgctgcccaagcgaannagagctgcatgacctgatcgtagaggtagaggaggaagaacccantggatacattcgatttgaaaaatttcttccagtgatgaccaaagtactactagaaaaaaggtacagaccaattccagaagatatccttcttcgagcatttgaggtgttagatccatccaaacgtggatttctaactaaggaagaattgatcaagtatatgactgaagaaggtgagcctttttctcaggaagaaatggaagaaatgttgtccgctgcaattgacccagaatcgaattccattcgttacaaggactacatagccatgatggtggtagatgacggctaggtgccctgaagacttagtttctcattgaaaggatgactgtaaagatggcctgtctttgttaattttacatcttataattcctacacatgctaattaatacctggtgacaactatttcaagatactttgtttttttaaagatgaacacaaatttnnnnggtatgtctagacttaca

SEQ ID NO: 5492 - DNA, 204 bp, Canis familiaris
  misc_feature (1)..(204): n = a or c or g or t
ttatgatttttaaatacccgtaaaggatccagggaaggcttcctggctttggggagaaaatatttagaaaatgctcagcctgtcattttatttggtctttaaaaacatctgcagtnnntgagagagagattgggagtggctggatggggtttggtgttttttgttttttgttttgtatttataaagcaaaaaatgaacagcttt

SEQ ID NO: 5493 - DNA, 670 bp, Canis familiaris
  misc_feature (1)..(670): n = a or c or g or t
cacatgaagactcagtngcaatttttattgaatacatttnnnnnacagtcgnntacaatggtnnnnttctcagagtnnngataagagtgttgttaccatgttctttctnngtggtacaatattcttttcagtgcaaaagagatgtctttcagttaaatactttagatctataagtacatggaaaatattagcaatgttaatgctttagtactaaccatctcacagtaccagtgaaatctgtaacttagagatggtcagatggtcaggagccaactatgcagcagtgtaccgtaccgtctgtttacttattttgtaagtcctgtgtgtggatccagcttaacccagttctaaagttgtgtatgaaggtgacccttttgggaatagttcatagcagcttaattggatacttttagcaaataggaacttatttctcaacctcggacatgaattacttctctggaggtttttttccccttcatattttttgttgttcccaggaattcatttgaaatgttaataggcataaaactgcatcgttatacttaagctatgggtatttttattttatattttatttataactgtgccaagtattattttgctacttaccgtgttactctgtggaaagaaaaacctgtaaagtgtttaataaattagttctccttacata

SEQ ID NO: 5494 - DNA, 605 bp, Canis familiaris
  misc_feature (1)..(605): n = a or c or g or t
gccactannnaagtaagtagtagtncttcccagtcattnnnctttatgagtgctnaacatgatcnnngttttcacttntgnnnaacacaagccactaccctctgaccttttttctcccctttattttaatatgctataggccactgaataaggacttgggaatgtccagaatggtatcttcagagtctggttccagggatataggtactactttctgagcagggaaattatttaagattggacgtggtttcctttgactatcaggnnctggggctaagaacattaaaaatagtaggcctcccttctcttttcctgctacaaggaaatatccctttatttatcaaggtccttatccagtcccttccccaagagcttacagtacagtgcttatttcttagaagccccatttgcacaggttttcagtgactcagaatgctctactgccttttctttaagaaaggattgaaatacactcctactgtgcccccttcctcccttgcaaactcctgcctgtgtttgtgtggatccctaatccctagagccacgctgagatggacacattgtctgtaaacccctgggtaactgtcaagtcatgatccagactt

SEQ ID NO: 5495 - DNA, 327 bp, Canis familiaris
cccgcaatctgtgcatatgtaaagtcaccactgcagaatcagtcctgatagaatttctctcaccctgttggaattttacttcagtgactacatctaaattgctcaaagcttttaatagcatcagttttagatagagaacgaatctaatcagccctgacatcagtaacacattctaaatttaaagccatcagctaatgctgcattcagtaatcattttagttaaccatcttgtttggcttgattgcatttgatggtgtaaacaaacaaacagaaagaatataatttttctccagttgagtgtatgtaaacaaatcaatttaatcttta

SEQ ID NO: 5496 - DNA, 497 bp, Canis familiaris
  misc_feature (1)..(497): n = a or c or g or t
catgcgnctgctgcagcctgtcaacgtcacgcgggncntcagggccggagaagggacggacattaacttctggatccaagccggagtgcccggagccagcctgctcgacgacctctacaggtacttctccttccatcactccgacggagataccatgaccgccttggatccgaagcaaatgaacgtggccgccgccgtttgggctgtggtctcctacgtcatcgccgacatggaggaaatgctgcccaggtcttaggaagacgagcaagccctttggtctcctccggccaggaatgctggctcccgcttcaactgacgggcccatcggacctggtccgttcccaaagcacaggactttctcatcctttctgttaccatctttcttgatactttccaaattctctgtttctacaggaagaaatgatccccaaccccacgtcgaatcaaaatatggtggggatcacgnnnnnacctttctttataccatccataaaaac

SEQ ID NO: 5497 - DNA, 695 bp, Canis familiaris
  misc_feature (1)..(695): n = a or c or g or t
accatctcnngnctgtggcccgagnnaggggcagannagagcgtgtggnnannatcagaggtccggncttagactcnannatgctcgnnaggcatcacttctatcgggtccagccaggaagacagactgagtgcaggggattggctggactggtgagggctcagctgtcagaggtgggatggtgaggcagcccagggaccagctgtcacctctaggctggagggacaaagctcagatgatgttgttgaccctagcaccagggtcacctggctcagcaggagtcccaggagacaaagcttgagatgctgccccagggagtagggggttgtgtgtgtggtgggcgaggtaccaaggcaggagatggagacggtgggatcttcagtgcgcagctctctccccagatcgtgctgctttgaagacttgtgggctctcttggcgctgctcccgcccacctggccaccaccttggacttccgagctcatgtctgcttgaggaccacccccctcctacccatcttgaacttggaacttcttttgcaagactccatccctgagctgtgtttttggaccttgaggagctgggcactgcctcttctctgctgggggcttctgtccaagagacctgtccatgtgtgtatgtgcccaaggtcagaggctgaaaggggggagcaggtgaagcagcaaataaagannnnn

SEQ ID NO: 5498 - DNA, 657 bp, Canis familiaris
  misc_feature (1)..(657): n = a or c or g or t
gaaacatccctngaattactttacnnaatgtaagcaagctgaacattctgaaacttgctcctggtgggcatgtgggacgtttctgcatttggactgaaagtgctttccgcaagttagacgatctgtatggcacttggcgtaaggctgcctccctcaagagtaactacaaccttcccatgcataagatgcttaatacagacctcagcagaatcttgaaaagcccagagatccaaagagccctccgagcaccacgcaagaagattcatcgtagagtcctgaagaagaatccactgaagaacctaagaatcatgttgaagctaaacccgtatgcaaagaccatgcgccggaacaccattcttcgccaggccaagaatcacaaactccggatggataaggcggcagcagctttagaagccaaatcggaggagaagggagttccaggcaagaagcccacggtagggaagaaaggaaagaaaactgttggtgtgaaaaagccgaagaaacctgtggtaggaaaaaaggctgcagctaccaagaaaccagcagctgacaagaaacctgcagaaaagaaacctaccacggaagagaagaagcccgctgcctaaaaacttatatttgtttattccataaaactcaaatcattttggacagctaatt

SEQ ID NO: 5499 - DNA, 501 bp, Canis familiaris
  misc_feature (1)..(501): n = a or c or g or t
aaatgataaagcgtttnnnnnannngtcgcttcaattcaaagaattgtatgnnnttgtcntnnnnnaagaaaaaaaatttttttttttttttttactgagttctatcatcnnnnncagatttaattttattacctcatgttctaatttaaacatgtcttactcacatgaggacacttttaaatattcatagtttttgacatatgatgctttgtatctttctcatgtccttaattcttagtaactcagctttaagaagtacgtcctaaccataaccttccatattctggactaaatcttgtgtagtgcactacagtgacagcagatttgatattttgaagaggagataatagctattatattttacacttgcttgatgggacaactctaaagacatttttaaactgtaagaatgcacatggctattttgatatatattagaacttgtgtttgctactttaggagcttttgtggcagaattgtaacctaattttcttatcttg

SEQ ID NO: 5500 - DNA, 276 bp, Canis familiaris
  misc_feature (1)..(276): n = a or c or g or t
ctcagttctttggggtgctgtgtgcgcnctggaatgggctgctcatggaccggctcaagcagaagtaccagaaggaagcgaaaagcacagggtnntcggccatgacggtggccctccgctcggcggtgccttctctggccctgacgtccctgctgtgcctgggcttcgccctctgtgcctcggtgcccgtgctgcccctccagtatgtcacgttcatcctgcaagtgatcagccgctccttcctgtacgggggcaannnngccttccnnnnncnnn

SEQ ID NO: 5501 - DNA, 582 bp, Canis familiaris
  misc_feature (1)..(582): n = a or c or g or t
gttcaggaagcctaatccaggtggtaaccacnnaggngaagacnnagcttacccccgcatatttttaagcttcatctcagtgcctgttagggacctgccagaagagtcgtttatctcagtgtgactgtgtctggtcctgtgtttcctgtaatcttgtttgtggtacganntagtgagtcctgtttttcctctctcctcannnncatttgttctcctcggacagtgtaaaatnnnnnnggtaaataaaaatgtgtgagggtggaggcccgcggagagcaccattggtctgtgttagctgtgtaagtttgggaggtcttgaatgggcccctcttgtatctgtcatctcgaattgcatttgagacagggattctctgttcctnnnagtgcctgttgtctaattcagagatttgttgatgattggggatgtctgggggtctgagttattgaatgttatgtttatgtcacggacctagtttttggagcctcgaatggaactgccttaaaagtggtattttgtggtataagcaaaatcctgtggactccgtgaagatatcttttcctgtgcagttgccnnnagtgcaa

SEQ ID NO: 5502 - DNA, 430 bp, Canis familiaris
  misc_feature (1)..(430): n = a or c or g or t
tgcaagagnaattgaagagcacatttttacccntcattccaagaacctcaaaaaatacaaaacttgtgtgagaagcaaagttgccaannnnnggaaccccaaaaatnnncacttacaacaaaacctgctcnnngggaccatgnnnccgagagaattcnnnaagatgactgtgatnnnaatggcaaacaaggaactgaagcagttgagagcctcctacacggaatcttgcatacaggagcatcaccttccccaagcnnnngagggcacacacacaagaaaaataaaatgcagacgctgtgagaagttcaattgcaaggtcacnntnnncgccagaggcacacttttccttccaagttgggtacggaattcaaatccagatgaggagatgatgacctatgtgatctgtaacgaatgtggggagcagtggtac

SEQ ID NO: 5503 - DNA, 494 bp, Canis familiaris
gggtgagccagctgtggccacagcgtcagctcccaagaggcctggctccatgaagccaaggaacatttggactctctccaggccatgcttgtggcctttgggcaaggttctgcagggtcagctagtagacatgcccttggggtcacctggcaggcagcactgagtgaacagagtgagaactgcccatccccaggggttgggcctgggagactgcacgccaggacccttgactgcccctcagcctatggccccgcataccttactccctcacagtttctctgtggtctgcttgtagggaagtgctttggggcatccagtttctgaggctctgagcaggggggctttgctcacttctttaccctggctaagagacagctgctgtggggcagcagggagtagaaccgcccaaccagggccccaggaccccacctcgcccccagatcagaagctgggaaccacaacccagggccaagtggaagagatccgagagcagg

SEQ ID NO: 5504 - DNA, 533 bp, Canis familiaris
  misc_feature (1)..(533): n = a or c or g or t
aagatgactaatgatcannntaccngaatttaatgnnnnaggatttncnaagccntcccnttgcccgttttgaaccnnntactgaattttaaagtcttcattccctagatttaaaaaatcaaaaaataaaaataatggaatatcatgtcatatttatgtatattttctctgattgttgttaatgttgctgttattagtgttataataaatccnaagtnnnaatcctnngacaactcctaaggaagagtttttttctcccatgttaattaatttgcttgctcaacaagtatctattgagtnnnnnngaggtgctgggggaaatgcagtnaccaatacagccagagtctgccttcggggatgtactgtacagcacggtgactatagtaaatactgcattgcatatctgaaagttgcgaagagaataaatcataaaagttctcatcacaaaaaaacattctgtnnntatgnnnggtgatggatgttaactggacttattgtggtgatcannntgtaatatntnnnaatatcaaatc

SEQ ID NO: 5505 - DNA, 642 bp, Canis familiaris
  misc_feature (1)..(642): n = a or c or g or t
cggcgnnaccagcatcannatggcccagnnnctgctgtcactgtttgannatgccccagtgcgcggnnnagccatctccctgttcgggnacgtggtgcacagcggcggcaagaagtaccggccggcgctgaagaggcaggccttccaggcgctggtgcccctgctcttccacctggtggactcctgccccgcggtggtcatgaagacgaagctgaccttcctgcgctgtgccatcctgctcaagtgggagttccgcaaggagctgttcgggaagttggcgtggggccatggcctcggtgccgagaacgacattttcatctacatggtggagagcaacttcggcagctaccaccagtttctcatgcaggcgttgatttacctgggcagcccccacaaaaacctgaagcggatggccatgaagttcatcgggggcatcctgcaggactactttaccgacctctgcttttccctgaagaggggcgacctgaaaatcttcaagaaatacttggaggtcctgaagaaggactcagactccgtgagccgcagattctaccagaactttctggaagacatcactgaactgtcgaagttcgtgaggcagtgacacccggccaccggcgcccggctccgcgtacaggctgt

SEQ ID NO: 5506 - DNA, 528 bp, Canis familiaris
  misc_feature (1)..(528): n = a or c or g or t
tccaccannngcatcatttctgcatggccagagctcctttatgcctctccataaacctgacagagaaatctccaaagaaaataaacaagattttatggagtcactatttccatgggtcactaatgattgaaacaggagataaccagccctctagaaaggttctaacacctgattattaacattcattttaacacgtctcatgtgcacatctttgaagcaaaaatcatgctttattaacatgcaccgagcaaagtgtcttacttctagattcatttttatttcttcactgtggaaagaatatgcaaacaaaatcgagacccccctctccctgccagggaagattcccaaatgatataaattgtcctctctgctgggtgagtgcacattcagcccacaatcaaggtcttaagacattgcacggccattgagagaagtagaaaggattaggtcaggctggtggagggtgttgatacctgcctgtatcctagagaaggtttctgattagcctcccctgtacacctgctccct

SEQ ID NO: 5507 - DNA, 167 bp, Canis familiaris
  misc_feature (1)..(167): n = a or c or g or t
tccctgttaaaaaaaaaaaaaaaaaagtttttggcttaaactagccaggatcaattttctgttgcttgcaactaaaggaaacgtatttactaataggatatttttatagcattataccttactgatnnntgcctcctattannngaagcacaanaatgtggaaaaga

SEQ ID NO: 5508 - DNA, 461 bp, Canis familiaris
  misc_feature (1)..(461): n = a or c or g or t
gcagggaacagaacaggcacagagcctcntcctcactggctannnnnnnggtnnaggccccacatctgccactgactgctcagccacctgcagggcctcggggcggctcggccaggattgcacccttcgcgctcagggataccctgctcccttgaccattgtcactttaggagggtatgtctcggagcacttctgtagagaaccttacccaggttcccgagccccatcccagaccccctgaatcagggccttggcggcaggcctgtgcatgaagtttgggaaatcgnnnnnnnnnncgttgcaaggcaaaggcaggatggtgnnnnnnnnntgcactgggcgaggcctggggcaaactgggggtgcagacctgacaacgagagccccacgtccccatgctcnnngcggccagcctgcctgctggcgcaaatgccagagggannaagtttccaagagggaat

SEQ ID NO: 5509 - DNA, 548 bp, Canis familiaris
gccaagcatagtttagtgggagagcagggcctgggcagccaccggagatgggagacgggagatgggagatgggaggaaggggctcagggtgggcttggaggacgatgcagtcccgccccggagaagcccccctgagtccccagagggatggaaaagtgaccagggaagagactggagctgccaaggcctggcccacggagaccttccccaccccacccccaaattggagacactaccaggccctaaaacccgagtagtctgattaggaattaacctagaagtttcaccagtcggagccttgcggggattgtcccgggagccagattcacatgtacagtgatgagcttgtccgcagggtcaccgggtgcttgcttccccgccgacaggacctgcaggttgcagattacctttttgcttttttctctgtcttcagttttgattttttaaaaatgtccggatccacgccctactgaggattgaggtttagagctttgcctttagtgcttgaccaagaggctccttttgtatcctttgcttgccctatgatg

SEQ ID NO: 5510 - DNA, 468 bp, Canis familiaris
  misc_feature (1)..(468): n = a or c or g or t
cctcttctctgctcccatggggnnagnctgggctgtttagaagtgacttggagcttttgcattttgccgcctctcctgggcccctgggggtaccggccggctccccctcgagggcagaggcggcaccccttgggtggccccgtgggtgggtgggggagtcttcacaccaaagatgtcccgactctgcccccgcctccgttagccacttcaccttgacccccaagcaactcagccttgtgtgtccaggccagtgggggggggggcgggaagggccctccccccggtactagtgagcagcgtggggggaggtctctgggccaggggtgggcactgattctccagctctcgtctccctcggggccgagttgctggaggagcaccccagatcttctccggatgtgggcaagggctctgagggcccccagtgcctcccggtccctgacggcgnnnncagcactcagattgttg

SEQ ID NO: 5511 - DNA, 250 bp, Canis familiaris
  misc_feature (1)..(250): n = a or c or g or t
cctctggcctcgaagaccanctcnnncncncagccnnngacacgcccaggacagggcccctgccggctnngttcaaggtcagaagtagtgctaccccgagatggccccctctgnnnaagtgtccaccatttctgctcctctctcccctggagtggggtcaagtgaagtgaactctgtgccatcctctctcttgccaatgaagtggtgggaagctggcctgcaagaaattctctcccacctcatcctctga

SEQ ID NO: 5512 - DNA, 569 bp, Canis familiaris
  misc_feature (1)..(569): n = a or c or g or t
taatcnnnagagnncgatggnnctgtcccagnnnnnagtcaggctcgagggagtctgaccnntgancaattcacnnggtaaactctagggatcctggcagctgtggaaatgaaggacaagtactgccctagagctgtgggtatgggcaaactggccccttcctgcttcaccccattatgttcagcaagcggtaaggcaatagaaaagccagacttgcctcttatgttcctctatattctttccccccagccctggggaggaggagagggagccacttagactgcacttttttgttttccgtttactctgtttacacattttgcacttgggaggagggaggctaaggctgggtcctcccctctgaggtttctcaggtggcaatgtaactaatttctttgtccctccatttctctgcccaagccctggcttagggcctagggggaggtcaggagattgtgaaagcatgtgatggctcaggctgaagaaatgggatgatgttttaagtccctgcttttatcctggtgcctgattggggtggggactgtcatattgtaacccctgtgaaaaat

SEQ ID NO: 5513 - DNA, 622 bp, Canis familiaris
  misc_feature (1)..(622): n = a or c or g or t
gncacgaannaatcctcccaatnnnnnannnnctaggcagaggttccggagattccgctatgagnacgcagctgggcccagggatgtcctcagacatctccaggagcttgccggacagtggctgagacccgatattcacacaaaggagcagattgtggagatgctggtgcaggagcagttccaggccgtcctgcctgaggagctcagagctcgggcccagagatgtcagcctggggtcagaatcactggctaagtcctgccactgggttcttgctcagcctacatgtgagaagtaggcaaatgttctctttgttgcaagatccaaggacagtcatgggggaaatgtgaacctcggtttttttgagcttgcctttgactagttgtaataagaatccatcaaaacccagtctggacctctctggctgaggcagctctaattcctgggactgagctctagaaagagcttctgttaggacaatcagcctgttgcttgtttttgctctgctgaatgcctccttttttgcactttctgacatgctttaatatattgttatgtatccaaagcagtaattgcttcaactttcagaattcttgactcttgctgtggtggcatgaatggcag

SEQ ID NO: 5514 - DNA, 642 bp, Canis familiaris
  misc_feature (1)..(642): n = a or c or g or t
ttgctatngnagctgctgacacggggtgcccnannatatccccacattgacccttttganntcattcaattnntnncccagnntnggnnnntgccccagcctgaatattgtcccaattctctgtatatggtgatgcaacgctgctgggctgtggaccnngcggtgagacccaccttcacggcactggtggaggaagtagagcacgtggcggccaggctgcttggggaccactatgtgcagctgccggcagcctatgtaaacctgggcgctggtgcctcggaggaggcaaacaagcccccagagcagttgcagaccacacctgtgcacaggaacacgggtcgactccggcctttctcagagccatcacagcccacgtgacctcagctgtgggcaggcctccagggattggactgtctagcagccagggagttaatcccaaactgcctctgggccaggctaggccccagggcagcccaggctggcctctgtcctgtccctccccctgaactttctggggcgacaggagggagcagggccccatggcccctcactccacagagggaacagtggggtgatcctcaatgtgatgagtatttatgaggtacctggtgtgtgcctgacctgctgggcacaggagactca

SEQ ID NO: 5515 - DNA, 625 bp, Canis familiaris
  misc_feature (1)..(625): n = a or c or g or t
tcaaagcactgttgctataagctatctctggggtgctctacggccccctccctcagctcanntctggggaaagtacgcactgtattaacttgtgaggattttcctccccaacaataaatggagacaacctcagttgccagtgccccagagcctgagacgctttgccctcagccaggttggccttctttcctgcctccaccatgccccgtggccgggcatctctggtccctggggaggggcacgtggggctgtccactgccaagggcattggcccttcttcagagcttgctagtgggcaggacccttcctctgcagggagatgcagctcccacagctacgcagcccctggcagtctcctcccaaacatgcctgttgactgttgctggtcaccaactccaaaggcttttgggggttgggctggtcacatacctgaccaggctgggtgtaacctgagggtggctctggcaggctgtcttggtgtctagagactccggtagtggggactggggtgtctatgccccaaccaaagggggaagttcttccttacttaaagtcaactgtagcctgtgaggatgcaggcctagtgttgccacacttttccatttttcaaaagaagctagannnn

SEQ ID NO: 5516 - DNA, 604 bp, Canis familiaris
  misc_feature (1)..(604): n = a or c or g or t
gatanngtgagntagannaatgactntttttttttttgtgcttcggattttagaagaaaagatttgtttccatttgaaannaactgtaagcttttatcttctaaccaactgaacaacacaccaaaagcagcctagggatgagcatttctttgaaagcaattaggttattcacctggtattaaaactattgactattaaaaaaaatctgactttattaatttaaaaggcagcatcaaaaactgaaaaggaagggaaaaataaataattagcttctctgcactcgtttggagctccccaaacaggagccatcaagatgaggcatcaagaccgggctgccctttccagaacactgtgcagccgttctgagtcgtgctttacctgcactgcatgcagcccttctctttccggccccggaaagaagtggtcttgagcccggttgagaagcacctccactcctctctcttgttctgaatggtgtttgtgtcagtctgcagctgtgtatggtattatgtcttataatcctgcatcacttctatcctatccagtcatatctaatgtagaaaattagttttcagtgaaagtaatatgtagtgcttttatgata

SEQ ID NO: 5517 - DNA, 558 bp, Canis familiaris
  misc_feature (1)..(558): n = a or c or g or t
ccgccatccagcntnngcaggccccccagcctgccgtccatgtacaggggcannagcccctgaccgnntccatgcnggctgcagcacccccccaggagcagaagcagatgctgngagaacgtttgttcccactcatccaaaccatgcattcaaacctggctggaaaaatcacaggcatgctgctggagatcgacaactctgagctgctgcacatgctggagtcccctgagtctctccgctccaaggtggatgaagctgtggcggttctacaggctcatcatgccaagaaagaagctgcccagaaggtgggcgctgttgctgctgctacctcttagacaaggaaaaaccgattcaaaagccaaataacccctcctggaattcagctcaaggtttgaagatttctagcgtgtcctatggacctcaacaccaggaaccacaaattggaaatttaataggtcattttgtatcaaannnnnnaattatgaagcacctagaatttttcaatttaaagaatatattctctgggttctgctttggcccagacagtgttaacttttt

SEQ ID NO: 5518 - DNA, 478 bp, Canis familiaris
  misc_feature (1)..(478): n = a or c or g or t
catctagaggtnnaggggggggcnnnagaaaatcaccttcaccaccaggctgcttgtatgggttgtacttgggctttggagcaactactggtgcaaacttcttgggtggttgctgtgtggacaccgaaatgctgggggtcccaaaggcatgggtggtctccatccgagcaggcacatggccaaggggttcaccggtgcttttgggtggcagccaagatgggtgagacatcgttggaatctggaactcagatagctagctcctggaatggtcagtggacgtaagattcagcaaactacaatgccagtgtcttgtttcccctccaagagctccattttcactctgaagtgcctagagcacatccctccatcaggccactctggcctcactccctggtgagcaccgacagtcctggtacccacaaggcctcctcttcagatttgcatacacattagaggacaaaatcactgggctgtgtca

SEQ ID NO: 5519 - DNA, 517 bp, Canis familiaris
  misc_feature (1)..(517): n = a or c or g or t
ccttgtggnnacccgctgccgnnnnctcgccaggttgnnnngtctcttctccccgctgctgcccctgtgcttgnnaagaagagggcatcatgggggctgcaggctgcgtgatcttggggttggactggtctcatttccttgtaatgaaccagaagcttccaggcagccagggtgaagtcagaggggtttcctgtccatttgtcctgcgtcacacactaccaggctacacacaggctcccctgcccacattgggccccagcttgggccaccccatcttcttgggagggatgtgagcggcgcccttatcgcccctgctgctgttctgtgcagcccccgggtctggaatgttccaggaagaagccctcctacttccttcctgggagcccccagccatcattttgttgcctcatcccatacacctcagggcacatttctccttgttcgtcttgtctttgcattttaattttaaaaatttgagatctgaggtaccataacatttctcccttttaatctcttc

SEQ ID NO: 5520 - DNA, 372 bp, Canis familiaris
  misc_feature (1)..(372): n = a or c or g or t
acttnacaagnnnnnnnnttttnnnnnngcccaattgatnnnctagaannacatatatnnntgtngnagtgtactataagggctcatttccttttttaaattaaatctgtagtatctgataacaattatgaattccattgtattatatgtgggaatataaatatctgaattctcagaggacttggttttcatccaaggatgttggcagtggatgctaagtttacctcaggaattagaaccatgcaggattagatttttaaaaaatgctggagtttataatgctgatcactgatataaaatcatnacaatagaagctaaacagaattgtcacatgtagtccatagtgcttgtatgcattactctgtaactcgt

SEQ ID NO: 5521 - DNA, 630 bp, Canis familiaris
  misc_feature (1)..(630): n = a or c or g or t
gagnccggaggtgccanngccacacggcatcgtnnagcccgngtccccagggtgcacggcacatcccggctccgcggtgaagccacagcagtgccccggccccgcgacccccgcgacccccgtgacccccaggagcgagcggcgcacacagcgtgagacgtncttcaagactccgggcagcctgggggagcctgtccgtcggaggagagggggcagcgcggcccggcacagccgctcggcgcagaggcggctccacatccccggcccccccgggccccccagcacccaggccgactgaggccgcccggagccttcacccccggttctgctggtatctccccacccatgaagcctctgttttcccgaaagtgacggttgctgattgtgcagcgagtgtgcaacgagtgtcacccgagcccccagcggtggttgtgactccagaagggcccaggggctgcctagcacttaccgtgctgagttctcggcgggttcccctcacccccagtacacatctgtggtgcgagaaacttcttttctgcagttcaaaaaagctactgcttccttgggcttcatcgggaagccagctccagtcgtgaatcctatggtgttatttattttgttcctgaaatg

SEQ ID NO: 5522 - DNA, 293 bp, Canis familiaris
  misc_feature (1)..(293): n = a or c or g or t
gaactttttcaagagaatgaatgggatacgtttacaggtgtggttgtgnnagacatgtngcnnaangctgactctcagcaaagaatccgtgatcaactcccatcgtggatagaccaggagcgaagctgggcagtggcaacgctaaagattgccctccccagtctttatcagaccctctgctttgacgacgtggctctgtggcggacatactatcacagctcggtgtgtgagcaagagtttccatctattctggcaaagaaagtgtcctcatttcagcaggttctcgtggtaca

SEQ ID NO: 5523 - DNA, 340 bp, Canis familiaris
  misc_feature (1)..(340): n = a or c or g or t
gggcaccgctgagaccctnncaggcgccgggccannnggcgnnngagcccctggggggcnnnnnnnnnccgccccgcccctnnnganncannnnnngcgcannngggcgcctggggtctaatccncgcgggttccgctgacacagcgcccggcctgggannngcgggcannngaggntnnnggagcccccagacctcccannggggacggggcagggcctggcccgggagnnnnnggcnnncagaccctgggcccccggnnngccccgctcaagaccactgaannnnnnncacccccaagnnnnnancnccaccnnnntgtnnnaccccacccctgtact

SEQ ID NO: 5524 - DNA, 569 bp, Canis familiaris
  misc_feature (1)..(569): n = a or c or g or t
tgancatggtgctcaagatccannncggcccgggaggagggnnnngctcacacacnnnnnctgcgagctgaagatgccacacactacggtcccagatgcccggctccccggnngctgaacctctctaagccctgcaggtgccgggggactcgcccctgtccactcctgcccggggacactgtcctcgggatcagtggcctcctctgttacagccctctccttgctctgtgccccgagtgaatgggggaggtttgggggtcctgactcgggggctatgcccccctcaacctggtactagctgtgagctgaaagccctgccacatggcttgatggccaacccctcgagccctctccctgtcactccttaaaacactattaatagctccaccaccacttggagccggagggcggaggccagacagtcctgtgcccgagcctaaccgagcctcccggctgggcccttcctactgcaaagtgagcaggtgtgtggggaggcccggctgaggctcctcctggactagagccctccctaccacatccagccccagaccaaagatccccctcccccc

SEQ ID NO: 5525 - DNA, 579 bp, Canis familiaris
  misc_feature (1)..(579): n = a or c or g or t
caagaaaggtaggnncagtggctctaagagggnctaaaaannaaaaattctactttattactttatttatttaagtaatctctatgcccaatgtggggctcgaacttnannnagggatcaagagtcacgcacccttccagccgagccagccagtccccccttggagtatactttcaaattatgagaataaattgtcatatannnnnntatagatactaattatatctaattctccaggtggaatgaagcatttttgtaagtaaagggcatcatttcctcggttttcccagtctgcccctttatccatttgcgttagcacctctatatactgccctaggaagcttcataggagcggagggaggggacatttgtgattatgtatgtgggtcattaactgaataatcaagatctcatctgaaaaccctaggtatacacaggtatttctcagggggtgcagtcattcggtcacatccaggtccttaggagggcgaacaccagttaccttcagatctttgggaccttctacattttgtcttctaaggtaaaagtgatggcgtgtcgcccgcagacaatcccctt

SEQ ID NO: 5526 - DNA, 522 bp, Canis familiaris
  misc_feature (1)..(522): n = a or c or g or t
atgcatttgtnnatagaatgttatatgtatgaggtaatccatgcataagtagtaacatatttaagtttttcatatagannagaaaactaaaatagtaatacccataggaggacaaaatttgtaatattaccaaaaatagcgtcatgtctcatttaggtacatttaactttcttccagtgttaaaactttgacaaagatggttttaaatctgcattaacctggtgtcataaataccagtttctttgatttttttttctgtattttcatgtaatacatcaatattgggtttaagtaatattctataaatgctgcagttggtattaaccatgatcattttgatgtctgtggtgattgttaactaaggttaaataaccacccataccttacttaacaatgttgagtattcatcaagattgtgttctttagagaatntagtcactaagaattatttagcattttgagttacatgtgctttatttaatgagtggaaatactgatgtattggtgtacaaaagtaaattg

SEQ ID NO: 5527 - DNA, 388 bp, Canis familiaris
  misc_feature (1)..(388): n = a or c or g or t
gaagagatgnntgccaacaggaacaaaataaagcttgggatttgtaaggctgctaccgaagaagagaacagccatggtcaagtaaatggtattctgaatgctccaagccttggttcaccaatccntgtccgctcagagattactcagccagatngagatgttccattggtgcgaaagttacgttccatccacagctttgagctggaaaaacgtctgacactggagccaaagccagatactgacaagtttcttgagacctggtataaaatagtttttctttttcattaaagctactaagataatataataaccatcatcatcataattaataatttatattacatagtctttgaaataataattttttgcatttttgggcagccccagt

SEQ ID NO: 5528 - DNA, 371 bp, Canis familiaris
  misc_feature (1)..(371): n = a or c or g or t
cagctatcaaatatcaccatnnncaccatcatcaacgttaccaataccaccactaccatcatcatcaacaacaccaacaccatcatcatcatcatcatcacatcaccatcatcatgactatcatcagatcagcttcccagtgaccagaggcaagctgctgagctctgtacatcaatttcctctcctaagtttaactacatggtattaagatcatgaagcactgacatcctgtggttctctctgtggttttacccactctgtatattaatcagagaaacttctgaatcccaaactggctttctctgccacccaatgcatgcttgaaccaccttccaaaaccaaccaagctnnnngctcagagcactcaattt

SEQ ID NO: 5529 - DNA, 491 bp, Canis familiaris
  misc_feature (1)..(491): n = a or c or g or t
tatgcatggnncttnnataatnntgttgatgttcatgcttnnnnnnnnnatnnctactatgacattgtgaaaaatccaatggatcttngaactattaagggaaaaatnnacaaccaagaatacaaagatgcatatgaattcgctgcagatgttaggttaatgttcatgaattgttacaaatacaatcctccagatcatgaagtagtgacaatggcaagaatgctccaggatgtttttgaaatgcattttgcaaagatcccagatgaacctatcgagagtatgcctgtctgctacatcaaaacagataccacaaaaatccctggtagagaaagcagtagtgaagcttcctctgaagataactcttctggtgattctgaagatgaacgagttcaacgtcttacaaagcttcaggagcagctgaaagctgttcatcaacagctacaggttctctctcaagtacccttccataagctaaagaaaaagagtaagtn

SEQ ID NO: 5530 - DNA, 643 bp, Canis familiaris
  misc_feature (1)..(643): n = a or c or g or t
atctattggatcctcgtnannntgggcttnnatctttcttggtccatccgcntggnntccaagtggtgtgagcggcccgagtgggtgcatgtnnatagccggcnntttgcttnnnnnnnnngcgattcaggggctgccctgggtctgggcatcgccctgcactctccctgctacacccaggtacggcgggcacagctgggacacggccagaagatagcctgccttgtgctggccatggggcttctgggccccctggactggctgggccatcctcctcagatcagccttttctatatcttcaatttcctcaagttcaccctctggccatgccttgtcctggcccttgtgccctgggtggtgcacatgttcagtgcccaggagacaccacccatccgctcttcctgacttcaagtgcctcccgttgccacttgcccatgacaaagccaacagtccatgacctccacactccagaaagtgggcctcatccccttccagctcccagcaggccctgttcatcctcagtctcccactgctccaccatctggtctnngcccccaaaaagggccttctctctcccagaaatgctggtcctcctgccttctcccccctgaatccccagggagctaangnaacatcaagacct

SEQ ID NO: 5531 - DNA, 431 bp, Canis familiaris
  misc_feature (1)..(431): n = a or c or g or t
gannaatctgtcctgtgcctctttcntagcagctggggcctggctggcgatctctggcattccttggcgcctactgcagcacaccaccctctgccttcctcttcacgtggtgctctccccatgtgttcgtctagtttcaaatatctatctatctatctgtctatctatttatttatttatttatttgacagagagaaagcatgagcaggaggggcagagggagagagagagagactctcaagcagattccacacagagcgcagagcccaacaccaggctcgatcccataaccccaagactatgacccaagccaaaaccgagagttggatgcccaactgactgtgccacccaggcaccccaaggacactgacctcttttaaatgactcataaatgtagctcattaagggccatagaaagaccaacagaagag

SEQ ID NO: 5532 - DNA, 583 bp, Canis familiaris
  misc_feature (1)..(583): n = a or c or g or t
gacagtgagcgggacatgaagaaggagctgcagctgatccccgagcagctgcgccanntgggtaatgccatcaagcaggtcaccatgaagaaggattaccagcagcgcaagatgcagaaggtgctgagccctcagaaacccgccatcaccctgagcgcctaccagcgcaagtgcatccagtccgtcctgaaggaggagtaagggtcaccgtccacgggtcccagagccctggggtggggccacctcaagcagggatcagggcagagaacagcgggaggagccgacgcgggacagggtggcggggtggaggggttcctgggcagcacgtgcacagcttccagcaggggcgccaccttggagcgtttgagacacgtggaggtccttgggcgtcagtgaaagggctcatccgtggtctgcgttcccgagtgagggactctgtggccttacaggggcgagcacataagagagatggtgaagcagattaatgacatccgaaaccacatcaacttctgatctgcggggagctggtgcccgtggagtggacgcagggaggggccgacgggcgccatcgatgaacttggcc

SEQ ID NO: 5533 - DNA, 684 bp, Canis familiaris
  misc_feature (1)..(684): n = a or c or g or t
aattnnataatattcttgctgtaaaagagcntcctgttaaacctcagaaatcnnnnatattcaggtttgaaaactgacacattttcataagacctcaggcacagactactgaggatggggnaagcgtatgaggcagggaaggaaaagaaaaataagacattgttgtgtnnagatggtgcagttaagtgatgcttgatgacagcctgtaaaactcatcaataagtaagtgttgtaaaataatttataaccagtaatggatagtgtgtaatgaatggaccattaataattgattgtctcaaaacaaactgcttgtgttggctaagcttgtaatgttttcgagtgaagcagaagcactgtgctttccaccttatttttctaccaaataaacaccacaagtgatgggaaatgccgacgacgcccctgccaggtatcgacactgtgagagtagcggtacgggtgcggccgttcagtcaggtcagtgatggtgaaagctccaccaccttgttggaactttgaccaggacttgcattttcttcattttccaatgatagttaccaaacgtgtattcaagctgcttgtcactgatggaattattgaacttatttaaatgaacttgttaaacgagtaacttaaagatctctgcataattagtaaacacgtaacctcattcctttgcanannnnn

SEQ ID NO: 5534 - DNA, 510 bp, Canis familiaris
  misc_feature (1)..(510): n = a or c or g or t
tacttaggtnnnaggtcactgttcagatcctgtcacgctttgccancnnnncgaaatgattttggttttngcgtcatcaatacttgagggtgcagtcagctgttagtaagtgtgcagtgaaataaagccctgtggtgtgtccactaatagttaggagnnncagttgatttgtctcatgttttgaccttttgtctctgaccaaacannggacgcgcgcatcacgtcaccttggagtggtcttgggggagtcccctcctccgacgtagcatcagtgatttgttatccctcccgccctttggaggatggatgggtttcacacagaggaagttggcctccccacgtgagcttttgaaattgtttctcctagacacagggaggccggttttgtttcagaccgattctcttcacagattctctgtcacggtgttgggactatgtctcctggtttcagttttcgtttctactgctgtaattctgtcctgaacattcttctgttcctgttccctttta

SEQ ID NO: 5535 - DNA, 697 bp, Canis familiaris
  misc_feature (1)..(697): n = a or c or g or t
gggtgcagacagaggagaagataggccccggggannaanacaagacagcccccttgnntcatgaggaggcccatgtgcctgggctgctgccagaccagagcacaggcctctcctcaccttttgaggagtccaaggggccgtcgaccccccaggaggactccaagacactccgggtcctacgccagatggtcggtaacctgtctgggtcttctggggatgaagagatgaaagccggctcaggcctgctggatggaagccagtccttggagctactgagagagatgaaccaggtgctgcaggccctgcgggaggagaaccagaacctgcagatcctccgggaggagaaccgcctcctgcaggaggagaacagggcccttcacgtgcttcgcgagaagcacagaatcttccaggaggagaacaaggccctgtgggagaacaacaagctgaagctgcagcagaagctggtcatcgacacggtgactgaggtcactgcccgaatggagatgctcattgaggagctctatgccttcatgcctgccaagaacaaggaccccaagaagcccagcagagtctgaggcctccaaggagcactggtcacggaaactcggccaaagaaaacttcctgccttccacttgtctcctggtcttcagccaccagtgtgtgcctgctgaggagcagaattaccaccttcctaaa

SEQ ID NO: 5536 - DNA, 474 bp, Canis familiaris
  misc_feature (1)..(474): n = a or c or g or t
gcccaaggctatgnctaggctcagcaggtatgcacaccaggagcacatggtggctgcctgctgggggtccctatcacccccagtatttgagcttctcccatctgcagccctcatagtaggcaattccgaagggaaacagggtgtcgtaaccctcaggctggcacccagtgctaccaggaacaggccatgtcctgagatgtgtgcccctggccagggtcgtggctctagaatgccctgcacacactgaggccagctccaaggagagcttctgcccctgggcccgctcacctctgcagttcctgtcatccctggccagggcaaagcctgcccaacaggagcaggagaagcgaccaggtgcattgtggcaggagtgagaacaggggctggggccatctgaacattcgtccctctgggcaggggggtgggggtgggcagagctcctgtggtctgtgctcacaggccctcctactggct

SEQ ID NO: 5537 - DNA, 592 bp, Canis familiaris
  misc_feature (1)..(592): n = a or c or g or t
agggccagggggtgctggacgtgaagggccaggtgaggatgnnggtgcagggtgaggaagagaagagggaggacgaggaggacgaggaggacgaggacgtgagccacgtngacgaggaggactgcctcggggtgcagcgggaggaccgccggggcggggacgggcagatcaacgagcaggtggagaagctgcgccggcccgagggcgccagcaacgagcacgagcgggactgagcgcctggggctcccggcaggccctgggcagccccctcacctgcggggctcgaggcgggggcctggtcgccgagcacctgccgacctcgacctcgcacctgcatgacaagaggtagtctaagtacctggctcctgaccctcgggggctgctgctgcccctgctgcccacttcccaggggccgggatcggcgcttccagaagcctcaccccgtgcccttgctgccgggccgcccccgcccgtccaccggcctcgcttccgcctcgcgactccgctgcccctgcggcgacactggtcctcgcctccccttgccggcatcgggcctccccgcctgcccgcctgggaacgtgccccgctagac

SEQ ID NO: 5538 - DNA, 564 bp, Canis familiaris
  misc_feature (1)..(564): n = a or c or g or t
cattaaagaatataaagaaannaatgaaaaannnnnncagnnnnnnnnngtanctgatcnncgatatcagatangcagacannnnntaaagaagctaaatttgnatnnnnnnnngctnnnnnannaaaaagaagacttgctgaagaaattnnagtcctcatctgaaatcacaagtnnggcagaagaagtttcccgggtaatagttccacggatacaagttacatcacttggtccttcaaggagcatggatttggagatgaagcaattgcagtgtaaattaaagaatgcaactaatgaactcactaaacagtcatcaaatgtgaagtctctgaaatttgaactcctagcaaaagaagaacacataaaggaaatgcatgaaaagatgtctcgaatggagagggatataaccatgaaaagacatttgatagaggacttgaaatttcgacagaaagtaaattcagaaagtaatgagagtattagtgaaatgttagaaaatcttgaaaaaaaggtgaagacactaaccgaagaatgttccaacaagaaggtatcaattgattcactaaa

SEQ ID NO: 5539 - DNA, 548 bp, Canis familiaris
  misc_feature (1)..(548): n = a or c or g or t
ctttggactgtggtnntgagaccnnnaagagatatgctcaagttgtggccnaagccaagttaattgtgtggaatggacccgtgggggtatttgaatgggatgcctttgctaagggaacaaaagccctcatggatgaaattgtgaaagccacttccaggggctgtatcaccattataggaggtggagacactgctacttgctgtgccaaatggggcactgaagataaggtcagccatgtgagcactggaggaggagctagtctggaactcctggaaggtaaagtccttcctggagtggaagccctcagcaacttgtaattgacaatattcctttccattatttcctatccatgcatgggctttaattcaacttagtgctttacattttaacttgaatttatttataatttacctctataccaaggcctagacaatgaccaagtgatcaactatcaggaactctcaacatcaatacaacaacacaactcatttggttctgtcacacatttgcctgctctcttcaagatctcatttgaacttcactgtgtg

SEQ ID NO: 5540 - DNA, 394 bp, Canis familiaris
  misc_feature (1)..(394): n = a or c or g or t
ggaacagcaggaagtggctgctgctgtcattcagcgttgttacagaaaatatannnagtatgcactttataaaaagatgacacaggctgccatcctaatccagagtaaattccgaagttactacgaacaaaaaaaatttcagcagagccggcgtgctgctgtgctgatccagaaatattaccggagttataagaagtgtggcaagagacggcaggctcgccgaacagccgtaattgtacaacagaaactcaggagcagtttgctaaccaaaaagcaggaccaagctgctcgaaaaataatgaggttcctccgccgctgccgccacaggtaagtcagcacattgaagctgccctttcagaagcaatgcagaacattcattataacagagcaagca

SEQ ID NO: 5541 - DNA, 681 bp, Canis familiaris
  misc_feature (1)..(681): n = a or c or g or t
aaagtaccatatgatgtacagtgccccaagagagaaaaactgagtatnnaacatgctactcagatnnaaaatgtgaaatccttggttcatagactgtttacagctttgcatnnagaagagtttcagaaaaaacgagagcacctcttactggagaaaattgaccacctgaagggacagctgcggcctctcgaacagataaaagctggaatcgaagctcgctcagaagctaaaactagcagacttctgtgggctgggttagcactgttgtccgttcagggcggggccttggcctggctcacctggtgggtgtactcctgggatattatggaaccagtgacctacttcatcacagttgcaaattccatggtcttttttgcatactttataatcacccgacaggattatacttactcagctgttaagagtaggcagtttcttcacttcttccataaaaaatcaaagaaacaacattttgatgtggtgcagtacaacaagttaaaagaagatcttgctaaggctacagagtcgctgaaacaggtgcgccactctctctatttgcgaatgcaaggaaaggaactcaatggaaagaattaatcttgcatttttaaatatcattgaattttttccagtacgtgttgattctgcaacttaaaaactggaactttttgagtcccatagttc

SEQ ID NO: 5542 - DNA, 291 bp, Canis familiaris
  misc_feature (1)..(291): n = a or c or g or t
ctcccanagcaatgncctggtnncttttgtaaagaccataggatnnnnngncagcatataatgcaagggntgatggtataaattttaatactataggctnngaagacagttctgctcattggttaataccatggcatttggaattaggattcctgaactttctgaaagtgatttaacactctgtgatttatnncagaagccagagcaatcaaaaggaaagaatctacttataacactnnncagttcataaccttcagtannnnncctttgtcttttagnaccaacaccaga

SEQ ID NO: 5543 - DNA, 555 bp, Canis familiaris
  misc_feature (1)..(546): n = a or c or g or t
atgaanagtanngcttttccatganctnnacantgtccagcactctgttgattttaaagtatcttcacccagaccaattcaggaaacatagcctgagtacctgctgtgttttaggcactgtgatcagcaccaaggattctgttatctttacccaaactactactaaggaattgattctgctttcagctgtctgtaaatgcaatgaaccgtgtaatttggagctgctcacctgttgctggtttgctgctctatctggtctccctgttggaaaacttgtttgttactgtgcttttcctgggattcagtgtatgatgtcattgcttcttttttaagtcttttattatgttttcattttaaggaagcccactaaatgaagttaatattaaaggaataccactcattaagaaatttctgtatagctttcgctgaatacttaaatgccttactacagttatcaagttgacatgtttttaattcacctaaggtatattgaagtataatatatattgtattacaaagacttgttctaatattttaaaatgttgatgcaaaaaa

SEQ ID NO: 5544 - DNA, 566 bp, Canis familiaris
  misc_feature (1)..(566): n = a or c or g or t
agnnncccagcaaaacagcttcagtgattgtggtgtatatgtannnnagtatgtagagagcttttttgagaatccaattctcaattttgaactacctatgaatttggcaaantggtttcctcccccaagaatgagaacaaagagagaagaaatccgaaacataattctgaagcttcaggaagatcagagcaaagagaaaaaaaagcataaggacgctcattcaacagaaacatctttaggtgaaggaacagaacaatgtgtcaatagcgtctcagattgaaccatttttgatgcttgtcagtattgccttcagaaactgagtgactttcaactttgggtatagacagtaaagaactgaagtgctcactactcagagtgatctggaaatgttaatgcttgtataaatgtcatataattaatttccaatggagtatgtattaagtaaaagtttgtaaatatgttaatgaggccaatttttccagcatttataattatttttttcacttgttaggagcttttgttatgtattttctgttaatagtacttaaaactgcaacttctaaaca

SEQ ID NO: 5545 - DNA, 575 bp, Canis familiaris
  misc_feature (1)..(575): n = a or c or g or t
tttacagaannnncagatcccaatactgagagacctcaccagacagcnctctttnntgaacagttgagatgtttctgtttggtnnatgcacattatctcaagccacagaacagccacacttgcatcatgacctaagctaacacttcacttcccaaatgaaagaggcttcaaaggaaaaaccttaaaaaactgaaaactttaaaattaattattataataccaccaccactgtgccacagcttttgcctacccaaatgggaaagtaatcccacaactgatctgacaatctggtggcatttaagagaaactgcccactctgggagaattcagaaagactctcaggaattctgggaaaatacctcttcttgtcctttctggcaaacatgtatcttacaagctgaagtgtttgtaaacctctaaggacaagtggctccttgtgaaagcaagatgaagtatggggaagctagagccacttctgccaaaaagcacataaactccagagaggatgcaagagttgcataggtgcttctgtacgtttctcccagcctctcctcnnnnnngaagaatagaattcc

SEQ ID NO: 5546 - DNA, 647 bp, Canis familiaris
  misc_feature (1)..(647): n = a or c or g or t
atgcttgaggtccctgacaannaccggctagacatggtcatcaagtacagctccaatgcccgtctgagtcagctgnnttcattagtgagtgcctgngagcaagtnctgaagcccattcagctgcgggaaatgttgctggggagactagaattgtttgagcgacaagcttctgaccccaaccgcttcttccaaaagactaacatgggcctgggtagcttcctggaggagaatcagttccgcaaccgtctacacaggaagatcaatctggtgcaggctcctttggtttccctcctgaaggaaattgaattaatctttggtgagccagtgaccttcaaggggcggcgatacctggataagatgaagcatgacaaggtggagatgctgtactggctacagcagcagcaacgggtccaccacctgacacagggtcagaaggcctcccaccagccagggctgttcaagaagctcagcatccagccttcaataactcctgggaatactcctattactctgtgccttcaaatccctccctcacccccaaacacctagcagatccttcagacctcttgactactttagaagacaaattatctgggattgcaggattcaggaacattgtgcctccaactaccaacggctaagattaa

SEQ ID NO: 5547 - DNA, 356 bp, Canis familiaris
  misc_feature (1)..(356): n = a or c or g or t
agtaaagctnntantcctttccatccaaagctcctatcttaagtatcggcttnnnnagcaatnnnnagctaaacttgctgactgcagattcctgaggatgagaagctcagctgctgctgnnggggatctttgtctgtacttgcaaatatgaatgaaatgcatccatttccaagtacaactgactttcagctatgctggtttcccgtggggtggggtggggtgcagtagaggtggtggagaggagtctttaacaaggagagctttgctctttctgattaggaactcaactggaacaaaatcttttggaggctcagatgtgaggaagttcaaggtggcagaaaatttactggagggaa

SEQ ID NO: 5548 - DNA, 591 bp, Canis familiaris
  misc_feature (1)..(591): n = a or c or g or t
cagagactgtgaaagagatnnatggnnnaggatgcacaatgagcattctcatcttnnctgctaccgacccaaggattataaggttatcaggacaccccatgggagagactttgatgactctttggaaagatgtgatgagtacttaagctcaaggtcatgtagcaagccccagcattcagcaaggaccttactagtccattcagcaccttcaacaatgccgaagcattctccaagccctgtgttaaatagagcttctctcagggaaagattccattctgattggtgttcaccttcaaactgcgatgagatccatgaccgggatgagagagacccagagaaggaagacgaactggaactgaaaagaggtcttttatacagagactctgcctacgacagtgacccagagtatagctcatttcagcggccacgtggcactctccatttggatgatggtgaatactggtccaacagggcagcctcttataaaggaaaatcccaccgacccgtctttgagaacagcatggacaagatatacaggaacttatacaaaaaggcctgtagttccgtttctcatacacaggaaagcttctg

SEQ ID NO: 5549 - DNA, 692 bp, Canis familiaris
  misc_feature (1)..(692): n = a or c or g or t
acatatacagaaatgatggnntctttgggaaagagtcaggagcaagaaaatcatgctgcattagtatctttttctgaagaagagaaataccagctgcgaaaatttgtcaataaatcttacctactggacaagagagctcatcgccaagtatactacggtttgattgatatcttgctggcatattgctatgaaacttgtgtcactgaaggagagaggaatgttgaatctgcatggaatattagaaaactgagttccacactctgctggtttgagacttggaccaatgttcatgaaatccttgtgtcttttggaagaagagttttgtgctacccactttatcgccacttcaagctggtgatgaaagcctacagagacactataaagatattgcaactgggtaaaagtgcagtcttaaagtgtctactggatgttcacaaaatttttcaggaaaacgaccccgcttatattctgaacgatctctacatctcagactactgtgtgtggattcaaaaagccaacaggtggcgacgatgtttgtggtggaaatctcagtttcgccagatggaaaattgcatctttaacccctgaggtcatcatggcacatcatcacttcatctcatcctcctgctaattgagcttatcaagtaccctgctgccatttcctgttgttttcataataaaannnantnann

SEQ ID NO: 5550 - DNA, 635 bp, Canis familiaris
  misc_feature (1)..(635): n = a or c or g or t
gggaacaagaaaatgatgatctaccgaaattccaactttcagagagacaggnccttgttccttgacaatgtccagagaaaaggtgacctgaaaaccaccactgcgtgctcagggagcagcgcaaccactcccaagagaaagaagcccacggcagccacaagacattctccacgaatccatcaccaggaatccaccaaagaggacaagaaggcccccagggaagccccaaatgctcagggacccagtggcacccagtcattcacattctctggcatctggtctctgagcagtgtagccgggtacgccaccgaaaatcatggccccagtgagctggctggtcccagtggggagggtacctccaggaatgtgatgttcgcatccccggccctggccgggagggatggcgcaggggaactgccccccgcaccccccgtttacccagattacaggtcagtgatgtcactctacaacacctgttattccatcctcttggctgccctctcggtcatgtccccaaacgaggccccaagtgagaacgaggagcacgagggctcctcggattacaagtgtgcactctgtgaacacttcaaggaaaatccgggtccctaagctcnnnggccaatggtgacagataa

SEQ ID NO: 5551 - DNA, 431 bp, Canis familiaris
  misc_feature (1)..(431): n = a or c or g or t
aggtgaanannntggnnaactgtgtgtcagcgactctccaaaagnnncgacagacagctnnacacatcaannnctgatgctcaagagcgatgccattcacaaggtccacgnnnagaannacttcattgctttctgctcctcaaccccacataatgtgtcctngagacatatcacgaagggatctcttttcattgcacaactcatcacatgcttccaaaaatattcctggtgctgtcacctagaaggagtattccggaaggtacaacaatcatttgaaaaaccagatgtgaaagcccagatgccgaccattgaacgagtatccatgacaagatatttctatctcttccctggcaattgaaaagaataagtatcaagagctgttagcaggcaatcatgggcagtccagctcttcttgaccaacttcaaaaaat

SEQ ID NO: 5552 - DNA, 482 bp, Canis familiaris
  misc_feature (1)..(482): n = a or c or g or t
caatgagctgtgacagnnnnngngggcacgagnnnggcctnntcaggcctggtccccaccttttcagctgctgtgggaggatgggccatagtggnncanntgannagggctctccctgctgctggggtcattcctgccactgcctgggagggagagtggggcaggtaccccggnnctccctccccccgtgctagaggacactgctgttcctgtgtccaagccatgtctcagcctaggaattccaggggggcctggagcagggtgggatccccagcccgtgacctgtgaggatggttgaggatggtctgggcaggggcgtcttgtttcctgcattgggttggggacctccagagagaaagggcttgagatcctccttgttatttggagccacagatgttcctgcatccttcaccccaaaggagacagggctcccaggtaccacacgggtgacgggagggttcaaactgcacgctatgtacgaa

SEQ ID NO: 5553 - DNA, 544 bp, Canis familiaris
  misc_feature (1)..(544): n = a or c or g or t
cagtgcccagccctcccctaccccatcatgtaccgtgaaaaacccctctcgtgtccgcaaggcagcacctgcagcctgtggccattgtgcgtgtttccatctttcttccgtcagatgcccagcctcgccccctccaagatagtgttgtcttctctcatcccaagtattaacgctactaagtctttcaccttaatttgactcaggatttattcacatcctgcccactgtaggctcacagaaataaaatcaagtgctagacaggctggctgctgctaaggcagtagccatggaaccctggctgaggcagggctgagggccacccggtttgctcagcctgtcaggacctctgctgctcacggggaancnnnncttgggcagtggggtgtcgaggtgggccgtctgtccactgctacagtcacagcaaactccgcgtggctgacctggccttcaggtaagcagccataggctgcgggccgacagcagctcagagatgcagcatgaggctcttctcaaannnnntgcccgttgctgcnnnnnnttccct

SEQ ID NO: 5554 - DNA, 508 bp, Canis familiaris
  misc_feature (1)..(508): n = a or c or g or t
attccaatcaccacaggaacaggtgttgtgtatcccggtgctatcactatggnaactaccacgnnntccccgcagatggcctctgactgctccagcacctcggccagccccgagcccagcctcccgggcatccagggcgcctacggcctgaagacggacggcgggagcctcgcggccaatgagatgatcaacggagaggatgaaatggagatgtacgacgactatgacgacgatcccaaatcagactatagcagcgaaaacgaggcccccgaagctgtcagtgccaactgaggagtgtgtgtttgccgaatcaaagtacttggacatttcacctcccctctcccccccacaaaaaagttcttaaagagcccgcatgcatttgtggctctccagttacatcagcagaatggtcttcattgtttcgtaaagtgtgagacagattaagttttcccggatttttcatgaacttgagtttttgtcgttattgttattgttgttgttgttgtgt

SEQ ID NO: 5555 - DNA, 454 bp, Canis familiaris
  misc_feature (1)..(454): n = a or c or g or t
ctccacaggtcncgcgtggcccggacccatcctgtctccctcccgagttccagaacgcttggattgcacgcttgtccgtcacatggacgacggtgctcgtggctcctcgagacctactggcaagacatctgcggtcagaggcaggagtcaatccaacagtaactcagaggcttccgtcctcggcaacatttctgggccccatggcgtggggagcgcggagccaggtcttcggggcgcgttctctgtgtggtgtttgaggacgaccatccctacttcgatcctcctgttcccacctgtacatggacttgaggaagtcacggtgaggaccacgtggggcgcgggaggccctggcctggccttgtcccccataagcggccgtggcagccacaggcgctcagagtgggggagatgcctgtgggcgtcaccctcctcccgcccccttgacctgagnanc

SEQ ID NO: 5556 - DNA, 575 bp, Canis familiaris
  misc_feature (1)..(575): n = a or c or g or t
tgtnaccacaggacaggtgaaggtcaccacaggagaggtgaacgtcancacangacaggtgaaggtcaccacaggacaggnnnnaataagtcgacccggaaatcatcctcccatcggtccttatccggccatgacaaaagagatgacagaaaggagaaggggcagagccatgcaagaagcagaggacacagctctcacaagagtggtacccatggctctgcagcaagggtgtcaaggacagctcacaaattggggaagatcaaatctgcaaatagttcaagtgctataagtaagaaatccagtaaaattggctctttcttcaggaacttgagagccatgcctggttcaaaaacaggggtcccatcacacgatagagaggtagacttcgtggctaagtcattagagaagtgcaacatagagacgaaggtagagaaaaccccagatggcaaagacctggagatctgtagcaccatgacatctgaatcaatggagaccataatctttgaagctaaatccatttaaataggagaccaggcaggaatctgcagtggagacccagcctcagggaagtatcc

SEQ ID NO: 5557 - DNA, 165 bp, Canis familiaris
ttcctcttgcacgttttcttttgatatttttatattaagtgaaatatattcaattaataaatattaataaatttattaatgtccaacgtgcctcagtggcacagtcggttatgcatctgactcttggttttggctcaggttgtgatctcagggttgtgagatcaa

SEQ ID NO: 5558 - DNA, 536 bp, Canis familiaris
  misc_feature (1)..(536): n = a or c or g or t
gagannnataagctcatctccgtggactcccctgagagccaagannntcagcttcatgnnnnngcagttccagaagacagcaatgtnnnggcaagcgagcctcaggaagaggtannngnagttcaaactgactaccnnngaagaggaactgccaagacccctccccagagaagcccctcagctggagggtatataggtcggagagacttaagatnnagcattcagttttagattctccagccatatgaatgctggtggtcnnnaaagatctagcattaatggaggctgaggagccgacttgggggagggagggtggcaggcttggaagaagaaactattagattccgggaatatttaattcaggctttatagcactgttagaataagaagactttatatattattaagtannncgggccgaaaatgactgtaaaaagcataagcatctgtagatagagacacatccacatagagannnnntacctacnnctngtactcaggggannnnnnacaaatcgttgacttacnngtnactt

SEQ ID NO: 5559 - DNA, 178 bp, Canis familiaris
  misc_feature (1)..(178): n = a or c or g or t
gggtnnttctccttctttgagaagcccttttggntggcagtgtgctactggttatctataaggcatttnnnnnntgtcgtaaatggnatattnnngtctaaaggttnnngggtnnnntgaattttttttttaattgagctttatttnnnnnnnnnnccannnnnnnnnntatatnncn

SEQ ID NO: 5560 - DNA, 717 bp, Canis familiaris
  misc_feature (1)..(717): n = a or c or g or t
aaagaanctgaagtttacaagatgcttcaagagaaacaggagttaaatgagccccccaagcaatccacttcattcctggtattgcaggaaatcttagagtctgaggagaaaggggatcccaacaagccatcaggtttcagaagtgttaaggctccggtcaccaaagtggctgcgtctattggaaacgcccagaagttgcccatgtgtgacaaatgtggcaccggcattgtcggcgtgttcgtgaagctccgggaccgccaccgtcaccctgagtgttatgtgtgcactgactgtggcacaaatctgaaacagaagggccacttcttcgtagaggatcagatctattgtgaaaagcacgcccgggagcgggtcacaccccctgaaggctacgacgtggtcacagtgttccccaagtgaaccggcaggcccacacctgttgcaactcgatctctaaatgctctggccctctcctctcttgaaagttcttgctgactctggttttatccctgctcattaaacaccacgtctccctgcctctgctaactgactcactggctgtgtgacgcctgcttttacaattaacagaggattgttttgttcagtggcccccttgccagcatccctgggtcttctctttacctcagttcatttctgctgcagatggacatcagccacatttgaaccaaaccgaactgaatatgtttgacattgattcgt

SEQ ID NO: 5561 - DNA, 551 bp, Canis familiaris
  misc_feature (1)..(551): n = a or c or g or t
atatgcnntattctgttnnaagactggctgtttagttgtatagccaaagacatttagtattttctggttccgtaaagtgttattgtaccattttgtaaaaggaatattaattttaattgtttggtaaatgttttgacaaattaccttcttgaagcagccacaacttagaaagataatgtcaaaactaaggtgattttttttttaaagaccagtcaaaataaggtatggatttgtcatactgttaaattgaaattggtaacagaatgtatgtccccttccagtttgccttttttgagtttttagagtaattgaaaattttatattttaaaataatttttaagtgtgaatggcaagattgagtataataaccggtttttattttctatggacagacttgataaactggagaccctaaagccggattacccaaattgtagtgtcaggtttttagctgtaccagaggcctttatgtgctacacataatttgtataaagttttatatgtgcaaattgggtacataaacagttctccatttttctaagggaatgcaa

SEQ ID NO: 5562 - DNA, 611 bp, Canis familiaris
  misc_feature (1)..(611): n = a or c or g or t
cnnncaatgacangnagaaatgggctcgaccccccatttccatgaannnnnaggtgccanncgcacnnnctgnnntcaaggtgcgctacttgaaggtgtttgaaccgaagctgaactacagcgaccatgatgtcatcaaatgggtgcgctacattggccgcagcggcatttatgagacccgctgctagctgcccagtagcagccagcctgcctccctacccgcccttttccacaggtctgggtgccctgggccaccacacttcagtgtctcctccctcctgctttgctgccttccctttgcaccagcccctgagtctaggtctggaccaatcacgttgtgagcgggactggtggagcagtccctgggctccctgggcagggtggtttctggggctcctactccaccatccatctgtcagccctggcccagtgccaggctctgtgttctgtgaccaaagccaggtgggctccctctcctcccctcccctgtggccacatctctggagtgggagggttggccccctcacctcggagctcccccaaaggccagtaacggatccccagccctcaatccctattctgctttgggatagtgtgagcttcattttgta

SEQ ID NO: 5563 - DNA, 693 bp, Canis familiaris
  misc_feature (1)..(693): n = a or c or g or t
tcgagcgctacaagggtgagaaacagctgcctgncntngacaagaccaagttcctggtcccagaccatgtcaacatgagcgagttggtcnagattatcnggcgncgcctgcagctgaaccccacgcaggccttcttcctgctggtgaaccagcacagcatggtgagcgtgtccacacccatcgcggacatctatgagcaggagaaggatgatgatggcttcctctacatggtctacgcctcccaggaaaccttcggcttctgagccagcagtagggggggtggttggcctgggagtgggggggtgccctgtcaggctctgcccagggaactcctggctcctgaactgaactgctctgcccgggctgggctgggcagggatgctggccccctagccagggggcaccaactgcacctactctgcccctgggtggatcctgggccagtcattgttagggatgccctcctgggtgctggctgggatgggggagggtggggaacagcccccagcactcttgctcgtgtgatttatcttttttttaggcccctgcccatctgcccctccctcacctgaggcgctgcccccctgcctggacctgcccacccctgaaggactggcccttggctcacctgatcttgacatggtgtatggatctgtggtcattgttcctctgcagaataaagattgnnnnnnn

SEQ ID NO: 5564 - DNA, 623 bp, Canis familiaris
  misc_feature (1)..(623): n = a or c or g or t
aagacgatccacgcagagctatcgaaactggtgaagaagcacgcagcccagcggagcacnnagactgccctgtaccggaaaatgctgggcaaccccagccggctgcctgccaagtgtcctggcaagggtgcctggtccatcccctggaagtggctctttggggcgactgctgttgccctggggggcgtggctctctctgtggtcatcgctgccaggaactgaccacccaggcggccaccaccccctcgcacaccatggaccccaccccgcgctccctaacttccccaggctccctgtccactgccctgtctgatctagccccctcctctggggcgagagcagtgaggtgtgggggccatgtggccccagtgagccaggagggactgtggccctataggaggaaagtgaggcagggcctgggcttcatatccagccaggagggagggggccctcattcctccagacccaattcccacccccacccccttgggttaggtctcaacagaggccagtttctccttcccaacaggcctgggggcagccctttcccaactcagtccctgtccaagcgtcaacccctgcccacaccgcctgctgccctctgtccaggttctccttctgac

SEQ ID NO: 5565 - DNA, 602 bp, Canis familiaris
  misc_feature (1)..(602): n = a or c or g or t
gaggtnntgtccgacaccangnggcgctcggtgtacgaccgcgcnngctgcgacagctggcgggcgggcggcggggccagcgccccctacggcagccccttcgacgcgggctacaccttccggaaccccgaggacatcttccgtgagtttttcggcggcctggaccctttctcgttcgatttctgggatgcgcccttcaacagcgaccgcgcgggccggggccctgggctgcggggcgccttctcggcgggcttcggggagttcccggccttcatggaggccttctcggccttcgacgccctgggccgggccggcggtgccagccgcaccaccttctcgtccacctccttcgggggctccggcgccggcagctcagggttcaagtcagtgatgtcgtccaccgagatggtcaacggacacaaggtcaccaccaagcgcatcgtggagaatgggcaggagcgcatggaggtggaggaggacgggcagctcaagtcggtgaccatcaatggcaaggagcagctcaagcgggtggacaacaagtgagtggccggccgtccctggggccaccgctgtcgccgccacnnnnnnncgccacccacctg

SEQ ID NO: 5566 - DNA, 527 bp, Canis familiaris
  misc_feature (1)..(527): n = a or c or g or t
ctccgccagannagccancttcgattgagaannangagaggatggcttgactggccaaggggtcggccccatgcaccctcgcaggaccctccctcatgactgtgaggaggagcagggaccagcttcccaccctgctccctgctcactctgctggcggcccccagctggccactgccccctgagcttggaggccaccgtcacccgcagtcaaaactctcccagcacctcgcactgccccaagggcctcaacatgtctcagctcctcagctgtacccaaaaggcagctctggcccttggtccctcatccccacattccagccacgagacccatcctctgtgcccctcctaccggacccagggcaatagcctccttcctgcaggcccagggctcagcccaaggccagaatgaatcccttacccacagctgtggccacgcacatgactcctgccctgccaacccaggggttcccagaggcttcccccttggccccagctcccacacagagcctggtgggaggggcagcaat

SEQ ID NO: 5567 - DNA, 401 bp, Canis familiaris
  misc_feature (1)..(401): n = a or c or g or t
atatggtcctaagttaaganntgtacatataaagcaaatgtgccttgatctccaaaaggaaaagaagatttggtggagtgacttgacacggttcacagaactttgcagaatcctaccaaatgacaggaatcgcccggggatgagctcaacacatactccaccatgctaacgcctagtcccccactctccgatcgtggggacagtacagaattgacctcactgttcacatggaaactctgaccaggtcttctctgcaccatgattggctgggaaactgaatgatctacaaaaaagatacacaagcatgatacagtgcagccagaggctcaaacaaattatgagtgatgtctcatggataaaccaatgactgggaatcaggaagtctgccatggtcaggtgtg

SEQ ID NO: 5568 - DNA, 439 bp, Canis familiaris
  misc_feature (1)..(439): n = a or c or g or t
tgtgtgcgtaatcccaccncagagctnatagctgnnctctcntgtctggtctcaggcaggatcctggtggtgcagcatggcacagctatggcaacaaaggaaggagcagtaggtngnaggcctgctccaacagatgagtcctttgcctgccatctagccccttaagtgtcaggtgtgtgtgatgacggcattgaaggctttcccctttaaatctctctaggactccccaccccaccaaaggtcagtgaaggcactggagctgagggtcttgggagtcactttgctctcggggtctgttgttttagaccttaaaaactccagcatggacattgattctctccgacctatgcacactgcctgcgtctaggaggctacaagccaacaaaccggagaaggggacactaatgaggagcgatgttaagttaggtgggggtagata

SEQ ID NO: 5569 - DNA, 545 bp, Canis familiaris
  misc_feature (1)..(545): n = a or c or g or t
tgtaatgcaatctnnagnctgtttctnnagtgatagaactaactgtcttacatagtgctactgtttttgaattagcgatcaaatgtaaaaactgaaatttaaaaattaagcccagaaaacaaaaatgtattaagttagctgaatgtaaaagaaatttataagacttttttccttcaatatagatacctcacttgaaaataaagcacacagcatacttaaagtagttctagtaaaaagaaaaaagtcccacaaaagaattgcttaatctaggacaactttgggggaattatagtttgggagaaataaaatatacttgcttttaaccatcctgttagaagtatttgcttatcctgataattttaagccaacacagtagtcttaaattatttctgaatttctaacctgtgaaggcagtaagtgaaataactgttctgcaactgttgaaacaagttgttgactatattgaccataaatcaatttaaaattttgccaatgatgtacagttttatggttaaaattgctgtggttggttgcatcacatgaca

SEQ ID NO: 5570 - DNA, 571 bp, Canis familiaris
  misc_feature (1)..(571): n = a or c or g or t
cacagcacagggctggctgttctgggggtaccctctgtggggggcagagagggctaaggcccgagcaagctgctctctgggtgcccgtcggggctgcccagctcagaatggccaggtgacctcatgcctgcctccctcagtgatatctgccatccatacaccccaccgtgttcaatttccccaagcccaggcaaccaaaggattggggttcagcaaaagtgggttcctttccaacacagagcttgactggccactgaggccacacccctgtgctggagggcaccccaggccctggaccccacctgccgatctcccagcccagagaaggcccggcgaacaccaagcatgatcagctcttcctcttcccccgcagacgatgacgagcatgagtggatcatcaggacgtgtcgcaagggctgggacgagattgtgggtcaccgaccgaagctgtgagcttcgctatcacctccgccagagttttgtctacactgctggcggcagctggccctgagggcagtctaaacttccagaccctgacttttaactcaggaataaaagtctttntgcagnn

SEQ ID NO: 5571 - DNA, 580 bp, Canis familiaris
  misc_feature (1)..(580): n = a or c or g or t
acttgttggcantcccaacactgttgatactgactnntaagatagcaaaggggaactatcaactagagaaaaattgtccactagtatctgggatttacttttctccaatatctatcactacagaaaattaatccttaattttgaaaccttgaagtgtgcaggggtaacagaaacaataaaacaccgctgtaaacacatcaaaggttcattctgaccaaggtaagaattcccaagcccttgttagattaagccttacaaaactcctgtgcattataacctaagctgtgcagcctctgaagccaagagtaaatgggtgtttcatgtatatcttcatccaaatgaaattccctctacatttttttaaataaaaaaaggctatttaaaaatagttcattaataaatatgaacttctgttaagttagctgttagtcccctagtatttcttaattttttttttttttaggaagcatatttctattagtatttttccagtgaaaagaagacttgtctggatttaaacacttatttaatagtagctactataggaaaaccaaatagtgcaactggtcaattcaatttt

SEQ ID NO: 5572 - DNA, 606 bp, Canis familiaris
  misc_feature (1)..(606): n = a or c or g or t
ancaagttttcagnctatgacagttcagaatcatgttccccatnctagtgtgggatctataggtttgttagaatccttaccacaggtaagttggaaaagtaaatatttgtttcataaatttattcacataatttttgttcttttggactactctttgttcttacatataatatatgtgagatcattttaaatattcttgcctaagaagataacttcatttcatgccatgttttgacactaaatctcttccatctgttgcgtattttgagagacaccaacttctactcctttaaatatagaagagatgagttactcctaagcactcttaagggcaagtgttacctattgatcattttaatcataaacttctcaagatggttcctgaggaacatctcattctcagcgaactgtactattaagaatttcttaggatgggggtgcctgggtgatgcagtcagttgagtgaccacctcctggtttcagcttgagtcgttatcttgacaaggaagatcatggaatcttgtcatggaatcaagccctgtgtgaggctccctgctcagcacagagtctgctaaagtttctctcnnnnnntgcgtcaccctccac

SEQ ID NO: 5573 - DNA, 452 bp, Canis familiaris
  misc_feature (1)..(452): n = a or c or g or t
annnagttaaattcacatgaaacagagggttttttatttttgtagtgttannnnntaagtcttcagaaaatatattttgtaatatatcatgctattataattttnnnagtagncaagccatagtgcctaaaatgccagccaataccaagaagaaaattattgatgtctgtcaataactacagagcctgagatttcaatactcgatttacaagctcacaggttagctcacaggttacatgctacagaatacatgagacacttggatcagagacaaagcacttttattatttacagtgaaagtgttagccagagcttcctgttggtttgtatcagttcccatttctctgagccccataaaagcaacataaaaggccagtgatgagaatttgttgtgaagcctgatttgaatcaccattatatggatgagcccgggtggctcagtggtttagcat

SEQ ID NO: 5574 - DNA, 160 bp, Canis familiaris
  misc_feature (1)..(160): n = a or c or g or t
agcagaaacctctcctgaggtggaatgtttnngaaggctttaaaaaaaatacattaaaataaaaacccaaattggaactatctcctcccgtccccctttgacccccgcccccaatcctggacaagagattttggatatgcattcaaggggcaggtgaatt

SEQ ID NO: 5575 - DNA, 149 bp, Canis familiaris
  misc_feature (1)..(149): n = a or c or g or t
tccccctcccccccagctccccacaggcctggagcctgctgggctggactgaggctcaaggtctcccccagctgtcccgccccccaacgtccccactctagggccaggggggaggtgggggaggagttgtgtctcnncttctnnctcca

SEQ ID NO: 5576 - DNA, 438 bp, Canis familiaris
  misc_feature (1)..(438): n = a or c or g or t
ccaggtctgcccgcgtttaccactgttgtcaagccacggcccnnnngccagtacacggccatcctcagtgagnnngcccgcctaggccccccgccaagctctgatcccgaannngccccccacacgccctcccagccctcctnnngccccacccnnngctttgaggcagggatgggaagcaggctccccggggagcccagtggcacaccgggctcgnngcccatgttcacgtcctgatggtagagnnngnggtggggggagggcttgttcccctgcagtatctgttctgtgaagtttgttaaatgtaaggaaagcttaaattcttgtatctttaaaagagaagatcttatttaacccttttgtgttttagatttacttacacacatagcctagagctnnnttttagttttaacattgtgaaaatnnnnnnagaatctt

SEQ ID NO: 5577 - DNA, 327 bp, Canis familiaris
  misc_feature (1)..(327): n = a or c or g or t
tagtgtcttaaacaaaagcacagnnnaagtgacaaagaagaagnnnnnnntattgaccaaaggccagaatgccttggtggagctgcagacacaaaggccagttgctctggagctgtacaaagacttcaaagagctggggaggttcatgctgcgctacagtggttctacgattgcggcaggcgtggtcacggagataaaagaatgatgagtcagaatttctaccatgtttccaaatgcaatgaaatagctaagctttgtttttaaagaattcagttgttcagttaaaggaacaatgtgcaattggtatttttttaaaatgagaacctt

SEQ ID NO: 5578 - DNA, 626 bp, Canis familiaris
tcgctcaatgggctcaagagcagctgcttctgtaatgtgccatattgagccagatgatgctgatgattttgttcgaggtctcatttgtatttcttacccactgcaccatccaaagcagcaacataaacttagggatgaagatctctatcgtataaaagatcctgtgttgtttgtgtcaggctcagcagatgaaatgtgtgaaaagaacttgttggagaaagtggcacagaaaatgcaagctcccaataaaatccactggattgagaaggcaaatcattccatggcagtgaaaggacggtcaacaaatgatgttttcaaagaaataaatacacagattttgttttggatccaggaaatcaccgaaatggacaagaaataattatatttagctgaaagccctgttattttgaatacaaatacagttcatttgataaagaacagcatacctctcagcattatgagatatttcaaatgaatttaatgttctttaatgtttcccccatttttaaaacctgttttaattgtgaaattaatgtcctttatataatatcttttaaaagcactgttatagttgtataaagatgatgtacaaatattgaaggtggtctaaatataatttattttca

SEQ ID NO: 5579 - DNA, 621 bp, Canis familiaris
  misc_feature (1)..(621): n = a or c or g or t
ggaagggagtctgacctgacctggctgttgggcntcttgctgggtnannatnnagctnntgagttttcccagctgaggggatgatctttcattatattttcccaatcctgctcatcctgtagcataaatgaagtgcactattaaacagaatagttttttagaaggcgacattcattgtgtttttgtgcaggagccaaatctatttcaattaaaataggaaaccatggctataactggaatctaaattttaatctttaagatttttttacagacaactatttttctttcataaacacatgacctctctctgtcaagactctatcatattcctctagatactgccacagactcttcggtcatgtacacagttactcccacctcatacccacacgttggatgatacttaagaccagcaaccaaaactagaaaactgttactattgggtgtggggcctctgacaagcatgtacttggattttgggttgtaatgggcatatgtagatttcttctttgggctcttggtgggaggaggttccagtcatggagaaggctgagatgaaagtcttacagagaagatagagaagtatctggaactggcctttgaaaaatttctgagcatata

SEQ ID NO: 5580 - DNA, 424 bp, Canis familiaris
  misc_feature (1)..(424): n = a or c or g or t
ccaatccctcactgacaagacaaaagtccttacagtggctnnttcagggagtggctctttaatctggtaatcaaggtccttgataaaagtcttacctctccctaatatccaccataaactctctggcttcagtcagactcacttccagagcagacagacatggtgatttgctcttcatacttttattcttgcccaaactcccccaaatctccaaatgttttatacttttagtattagctcctataggaagcctttgctgattcatcttagtatctctttcattaaagtatggtaacattattagtctgtaaccatacagcctagcacttgattatgtattactgtttcctgtatgcatgtcttaccttcccaaacaaaatattagcgcttcgggagtagggacantgtgtttgtctccttgcat

SEQ ID NO: 5581 - DNA, 646 bp, Canis familiaris
  misc_feature (1)..(646): n = a or c or g or t
tgctgcaacttnnatcccagnntgaagcagagcctcnnnnncacctgccacatgagcacnannnnntgagaccaatggaatactccacccgaccccatcccaacaggacttacggaaacactgatgggcctgaaacagggttcagtgccactgacactgatgaacgcaactctggtccagctttgacagaatccttgacccagaccctggtgaagaacaggaccttctcaggctctgtgagccaccttggggagtccagcagttaccagggcacagggtcagtgcagttcccaggggaccaggacctccgttttgccagggtccccttgccattacactcagtggtcgggcaaccattcctgaaagctgagggaagcagcaactctgtggtacatgcagagaccaaattgcagaactatggggagctggggccaggaaccactggggccagtagttcaggagcaggccttaactgggggggcccagctcaatcttctgcttatggaaagctctatcgggggcctacaagagtcccgccaagagggggaagagggagaggagttccttactaacccagagacttcagtgtcctgaaaaattccttccctattcatccttccatccagtcctctgaaatattaatgaa

SEQ ID NO: 5582 - DNA, 232 bp, Canis familiaris
  misc_feature (1)..(232): n = a or c or g or t
ttttccccnngtttttaaaaaagggaagnnnnnnnngacacatggtaaaatcctttggnnnnnggtgctccnnnnnnctttaanggaagnnnnntaatattcaactcctagggaaagtgcanacgctttccngaatgaagccaactgctcagtcgctcttggaggagaggtcttcaagtgctttagtagaactacgtgctcaatcgcttttggcaaaggggttctcgaaatg

SEQ ID NO: 5583 - DNA, 262 bp, Canis familiaris
  misc_feature (1)..(262): n = a or c or g or t
gcnnnncggggtaannnnatggcagnngttaaagagaaggagnncnnnnnnnnagccatcaagnnnaannnggacnaannnnnagaccagcannnagtagagatnnnngnnnnnnnaagcaaanngcaggnnnnngagannnaggtaaaggagctannggtactacaagccaaatgcaatgaacaaaccaaggttattgataattttacatcacagctcaaggctaccgaagaaaagctcttggatcttgatgcacttcgga

SEQ ID NO: 5584 - DNA, 696 bp, Canis familiaris
  misc_feature (1)..(696): n = a or c or g or t
tcccccccaacccccgtccntggctcccatttnnngtctcacaacccagtcccacgnnnctgtggnnnctgccatctgagctgatgagaaagtagtcagtaagtngacacttacccaaacatcagcctcagaaaaacaagagggaagctcccagacacccctcccaccccaacacagccatgcctcaaccacagccttcttttgactacatgaatacctggtgtatgccctgaggtcctggtgtatgccctgacagggattgtgaagaccaccatgaattgtggcccctaccttcaaaaggcctctgttccagctgcagagatgaggcggactctagtgaaacatcttaaaatccacatggacagactctgtcctcggtcaggagaacctggggagcacagagagagagcgcaagagagcacaagcacagggaccagcagaaggagagggagaagcaagctccccactgagcagggagcctgacacaggatgccatcccaggaccccggtggagaaacaacatgaaacccagaaagggtctgcttttggaggaacataacttccaagatgcaatctatagtaagtatatttgtgtaagacctgcaagaatgtggaggaagtttctaccactgagcagttggaggcaaaggtggtggagagaaggtgaatgagtgnnnncagtctaaggatcacagc

SEQ ID NO: 5585 - DNA, 487 bp, Canis familiaris
  misc_feature (1)..(487): n = a or c or g or t
tcatcagcttgggttatgatnnnnnnnncgacccccannnnnaggcnnaatttgcccgcatcatgagcatcgtggatcccaaccgcctgggggtagtgacgttccaggccttcatcgactttatgtctcgggagacagccgacacagacacagccgaccaagtcatggcctccttcaagatcctggctggggacaagaactacatcaccgtggacgagctgcgccgagagctgccccccgaccaggccgagtactgcatcgcgcggatggccccctactcgggccccgacgccgtgccgggtgctctggactacatgtccttctccacggcgctgtacggcgagagcgacctctaacccgcccccggccagcgccctcattgcccgctgtgcgccccccgccctgcgccccccgctgcccccctctcccgcccgggttaggtctcctcgctcagcctccagccgggcaccagccgggaccccacgtg

SEQ ID NO: 5586 - DNA, 531 bp, Canis familiaris
  misc_feature (1)..(531): n = a or c or g or t
ggggtaattggggcttttnnngagtctgtctgccacaatatgattttgnnnnnagatatgcttttttagaaaatgtaaacagtatgggtaagtttcttaaaaaactctgtaatcccatatccagagataaaagccactaatatttcaatacatagcctttcagtcatttttctatttcatatattattaaagttaatgagaatgtggtcataacttgatgcactcttgtatagtcttatttccttaagcattcttgcaagctagtgaataatcttctataccattttaaatagctgtgtaaatttatgctatgattagaccatggtttatttaaccaagaggttggcaaattttttatgcaaagaacaagacagtaaatattttagcctttggggtccataaagtctgttgcatttacccaactgttgttatagtgcaaacaaacatgttagtaagtgtgattgtgactgtgttccagtaaaactttatttntngacattgaaacttaannnnncctgggggttattctgt

SEQ ID NO: 5587 - DNA, 252 bp, Canis familiaris
  misc_feature (1)..(252): n = a or c or g or t
ggtcccgatctgcacagagaacattnnnncgagtngatctctgctctttgatcccacgtctgggctcacctgctcacctgctctggtgaagggattctggtgttccctccatccctgattggtttttcccaaacctaaaaactccatgaagagtctttgcctggatccgtgtcccaaaagccgggatgacccccgaaagggctgcctggagatacggcgggggctttttccccccctctctttcttattctc

SEQ ID NO: 5588 - DNA, 688 bp, Canis familiaris
  misc_feature (1)..(688): n = a or c or g or t
tnnagaaagtttgncgtgagtccatctaacttcagcagcagcgnnnntcaggatgaagagggacgaaaagnnnnccagctnnactacaatttcccctggggaaannagncaatagagaccctatggaatctaggagaccatgaacttttacacatgtatcctggaaatgagtctcaattacacggccgagatggacggaaaaatgtagttccatatgttttatctattaatggcaatctagaccgaggtgtgctggcttacctctatgattctttccagctaacggagaactcctttacaagaaagaagaatcttcatagaaaggtacttaaacttcacccttgtttagcccctgttaaggttgctttggatgtgggaagaggcccaacagtggaactaagacaggtttgtcaagggttatttaatgaattactagaaaatggtatttctgtgtggcctggttatatggaaactgtgcagtcctcattggaacaactttattcaaaatatgatgaaatgagtatcctgttcacagttttgattactgaaactactttggagaatgggttaatacatctgagaaatagagataccacaatgaaggaaatgatgcatatatccaaagtaaaaggctttttaatcaagtacatatcatcagctaagaatgtatagctttaaatatttgtgt

SEQ ID NO: 5589 - DNA, 692 bp, Canis familiaris
  misc_feature (1)..(692): n = a or c or g or t
aggnnnatacaatcctgctgatccagctgctggtgannnngggtgtcgtggctctctttaccttctgtgaccccgnnaangactacgtgcaggctaacccaggatggtactgggcgtnntacgctgtattcttngcgacctatctgaccctggcctgctgctctggacctaggaggcatttcccctggaacctgattctcctgaccattttcaccctgtccatggcctacctcactgggatgttgtccagctactacaacaccacgtctgtgctgctgtgcctgggcatcacggctctcgtctgcctctcagtcaccgtctttagcttccagaccaagtttgacttcacgtcctgccagggtgtgatcttcgtgctgctcatgactcttttcttcagcggactcatcctggccatcctcctacccttccaatatgtgccctggctccatgcagtgtatgccgtgctgggagcaggcgtgtttacgttgttcctggcatttgacacccagttgctgatgggtaaccgacgccactcactgagccctgaggagtatatttttggagccctcaacatttacctggacatcatctacatcttcaccttcttcctgcagctttttggcaccaaccgggattgaagagccttccttccttctttcctgctttccaagaatgtccccttgctggtcctc

SEQ ID NO: 5590 - DNA, 466 bp, Canis familiaris
  misc_feature (1)..(466): n = a or c or g or t
tcagaaatactnnnnnnatatttagtttgtaagcagatttctatattgtattacatttttgaaaatagatttggtaccattgtaaagtttagctgtcaaaaacagtcaccgttatgaatagttgataagagtctgcttttactaatgggtttaacttattcaagtttgagattctgtttatttttaagggcaggcagggcatatctttataatactctctgttaattttaaaattcactttattcatgtgatatttatagtaccagaatggttatctcctatcgatgaaatcagacctttcagtggttgaaaagttggaagttatctgtgagtactcacattggtcaaaacccacaaaccatgcttcagatgacctcttgctctttgtctctcatgttcaaattatctgacatctaccaaaaacagtttaaaattattatgttttaacaacccaaagggtttggtt

SEQ ID NO: 5591 - DNA, 494 bp, Canis familiaris
  misc_feature (1)..(494): n = a or c or g or t
atcagtactcactaggtcagccacacagcactctaagatacaanntgagggggctccagaatccggctcctcctctctttcagttgaccaccttaaccctagtccagggccctatacctgttcacctggagtcttacaatggcctccccagggctgccccagctcccagtcttcccattcccctttgctcagaggccagagccgagctctgccaagtgcggcttcggacaagttcactgcctgttctcaagcctacacctcgctgtggttgacagaataaaggcctccttaccatggtgtttagaccctccatgatctgaccccctttccaggccggttttccctcttcctctccctcgtgtgctttataccttgtgccagagagtatcctaaacatcagtcactggagtagcccctttgtgatttttgccagagccacgagccacctgaatgtttgactcaatactgtctctttaaatggactttttttcctt

SEQ ID NO: 5592 - DNA, 575 bp, Canis familiaris
  misc_feature (1)..(575): n = a or c or g or t
ccttggcacacccaaggattagggtattgttgccatacccccagtnactnngtcctctcttcaccaccaaaccagagcaggtgttgcagactggagggccacagcaggtggaaggaaagactttccagctggagatgccctttccagcggtgtatgattatcagttatccccttgcctggctctgcctgaggcttagcggtgcatgaccccctaggtgaccccacagctgccacccacccacaacacctatcctgcctaataggaagaggcaaagtgtcagccctccgtgctgggcacctgagaccaaaatcagccaacagtgagtttcgagcaagcactgtcatatcagtcttcttgcccagctggccactggcccaagggggccagcctggctagtcttcctttcattaccctcaggccacggggctcaggctactgctattgcattacatccatccctttgccaaatcccaaaggagcctgtcaccactctcctcactagtccctgctctgttctcttaagattttcttcaggttaaaaaataaaaataaaannnnngattttgaaataaag

SEQ ID NO: 5593 - DNA, 497 bp, Canis familiaris
  misc_feature (1)..(497): n = a or c or g or t
gcagggggcatctgtgggattcttctcttcatttccaccactaccaccttggtcnaagctgtcatcacttctcacctggacaagtacaaaaagccttccagccgttttccgtgcttccactcttgctcctctacaatccatcctgcacacaaaagtcagaatcaaaaatcaaagttaatcatatcattctcttgacttgtggcttgccattgcttttaagctaaaagtaaatcattatcatggctataaagtcttgcatggtctgaaccacatcctgtgccaggtcccctttcactctatatgccaatcaagccgaccttcagcgtttcagcacattgggtcttcccgccaccgggcccttgcacatgcttttcctgctctgttatatgattttctttttcttcttctcctcttcccgaagctaactctgactcatccttcagaacgcatcttaatgattacttcctcctggaagacttctctgattttcataacta

SEQ ID NO: 5594 - DNA, 514 bp, Canis familiaris
  misc_feature (1)..(514): n = a or c or g or t
gtcgaggncatcannnanncnctgatggcacatnnacnnnnnaacagggtgtcagtgatgagctatagtgccaaatttgcatcctgtttctatggacctttccggnacgcagcgcagtccagcccggcttttggagaccgccgctgctaccagctgccaccgggagcgcggggcctggccctccgagcagtggcccgggacgtacgggaaggagccgacatgctcatggtgaagccgggaatgccctacctggacgttgtgcgggaggtcaaggacaagcaccctgagctccctcttgccgtgtaccacgtttccggagagtttgccatgctgtggcacggagcccgggccggggcgtttgatctcaaggctgctgttctggaggccatgaccgccttccgccgcgcaggtgccgacatcatcatcacctactacacacctcagctattgcagtggctgaaggaggagtgatggagaccgagcacaagaccaacagctagaacttttaaaaggt

SEQ ID NO: 5595 - DNA, 529 bp, Canis familiaris
  misc_feature (1)..(529): n = a or c or g or t
agcccatgtgcactatnntattgactactctttctgatatctgtgcccagtnnnnnactggcagggacttctnntaaggagcctggctgcaaagcctgaatgactaccctgattcntagctcctggccccatgtccccttctcttccctctccagttcccaccccagttacgggttagaattagactagagcagagtgtgggtgtttccatgctcttggctggtggtaccctaccagccttgtggctttgggcagcaactgggctgcccctaccctcaggaggaacataggtgggttcccagctgttgtttcccaaccgctggtcttaaggccagcttctcaaatgtagggcaaccccacccctattgtacccttaactgttgactgccctggctgcccaagcccagctcttcttttcctgggttagtttggttatattgactcaacatcttttgaatagctttcagttagagttgttaactaaaattatttcagtggttgttaggtctttggtgtctcagagagagtc

SEQ ID NO: 5596 - DNA, 623 bp, Canis familiaris
  misc_feature (1)..(623): n = a or c or g or t
attgttnnngagtcatnnaatgtcccttatacaaaatnnnnnnntgctttccatatggaaaaagnnaacannnnnactgtgtatagtaaaagattttatcatgtatctatctaagcactatcccatggccagcaagtcattttttaaataacttgcagagattttccaaagtattaggttcagctattccctggttacttttagtgtcattgtggtatgtgatgtgatagtgtttatagaattactgatttctcatattttcaaaggaagcttggaaattgatcactctgaatttgtcactctaaataaaagtgctaaaatttgaccagctcatcagcttaagacataaaacagcaacttgaaggagaaatgaagagtttacacataatgggttaaatttttgttgttgtaatagtagatttagtcttaacataatatttctaaaggaaaaatcagatgtatttgttgtcatgtctgattactttgttaaaagcgaaagtggtcatgtgatgtactgaatattaattgctgtttttaaatgtttaaatcatgccaaacaaatcatgtctgtgccatccagggtttattgtaatcttttactgagtacttggactgggataaag

SEQ ID NO: 5597 - DNA, 672 bp, Canis familiaris
  misc_feature (1)..(672): n = a or c or g or t
aagatgcannngcagaagaatgaannctgccaagtatatggctncntagaagtcnncaaggtngctggaaacttccactttgctcccggnnngagcttccagcagtctcacgtgcacgtccatgattngcagagcttcggnntcgacaacatcaacatgacccactatatccggcacctgtcatttggggaggactacccaggcattgtgaaccccctggaccgtaccaacgtcaccgcaccccaagcctccatgatgttccagtactttgtgaaggtggtgcccacggtgtacatgaaggtagatggagaggtgctgaggacaaatcagttctctgtgaccagacatgagaaggtcgccaatgggctgatgggtgaccaggggcttcctggagtctttgtgctctatgagctgtcacccatgatggtgaagctgacagagaagcacaggtccttcacacacttcctgacgggcgtgtgcgccatcgtcgggggcatgttcacagtggctggactcatcgattcgctcatctaccactcagctcgagccatccagaagaaaattgatctcgggaagacaacgtagttgtctccttccccctctgttgttgccttctcctgtttctctttggccctttggtcatttcccagcctcgtccccacgcacccccac

SEQ ID NO: 5598 - DNA, 392 bp, Canis familiaris
  misc_feature (1)..(392): n = a or c or g or t
cagtcttgtcattctgtnntgctcctgcccctgccgnntccagccctggnntgggtgatgttgactcannnntnngtggcaagacggggagcttttgctgnnnnnggggagagggaggaatgtttgtccggtcctcaccctgtaactaatcccagctgagaagctccacagggagaggcgctaagggagaacggccgcttctgagccacaaggcagcagatggaaggaaccagagaggcagctgggctttaacattggctggagagggccaggcctggctgtacagaacggccctgctggaataatggcttggagagaggacagcttacggggacagtgagactggttataaagaaagctaggggtacctgggtggctccatggttgagcat

SEQ ID NO: 5599 - DNA, 186 bp, Canis familiaris
  misc_feature (1)..(186): n = a or c or g or t
tccagccattnnnnccatactcagcatatagcagtnnnnngggaaannnnnnnnagnnnnnnnnntggccagtggcacagtgnncaatgcccatggattctacaaccccaaggactccaggtgcctctccagggcccagagannnaccattctcctttcagagactggaggatatggggtggtatg

SEQ ID NO: 5600 - DNA, 527 bp, Canis familiaris
  misc_feature (1)..(527): n = a or c or g or t
ctgcccggaactgcctggtgacagagaagnacgtcctgaagatcagcgactttggcatgtcccgggaagaagctgatggcatctatgcagcctcagggggcctcagacaagtccctgtgaagtggacagcaccgnaggctcttaactacggacgctactcctccgagagtgacgtgtggagctttggcatcttgctctgggaggccttcagcttaggagcctccccctaccccaacctcagcaatcagcagacccgggagtttgtggaaaaagggggccgcctgccctgcccagagctgtgccctgacgctgtgttcaggctcatggagcagtgctgggcctacgagcccgggcagcggcccagcttcnnnnnnnnntaccagnngctgcagagcatccggaggcggcatcggtgaggctgggcccccttctcaagctggaggcctctgtgggcaagattctggctgccactgttggatggctcctaacagtcccaggccctggacactggcatcagtgctgccggc

SEQ ID NO: 5601 - DNA, 603 bp, Canis familiaris
  misc_feature (1)..(603): n = a or c or g or t
attgagtatnctggtattgtcattcgctctgtgctgactgacaagcgggagaagtnctacgatgggaagggtattgggtgctacatgttccgtatggatgactttgacgtggtggatgccacgatgcatggcaacgctgcccgcttcatcaaccactcgtgtgagcccaactgcttctctcgggtcatccacgtggagggccagaagcacattgtcatctttgccctgcgccgcatcctgcgtggtgaggagctcacctatgactacaaattccccattgaggatgccagcaacaagctgccctgcaactgtggcgccaagcgctgccgtcggttccttaactgaagccgtggctgcccaccacatcccctgctgccatcttgcccctagtctgggggctccctagtccctcccagagcatctcacccccaccctcctgttcagggtggatgtgggcatgcaggtggcaaaggccctgcctccacccctccagcccacccagcaatcgcctccttcctgccctgggggcccaggatgtagatactgtacaaaggtttctaaatcccttcttttctatgcacttttttatttaagagggtgggt

SEQ ID NO: 5602 - DNA, 577 bp, Canis familiaris
  misc_feature (1)..(577): n = a or c or g or t
ctnntcttgangccaaaacagatttcccagccgctgtcagcccagaagtctnnagnnaantctctcgcttttcttggcccttggcagctgtccagcccagcggaagggctatgtgtcagagagggaagccgggctgtgaagagccgtgttgcttctgtggcatgggcagagggttagaaaagtgctcctaaaattgcacctggtaactgtcgcataaccagaggagtaccatgatcctgccccaccatccccaaaataaaaattgactcacacttgtccccacccttgcccccctccacacacttgggcgctaagagaggtcagtgtcatcctcccctcctttgatgggactttgcaaccctggagaggagctgctgccccttcagtcccaagagggtctctgaaggcttcctaccctgcagcctccagcggaggcccctctgtggtgcaggggcaccggggttgtgtgggaggcggtgcagcacagtgggcatggcaggagacgtggactctgcccctctgctctgctctggatcctggtttaaacaagttgtgttttcaagttgtgtgtcttggg

SEQ ID NO: 5603 - DNA, 548 bp, Canis familiaris
  misc_feature (1)..(548): n = a or c or g or t
agacgctgagnaggtngacacattcnntgcagatgagnannatagacaanctctacctgccaaagttttccatctccagcagctataatctggaagatgtccttccccagctgggcgtgagagaagtcttcaccaaccaggccgacctgtcgagagtcacagggcacaagaacctggcagtttcccagatagtccacaagaccctgctcgatgtgaccgagttgggcacagaagccgctgccgccacgggaagtaaatttgtttttttttccggaaagatcggcccactggtcactgttcgtttcaacagaccctttctgttttgcatacaccacaaagatacggagaacatcctcttctggggcaaggtcaccaaccccaatcaagcctaggcctccccccgcagaggtggggcccctttcagaggtctgtgcgtgcagcctggcctctctgcaccgaggagccacgtgccaggctctgccctgctcatcctttagaaggtgccagtgactacctggtggcttccagggagcctatgggctttttga

SEQ ID NO: 5604 - DNA, 350 bp, Canis familiaris
  misc_feature (1)..(350): n = a or c or g or t
tcnnttgtcttaaaattgtatgtattaaannnaaaaaaattgtgtgtattaagtaatgtatttattctcccaacattaccaaaatatatnnnnaatatttgtagaaaatcgggttnntnnnaaacatttagccnnnnacatttnnnngtaaaagctaactctgtcatctagcttgttggatttgnnnnnaaagaaaatgcattgttnntttagaaagaattttaaaggtttttaaatttgtgagaactggaaggactttttagtaccctgtatattctccaaaaaaacaagattcaggtctttatagccatatgctctgcnntttaacaagattacattgattacatttc

SEQ ID NO: 5605 - DNA, 569 bp, Canis familiaris
  misc_feature (1)..(569): n = a or c or g or t
agaaagaaggtgcnntccngatgacccagaatcnggcccttcaactgctnnatgatctgcgttatctcaacattgttctgacagccaggactgaggaggtgaaaagtngccgcagcaaacaggactccagaattgagaaagtggctgactatctggaggcactcattgacccgtttgacctggatgttttcacaccacacctcaacagcaaccttaatcgcctagtgcaacgaacttctgtcctatttggattggtcactgggacagagaatcatttcactcccaggagctgcacattcaactcccaagaaccccataatatactgcccctggcgtcgagtcagatcaggtttggacttcttccactgagcatgacaagtacccgaaaggccaaatcaaccagcagaagtatggaaacaaaagcccaggttgtccccccggcactctcccgagcaggtgacccaacgcatcctggctccttgttcagacagctggtcagtgaggaagaagacgcatctacgccttcattattcaagctaggttggctctctagtatgactaaataacat

SEQ ID NO: 5606 - DNA, 562 bp, Canis familiaris
  misc_feature (1)..(562): n = a or c or g or t
caaccccatcagnngacntggtggcacaaagtacatctcctttgaggaacggcagtggcataatgattgttttaattgtaagaagtgctccctctccctggtggggcgaggcttcctcacagaaagagatgacatcctgtgccctgactgtgggaaagacatctgaagcccacgcagctgcttgcaacacacatggatttatacactctcgttgtcaaccaggcagtattgtgtctggtctccaccgaccacattgagactttcttcttgtgcttctcagtgatactcacatttgtttaaacccttgaatcctttgtactagttcaatcccagggaaggaggaaacccttatgtaaaccctcagtgggaagatggttttgaatttttgtaatcaagcaaggcaaatccaagtgtaaaaatcccttttgaatgacatctttataaatgtatctttcttttgctgcgtatttaatttttaagtgcaattaacatgtcgcgaactcgagttttttaaactacatgagataatgaagaatgggcatttacaactatgtaacttcct

SEQ ID NO: 5607 - DNA, 548 bp, Canis familiaris
  misc_feature (1)..(548): n = a or c or g or t
ctggaagtcaagtacgacganntctaccactgccncgtctccaaagaccacgngaaggtgtacgtgcaggtgaccaagaaggccgtgaactccagcagcggcgtgtccatccccggcccttcccaccagaagccgatggtccacgtgaaatccgagggcctcgccgtcaagttatcacaagagataaactatgcaaagagcctttactatgaacagcagctcatgttgagactcagtgagaatcaagagcagttggagctggactcctgagaaaccccagctgccggagagacgctcccagacccggaccccggatcagtcaggacgacaggcccgagggctgggcctgaatcaggcaaaccaggataaggtttgggggataatatcaaggaacgaggggaggatacgaatggaaaccgtgttaatttgtgggtagggtgggggttactttagattatggggaagtaatttttaaaaggttttggttgaataacgttaaaaaaaaaagtgtactgagatgaatctaatttttagatcgccctgtattt

SEQ ID NO: 5608 - DNA, 690 bp, Canis familiaris
atgtaaatgaccccaaacttgacttctccttgaaagatgatgaaaaacataaccagttcatcctggaccttgctgtctataggtatatggacacctctttgatcaatgttgatgtgcagccaacttacgtgcgagtcacggtcaaaggaaagccattccagcttgtccttcctgcagaagtcaaacctgacagcagctctgctaagcgatctcagacaacagggcatttggtgatctgcatgcccaaggtagatggaataatcacaggttggcgaccaacctcaaagtctgggaagagtaccgtggacagccgcagagagcccacaaaccaaagaagcaagcaaattgagaaactagaagtagatcctagcaagcgttccatccctgatgtggctaacatagttcaagagaaaaaacacaggctccaaagagttcgagctgaacccaaaattataccaagtgaggaaaatcctgactttgaagataaccctgaagtgcctccattgatttgaaacatcaggctgcatcaacagactcaccagacccagtttttcctcagtgcagtgtgtgtgtataccacttatggggtaaacagagttatttatcaacgttactacttcagtatttcgacttctattttatacagtaatattcttaaactagctaaaacttcaaatgtataccttaaaa

SEQ ID NO: 5609 - DNA, 549 bp, Canis familiaris
  misc_feature (1)..(549): n = a or c or g or t
caatataatattttcannaatcatccttgctgtgtctatcagtagnncatggcttttcattgctgaatactcttctccatttgattcatgnnngtcacccntgtctcttaatgattcatcacctctnnaagggcaggggctgcattgtctgacaccctgatacttgatatgggcctaggcacatagacaanntttaggagtggtgtagcccattttcctggacccaaggcatgtgagtgaccactctgtacccacacccaacagtcaccccgacattaacagtcttcccctccatgtccacaggctgaccttctgggtcctgggggcccaaatacatctacttctcttcagaatcagtctgatgcttcccacagccatggggagaagtcctgggtcagccacagcgattaggaagcgaagccgggtgatcatgggctgatcctttcaacactgtgaactttgatttcctcaactgttaaatagagacactgctgtctacctcatagggtcattaagtgggcacatatgtgtgaaagtgctgtttgaacg

SEQ ID NO: 5610 - DNA, 611 bp, Canis familiaris
  misc_feature (1)..(611): n = a or c or g or t
tctctacccctttctgttccaaattcatttttattccttcctgtctcnncaaaaactttatnnaatcaacaccancgtgctctgtgggaaaaaagaaaaaccttctgctcccnnngctctgctggaagctggagggtgctaggcccctgtgtagtagtgcatagaattctagcttttttcctcctttctctgtatattgggctcagagattacactgtgtctctatgtgaatatggacagttagcatttaccaacatgtacctgtctactttctcttgtttaaaaaaagaaaaaaaacttaaaaaaatggggttatagaaggtcagcaaagggtgggtttgagatgtttgggtgggttaagtgggcattttgacaacatggcttctcctttggcatgtttaattgtgatgtttaacggacatccttgcagtttaagatgacacttttaaaataaaactctcctaatgatgacttgagccctgccactcgatgggagaatcagcagaacctgtaggatcttatttggaattgacattctctattgtaattttgttcctgtttatttttaaatttctttttgtttcannnnnaggaaagatgctcagttttaa

SEQ ID NO: 5611 - DNA, 588 bp, Canis familiaris
  misc_feature (1)..(588): n = a or c or g or t
tgctccccactgatgggatttcntaggggccatgtgacccttcttgccctgccaggggccagacaccagtttgccagtaaagtaacacatctgttccaaagactggctccaggtccctggctgccgggactgtgccgtccaccacttggtctaccttaacctgtggccaaacctacaggtcacaccagtcagaagaatgaccagagcccgggtcctgggctctgatcacccattcatccactccctgtgcctcagggctggagtcagcatttgtgccttacaaatggcttttgtgcctttttgcttcagactcaaaatttcctttgctttccaggctctttccgtttttccaaggaaaggaaaactgagggcccttgcctggtagctccaggacctggccctgcacgcatccaaagaccccatgtgcccagctttttgggggctctgggcacctcctcccttcccccaaggccaggactgtggctggtgtatctggctgcctcttttctgactcatttatttaaaatttgtactttctgatggaatccttgtgaaggctttgtttnnnnnnattgcgagaatttttaa

SEQ ID NO: 5612 - DNA, 537 bp, Canis familiaris
  misc_feature (1)..(537): n = a or c or g or t
gccgtggcacannaaggccaatgtcgggtagatgacaaagtgaattttcattttattctgtttaacaacgtggatggccatctctatgaacttgatggacgaatgccttttccagtaaaccatggcaccagttcagaggactccttgctgcaggatgccgccaaggtctgcagagaattcactgagcgtgagcaaggggaggtccgcttttctgctgtggcactctgcaaggcagcctaatgccctgggggagggacatagcttttgtcccccctcttcccttctatgtgaaacctacccccctcctccccactaatgcagtctaaaatgcttcagtacttgtggaacacagctgttctcctttggttctgcagatatgctcttaccctgagccacacccaagcactagcagagctcagctgtcgatcgaacaaagtttggtataagcttcagatggagaagcattttcctcccaacgtatgtattgtacctcaatagctaatgctttaaatggctcctttggtttgcgtctgtaag

SEQ ID NO: 5613 - DNA, 660 bp, Canis familiaris
  misc_feature (1)..(660): n = a or c or g or t
cccaatgtanngccctgcacacacacacgcacatgcacgcacannnngacagagatgcatgcttatatgtggcagtttgcaaagggcttcgttgagatcttcgtgttcacatcatgacgtgcagaagccctgatgttctaggtgcgtacacttccctccgctgaagaagaattaggacaccttcatcagcttccagtgacacggcaggctcatgcaaatctgttaggacagtcgtgcggagaatggcatgctcgtgaggatgcacatctcatcatcagtagtgatgttcagaggtgcagcatgttgtccaagccaggttcacacacatcagtccccatcgaggggtatgctggcatcacacctggatggtgtgccatcacatatcaccagatttaggggaagggctggggtggaagtatcagtcatccatcatgggtctttgtcacttggaagctcagaaacactgctggcagtctgggcggtgggcccctgagccttcgtcccttgtgttaaggactccatccctccccggacactatccctccattagctcctacttccctccattgcccacgaggtttcaagcttcattctcaagatccaatggggagcatggtctctggctctttttgcatttannnnntttttcctgtttttcat

SEQ ID NO: 5614 - DNA, 590 bp, Canis familiaris
  misc_feature (1)..(590): n = a or c or g or t
actggagctggccaccagtgctgtgtgctgatggttggcgagaggactggggcaagggggccaagcttgcttggccatctgaggtgggggaggtgtggctctccggctgcagatgggggacagatggccttggtggccaggcacttgggcagtcgtcaggcctctgggctccagcccacttctggtggtgcaggtctgtagtggggttgctcccagttacctacttgtggaaaatcatgaagtcggtcctcaggcctgggctcccgtccgctgggatctgggaggaaaagtaggtattgaggtggcccagctatgagaacaccagaggctggtaagtaactccttgcacatttttacttgtttctgccttggtaaccctctcttcaagtgaggaaaaccaagacgtctccatttacagttttccctgttttccgcagtgaaacagcaaagtatctcccctagtgattcagtaggacatttaaggagccgtcgtcatgtgtttcatttgtgtgacagaattcactgtttagcctcaaagctttgtttcagtttctcttcttacnnnnnctctcttctcaatatggtctccg

SEQ ID NO: 5615 - DNA, 509 bp, Canis familiaris
ctctacaggcccagaagtctggttcaggaggggacactcaggctgcggaggacctgctgctgctgagcaaacctctgacagacctcatcagcctgctcattcctctgcttccaagtgaggatcctgaaatttttgaagtgtcgtccaagtgtttgtccatactggttcagctgtatggaggggaaaacccagacagtctgtctcctgaaaatgcagagaacttcgctgatttactaacatctaaggaggacccaaaagagcagaagcttctgttgaagattctcagaagaatggtcacatccaatgagaagcacctggagagtctcaaggatgcaggcagcctcctgcgggctctggagtggcttgccccggctggaggttcgtctgctgacagtgtggtggcttccctggccctggaaatcctgcaagctgttggacactaggcaagaaggcacttagcacaagcctgctctgcagtaagccctcggctacacggggtcaccacatac

SEQ ID NO: 5616 - DNA, 547 bp, Canis familiaris
  misc_feature (1)..(547): n = a or c or g or t
caacacttcccnnnagggcgctgctgccacccgccccagccagccgnntgctcccctgacagccagcagctgtatatttgacaaagtcnnnngtatatttttacttactggattttccttgcactttacctgttcttttcccagggccgacagcacggggctccggggcagtgtgcctggcttggcttcccttccccgctgccaggagccgtggcaggactcgcccattcttatttattttgtcttttgactttccagtagttgaggggaaggctgatgtcaggagagggataaggggaccgaggggggtggtgccttaggccctggtggtcagggaggaggggagcatgtgagggatgaaagtgacctcctggcaccaggttcacccacccttggccccctgcccccagcactgaagcccagcactgccccgaggccccctccactcctcctgcagcttggttcataccacacagactctgcttggaccctcctgtacgtctgcctcccatctgccctcctacccgnnnnntatcccctcgggcca

SEQ ID NO: 5617 - DNA, 597 bp, Canis familiaris
  misc_feature (1)..(597): n = a or c or g or t
ctgagcctggcgtgcaacgcgctgggggacgagggcgcgcagctgctgtgcgnnngnctgctggagcccggcagccggctgcagtccctgtgggtgaagtcctgcaacttnncggccgcatgctgccaccacttcggcacgatgctgacccagaacaagcgcctggtggagctgcagctgagcaacaacaagctgggggactccggcgtccgggagctgtgccaggcgctgggccagtcggggaccgcgctgcaggtgctctgcctgggggactgcgacgtggccaacgatggctgcgccagcctggcctcgctcctgctggccaaccgcagcctgcgggagctggacctcagcaacaaccgaatgaacgaccagggtatccggcggctcatggagagtgtggagcagccaggctgcgcgctggagcagctggtcctctacgacatctactggtcccaggacattgaggacagcctgcgggccctggaggaacggaagcccagcctgaagatcatctcctgagcagcccccccactctgccccccccacgtcctggcttggagtacacagaaatgctctaatcaactcagttctgca

SEQ ID NO: 5618 - DNA, 544 bp, Canis familiaris
  misc_feature (1)..(544): n = a or c or g or t
gcccagagctcctcgcctgagtgagttcccccatcagnngccagcagcagaagccagggcgctgggctcgggcggaggtctgtccgcaccaggagccttgggagggctctggttggactctggttgggtcctggttgggcccccgcaggctctggaagcctcctctggaggaaggaactggtggtttaggcccttggtctgggggtcagtggagctgggcggccgagtccaggccactccccgtgctggctctgcacccgcctcagctcgccctgcaaccctctcccgaccgggccgggggttcaggccagaacagcctcctgtgccatctcagcccagctcagcctcggattcaccgccacgaaccacacagcatttcccccgctgctccctggggggcctcgggccttcctgtaaggcagcccctggaggaaaccatgggctcccacccggcagcgaagtcgtggcacaaaccaggccccacaccccgctggccacacttgagagcctgatatgtttgcagttggtgtgcctttagatatta

SEQ ID NO: 5619 - DNA, 723 bp, Canis familiaris
  misc_feature (1)..(723): n = a or c or g or t
agactaacttccttctctccttgcacttctccccacttgccatcttnnnnnnagtctttcacaaggatcctctgaaaccccctctgtgccccaagcacagaccccattacttctgcttttgcatctcctcaggcaaaagtggagggtgcctctctggaccctcctcataggttgtttcttcatctacgaaccaaacccaaatttgctccggtgccagaaaaacagctccatttgaacaaagggtatccatgcaaaccgtactgtaaactggtttaaaatgtgggggcaaggaggaggatgcatttcaaaagcctgatgacatccgagccaaattaggggaagtttccccatccaaaaattggttaccagttatcagagtatctgatgcaggcactcatggctcctgagaattcctcagctggggtaatggggtcatactatgaatccctcactacaaaatgacttgagtccagcgaaatctcattagggttaagaatattttcagggatccttaatactttgatttttgttttctgaaattggattttattttattttatcttataatttcagttcatctaaattttgtgttctgtacatgtgatgtttgactgtaccattgactgttatggaagttcagcgttgtacgtctctctctacactgtggtgcacttaacttgtggattttttatactaaaaatgtagaataaagactattttgaa

SEQ ID NO: 5620 - DNA, 715 bp, Canis familiaris
  misc_feature (1)..(715): n = a or c or g or t
gttgatttcntattttgcaaaaacaaannnnnagagagataacgggacatttggaatctgatttttgaagaaatttagctggtaatgaaccatgaggaattctagtatgactctgctcattttttctttggagttccagtaggttaattctgccatttttgtttgttattctctgccccatgcttttttttcttctaaatgtggaaacttaaaggatgaattagattctaagtactttgcagttaatgtatgactatgcaagtttccattggccttctaaccacctgataagcaatagagttcttcagaaataacaaacacattggaaaggaatttttaaattacagagtattgtttaaaaagaggcaacaaactcaaaattgagtcacttgtgctaagcccatgtcaccaaaccaagactgattgcagtttcagtctctcccaagagtggaatcttaagccagtcagtctcgaatgatctggtcagcactagtggaataatccccaggagacaccctcccaaacccatgacccctcaaaggaaggtgattttgcctgtaacaatcagctctgctaaaataatttccttgtcccacctctttctgcccatagaagttttccattttgtacagctctttggaacttctttctctttgccagataggatattgcccgatctatgaattgttgaataaaactgataagatctnnnnnn

SEQ ID NO: 5621 - DNA, 518 bp, Canis familiaris
  misc_feature (1)..(518): n = a or c or g or t
catnnggtggcatatgtattaaaannagtggcatgaagtagntgnnaatgtgattaaatttcacctgtgaagttgtgtaaannnncagaatattttttgagaaaaagtgtcatcaaaaattaatttgatgctataaattttaacattgaataaaatgcagaagaaacaattatcacaattttttttcatatagtagttatatttatctatttattttagatttcctttcctggatgaaaatgtcgtctcctttctaaattccctaccagtttggaaaaaggcagacttgactttaccccgtggaattggtgaaaaactgattttgcgtcttgcagcagtggaacttggcttaacaacttgtgctcttctgccaaaacgggccatgcagtttggatccagaattgcaaaaatggaaaagaataatgaaaaggcatctgataaatgtggaaggctccaggtcatttccttagaagacctctctattgaaaaggagattgaagtgtaatatttcacgacgt

SEQ ID NO: 5622 - DNA, 597 bp, Canis familiaris
  misc_feature (1)..(597): n = a or c or g or t
ctganctttcatattcatgttaaagaaagatgcagtattccatttcctggtatgttacttgtgtctagagttctaacaatacaaaagcccataccacttccaacagcgaacagttctgttcgctctctgaacagaacttttggattacttttttccagggcttaccccagaaaatacagatagtaaagtttccttcgatttgcttttcaaatagtgcttgaataacaaaccttctttgttggtgactagtcttttttggtatctccccatcattaaacattgttcaaatttttaacctggttttactgtgttccactatgtctcccattttctctcaaaattagtttgatctcactgtagggaaaaaaaaaaaaacggtttccatagcttcatccatcagaggaaataaaactcttactaaagaatagtgtactgcatctttaagcagtagaaggtaaactacctgcaaatgtgaatttcttagtttcattaagaagtatagttgttaacctttcgtgtgccaaaaattctaagttacattttccttcaaagcaatgtacttttttctacatatgcagtatgtatagttagcataaa

SEQ ID NO: 5623 - DNA, 541 bp, Canis familiaris
  misc_feature (1)..(541): n = a or c or g or t
gcnnngnngtgannaacaganngnnnctgagctaggcttgtgcccaaccnnncnggatccttatcacactaaccccttttnngttttttggagggatgttctnnnagtgggtggcntngtgtctccaccttctgcctacctctactttcccagagtcagggaccctatttaatcccctttgactgctccttatcttgtgctggtgtatagggtgtgtggatgcgcgtgtgcacacgtgcacacacacacacaccagtctgccttagaggccaggaagacctgacaaatggtgagagaagctcccctgtaggggaggagggctggcccccttccttcacttaccccagatcctacctgagagcaactttttggctgttcaggagtctctcataaggacttgagaccactcacacaatcctcatgggcccaacccttattccaaacctccttcccttctatcccaggctgtccttcctgtggcaggaggggagggtgccaggatgtgccttgtcagttcacgttcagaccttttactacaaga

SEQ ID NO: 5624 - DNA, 472 bp, Canis familiaris
  misc_feature (1)..(472): n = a or c or g or t
caaatcagtannnnnnagctcttcactannanctgcaggcannagctgtgtgttctgannncntcaannnnnctgtgccccctgacgtgtatacagaccaggtaataaaacgaatgataaaatgttgttctttgctgaattgccacacacaggtggcaattttatgtcagttcctcagagagattgactacaagacagcctttaaatcattgcaggaacaaaatagtcacgatgctatggactcctactatgactacatatgggatgtcaccattttggaatacttgacttatcttcatcataaaagaggagaaacagataaaagacaaattgcaatcaaagccatcgggcagaccgaactgaacgcaagcaacccagaagaagtgnnnagnnnnnncgcagagaaggaaaaagaagtttctccaagcaatggcaaaactttacttttaagcannnngttaaaatttttaac

SEQ ID NO: 5625 - DNA, 658 bp, Canis familiaris
  misc_feature (1)..(658): n = a or c or g or t
ctgccaactgtcagctgcagcatcatnngtgagcaaacacgcatcngncgannnctgcntgtgggcttgggnactgcctcatctgataagattcaagcccgtggttcctcagtttcccacaagccctcactgntagnntcctgggaaccttctggatttccactcacacctcctgtgacagctcctagcctctctctgccgcctgcctgatgcaaagccgtctgtcttagacctgggggtggctgggatcacggagtcttcctcttcacgcgcatgtctctggcctgggcagggtgatggcaatagcatggagctgaccggagtcgggacgcttccacatgtgctctgctgaccatgtggcggctgcaaggtgtccctgctccttgtcgtcgagccacggctggcaggtttcccacagctgaggcaactccacggtctctgtgactcagctccgaagtgacacagcctcacctctggggtgctctgctgcgggccacggggtcacaggcccacccagggggtctggcgggccccccgcgatgaagagccgtcggcggtacaggaagtgtgtgtggggggcaccgtcccggtcaactttggaacataaggtagcatcgggcggcaggatgacgtacnnnnnntatatctcgtctacccc

SEQ ID NO: 5626 - DNA, 580 bp, Canis familiaris
  misc_feature (1)..(580): n = a or c or g or t
taaagagatgctgactctnngcgagtaccatgagcgcgtacgctcccaggggcagcaactgcagcagctccaggccgagttggataaactgcacaaggaagtgtccagcgttcgcgcagccaacagcgaggggcctccatcgaccttgagaagacatcacacgattatgaggatgcgaacactgcctatttctggaatcgcttcagcttctggaattacgcacggccgccaaccgttatcctggagggcctccaggttgatgacgagactgaagttttcttggggaaattcaccttcaatgtggagaaatcggagattcagactttccatctacaggtgtgtgtctctgggggtgagggtgccaaaagaatgggacagcaaaggaagactggggagaaaggcagcccttgggacagcaggccttggcatgatccatttgtctccctagaatgatcccccagctgcctttcccaaggtgaagatccagattctaagcaactggggccaccctcgtttcacatgcttgtatcgggtccgagcccatggcatgcgaacttcggagggggcaggggacaatgcc

SEQ ID NO: 5627 - DNA, 434 bp, Canis familiaris
  misc_feature (1)..(434): n = a or c or g or t
tatnnttagagtaaaattttgtgcttgatnnnnnttatttttnnnacattagaaatangatgccacacagggaattacattccagagttaaacgagtggaaaggatacagaccattaaagaatagcaggttatcgttcatacttgtaaagcaccttaaatcacagaaaataaagaacagtgccttaaaaagacagacggaaaggtagactgtgacttcagatgtttgtgatttattctttcacaggaggaaaggtgaaggttggtttgatgatgtaactgttgacgagctgtagtagacctgcttttagataccgtactgttagtatttaattgaaattttactattttatttcagacctaagcaagttaagctaaaggatgttctacaaagttgaaagccttcatatagtgaacttcnnnnnnatttttctta

SEQ ID NO: 5628 - DNA, 533 bp, Canis familiaris
  misc_feature (1)..(524): n = a or c or g or t
cnacgagatacaaaaagtaagaatgagttcaaagaatcctcaaaacatgtcaccatctcaaatgtaacactgactttccaaggtgaacgatgttttcgtactaccttgacagaagaagaaagtgagacaagttcatccaaagggttgagtgctagaacctctgaaataaagataactgattttaaaaacacagctctcaagtttgaagaatccagaatgagcaagaaagagagaacatgagcggggaggagcagcagagggagagggagaagcagactctccaccgagcagggagcccaatgtgggggtgatcccaggaccctgagccaaaggcagacacttaaccgactgagccacccaggagcatgagaactgattcagtcacttcaggggaatggctgtgaggaaagcaaagtaaacagaaaaagaagaggccaatggaaaaaacatataagacaacctaaagataaatacaaactactaaactnnnacacaagcatggctcaagaaataacaaccaacacaagggaaaa

SEQ ID NO: 5629 - DNA, 538 bp, Canis familiaris
  misc_feature (1)..(538): n = a or c or g or t
gctctnnnnnattttnntgtacatgggggtcacgtcnntgtnnggtatccagctctcccagcgnctgttgnnnntcctcatgcnggcaaaacaccatcccgagcaaccctatgtgaccaaggtgaagacgtggcggatgcacctgttcacctgcatccagctgagctgcatcgcactgctctgggtggtcaagtccacggcggcctcactcgcctttcccttcctgctgctgctcacggtgcccctgaggcgctgccttctgccccggctcttccaggacagggagctgcaggcgctggactccgaggatgccgagcccaacttcgacgaggacggccaggatgagtacaacgagctacacatgcccgtgtgaccccccactggggtgcccctcagagaccctgacaccttagtgatccacacccgggcccggggccggcgggcccctcatgacccagagacgtgcgggaaccactaacgccgcggcccgcggactctgcccagggccctgaccttggcgcgcccgggccctcgcaca

SEQ ID NO: 5630 - DNA, 498 bp, Canis familiaris
  misc_feature (1)..(498): n = a or c or g or t
tgcccctagnngccacgatggctttccgcatagacatggcacgcctattnnagncaagccattcctnnnnnttccgcccacggaggtcccctgatgcacagaggagctggggaggggctttcctttgggggtgggcggctggcgagatgagggacgggcctggctttcttgtacagtgtatattggaatttatttaatgtgagtgtggtctgggctgacagncgtgtgcccccctgaggggggacctgggacacagtccaagaacaagctattgggagtccgggcacaggacgctgtgttgtcaacacgccaagcgtcggggagaaggggagagacgaggccaaaacaggacttggaccacaatctactctcttccccgtgccctttctctctctctccttgaccttgccccttccttctctccctcttttcttacttctcctcttctccgccctcctttcccacctgcctcactcctccctcccttgtgtttgtgca

SEQ ID NO: 5631 - DNA, 652 bp, Canis familiaris
  misc_feature (1)..(652): n = a or c or g or t
gcaggatttgacatnaccnantaggatcatccactcttnctgantcaaagatactggcatnnaattngnnnngaataannnnntatnacantaagtattttaataacagagatttactcttctgaaaaaaaataaaagtatctaactgctctccctttaactaagtgaggtacgctggcttttattttcttgaccaaagaaggagtttatttaagatttcctgaaataccctgcttttactctatttttaaaaattgcaaagtaatattaaatgtgaacaaggccccatgccatcaatgttggccttatgtgtcatccacatcttgaaatgtcaaggaagcttctttgtaagccatacctccctcttcaccacacaccaaggaatccttcccagtactcattagacatttcttatattaatagtccaaatttaggatctatgtttaatttgtcacattaacaaaatgtcaaattttgaaatgtatccattatctcaaactgaaagttctttgtgctactaaatggaaaaggatatatttattttttaaacaatcccagaatattgtgtgtagactcttgttgtgctctattgaatgtttacctatcctacaaagcacaaatactgaattgtaaccctgtgataaagttatac

SEQ ID NO: 5632 - DNA, 580 bp, Canis familiaris
  misc_feature (1)..(571): n = a or c or g or t
gattaatgacgtagatatctttcagtggnntttaggagnnnnnacatacaggaattttcctgtggnnnnngcgagnnggtcaatgctgcataatgaaaggccctacttatgtaatttcttaggaacggtttatgaaaattcatccagacaagcactaatgaacattttgaaacaagatgggaatgataagctctgttgggtttcagtaagagaacagtggcagcctcaggaaacaaatgaaagccttaagaattatcaagatgctttgctccagagtgatctcacattgtgcccggtaggagtaaacacagaatgttatagaatatatgaggcttgctcctatggctctgttcctgttgtagaagatataatgacagctggcaactgtggaaatacgtctgtttaccgtaatgctcctctgcagttactcaagtccatggacgctccctttatctttattaagaactggaatgaacttcctgctgttttagaaaaagagaaaactctaattttacaagaaaagattcaaagaagaaaaatgttacttcactggtatcaacatttcaaaacagagctaaaa

SEQ ID NO: 5633 - DNA, 648 bp, Canis familiaris
  misc_feature (1)..(648): n = a or c or g or t
tttatgggtgtnncaaaagctnnatgttgtaaatgttcctgncttcagctatnactaaaacattccagtaaacctatttttgactgtataagggaatgtgtagtaattttttggcatatggattatggaaatggaaaaatctaaacaatatgaaaagcatagtgtggtaccataaaactggagataataaaattattggagaacattactggagtgtttgaaaataaacagcatggtccagtctatttccagttagcttccaataagaagggacctaatgtgagtaaatgaaatccacaggtaacttatcctctaattttattttgataccttccctctttagcttcaactatccctctcccagaagtgctaaaagtagcaaaatcatctgtttggaatttgctatttttgtattccctgatcatccctgagaggtgcatgttgtacaatcaggtgtcaaattagccaacagtaataagtataaaaagtcaggagataatcatccatcagtcagtaaccaaatagctagagtggccattaacctaagtctatttttacagcaataaaatatattgttaactttaaaatgtgccaacctccttgtgttgtttaaacaagtcaaagcaaaaatacatagtgctcaaatgt

SEQ ID NO: 5634 - DNA, 610 bp, Canis familiaris
  misc_feature (1)..(610): n = a or c or g or t
tcttactcagttctgacaaagcttcctgcgtaaatagtgataagtatnnnnnnnntatggtatacattnnnnnctccaaacatcaagtcaaatnnnnnnnnnnannnnngaaaggtgagagattncttcagactgacntatataccnnnnnctctcccaacctcagacagtgggcatttctgcatggatggatacagttgtgggtagaagctgtacctgtctccataggaaaactgaaaaagcttagacccaagaaagaccttggagttaaccaaacaatttattatggacatagatgatgttgaacaacaaaaagtttacaagtgctctgtggttgcactaatgtataatcactgccatataaaaggggaagtatactttaaaatatattttaatgtgatgtactaatatgcagcagcttattgtttttctatgaaattttagaatgtggagtttaatcaaaatttgttggtgatctacttttccattgcatctgtcaatctgtatgaattgagttgttaaatatatttaaaataatattatgtacttaaattcccaaatgtccgcattgggaccacttttgggaactctttgggttttcatgttttat

SEQ ID NO: 5635 - DNA, 559 bp, Canis familiaris
  misc_feature (1)..(559): n = a or c or g or t
ttaaggtctcnnnaagaaagtgccntaatgtccttgtgtgaaaagggggacctgtnnnnnnagggggcagacagtctggaaatctctgaaatgcaaataatcaactcaagattgcaattctcttgaagcctcaccagatagcagttaacttggataaaatcgaagaagtctttggaggggcaagagttggcagccaaacctgtgttgttatctgggttccacgtcttcccactgtgagacttgggcagttgcctctgagtctgctttcacttaggcaacatggggaaaacaatccttaactgtggtcgtaaagattgagtgagatgttgtactgaaatgcttttggtaaagacccatgttttttcctcctgcaggaatgagaaaaagtaaggggagatgatgggtgtcatctaagggaaaaaaaacaacagaactctacaccagaggctatgaaaaactaagcttactctaatcctttgtaacactcctgttgtagtcctgttgtagatcctagacattagctgatgaaaaggcccttcggcgccacctggacaagaac

SEQ ID NO: 5636 - DNA, 600 bp, Canis familiaris
  misc_feature (1)..(600): n = a or c or g or t
tgggtggtgcccatggatgccctcatgccctttgtggtgcccaacccgnagcaggaccccaagcccctgccgtatctccgccacagccagccctacacgttcgacatcaacctctctgtcaccctgaaaggagaaggaatgagccaggcagcgaccatatgcaagtccaattttaagtacatgtactggacgatgctccagcagctgacccatcacaccgtcaatggctgcaaccttcggccaggggacctgttggcttctggaaccatcagcgggccggagccagagagcttcggctccatgctagagctgtcgtggaggggaacgaaggccatcgagctggggaacggacagaccaggaggtttctgctggatggagatgaagtcgtcataacaggacactgccagggggacgggtaccgtgtcggcttcggccagtgtgctgggaaagtgctgcccgccctcccgccagcgtgaggtcgtcggcggtcccggacatcaggagctccgcgccccccgcctgcggcatcagcagcctcagcggcctctctgtggctgtgggcctggctcttcgttagtggtaaataaatccacggtgct

SEQ ID NO: 5637 - DNA, 569 bp, Canis familiaris
  misc_feature (1)..(569): n = a or c or g or t
agagaatcactgnnntagccccacacagtctcaccagnnnnnctggattcttctagacactnnaattggtgaaaactacagggagtggggggannagaaactgtgtcttgttttcctgacttcgggttttgtttctgtatcgtctcttctcagctatcatgtttccactgagatctcatagtgagttgccaaaattgaaatgcattaaccattgtctgcatctggaccagtcaagcagtggctgtagtttgaataagttatgtgtgcatgtaaaatatatacatatatacatatatacaagtatgtgcatggaaatgtatatcttcgtactttttgatacaatgtactcatttgttaatttttaattatatttgatataaatcaaaggtttgttgcaaaactttatatttaagaacagtgttaaaaaacccaaaaagaagtcccaaccatgcaacacaactgggacctgctttaaaacaatcctgtgattgacaagtttgctgcctgagtaatattgaacacccagactttggattctgctattgtttctacaatgacattttgtatga

SEQ ID NO: 5638 - DNA, 577 bp, Canis familiaris
  misc_feature (1)..(577): n = a or c or g or t
ttgatcttnnnanaatgtacgtatactctagaattttgtacatatgtttgctttttttttgtacagactatttagntgtcgagaaaatgggaatttcctaatttggtctctatctttcactttaaactaagctaacacacttttcaacagattatccgttacctatctcacagatcacaagcacgccttgattgtgtgattctataagagcatttatgcaaaaatttatgaatttaaaagatcttagcagccaaactgaaatgtactgattacagaggagtttcattagtaagaaggtaaagaaacatctttgagtagcctaccttgataactgtcaagttcacaaccagctttatattttaaaggctttggatttgaaattaagtcaactgcatgcagctttgctgataaatgaataattatctttgatgccatttatgagaaaagatttcaatatctgttgcctgtcatatttaagaaaaattactgtttctactctctgtatctgattttaaaaggaaaaatattcatacctggctttcaggtcatcgactttgaattcttacaagcgaaggtc

SEQ ID NO: 5639 - DNA, 555 bp, Canis familiaris
  misc_feature (1)..(555): n = a or c or g or t
cntaaagaactagaggtagaagagataaaatttggagaatnanntgaagtggcaaagnnnnnaatcagcagtttctgtccagaccttttcctgagcctacctgacatctactcaaatgtatcaaaggcatctcaagactgtgtccattaaggaaactatttctcctccaaaaacaaaagatacagaattttacataaaaatattttgttcacatcaattatttataaagattctaaaattgtaaactctaaatatttagcatcaggagaatggttgaattacattgcactaatctgttctgtcctccaaattattttaagacttaaggtcatgaaaaaatactcataataagtataaagagaaaaaataaaatggaacgtgaggtataatgccagttgtatatgtgcatattaaaaatattgaaagaaaaaaaaatatnnnagaaaatatttggtataagaaaatactctagaagaaaatagtaccagtcattatttttaggtggtaagagtagtggtaattttaatttttccannnnnnttttatcttttattt

SEQ ID NO: 5640 - DNA, 627 bp, Canis familiaris
  misc_feature (1)..(627): n = a or c or g or t
cnnagnaggctggnacgcagcacgtagatggtggctctggctcgaggctcttgtccgttcttagaaacattaactctctcctttcccagcagcgtctccgggtgtagaatcagagatgcagccatcacaaatgacattttaacctgtaaagttgtgtgaggatgcttataatttggaaatagagggatgagaatctggccccatttcaccagacatgaatttcgagtagagtagttggcttttcagagttggtgtcctgatgttgccggcccggcccacctgtccccgcatcactgattgtcactagcgggcagcagaagacgtttcgcgttgctgtgtcagccagggtcacgcagttcacgttggaaagctggttcagtaggtcccgagggcggccggtgagctgcggcggggggctcgtgcgcttcgcggcctggcacccggagtgcagcagacaatccgagtcagaagcagagccagcagccgccagtccgcggagcgggatggaatacggaagctttctcgagggcctttgtttttgttcttcttttcattgagactggaatcaagcttacgtgnnactattnnnnatttaagtttcctnnnnnnncattcagtgtaaaactg

SEQ ID NO: 5641 - DNA, 609 bp, Canis familiaris
  misc_feature (1)..(609): n = a or c or g or t
atanagtttacctagagttgttgagttggaatatgtttgttctggtatttccctaaattgccatcactcctgagaagtgacaatttagcatttttccttctctcagcanctcaaagaaactcaagctgtctttttcctttctattcccaactagtcttatcctgataggaatagtctgtacgagtgcagattttcatagttttttttttcccctcaaggttttaatactatatagtgttatgtatgaattgattcatcagctaaagtaacatgtctctggacttactgaatttcagtatccgtaagggttttgtgttatgatcaaagcaaaaagaaaatgctgtataaaaataccaaacttcagcaactgttaatactcagatcatatacctcttaacaaagagtatcttatgctaattagccctgctaaactatgtacagaggaaaatgttcaagtattggatttgaaaataattgcttatgtttaacagaactaatgatgtacttaaacaatgtattatgaaaaactaaattatattatacatcattgtaactatgtagaaaatatagacttatgtataatcaaaatgctaagaatttttatatggc

SEQ ID NO: 5642 - DNA, 707 bp, Canis familiaris
  misc_feature (1)..(707): n = a or c or g or t
acacataaatatgaaataaaactataatcatttctccaaagccnntcagatttaattgatcaactttaattttaccaannannatgcaaagcctgacaatgtcatttaaagcaacttttttattttagcactgaaaaaaaggcaataaaataccaataatgtcaggcatacttttattaaagtatattcaagttcaaaaagcaaacaaggattaaaattatagtatgcaaataatggtatgattcttctaagtctaatgttaaataaaagtaaatataacatgacagcagagttactgacttttaattgaaccaattatggagtaaaggtgtctatgtaagcaaatcataaatataacctaaaatgattataaagaactttattacaatgtatttacttattgcatagcatataatgtaagataatataaaaagatatacaaaagtctttaaaaacatttaaaaatgggcaaaactaaaatatagtactcgaagtccacataccagctacccaggtggactggggaagtaattgttaggtgtcagagtatgtggttctggagtcctggtaatgttctattcctcaagctaagtgacagttacacagatacattcactttgtaaaaattctttaagcctatatacttagaatttcaatggttttcattatgtatgctaaatgtcaatataaagtttannnnnaaaaan

SEQ ID NO: 5643 - DNA, 537 bp, Canis familiaris
  misc_feature (1)..(537): n = a or c or g or t
atgatcntgagcatggtgctctgctgcggcatcnnnaacagctccgtgtactgagcggccccggctgcanctgctgcggggagggccgctgggaaccctgcagggcccctagagtgaccggacatnnngaggaggggccgtcagcgcctgtgtatataacttctctggtattactctgctacacttattagcctttttacttctgaggttttctgtcctgaagtcccccgttaccttttggggctgaagtcacctagagacggcgtgtgagtgggccttggggaccgtgaggcaggggccgctctgcttctgcagctgcttgggggctccgcctgcttagtcaggcctctcccgggggccccggggcccacccacctgcccacgggctgcacggctcatgccttnnnnccctcgttcctgtcgccacttgtcccgagccgagtctgccagcagccttcaccttcagtgcacctgtcctctctaactcgtcaccttcagctgtaattannncttcaaagtcattnnnnnnngaaggaa

SEQ ID NO: 5644 - DNA, 472 bp, Canis familiaris
  misc_feature (1)..(472): n = a or c or g or t
ctgtgtacatgcannngtgcatgttaaagaaagagagaanaccatcaagatgagcanngactgggtatagaaaggtggactcctgtctatcttctcttctnactgcagttctttggaactgccttactgtgttgggcatagaagggagccatcagctaggaagctgacttgtgacagcttggatatgacttccaggagtcctctgagtatggcaagtcccattgttagcatggctcacacgtctaagaagtttgaagaagttagaaaacagaggattcaaacctgcgatgttgggagatttaagccccgcaaagttgggctgttccttccggcctcacaaaactgaggggagatggaggnagcagttagtgcagagagatgcaacagtgtctgaagtacttggtcctcacagaannnacactgtcacgtcctgaactccagggctggnnnnntgtacgcagatgtaggtgtt

SEQ ID NO: 5645 - DNA, 271 bp, Canis familiaris
  misc_feature (1)..(271): n = a or c or g or t
ggaggaggaggaagaagtcatcaaaggcaaagagagagactgtttgaagaatggcctcggggccaacaggcanctcattcccaatggtnnnnagggccattagcttgaatcccatgcagctcccagggcacagtgtgctatgagggctaccagaagccagagttgcttccccctccataactgtggcctacaggagccacagagaccccagattctgcccttccctctttttaactaccaccttctcccctcctaagatgtatttaacaaa

SEQ ID NO: 5646 - DNA, 628 bp, Canis familiaris
  misc_feature (1)..(628): n = a or c or g or t
ccganncattccttgaagagtttttatagtaaagttcatgaaatataatttgttgcaattaagatttttctctatatagtctaataattgcaagattttacattttgattattgtggagaaaatgacggaatttaagaaatacatggactttggaagttcaaaatttatcatttttgaagaagctaatttagaataggatttaaaaactaatttggactattcatcacattggtggatataatagttaaaataaattgctggatttgataaatacctaactaaaatattttttcagtcatacatagtctggtcataaaacaaatattttacaagatttccagtcatttcttccaaaacactgtaattgcatgctaacatttcatgaagtcatgtttctcttctgggaaatgtgtattttcatttaacctttggatttactaatactataatactattgtatattcatggtgtgaattcctttaaagatagtattgttcttggacctgtatccattttaccttgtatatgcttgactccagttcagcatccagtagttgttgaaaggatgagcaaaatacattatctatgtaacaaaacagtaagtatacagaaagtaaaatatgttaa

SEQ ID NO: 5647 - DNA, 599 bp, Canis familiaris
  misc_feature (1)..(599): n = a or c or g or t
gcagtgatagtggtnnnagcagcagcagcagcagcagcagcatcaacagcccggacagggcaggcgggccagagagcagctngaaccacacggctgctgggtccggccctcacacccctcagcctgttcccgagcagtccgcactgtgccaaggcccttacttccacatcaaccagaccctgaaggaggcccactttcatagcctacagcaccgaggacggcctccaacatgatgtgccggcagtttcttgccttctgtgaagggacagcgctgtgcagatttgatatttcaacttatgatgttttaaaaaattgcacaaaaatatgcctgttggcttttcagtctatatttgaaataacaggttaacaggcagttgtttacttgtggttttgctgcactattgcaatttcaaaggggctttgaagcaattttttataggattcttttgagggtgggtatcgaatccatgtcaaggtaatggtatgaggaaatctcatctgcgtgttgaatccatagtttgtccagttcagattgatttccaaatctgtcaattagaaattctactttatgtataaaaaggccttttaaaaatgcggga

SEQ ID NO: 5648 - DNA, 544 bp, Canis familiaris
  misc_feature (1)..(544): n = a or c or g or t
ccagtttgatacnnnggagcccccatcagctccagaaaatttcattcaaatcagtgtggacaaaaatctttcagagatanntgctacaatcgtggacactctaagataaaaggagaacagtttcagattggcagtctagaacaatcaggaaacctctattccatcccaaactatgttctggtgtctttgccaatactgtattctaaattcctaaggtgaacaaatcatagtgtactgagatacacttttgggggtatatttttaggaatttgtactctgacatactgagaggaaacagcagggaactctgaaagtaaagcttcagtagaaattcaaattcctatgacctaatcaaacgatcagngnnnagcnnnnaatcgatgctgtaaaccaccaccttatttagaacatttcttgatcatacctatatttgaacaaataaatcaaacttggctatccttggtatcccctagaaattggtcccaggagcagaaacgtgtacaaaatcaaccacnnnnnaccaagtcatgtcnnnncacacact

SEQ ID NO: 5649 - DNA, 594 bp, Canis familiaris
  misc_feature (1)..(594): n = a or c or g or t
ctacgattttnnctcttatnnaattcttcttctttnagatctactggtatcgacaannngacnnngaaccgaaatttagaaatctaatttactatatcttattttctatcatcatgttatgtatatgtgcaaacctatacttccatgacgtggggaggtgaggctgctataggagaaatacttaccaggtctcttcaaagctatccattaggactgtgaacaagagctgggtaagcttctgaagaatctcctgaacaagtctgatacatgattttcatgttaattgtaaatctaaaataccctcttgcaggggagacctagattgctttgctttttctttaaggaggtgttgttgcacttaaacattccaacccttaaagctcaaatggcacaagcaattttcacttttgaaattaaatttttttatactgtaagtgcatggcgaaaggctatgtaacaatcttgcattttaagacaaatattcttttatttctgttaaactgaatatacaattgttccctaggcaaccaacttttgcttataactacaatttaatttcacattaacaaaacacagatggtgaaaagacaactt

SEQ ID NO: 5650 - DNA, 541 bp, Canis familiaris
  misc_feature (1)..(541): n = a or c or g or t
aaaatgtagtcccctgccccacccctttttgcctctctttatccccatgagaagcagtttcccnctatgatttgggtaacctgcatcttgaagctctgagaggtgataagtggatgtgatggcagagcngncntcttcacatgcagggactggggttgcatgtgcaaggtggcccactcctaggtggctgagcagagcaacatcatatgagggacctggggtcagggagggccggggggtgcgggttggagctcctggatcaagtgtcagagcttgggatccattgtgctagctttcaggttaacaaaggaagctagattctgctttaaaaaatagtcgggctgatttcattttggggacttgtcaccagtatggtttgcaggcagtcccctccccccagttgcagggccatgccacagctgtggggactttacagctaggctagagcttgaggtgtctacccacatcataccttaggatttctttattaactatttaataatgccatacatttttataaggttagattgttcgtttgaaa

SEQ ID NO: 5651 - DNA, 546 bp, Canis familiaris
  misc_feature (1)..(546): n = a or c or g or t
gagaatnnnngactgcctatccagctctgtttcagaggccctgnnagnccctggctgccgggcaacgtgnnngggatgagctggccacaggtgagcaaggcaggaaactgcagtacagcccctgccatgggaggggccacctctggccagtgctgctgtgccttcaaggaccaacatgtcatgtgggggcagagatcatcagctagccactgtgtcggttctctgcatctcaccacccccaccccctaccgcccctcgctcaggctggcccatttgtcacattgggtttttactctgtgtatttcatatcctatggcaatacttgcagggagacatggtaccccaaagtccctccagttctggtttttacaagaaaatagaggaccccaaacggaggaccctggggctccctctcacactttgtgagcctccaggcttatttgctgcgttcataagcagcaggaccttaggctcacaggggagggagctcggtcttcataccaccacccacctagagccagggatacatttgtagttttttgacaa

SEQ ID NO: 5652 - DNA, 620 bp, Canis familiaris
  misc_feature (1)..(620): n = a or c or g or t
gagctcgccatcntggtctataggttgtatgggtaaganntggggcannagctcggggggcggggggtgggggggtggaacagggtgtggctacagcctccactgtcctcactcaaagttcccaggtcctgactatgcttgtgtctgaggtcccaagggggccctgacctcgtcctcagctttaatctgaagggaacactcagggccacccaggaagctgggtggggtgagcatccacgcatccacccctttacctgagtgtgttcttagcgatcatgggtggggggtgtgaggagggaaagcgagccagctgaggcatatccctgtccccgagcaaccccaccatggggctcatgttcactaccatctgggggtaatcttgcatcctcccatgtactcccttggtgctcccgctcctgggggacaggaggaagggtttcaaaatcatgaactataaaaaaagactgacctcctggactagacctcgaggcactaaccacgcacttggactctgccccccgccccctgccccgcccggcctgactgaaggtacctaacatcccctcacgtccacctggggcctgcgacacgtgggggcaggcagtgggctcgcttcatca

SEQ ID NO: 5653 - DNA, 583 bp, Canis familiaris
  misc_feature (1)..(583): n = a or c or g or t
ataagactactccatgattcaatcaaaatattctnnntcctnntcagtcttcacccatncntggctcctcagtccccctggttgatctacatttctagtcaagaggatggaggcagagattatgggagcagaggaaaagccagataagggaggggatcacgcacttggagctgctcctttaagcagttctctttaggaccaacattttttcttggtggaccctgaagtcccaattgagtagtctggtagaaatatataccaaaaagtagtgagcaaagacatcaagatctggtaaaaacaaaacaaaacaaaannnnnaaacatggcaccatgagtcttatgactcgtctcttggccagagaactgtcatactactttctgaatttgtttccttggatataaaatggagattaaaatgtacattttcatgatcttaaaagttcttatcacaagaaacaacaatttttgtaactgtgtatggtaagggatgttaactagagtttctgaggtgatcattttgcaatacacacgagtatcaaatcatnnnntgggatacctgaannnnatataatctatattagat

SEQ ID NO: 5654 - DNA, 615 bp, Canis familiaris
  misc_feature (1)..(615): n = a or c or g or t
canaatcagcnattattttaaaatgaacatgtatttttattaactngtagttaaatatagattattacaaccaggtcaacatgataagcctaaatctatatagagagctaactcaggcaatgtcttgtttatctgtagactggataagacaaacctttcctgttttgtcagtccctagttccttagattagaataaattagaccaaaagaagaaacttgtctttgtatacccgcagaattaagttattgttattgaaacctggcctttcatttcactagtcttagaagagtccagatgcttagtagatgttcaataagtgatttttaaattgaatttgttcatttcaaatcctcattaacctttctaggaaggcttctttgaataaataatggaatcttaaaggaaaagtgggttttttttaaagctaaggaactcctctcttggaaataatgtgaaaacttgatggaggactaaaatttccatgagaaatggcagccaaataacagttacatgcatttgtagtcaatggtcaattttaggaggccggtgatgtctgacaaatgttagagcagatggggaaggaaattgtggggaattgtaataaatatctctat

SEQ ID NO: 5655 - DNA, 703 bp, Canis familiaris
  misc_feature (1)..(703): n = a or c or g or t
gggctgggatgactatgaaaatggctttggaaattttgttcaggaaaatggtgaatattggttgggtaacaaaaatcttcacttactgaccacgcaaggagactacactttaaaaattgaccntgcagattttgaaaaaaacagccgctatgcacaatataaacttttcaaagttggagatgaaaagaattcctatgagttgaacattggggaatattctggaacagctggagactcccttgctgggaatcttcatcctgaggtgcaatggtggggtagtcaccagagaatgaaattcagcacatgggacagagatcatgacaactacgaagggaactgtgcagaagaagatcagtctggctggtggtttaacaggtgtcactctgcaaacctgaatggcttctactaccctggcccctacacggctaaaacagacaatggggttgtctggcatacctggcatggatggtggtattctttgaaatctgtggttatgaaaattaggccaaatgattttattccaaatattgtttaattttccctgctgggctttctttctgtaattcatctaggtttaaagggatttgaaaaacagcaggcctaaacacacacatgcatatatgatgatggcaattgttacgtgtactacttttcattcctacttacctttattacttaatgcactttcagtacagcaaatatg

SEQ ID NO: 5656 - DNA, 675 bp, Canis familiaris
  misc_feature (1)..(675): n = a or c or g or t
atgctatatatnttctcttgtgatttgttcttgttcnacactgtgaaatgtgtctgtgatgtatagtgtgggtttgaattccagtgcacgactataacagtttatcccttctattgtttttaccattcagctgttagcacaacactggtgtgacccagtctgcatttcctggttcagttatacaacagttgctggcagagtagatgtatcttcacttgactagcatattagtttcctaggactgctgtaacaaatgactacaacctgagtggcttaaaatgacagaaactgattttttcagagatgtttttggagaccagaagtctgagatgaaggtatcgacagggccatgctctctgaagcttgtaggggtgaatccttgcctcttccagcttctggtagctgtgaagcttgactcatggttgcatcacaccagttcagaccccgtcttcatatggtcttcttgtgtctctgtcttctggctcttacaaggacacttgtcattggactcagggcctacctggacaatccagagtactctcacctcaaggtctttgatttacatctatgaagacaatttttccaaatgaatttattcacaagtcccaagcagatgtatcttctgggggcagggagactaccattcaantnnctacaacnnngaaataccagagg

SEQ ID NO: 5657 - DNA, 671 bp, Canis familiaris
  misc_feature (1)..(671): n = a or c or g or t
ttctttgaaaaattcctttaatttnactttgtaatcccatctattgggattttcnnnnnngntgtaattnnaanttctacaggctaatttttctttgtatatttgaatgtatattggaatgtgcacattcaaagaaaaactaaaatatccttgttnnnagggtacaatgttttaacctctgtgaagatgatagtgataattttcatttgcctacatggtctattcccttcatactgctttttatcctttttaagtcagcataaagtatatgtatatacataattataaccagaataaagtattaagtgcaaatgaaaaaattacagaccatgtggaattgcaaccatttccccatatacttaaagaatttcctcctattctgaaagtaaaatgttgtcaagttacagtagtcggtatttttttttttttttattttagattttatttgccagagagagcacaagcagggggagaagcagggtctcgctccactgagcagggagcctgatgtggggctgtatcttaggactctgggatcatgacctgagctgaaggcagacagtaactaacaggcatcctagtagtctgtgttttaaacctaagacctagttctgagtgaagtttgcttgctnnnnccatgaggtgtgannnnnctttacctggactgcgta

SEQ ID NO: 5658 - DNA, 653 bp, Canis familiaris
  misc_feature (1)..(653): n = a or c or g or t
gtgaagannatgctactctcaacctcaatgctatcaacctttgccctctaccaaagccctggaaactnngtttctcctatggacgggctctnnnnnncagtgcactggctgcctggggtggcaaggctgccaacaagaaggcaacccaggaggccttcatgaaacgggccctggctaactgccaggcagccaaaggacagtatgttcactcgggctcttctggtgctgcttccactcagtccctcttcaccgcctgctacacctattagagccccaggcccactagcctgcctccagctcctctaggtgccttgatcgaagggctgaaagagaacaacttttctactgaccctggaaatgagacaagatcagactgggactgttggaaacacaatacctgttaaattgttagacacagcgaaaaaaatccgttcttgaaacctaaggcgcgaatattgcagatctgatgaaatgtcatgcaatttccttgtgacagcttcaacttcccaggccccaagagtatccacctaagaaaagaatagacttgaaaataaaaccagcttgccattcgaataacaaccaccagatataacacctcagaagctgagtgtgnnnnnngtgtgtcttattcannnatcttagcagtggtaggt

SEQ ID NO: 5659 - DNA, 625 bp, Canis familiaris
  misc_feature (1)..(625): n = a or c or g or t
attgtttanngatggtatggtcagtttctaataagagtggttnnnaattgaaaagtgctaacttagaaattgctccagcagaatatttcaagatcactgagcaacctggatgctgcttgcctgtaatagaagcagaaagcatcaaaacctttcagtataatgtgcagatggagaaaccttttacagacgggaatcttactggttttataaattatcaaatgatggatactcattctgttcagcttgaattttctgtaaacttatcgctattagatttcattagaccgttaaaaatctcaactgaaaactttggcaaactctggttatccttcgcaaatgatgtgaagcaaaatgtaaaagtgtcagaatctcaagctgctctgtcttctgccctaaagaccctgcaacagaaactaagacttcatgttgttgaaattataggcaacgaagggcttttggcctgtcaactgctcccatccatcccctgtttgctgcactttcgagttcatggtgatgtattggccttgtggttcagatcctcctgctcttctcttcctgactacttactgtatcagtgtcaaaaggtgatggagggatcctagcagaagctctgttgatattttac

SEQ ID NO: 5660 - DNA, 621 bp, Canis familiaris
  misc_feature (1)..(621): n = a or c or g or t
gtgatggtgacaggccncagctatgagaccgtggccgagtgttccctgctgcagcagctggnggcagatgctgttggcatgagcacggtgccagaagtcatagtcgcgaggcactgtggactccgggtgtttggcttctctctcatcactaacaaagtcatcctggattatgaaacccgggagagggtgaatcatgaggaagtgctagaggcggggaaacaagctgcacgaaaactggaacagtttgtctcccttctcatgaccagtatcccacctcccagcaaagccggctaaccggccgtgcagcgcctggcctccccctatgggatccagcgcctactacctacttgggcccttgcggggtcccgtgcctctgtccttaagtagtaggagaaaggagaggaggatccccgtctttcgccctccccgttgctgtcaccccccttcttctccgagagctagtgccaaggcctgcctcgcacacgcccgggctggtgagcctgttgagcttggcgcggtagctactgctgccctttagagacgcgctttcacattcccgggcccgtggtgccccctgcaaagcaccagagcccgcacaagggccggtccagcccaatacct

SEQ ID NO: 5661 - DNA, 605 bp, Canis familiaris
  misc_feature (1)..(605): n = a or c or g or t
accccctcagtnggtnntcctgcccctgccggcccctgtgagcacccccatgcccacctcggcccccggggccacagggggccctctctgcagacacaggactcctctccacaggcgcttcccttggataatattatttcaccagatccagaaccnnntcggctcgtttctcaagaggaccaggtgaatcccgaggtgggatgccgtgtttgtagcccctcctgctgaagaaaagggaaaggaatttttttccaccgtgcgccagaaagaaaaggagctgttaacagccattcttgaggcacattttagattcatcaaaacactattatttaaactgataaattcaaatatgtgttcaatagaaatactgatttgtagtttttctggtttgtgcatatcatctctttgaagcttcagtaacaactctactgatttttttttcctaatgtaagaatgttgcccttaaagattttccagagccagatgatgagagtaaaaatcccttccttagagatataagaaaatttattgaaaaattggtttggattatgccatttctaatggcaactaataacagaatccttagtgatatgttttgaattgga

SEQ ID NO: 5662 - DNA, 675 bp, Canis familiaris
  misc_feature (1)..(666): n = a or c or g or t
gctnntggtgcttctgtggggcctgtacctggcatggtctggcctccatttcttccagcnctgggggctatggctgcggtccagcgggctgttgtnngccaccttcctgctgctctccgtcttctctttggtggccagcctgctcctcgcctcacacctctacctggtggccagtaacaccaccacctgggagttcatctcctcgcaccgcattgcctacctccgccagcgccccagcaaccccttcgaccgcggcctgacccgcaacctggcccacttcttctgcggatggccctcagggtcctgggaggccctctgggccgagggagaggaggaggaggagggcggcagccaggctgtttaaggcgtgggagggaaggccaccaacttgtgcctgaaaaccaaacgggctgcacccagctgcggtcagccctcggaaagcctggggttcttcactcctgctcgctcttcccaggcctcagagcagagctgaacgacagaacccctgcctcagtgggcagttctgccttccaaaggaagaaggggaggcaggggacctgtggggggctcaggcacaagcaacctgggcttggaggccccccacacaccaggatgcctccagtgcacagttttataagtttaataatccataaagcgagtcannnnnnnaaaaaa

SEQ ID NO: 5663 - DNA, 603 bp, Canis familiaris
  misc_feature (1)..(603): n = a or c or g or t
atgcagctacaagacattcagtnnnnngtagagaacanctgggcttcccagtcagtnnnnagcgnngggaatgatctcaatgatctggtcctggtcaggtgggatcggtctttggaatggtccccctggaactgcattcttcttaccaaagacgaaggtgttgctcatctcaagctaacaagtattgaggagggatatgaacccttgtttattcacaagatcaaacacaaacatatcctagctaagaactacttttnnnnncattccagtgctggcttcatttatacttgatgatggtgaaatagatgagatcagaaaaaaatatcactcagaaacaactcctaagatgatagtggcccagaggcccagtccctagaagatccgggagtatttgatgatcagcatttttatccactgctaacagaggaatacagaggctatacattatggaaatagaattttatcttttaattgattttaattgttttttgtttctcatggtatcataagtggtatgaagacaaagcatccatatgtaatgctttattgttagataattagtgaaaattgaaataccgttttgttcctgaattatattttaag

SEQ ID NO: 5664 - DNA, 536 bp, Canis familiaris
  misc_feature (1)..(536): n = a or c or g or t
ctcagtnnactgcagcaatgactgtannctaaaacatgctgcggctactatgaaatttctgagttcaggtaaagaacaaaaaccaaaanntaaagaaaagaccaagacgaagccagaaaagctcattcttccgaaatgtagcgttcaggcaggcattagaatctcttctctgcacaaaagaccagctccagacaagaaagaaaacaccgtgaagagggcgacgatggccccaacgaggagcgaggtcctcgcgaaggaagcgaccagtgaaggcacgccgtcctgggcgagcgaccacaattacaatgcagtaaagccagaacagactgctgccctctggccaccactgttgtataaatgtatgtatcacctaggggtagtgtctggaaccctcttggtctttctggacagctgtcacatgggcctgtccaggaccaggagctttngccatggttagtgctgcagctgtaaagacggaagcagatgcccgagccctgtgaacctcctcagtctgtcggccctacctgtccatacac

SEQ ID NO: 5665 - DNA, 681 bp, Canis familiaris
  misc_feature (1)..(681): n = a or c or g or t
ttcccctgctgactacnacgctatcgtcagcagctgcgttgctgggatccagaagactacttatgtgtggcgagaaccaaagctatgcgtgggtggcatctccctgcctgaacagagagtcaccatctgcaaaacgatcgatttctggctgaaagtgggcatctctgcaggcacctgtactgccatcctgctcaccgtcttgacctgttacttttggaaaaagaatcaaaaactggagtacaagtactctaagctggtgatgaacgctacgctcaaggactgtgacctgccagcagctgacagctgtgccatcatggaaggcgaggatgtggaggatgacctcatctttaccagcaagaagtcactctttgggaagatcaaatcatttacctccaagttgatggactgtttgggccttttaacttccagaaggagtattgaaccatccacgttaggactcctgatggatttgactccgtgccactgaagacatcctcaggaggcccagacatggacctgtgagaggcactgtcctgcctcccctgcctcctcacctgggcacgtcaccttgcaagcctgtggcaatttgggtgccagcttcctgctggaaatctcttcattgtggccttatcagaagaagtttgaatttcagatattaggttttttatagaatacccaagc

SEQ ID NO: 5666 - DNA, 534 bp, Canis familiaris
  misc_feature (1)..(534): n = a or c or g or t
tagtggactgcgccganngcgaccgcatcgacgaggcccgccannngctgcaccgcattatcaatgaccgggagatgaggnacgccataatcctcatcttcgccaacaaacaggacctgcctgatgccatgaaaccccacgagatccaggagaaactgggcctgacccggattcgggacaggaactggtatgtgcagccctcctgtgccacctcaggggatggactctatgaggggctcacatggttaacctctaactacaaatcctaatgagcattctccacctatcccccttttttttttgctttgcattaggatgctccgatctgacatttgacatgaccacaaagtgctagatgctcttactgacttccagcaaatgggatgggggaaatatagcagtttttggtaaagtcctttataataatggtttgatttttttatttcgagagaatcttttttgcaatgtatgcttttttcctttttgcccagtttccttatcacttgctgtagatggcttattttgcattcatgc

SEQ ID NO: 5667 - DNA, 561 bp, Canis familiaris
  misc_feature (1)..(561): n = a or c or g or t
tcctccntaccagctaaatggggctcaatatgcctcagagagnagacaacataacatattacagtgcctggaacatactagcttctccatgaaaccttaccatcatcatcctcatcactgccttcattatcataaagtcagagttcccatgtagaggaggaggggaacagatgggtcaaacacaacagcctaccataaaaattgggcttccgtcctcaaagatcatattgggatggcaaccagacaagaatttaggtgggtttcaaattactgtatgaaaatcagggtcggtctttgggtaagctctggtcttcactggttccctatttccatagtagtacagtgagagtgtttcaccggattgccctccaggtcctcctccagcacagacagggcagggccagggccagtgtaactccccagggctcagctgctcacacaagcgggacctgccatggtgttcccctagaccttctggcaacttagaagagggatctctgtgacaatggcccaatgcacagcaccgagggcagagatgtttannnngtttgaactgctttc

SEQ ID NO: 5668 - DNA, 450 bp, Canis familiaris
  misc_feature (1)..(450): n = a or c or g or t
ctgctcagtagccccggctccannnagctcaggnnctctggctccaggtgacactnngccctccttgtgctttcagcttcccaccccccaggtagggagagagaatggtactgttacggcttacccagaattcaagttttggagcaaaggggggacttaggcgaccgaagcattcctgcagggaggctttcaggccgggaacctgggtgctggctcagccttcaggcctgtgtgtgaaggtgcaacagcagctcctttgagctctttcctagaaggtgggggtgagggggaggctgcctccctgagtctgctcctcctccctgctgacatctggggctttgaccctttcttttttaatctacttttgctaagatgcatttaataaaaaaatacacaaaaaacaaaannnnnnctatttcccttgcctcttgggcttctgggatgtcatca

SEQ ID NO: 5669 - DNA, 544 bp, Canis familiaris
  misc_feature (1)..(544): n = a or c or g or t
gtggatcagggtgaggnnnagctccatgctgcgaatgcccttgatgccgatctgtcctgttgnnaaacacagatgtcatctataccacataactgtgactgatatggaacatgaaaaacagctctgcagattcacatgggtttccccagctgtccgcaggtaacacctcattgcctagtctttgctcccagggcccaggacatccttgtccccagctagccagtttgctcctcactgagaggggcgttcacccaagtgagggcctccctgaggtgctcatcaggccgttctgagcttctgcgccccgggcagcagttatccatctggtgtggatggctcctcatgccgaggccggcgcacagtcggtggggtcctatctgggtggatggggagtagtctcttcagtagctgcctgcatgtgtgcttagggagctcctggtttgaaatgaggatattttgcagggggaagctctccgatgtccatgccatgtccatccatcccacccccttttccagttcatgagcacaatagtcttatgttgga

SEQ ID NO: 5670 - DNA, 588 bp, Canis familiaris
  misc_feature (1)..(588): n = a or c or g or t
ttgtatgtatatnanacagatgagncagcaggtggtgaagaggtncagaatgacatgcaaaaactacttttttgggnnaaacaaaacaactttgtagcaagaaatgaaatatagatttagattgtaactcatgtagattttatttttactatgccttaccaagtatgaccttaaagtagtcagacatggaattgcacttaaccaaaactattgtgtaaaaagattttaattcctcagggttttaatttaggctagtatttttttagattattcattttaggtgacttaatggtactttaataattgttaagagattttggttatttgaatgtaagttgtaagttggcacattcctaagggtatttatacctaatgacgagaatatgaaaattgaaataagataaaatataatgcactaaaccttttatgtatcctaactttaaaaagcaaatcaacaatattagactgatgtctatacatgctgatattctgataatattactactctgataatattaaattaaggctgttttatgttttataacaattatagtttacatgcttatttttaaaatagtatatgtgcat

SEQ ID NO: 5671 - DNA, 455 bp, Canis familiaris
  misc_feature (1)..(455): n = a or c or g or t
agcacagtgngncttcnngcagcagcccccagtcnnnntggtgccattnnaggnnnnntggagcagtttgtnnntggtgttgnactccggggcaccagcagcagcaccttatgaagtagnnagccnacaacaatttcctgctcctctcacctgagnnnngagtggaatcaaagncntnnntggacaaggggtncttcaagatannagnnnaatcttctcactcctccttctccatcatgcacatggcagccccaaannnaagcagggctaannncggggttccccaacccccagcttnntgactggtgaccaccacccctcttgtcattgcctttcacccaccnnagnnnttgttgggattcccatcaatnnncngaactgtgtgggttttcccaagtnnnnggggccnngtgggggctgagacctcatgaaagactcccctcttcccanncttg

SEQ ID NO: 5672 - DNA, 630 bp, Canis familiaris
  misc_feature (1)..(630): n = a or c or g or t
acacacatgcacgtgcacgcacacatgcacacacacacacacacgcactcgggccctgcannngctgcatatctgaaagctcaagcagaaagaatccgttgttgttggcaaaactacacgtctcgtgcggctccagctataaaggcagcgtgtggtgtggacccagaggccttcctggccccttgggtgacaccgcctcgcagggctggcggccgagctggagtccgcagcggggtccgcactgccccccggggtggggagcgctgcaggagatgggagccccacctctacagggccctggcgtggggactggctctggtgccctcacctgagaacacacctcacctacatgggaagctctgattcatcgtccacagtgctccggacaggactgccctgagccttgggtctttgaaaagaatgggtcagggggtggaaggagagtgacccttcacccctgtgccttgggaagaacatccccagccccgcctggagcagggcaccagcgccgcaagcccgagtgtggggcccagtggggtgaaatgtatgaaaaatggatttctgactgattccagccttccactgcgtgtgttttggggtctcctcatctcgctgctatccagttcacag

SEQ ID NO: 5673 - DNA, 472 bp, Canis familiaris
  misc_feature (1)..(472): n = a or c or g or t
acacctgtagccacaggaggacngatagatcaattgcncattcttgtctttagggtttatttgtaatttatcctcnnaagatgacagagtgggtcttttnnncttgggtagcatccagtacagtgtcacatgtaaaggataagtaaatactatcaactactactacttatattcagttcacaaaatcaatggcttctcattgcttgaaccatcggtgnnnnccaatttggctctccttgtttgcacagtnnnnnnnnnnttattatgaattctgtgcctttcatcctgttccnnnnnnnnnnnnntcattaccacacagggatgttgtgnnnnnnagttttatgctgttttgaaacatctagcaataactaaagaaagaaacacttggaactcttcaaagtgttactggaatgtatatgtgcatttatgtatatacatggcttaatttataccttatggcagctctgtatac

SEQ ID NO: 5674 - DNA, 532 bp, Canis familiaris
  misc_feature (1)..(532): n = a or c or g or t
tcccgttcagatctgcccctgccccattccccaagcctcattcaggagggcagcccccacccacnnaaggctgtnntgaaccccatgtcccagccaggccaagtgtctgtnnaaggtaagcctgtttgccccttcagctcttcagtctgtcaccactgttgttcctcagtcactttttgtaaaaatggggttggttttgtctctttttttttttcttttcttttttaaacgccaataaatactttcattcaagcaggggagagaaggcaagggtgtgaccccctggggcagaccctcctctctgggccccaagagctttgcttatagtctccccacatttgacacattccatgtcctgccgctttccccctcaagatgccatttggaaggcagggggtctgcttcccactgtgactgggctatgggacactgactaccttgcttacggattcatggtttgataaatttgttgtattcaaaaacttgaaatgtaggacgccattaagtgtctgtttatatttttggaatattt

SEQ ID NO: 5675 - DNA, 530 bp, Canis familiaris
  misc_feature (1)..(530): n = a or c or g or t
annagagnataccaaangaagaaaggattcactgtctgtttttgcatatagttttgaatgggaaggacaaatnnnnagaccaaaggaggatggttgtgagcatagcccccagagggggtccaggatcacctccaaagctttcctgccatctctgctgctcacagtccactctgcccttaaactcgtgagtggctgtggggctggaggggtatagccatccgtcctccaccattaccatattccattgccaaccccctccccttcaacggacctctgccatttctaggtctcagctcctggggtcatgacaacactcgtgacaacagctcccctgtttcaggtgccactgggctccgctgcaaggtttgggcgcactatccgcaacttgagtttgagcatcatgaagaggtccggtttccaggccagtgaacaggaagctgcttccatggcatcttctgcttagctgagaggtatttgcatggtgaagactggggttgtaaggctnnnnnnccatgtttgtgcctctcaag

SEQ ID NO: 5676 - DNA, 643 bp, Canis familiaris
  misc_feature (1)..(643): n = a or c or g or t
aaaggagnntatcancttcagcangtnngncagctccatcgtngnnnnntatgatganntcatcctcccaccagagagccannaggtngactggnaggnnnngctggctgtggtcattggaaagaaannnnngcgtatcaaggccacagatgctatggcacatgtggncggcttcactgtggctcatgatgtaagtgctcgtgactggcaaatgagacgcaacggaaagcagtggctgctgggaaaaacctttgacaccttctgccccctgggccctgccttggtgaccaaggacagtatagcagatccacacaacttaaagatctgctgccgagtgaatggggaggtggtccagagcagcaataccaaccagatggtatttaagacggaagagctgatagcttgggtctcccagttcgtcactctttacccaggggatgtcatcctgactgggacccccccaggtgttggtgtattcaggaaacctccagtttttctcaagaagggcgatgaagttcaatgtgaaatcgaagaactaggcatcatcatcaacaaggttgtgtgatgactctcccagaggccctggacttaacaggtgggacatccattcccacacagtgtcagctgcctcttccaggcagag

SEQ ID NO: 5677 - DNA, 650 bp, Canis familiaris
  misc_feature (1)..(650): n = a or c or g or t
gtgagactccagaatcctgtgtgaaangnntttttttagaactttgttagtggtttatgtaaaaaaaactatctagatttatcaaccagattttttatttaaagccatataacagtttgggtacttgtacattaattttcatcaaaattcatgcagttaagaaatttcatgaatactctgaatggaggagcatcacaattttctgtgataaatcaggcttcatatgtgtggggtggttgggggagtggaaagagcaattaggggctactgagaagaccgtttattcatggtcctccttcccatcttgggtgttgagttcttatttgtgattgcagatcctccaattggagggcggtgatatagaaaaataggatgctgtcaggtaggaagccaatgtcagtcctatcagtaaagccatttcacttacctgaagggaaatgagaagagaaatgccactaaataaatttcccgtaaatgtgaatgagattcttaagaagtagactcaggtccttggctctcttatttttaaagtgattagtcaagataacgagatttgagaaaacacttggggaattttaagaggaatgaaagctgctaggtcagggcaaataaaacgttttaagcaattaaatattactttgtccagatcc

SEQ ID NO: 5678 - DNA, 375 bp, Canis familiaris
  misc_feature (1)..(375): n = a or c or g or t
ccccccccccccgggcccaggggaggtggcctgaggccgatcagcactccccgggccttggaccccctcgtcgcccgcagcttcaccggggccgggggccgggtgctggtcattgccacctggggacctgcaggccgagaggctcctgtgctcccagcatccggaaaagccccggggcgcaggcacagggctggtgccaccccacgggggaccctccccctgcccgagcagtaaccccagagggcctcgaggagactccttcctggggggatcgcccctgccaggcattgtgctcactgatatttatagaaagaacccaaggaagttctctgggcttgcccacttgnnnccctgatgcataaagctctcnnnnnn

SEQ ID NO: 5679 - DNA, 641 bp, Canis familiaris
  misc_feature (1)..(641): n = a or c or g or t
tgttaatgggaacaaaacacatgcatcaaatagaattatgtgtaaattaaaatagaacccttacctaaagttaggcggcctggatcgtagccttggagtgttttccagccaatcttgtgtccctgtgtcatgtgactttggacaaggcacttcatcttgctgggcccccgtttcaccatctgtaaaacaggaggctcaaagtagatgatggtgggaacttcccccaaccccccaacgatgcctcggtccagcggcctaccctctctacaggtcctgccaacatgttggtgctataagctgcttcagatatacaattggttcatctatcacgtatgctcatttaatagcttttgaaaggcctttttgttacataactttttctagttttatgacttgattactgtaatgtctcgtttttagtcatgtaactctaaacatcattcacttgatgtctcggtaatctgcgtttgctatatggttgaagggattttgttatttcatagcattctctggctactcatctgtctagcatcttattaacctaagcactgtgatcattgtttggaaatctgtcctatggaaagaataaaagcacttacttcacatgtacttcacagatnnnaagaagtttcnnnnaacnn

SEQ ID NO: 5680 - DNA, 587 bp, Canis familiaris
  misc_feature (1)..(587): n = a or c or g or t
gaggtgctccagtattatctcaaggattacagcctgaacaagaaccacagctgtggaatgagataagggatgcatgttccgctttcctgtcccttgactctcagcctcaggcacccaatgcattgaaggagctttgcatcacaattatggggactctaccaaagccccaggaaactgatgaaaaagataataccaaaaggtttttatttcattattcaaagacacggaagttgggcaattcaaatgttgtgtcgtctgtcctgcatccgttactgcagcttgtccctcaactgcatgagagaagaatgaagagattcagactggacgaagaattccaaggtcctanngcaagccaagttcgaagacagtttttgttcaggccacgcaatggaaggaggtcagaaggttacatttaaaatggataccaactattttctgcagaagcggcaccagagaatgcaaaatgttgacattctcttttcttctcagaaacaatccttgctaaacttaccatgtttgagaatccatgtgttgtaaacattcccaataaaagccggttgagattataaatgcttaatttgttgacg

SEQ ID NO: 5681 - DNA, 637 bp, Canis familiaris
  misc_feature (1)..(637): n = a or c or g or t
aagtttcagatccatcgggatgacaggtccacagatcgnntgnnnncagctcacacatgtnnnnatcagctnnacctacctgcctatgagagctttgaaaagctccgccacatgttactattggccatccaggagtgctctgaaggctttgggctggcctaataaggccccacacaccactgtggggtttttctaccattgttggacctgggaatggggggaaataaaaaaagaaccagaaagaaaatgtcaaaaaccaataaatgaaatccaccaactcaccatgtgtgtgtcccagcttccccatcttcccccagcgcatacccaagtcccccacccgctcattctctcttcctgtcctttttcctcacctcctcctcctccctgttccatgccgtccatgatccccagcccatgtgttaaaaaggcattagcctttgcagggacctgtttgtcccaactatttgaacagtgtgctcctcagattctgtgttcagaaggatttgctgcattgagacttgaaacctttggataggggaaaaattatatatatatatatttttttgttctgtttgcatttcttaatttgtgcttggaatgtgttgatgtgcacannnnnatgattcaatgcgagaca

SEQ ID NO: 5682 - DNA, 659 bp, Canis familiaris
  misc_feature (1)..(659): n = a or c or g or t
tccatgaagaccatgcaccgtttctctcagcttaaccatcctttttgttttttcagcatagtgctatgtgtttcattgttagctgtcctgctatttaacacgatgttgtattttttaaatgtatataactaggaaagaaaataactataggaagctgtatgtagcttctgtgtaaagccgtggctgggctgaaaagtggcggggcttgcatttcctttcgggtcttgatgatagatggtatgaaaatcatcgaagtatgcttttgaccatcatctccccgtacgagtttatttttaccatccatttcagagtaggtaaggcctccgttgaaaagatgacatgaccaagagggggaagcatttccttctggttctaattccctaagttgttttccttatgttgcatttaatacatggagattgagaatacagagggatatttgagtcattcagatttcataaagcagttccttggattatagctgcattaacttggaaagaacccagttaggctggaagacagaaactccaacgggcagaaaatcaagtaaccgaggggggaaaataaaatccacaggagtattgaatttaccttacttaaatgtatttgttaaatttattttactaaacaaaatgaactgcttttnnnnnctgaaatga

SEQ ID NO: 5683 - DNA, 472 bp, Canis familiaris
  misc_feature (1)..(472): n = a or c or g or t
tcagacaggncngactgttgtggcacggagaacctgagggcagctctccacggcctcctctcgagggggaaggaaccgtgtgtttagtaggtgggcctcacgggagccctggaggcccagggtggggggcagagaccctgctcgtgctggggtggcatcatcttgcttacaaactgtaagatatgttttctttttgtttctgtttttgttctgcaacacccacgtctgtgacagccctctgggaaacaccccacccagagaaggacgcgtgccgtgcctcccagtgtaacctggtccccaggactggcataacgcttccggaagttttcttttttatatttaaaatgttacttttctgtatgatgtgcatgcaagtttaccgtaactttttcttaaaaactttttagtgccgtttctagtatattcctgtannnntcagttactgaaaannnnnncgatgtaagtagtttta

SEQ ID NO: 5684 - DNA, 510 bp, Canis familiaris
  misc_feature (1)..(510): n = a or c or g or t
ctccccaagcccggacccccacctgtnnagnagccannnnnnncatnnnnngctcnngcaactcnnnnngctcccaatgtgcccaatgtgtcctgcccaaagcagtgccgaaggacaggnnncttgcagagcaacttctgttccagcagcctggtggtgaccgcgacagtgaagtccatggttcgaggcccaggnnngngcctcactgtcactgtcagtctcattggtgcttacaaaaccggaggcctggacctgccttctccaatcactgacacccccctgaagttctatgtgccttgcaagcagtgccctcccatgaagaaaggagccagttatctgatgatgggccaagtggaagagaacagaggtcctatccttcctgcagagagcttcgtggttctctaccggcccaaccaggaccagatcctcaccaacctcagcaagcggaagtgcccctcccagcctggaagggctgctgggtcccaggcctgaaacccaggctacnnnnct

SEQ ID NO: 5685 - DNA, 611 bp, Canis familiaris
  misc_feature (1)..(611): n = a or c or g or t
anataattaagctgttgaatgngncntaaaaatcatactactgntangtnnaccaagttnggtgnngcagaatgtgacagaggnngantataannaannnnnnactcaagnacactggggacgataactttccacttgagaactactttatgttttactgtaattttttaatttttttttgttctgtttgttgttttgcaaaagaaaatagtatttacaggtggcttcttttaaaatataaaatataaagcaggaatgtatatgaaatgtcagattttattgtatttgcagagtattagctttgaaattgaataaagaaagctgtttgtagttttaaaatgccttattggtatcaattagaaatttcttctattttttgatgtacttagagctttttgagtatagaattttaaatggcaggattttacagtgtttacatgcaagtgcattttataagtgttctatatgtgtaaaatagtattttcaactggaaagtgttggctagcgcagaaggcctggcctttttctggttcccatgatgttgcctacactgctagactacagtttagtattgctttgtatcataaggccaagaaattccatgttgtttg

SEQ ID NO: 5686 - DNA, 517 bp, Canis familiaris
  misc_feature (1)..(517): n = a or c or g or t
gtgggtccccagaacccacgctcttcctgggggcaccacactgcccttgagnnngaccccacggcccgccccgctccaccnnnnnnngactctcaccctcagtgaaagccggnctctgtggcctgcaccctgggccttgcctgtcgctgtgctcagaccaggcctgcctgtcccaggctgccgccccaggcttgtgctgtttcctcagcctggaatgttctcctgtgcgaccagacctctccgttcctcaagacccgggtcgggagcaccaacctnnnangnctcagctagcaagacgctccgtgtccctgaagacactgtcgggtccnctgcgctggcacaggtccatctcccgcagcggacttgggggtcccaggggacaggaccctccgcggcatcatcccacggaaggtccgtcctcaggagccgtgcagctggatcaagtcggattggattgctgaaaataggaaagtgggctcaatcaggggtcagaaacaggttgtagggatccctggat

SEQ ID NO: 5687 - DNA, 629 bp, Canis familiaris
  misc_feature (1)..(629): n = a or c or g or t
tggggccccaatcagagtgctacattattttttggcacatgttataaagnnnngcacctcagtcctttccgaacccatcggggtgctccatttggggctttttagactgctgctgttcagctggctgctcagaatagggccagcctatcctctgctgtcccctggtatcttgtgcctcactgcagatggctcgagcaagccgtttctcagacagtaggcacagcctcccctcattccctgatcagtgttaagtagaagcacctctgatcccaggacagaaggaaagatgccccatcttcctttttttctgtaacctgcaaagtggctagttggtaattttcccacaagaattaggtgttagagtttttatttgggctttggttgggagaatggtctaagctgaaggtgtccttcaccagcaagctccaactctagaattcaggatgctgcgtcttgtgttttctcacctctctgtcaggaaacgtacactttggttttatttttggtatactccaaggagtaagccagaaagaagtaggaaggattatttctgattaatagcagaaacttttttcaaacttaaatatataaggtctctactcttttaaaagctctaaggtaagccaaga

SEQ ID NO: 5688 - DNA, 534 bp, Canis familiaris
tgaaccaagcactgttcatccaagaggggtttttgtgactgaatcagcagtgcctgctctttgttagctttgcttcaaacaccatagcgtgattagtgctgaaaacaagacccaggacaaatactgtccaaaatagaatctgctgcttgaactgttgtgtaataattaaactttgatgttgagaaattacagttttattgtactcctcaaatacatgatactaaaatgagattggagtttctgaaaaagtaacattaaaatgataaaattaggattgatgtgtggtgttactcatatctaaaactacatctaaatacaacttttatttcctgttttaatttcaggggagctactatttgggaaagctattggggaaatgttttataaatcactgtttctcattttcagtcatatttaatgactgggcaagctgatgtcctgtcttccaaggtacacatcaaacctgggatacagtaaaaatcctataaggtcctggatagttttcatttaattatccattagagaaacatttat

SEQ ID NO: 5689 - DNA, 633 bp, Canis familiaris
  misc_feature (1)..(633): n = a or c or g or t
tcctacntagagctttcaccagnnnagcagaagattgatgacagcnnggcaggatnnnnnnnaggagactgctaacttgacaaagaatnnagnnngagttctgctngcggcttctcaaatcccttgcatttactgcaggtgtgaacacctggctcatagtcttactctccagcctggctatagatttttcaccccatctaacttatttccctcctcgacatcttatatccatgaatatgtgcctgaagactctgactatgtggtagattgtaatccatacccttcctcccctgtactcgcacccacaagtttccgccagtgtagtcttcgttaacagttttacttatttttctatatccttttccttatatgcacatatatctttctctgtatcgttgtctaatacgttcacctgcctggttatttgactgggggacagacattcttattactgagagaggaaaagctactgcacaaatgaaacaaaagcaaagaaaataccctgcttggcttttctgggcacatgtatgtttacaaacacttgatatacagtcataggagagaggatggaacaccctcatcagggatgatcaaatgtgtgtccacaagggtgccccaaagtcataatccagt

SEQ ID NO: 5690 - DNA, 523 bp, Canis familiaris
  misc_feature (1)..(523): n = a or c or g or t
acatgtttgctacccctcagtatcgaggagtaagagcaggagtatttttgggcnttggnctgagtggaatcattcctaccttgcactatgtcatcgcggaggggttcctgaaggcagccaccatagggcagatcggctggctcatgctaatggccagcctctacatcacaggcgccgccctctatgctgcccgcatccctgagcgcttctttcctggcaaatgtgatatctggtttcactctcatcagctatttcacatctttgtggtggcgggcgcgttcgttcacttccacggcgtctcgaacctccaggagttccgtttcatgattggtggaggctgcagcgaagaggacacactctgacaccttccgtgagccagggaccctgaacagagcctgtagcatctgcaggcctccctttccggccattgaggccagtgccagaagagccccgaaactttgacagcctcatgggctttgtgatgcccccggggctccacctggtacacgnnnnnnaagagaaa

SEQ ID NO: 5691 - DNA, 689 bp, Canis familiaris
  misc_feature (1)..(689): n = a or c or g or t
tcnatctccaaatacatttccataatgtgtngaaaacatgctaacatttgtatgtntatncttctgccgaatatacntagaatcagatgaattgtttttgtattttacagaagaatcaggtacaactttgacaggcatgtgaagtacagaggggggtatgttttctgactgtgtcattgtaatccaatgtaaagaaatgctagctggaatgggtgctgaggccactgcattaatgttgtgtgtgtgtttagcattctgttgtcagaagaagctaatgaataaattagtatgtcattttagaacttagttctaaaattagtatgaagagcatataggttattaatctccaccaactagactaagcttaactcaaagactttggaaatcatttttgtttgtatcatttgctagacatggtttttagttctgtttgattatattttctacacaaactcggtttctaacatgatagcctaataaattatatttaatactttgttcaattcatttgataaagctatattgtaaaacatttggtttttttccccgctcttcactcttgattctgtgcatttgtcaattgtgacatgatttgtggctatattgaaatttgacttggcaacattaacatgttttaaaactcaacaaagaagcacggcaatacgttctttgacttaagaatggtataa

SEQ ID NO: 5692 - DNA, 615 bp, Canis familiaris
  misc_feature (1)..(615): n = a or c or g or t
acacagctcttgggnacgccccctggctgccctgagatgaaccctctccttttgttctcatcatattctagatgtgttgtcccatctttggggtgagagcacccacagnnaggcaagtgacttgtccagggtcacagctagtggagattcaccttgggctccccagctgctgcatccactgccccccatgaagcatgtggggggccctctggtgtccctggagaggtctgcgagctcccggggagctttggtggtgccaattaagggacatggggtctatggtttcctatgccaactgtgacttcaatcatgcgagtgtgtgtgcacgaacctggcacactttgtgcggggtgtggattgagctcaggtttgccctgctgtggcaaaaaccaaagtactgagccatgtagctttaacgagatctgagccaattttatatttctccgtcttctcaacctggcctcaatgacactcctgggcaagctgctgatttcactggaatgtgctggtgaggggtgatcccggccctcctcaggttccttcagtgtaaagctgaaattaggcagggactcaggcagggggcagcagatgcctccaaattgattatagacacat

SEQ ID NO: 5693 - DNA, 503 bp, Canis familiaris
  misc_feature (1)..(503): n = a or c or g or t
ttaatnggatttgtggccagagtccaannnaatatttcagatacaccaccaccaccaccacctgtggaagaaccagtctttgatgaatccccccctccacctcctcccccagaagattatgaagaggaggaagcagctgtggttgagtatagtgatccttatgctgaagaggacccaccgtgggctccaaggtcttacttggaaaaggttgtggcaatttacgattatacaaaagacaaagaagatgagctgtcgtttcaggaaggagccattatttatgtcatcaagaagaatgatgatggttggtatgagggagttatgaatggagtgactgggctctttcctggcaattatgttgagtctatcatgcattattctgagtaaagctcagcagcgctgtgtcccctcacaggaatagtcaggtcttcccagattatcaaaggccctggggattcccctccaatgaaatgaaggaaggatacaaatgacacaaactatttatg

SEQ ID NO: 5694 - DNA, 674 bp, Canis familiaris
  misc_feature (1)..(674): n = a or c or g or t
cagctgnggtncattctggtcaaggacactcaggccatgaaggaaatgcacttccaccccaaggcnntgaannatgtgaagggccagattggggcacccatgcctgggaaggtgatagacatcaaggtggcagctggggccaaggtggccaagggccagcccctctgtgtgctcagtgccatgaagatggagactgtggtgacttcacccatggagggcactgtccgcaaggtccacgtaaccacagacatgacactggagggcgatgacctcatcctggagattgagtgatcttgccccagattggcagcctggccatccccaccccaagccttcaatagacactgtgctgccagggcaggcccaggccagcccatgcctgagagcagaaaggcttagccctggagctcctgtcctcagctgcttgtggcaggagaaacactgcctgctgtggcacattcctttcctccagccatttgtctttccctgctggacagctgctcacatagtcatctcttgccaaacaagattcctctccttgtcggagactgcaggtgatggtgtgtaggagggcctaagacccaggggagcaggtttaggggtgctacctcgtagggggagatctagctccaagtcctgagaacttcgctcaataaaactggcttcccctnnnn

SEQ ID NO: 5695 - DNA, 589 bp, Canis familiaris
  misc_feature (1)..(589): n = a or c or g or t
gctccctcacccagctcaacgtggnnttctcccgnnagcagccccacaaggnctacgtgcagcacttactgaagagggacaannagcatctgtggcagctgatccacgaggccagcgcccacatctatgtnngcggnnacgctcggaacatggcgagggacgtgcagaacaccttctacgacatcgtggccgaggtgggggccatggagcatgcccaggccgtggactacatcaagaagctgatgaccaagggccgctactccctggacgtgtggagctagaagccacccggccccacctcactcggcccctcgggccccacagacttgcctccccgtgtaatcattttcctggcccccttctgccagtctcccgggatgggttctgctaggccctcccccaggaggcaggcccggggcagaaactggcccaggccccaaggcgcaagccctggagcaccccagccctgcggcaagtggtcaagggtgtgtgttgtgtgaacaccttgagccggtgggggggctgcgcagaaggggctcctctcgcagagctagggctcagccccctccacgtcattttcaatgactgt

SEQ ID NO: 5696 - DNA, 524 bp, Canis familiaris
  misc_feature (1)..(524): n = a or c or g or t
cgnnctnnagcccagaacngnntgcagagcatcatttcctactctgattgtgccaaatccctggaatccgtcctgccatcgccaggagattcgactttgcacctgatttatcaagtactaaacgggaggtcggtcctcagcacttgttacaagtggccagccgtgattaaaaacaccccttccaggaggagcgcatttgaacgtaaccacccccaccccttgctgtctcaaaatggtttggaaaatggggtcctaaaggctaatgccctcgtatgtgattaaatcttggccagaggtcctattcttgagtggacggaccctcaaagatttctgtgagctaggatggatgaccggtctctgggagagggggttcctcctcacgtgttgacatttctctccaccttgtcttcctcgctgggtagccatcaatgtggcaacatattcactatattcttggcaacctgtcacaccctttaaggaagaaatccgtgttctcttgcgcgttgccctatgaggtgaagccg

SEQ ID NO: 5697 - DNA, 622 bp, Canis familiaris
  misc_feature (1)..(622): n = a or c or g or t
taccagaagagacatctacgatcagaagctcacactgcagcnagnnnacaactcgacaattnctctacagatnnnnnncaacaaagtggnntcccagaaaggaatgagcgtgtacgggctggggcggcaagtatacgaccccaagtactgcgctgctcccacagaacccgtcattcacaacggaagtcaaggaacaggaacgaacgggtctgagatcagtgatagcgattatcaggcggagtacccagaggagtaccccggcgagtacccagacgactacccccgggattaccaatacggcgaccaaggcatcgattactaggtcccaccaggagctcagtatttagcccgttgtttttattcagtgagaaccaagctagccttgagtgatttttatcttgtcttcctaaaacactattatgcttattgtacctgaaggaaatactgccttacatacattccctcttcctttccctgcctcttcccccaatagctgcctttagtgccgtaacagtccagtcccacagcagaagcaataactcgcatatgaagttaaaaggaacactgtgaaaggggagtaccttcgtgcagccagttctctcatcaaagacctatgcatttt

SEQ ID NO: 5698 - DNA, 502 bp, Canis familiaris
  misc_feature (1)..(502): n = a or c or g or t
tgcagccactgatggcnnngctgtacccnnactgtggtggaggnnngntggacagccanngtgcctnnntggtcaaatacgcacttggccaggaccgtgagctannntgccactatgataatnnngagctcaccctcaacgtggccctcggcaagaccttcactgggggtgccctgtacttcgggggcctcttccaggcgccgtcagccctggccaggcccctgnnagtggagcatgtggtgggccagggcatcctgcaccggggcggccagctgcatggggcccggcccctgggcacaggtgagcgctggaacctcgtcatctggcttcgggcctctgctgtgcgcnnccgcctgtgccccatgtgcnnncgcaaacccgacctggtggacgacgacgagggcttnggcgatggcttcacccgngaggagcccaccgctgtggatgtgtgcatgctgacttgagccaggtcgggccacgtgggggtagcgtnnnaggccag

SEQ ID NO: 5699 - DNA, 549 bp, Canis familiaris
  misc_feature (1)..(549): n = a or c or g or t
ggcatatnagcatagacatgttgacatgactgacgagaggtgatttaaacgtgatcatttcgncttcagattgagtctaagatacagagctagttttaaaataatcctcagataaaaatctgcattgtcatcaaattaactgactttttctctcttttggcctcactttttgttttcaagtagttctgctatattcactaattcgactagacttggccatacacgggggcgatgtagacctcaaccatttgatggtttcagctccagaaagatgatgggggtggcctcaggagcggcccgatcgcagaacttgtgtatcccttgccgctggtgtgtaagcattcagggaaaccacccagtgtatcggttctgtccaactctgccgaatggagctggactcatggatatctagccgaaaaggggagccagagaagtacatgcataccaaagctgctcgtcctccaacttaaatgatattaatcaacctgcagataattcatactagaacttgcctttgtttagatgtcccttagattcaggaatgtatca

SEQ ID NO: 5700 - DNA, 506 bp, Canis familiaris
  misc_feature (1)..(506): n = a or c or g or t
gtncnnggctgaaancnncaagctgtgtgagacagtgatggctcagatcctggagcatctgaaaaccttggccaaggatgaggctctcnngcgccagagctcactgggcctttccttctttaatagcatcttggcccacggggacctgcgcaacaacagactcaaccagctctctgtcaacctgtggcacctggcacagaggcatggctgtgcagataccaggaccatggtgaaaactctggaatacatcaagaggcgaagcaaacaaccagatatgggtcatctgactgagctggccctcaggcttcctctgcaaacaaggacctgattggtgctttgaagccaagtccagaaagacctgccttgctttttttgttttatttttacatatacaagttggtttaagctttggcctctacccaaatttttgcgacagtggaggaggaattgtcagagcgttaaaatccaatcttgttcctaagagtagcagtgtctgtgcacaagtg

SEQ ID NO: 5701 - DNA, 623 bp, Canis familiaris
  misc_feature (1)..(623): n = a or c or g or t
ctgnngccccccagcatctcagagctccccatggcctcgagccacagctnnctnnacctccnnnnctgactctgagcccccgggctcanncgaactcggccccgagcccagcacccctggctcaccgcctcctgaggaaggggctcggactgggcccccggagcccgtgaaccaggccgaggctgctagtactggagagcccccgccgggggctgggggcttggccttgccctgggaaccccacagcctggagatggtgcttattggctgccatggctctggcacagtccagtggacccaggaagagggcacaggggtctgaccgccagccccagaactcagtgttgccagacctgctgccagcggctgctccgcctgaacccggggcggaggaagcacggcggccatccctgggactccatgctgcctccgggtcagggcagggagcggagaattaaagagggcccagcccccgactccgggtggcctggagcctcaggggcaggccccaggctgggaatcttcgtacccctcagcctcttcctctgaccgtctctccctctgcaggatggggggacagaggcctgaggccaggagggaccctgccatcccctgcatgtgtc

SEQ ID NO: 5702 - DNA, 671 bp, Canis familiaris
  misc_feature (1)..(671): n = a or c or g or t
atccnnaaagcccaccctgacaaggactggttccacctcgtggggctgctgcatgacctggnnnaggtcctggttctggcaggnnngccgcagtgggccgtcgttnnagacaccttccccgttggctgccagccgcaggcctctgtggttttccgtgaatctaccttccaggacaacccagacctccaggatcctcgatacagcaccgagctcggcatgtaccagcctcactgcgggctggagaatgtcctcatgtcctggggccacgacgagtacatgtaccaggtgatgaagttcaacaaattcgctcttcccccggaggccttctacatgatccgcttccactccttctacccttggcacacgggcggcgactaccggcagctgtgcagtgagctcgacctggccatgctcccctgggtgcaggagtttagcaaatttgacctgtacaccaagtgtcccgagctgccagacgtggccacgctgcggccctattaccagggcctcatcgacaagtactgccccggggtcctgagctggtgaccagcctgcgccgctcccacccccgccctcaccccgcccaggcctgcccagtgccccgctccacctgcacacccacggccagcgccccccgcctgaccnnnnngctcactgccaataaagacnnnnnn

SEQ ID NO: 5703 - DNA, 622 bp, Canis familiaris
  misc_feature (1)..(622): n = a or c or g or t
tgcagccggccagcgccgccctgtatgattactacaaccctgagcacaagtgttctgtgttctacggagcacccactaagagcaaactcttgtccacgttgtgctctgctgacgtctgccagtgtgccgaggggaagtgcccccggcagcgtcgtgccctggagcgggggctgcaggacgaggccggctacaggatgaggttcgcctgctactacccccgagtgcagtacggcttccaggttaaggtcctccgagaagatggcagagctgccttccgcctcttcgagaccagcatcacccaagtcattcatttcaccaaggacaccaaggccaaggtcggtcagacccgaaacttcctggttcgagactcttgccgccttcgcttggaacctgggaaggaatatttgatcatgggtctggatggggctacctcggacctcaagggagacccccagtacctgctggactcgaatagctggattgaggagatgccctccaaacgcctgtgccagagcacccgccaccgggcagcctgcgcccagctcagtgacttcctccaggagtatggcactcaggggtgccaggtgtgagggtcacccnnncgcctcccccagctaatacc

SEQ ID NO: 5704 - DNA, 545 bp, Canis familiaris
  misc_feature (1)..(545): n = a or c or g or t
atcggnacnnaccgccgggctccgctccagccacgccattcgcattgctcccctgtggacagtgcccgagtcttggcgcctccacagcactgagcccccgagagactcagcctccgtggaactgctgagaaccctcaaagcatgtcattgtcagtgatccatttttattctatggaactctaacctatttgtgtcatattgaccttttgatgcatgagtcataaattatgaaatcggtcttatggtttttgaaatgtagccagcatttgtaaggctaaacctttttcacaaactgaatttaagtgaataaccaagcggcggctcttctcctgaaggagagtacttatggacatttgaatctctttgcccttttcaacagctatggcatcaggttctaagacaagcttnnntttttcctgttattttaataatatggaaatattagcatagtgtttcttttgatagtgatagactataatccatatttaaattttatagagaagaaattttattgtactgtgatgtagatatttattatccaggta

SEQ ID NO: 5705 - DNA, 654 bp, Canis familiaris
  misc_feature (1)..(654): n = a or c or g or t
acgtgtncgtacgtgtacgcacntnnacgcacgtgtacgtacntgtacgcacgtgtacgtacgtgtacgcacgtgtacgtacgtgtacgcacgtgtacgtacgtgtacgcacgtgtacgtacgtgtacgcacgtgtacgcacgtgtacgtacgtgtacgcacgtgtacgcacgtgtacgcacgtgtacgcacgtgtaccctaaaactatatgtcctgaaaccattgactgaatagcnnnttgattttatgcgtgagttgataaatgataatgaataagtccagctacaagttatttgactgcattagggccgcgacgggcatattccctgagagcagaagataagttagagttagtgccgttgcggtcgtaggtgagtgatagcagattccccccctaaaaattaaaagataccagatgcatgacaccacagttatgtgtgatcatgggctgattagtcattagtccatcgagatgtcccatttgcgagaattagtaggattggagtaaataaagttatggccctgaagtaagaaccagatgccaggtatagtttcatgatagtaacccccacgttagtatgggcccggagcgagaagagggacattacgagcaagggttgatggtttctcgaggcatggtgattaagccctta

SEQ ID NO: 5706 - DNA, 605 bp, Canis familiaris
  misc_feature (1)..(605): n = a or c or g or t
agcccctnnnagtgtacagcgtngacttcatggtnnacaacgcccagctgggcttnntcgtgtctgaccgtgaccgcaacctcatggtgtacatgtacctgccagaagccaaagagagcttcgggggcatgcgcctgctccggcgggcggacttccacgtgggtgcccacgtgaacacgttctggaggaccccgtgccggggggcagcggagggacccagcaagaagtcggttgtgtgggagaataagcacatcacgtggttcgccacactggatgggggcatcgggctgctgctgcccatgcaggagaagacgtaccggcggctactgatgctgcagaacgcgctgaccaccatgctgccccaccatgccggcctcaaccccagggccttccggatgctacacgtggaccggcgtatcctgcagaatgccgtgcggaatgtcctagacggggagctgctcaaccgctacctgtacctgagcaccatggagcgcggcgagctggccaagaagatcggcacaaccccagacattatcttggatgaccttctggagacggaccgtgtcactgcgcatttctagaccccacatgctgccccgacccga

SEQ ID NO: 5707 - DNA, 494 bp, Canis familiaris
  misc_feature (1)..(494): n = a or c or g or t
cgtattgctgaaatcggtnngctgcgagagctgcccattagcataagtgaaaaggcgattccgagggccagggataggggcaggggaagcgggctgggagcggagttgtggacccagcccatcttctcagtttgctttcaagcttctggaactccagcaggtgcagaagactctcccaagagagctatcagaggctaagggactgacaaggcccaggggtcagaagcagctctgccacctgccagctgggtgacctaaacaagtctctgcatcggcctgggctctgctttcctctactgtaaaatgggcgtgataaacccacctggacatttcaccctaacatccagatgaatctgattctagaatgttcctcgcacaagcctgcccctcacaggtgcccagaggtcagcctctcctctcctattgcatcccctgtgaacctcagtcctgtcaaaattcaagtcccatctactcttgcagaagctgcttctctg

SEQ ID NO: 5708 - DNA, 676 bp, Canis familiaris
  misc_feature (1)..(676): n = a or c or g or t
ctgtgctgaaatttgctgnngctactnnngccactcctattgnnnnnngcttcactcctnnnnncttcactaaccagatccnnnnanccttccgagagccaaggcttctggtggttactgatcccagggctgaccaccagcctctcacagaggcatcttacgttaacctgcctaccattgctctgtgtaacacagactctcctctgcgctacgtggacattgccatcccttgcaacaacaagggagctcactcagtgggtctgatgtggtggatgctagcccgggaagtcctgcgcatgcgtggcaccatttcccgtgagcacccatgggaagtcatgcctgatctctacttctacagagatcctgaagagattgaaaaggaagaacaggctgctgctgaaaaggctgtaactaaggaggaatttcagggtgaatggacggctccagctcctgagttcactgctactcagcctgaagttgcagactggtctgaaggcgtgcaggtgccctctgtgcctattcagcagttccctactgaagactggagcgctcagccagccactgaagattggtctgcagctcccactgctcaggccactgaatgggtaggaacaaccactgagtggtcttaagctgctcttccacagaaggaacagaatggaaataaggttgacgg

SEQ ID NO: 5709 - DNA, 470 bp, Canis familiaris
  misc_feature (1)..(470): n = a or c or g or t
aaatgaatctgtcaggcagggatannnnngacgnnnnnnggnnnngttgngagttagcnnnnngctattaatnnncggtgcagataccaagcaccnnnnnngtgctgacgtgatacagggagaggaacagggagtggctgttggggaccctcaccccccnncggcatccacagggctgtgnnnncctgnnncatgtatnnncacccccccccacccccactccccagcttgggttgcaacaagcccatggttgagtcannnaggcgtaggccttcagacccttgactgggcacgggcagcaccaaaccagctagtcttcaagaggccctggtaagtggagggaagctgggagctcccgggctggtgggcgcagcaaagccaggctgcctgaggatcagcaggaccccagagaggcagctgggagaagatgacctgatccggtgccctctgcgagcccctcgttcctggac

SEQ ID NO: 5710 - DNA, 639 bp, Canis familiaris
  misc_feature (1)..(639): n = a or c or g or t
gcagnggtacaatctttttctcnnnctgcatgagctnnnnnnncagtacatccgggacttgtgcnnnngtctcaagccggacacgcagccacagatgattcaggccaagctgttaaaggcagaccttcacggggctctcatttcagtcacaaaatccaaatgcccctcctatgtgggtgtcacgggaatcctcctacaggaaacgaagcacgttttcaaaatcatcaccaaagaagaccgcctgaaagttatccccaagctgaactgcgtgttcacagtggaaatcgatggcttcatttcctacatttatggaagcaaattccagcttcggtcaagtgaacgatcagcaaagaaattcaaagcaaagggaacagtggacctgtgaggtctttgctgcggaggcgactgtgtgtgccccgaggactgggaccgcctgcgtgccctccttgcacgaagaggtggccgggccggctgtggttctcgaccagcgcggcgcgtcaccaccagagttaggaaccattcatcggggggtccctgggtggcgcagcggtttggcgcctgcctttggtccaggcgtgatcctggagtcccgggatcgagtnnnnnntcgggctcccggcnnnnagcctgctgctccct

SEQ ID NO: 5711 - DNA, 486 bp, Canis familiaris
  misc_feature (1)..(486): n = a or c or g or t
cccggggcttccgccgnnngcacctcaccaccnnngaccagcngcagttctatgcccacctgggctatcacctgggtgagcctgtgcagggcctagtcttcactagccgacggctatctgccaccctgctcagggcctttcccagagccccctctccccggccaccctacaaggctcctagtgtaactgcccaaactgccccaagagcccacaaggggccatcgttgccaccaccccctcccctgcctgagcccttgacctcctctctcccacctcccgctgggctccctccacaaagcctgctggagactcagtaccaggatctgagaggatgccccatattctggatggaaaaggacatctgagggctacccagggcagggcactgtccttcagggtcgatggactgcttaggacactaccagcctcagcccatgggccatacctcaggctctagcccctggggacagctttagcctgaccaca

SEQ ID NO: 5712 - DNA, 498 bp, Canis familiaris
  misc_feature (1)..(498): n = a or c or g or t
tccttggcctttttttcacaaaagccagatgaaggaatgagaaatggtcgtcatggtgcttaatcactgaaaactcccaactgcaagcttcttgtccctccctcaggagagcaaaagcttgtcataaatcgccagggagcggggtttgactgagccttagtggctcatctggagaggacagcccctagtgactgtccccatcccgggagtgacttatttctctccccccccaccccaaccccctcccctggcagctctgctgcaatggcccacaccttactcagaatcactacacattcctcagtcttccttcaagctccagagccagtggtacaaatgctttattgaaactacatagtgtgtaaaatgaaagagggcagggaagttagcatagnannnacnnnnnacaggggccnnnnngtggcctcagtgggtgagnnnnnnngggcatgctcagccccatccagccannnnngagggaagttcacttgtgatctc

SEQ ID NO: 5713 - DNA, 632 bp, Canis familiaris
cccacattttcagtttttatttaatatgcctagagggcatgacagccctctttgacagtggtactccgtgatcttcagaaagcaccataatgtcatatctactctatatacattacccaagacaaatgatttatttaagagttactatattaaaaagttctttttaattccaactaaattctcaccttcatataaggaaatgtattctcaccttcatataaggaaatgtatcttccttagagacataaatttgctgttgaaacatgggagctggctcactctaaggaatattccacttacatgccatggcctgagccatgtaccatgtctcacttgggtcttatttttaaatatatatatattttttgtccacatgggcagtcagcctgcgagttgatttttgaaaaattaccaaagtttctgggaaaacatgttcaaggctaaactgaagaatggatctaattttattatttgttttgtaaggaagaaatctttctttgaactggtctttcattctttcttcccaaactaggttatagattttcaactgcaaaattcaggttgcttagacactgttttccagcattctgcagggtagatcagttgtatggaagttggaatgttcttttccc

SEQ ID NO: 5714 - DNA, 579 bp, Canis familiaris
  misc_feature (1)..(579): n = a or c or g or t
cagagaacgccagttcttccatgatgcanaatgaannaccaaggttgaatgagtcacagctacgtnnaagagacaagggcacctccctggacccatcaaaaatgacctccttgattctgacgaagaatagagagggaatgcagaggccgagattcacagtgtcgtgctgtccaaagagaagcacaaactccagccaagagccagctccagatatgaagccactctggtccaggaacagatatcctgccacaaagagaggtcgcgccaccatgacggtgtacccatccttgcacatatacacatacccctagggtgccttggccgtgccacacaggtgcttccttggcctattttgggttagatacattttgtaatgagaggagttgtatgattgggagcttcattgactcgagacatactgtgttgtgtgttcatcgcacgctgaccttatgctatgtgcttacattgtgtgcatgcccttaggatgcatatctcatgaattagattgctcttttcacaaagtaaaattttataatgatgtatagaaaagcttcctttnnnngaaattgaaatgtgtac

SEQ ID NO: 5715 - DNA, 650 bp, Canis familiaris
tcccgcccatctgccacccttcccaagtgccccccacgggtcatcacagtgctcatgaccacactgaccaagctggcctcccggagccaagacctgattcccagggtctctctgttcctgtcaaagatgaggagcctggcccagaacccagccccgagctccgaccgctgtggggaggacgcgggggctgtctgcacacgggccgccgagctgcttaccctgctgaaaatgcccagcgtggcccagttcgtgctcacgcccagtgctgaggtgtcagagcctcgctaccaccgtgacaccaacacggctctgcccctggccctgcgcaccgtcagtcgcctggtggagaaggaggcaggcctcctgctggggtgaagggatgaagacccagtggaggctggctgggctgcagataagagccctgtattagggccagactgcggcttccagaaccagagggcccgtcaggaggggtgtgagacccggggaggagcttggggtgggtcacacggctgtcccatgcacaccttcctctggttgtgtttctcgtgcactgagctgtgctgaaacaggtctgactcaagctctcactccatttggggctagatgggggctgcttggtctgtttctggctgctccttgtttggggg

SEQ ID NO: 5716 - DNA, 485 bp, Canis familiaris
  misc_feature (1)..(485): n = a or c or g or t
agacttcctcttagatgcctttctcctttccaaccnnntgacaagactctcctcaaaaatgggaaggtcttcatgagacagagcaatcaggaacccaggcacagagctggaggactggagaaggaagatgcctgcagagcggtagggaggtggcagctttacttcaggcctcctaacaaggaggacagaaggggcaggggacagccctgtcctgacagaggtgggcagcacaccatattgcaagggaggtatgttttttgaggactggcagtgcggtagagtggaacaaacgtgggccttggaattcaacagactgacttttaatctaggtctgtcatcagccagctggtcaagtttaacctccaaagcctcagttttcttttctgcgaaacggggccactaacaaccctgaagggttggttgtcaagagcattaaacctaagagtatgcaaaacacagctggcccatggagtaggtgctccatg

SEQ ID NO: 5717 - DNA, 604 bp, Canis familiaris
  misc_feature (1)..(604): n = a or c or g or t
ctaccagaccggnnagtcactgcccaaaagtatggtgtctcggctttgtgaatctaaaaaggtgtgcgctgcagctgatatgcaacttcaggtcttttacgccactctggatcaaatctaccatgggaaacaccccttgaggacatcaaccacagacattctcagggaaacacaggagaaattttatggcttaccatacgttccaaatactgcctggcagcttcgattcagccatcttgtgggctatggtgccaagtactactcttacctgatgtccagggcagtagcttccatggtgtggaaagagtgttttcaacaagatccttttaacagggcagcaggggagcgttatcgcagggagatgctggcacacggcggaggcaaggagcccatgctcatggtacaaggtatgcttcagaagtgtccttctatggatgactttgtaagtgcccttgtttccgacttggatccagatttcgaaactttcctcatggattctgaatgatagaagcaccttggatcttttaaatcaagatcgtgtagatacgaacttggttgtaaatgctacagctgtgaacactcatttctgatttcagtattctaa

SEQ ID NO: 5718 - DNA, 655 bp, Canis familiaris
  misc_feature (1)..(655): n = a or c or g or t
ttgtgttaaggnnnaaacttgantggagaattnnnaaactnnnntccctcaacaacaacaaaatgggaaagccgattaaaacacccatnngccaaatatggggncagccatcggcaacacttgccaagcaacaacggggtagaaatttctgtgttccccacactcgacagtagtgttcacacgtgacctttttacatcaccttatgtacacaacaggagctacttccttcatttcctttaactgttgtctaacaatagtgttgactgtatgggtaagagccagcaagtgcccttaggatgccgcatggaaaaaagcagttgtaataattccaaagtgggaatctatttattatgtagcaccgtggctaagaaggaagagcctgagggacatatccatgtggtcgcaccactttgcacacccctgtcctcactggcctcatgaagcccggcacgatgggaatcagagtccgggatctgggcggctctgtgtaagtgggctgattagcagccaaagtcatttttaacatgctcctttttctctactctttgctaggacctggttggcaaattacttagctgttattaaaaaaaaaaaaattaagagaaagagaggggaaaggaacaaaaggaatatctccctgaattctttttctgc

SEQ ID NO: 5719 - DNA, 463 bp, Canis familiaris
  misc_feature (1)..(463): n = a or c or g or t
acggtgannngctgtgtnnctttgggcaaatcccttcacagcctctgtacggctgtagcagggacccagccaagtcccaggaggacacacccagcgtcttgccgggcccagcgcagggaaggtcctctggagacccactgtgctggccctggtgcgggaactcatagcgaaagacccaaagacttggttcttgccttcaggggttcccagatctgtggcaccggatgagagcagaagggacattcatgccactttccctcgagagacgtccaggggagactggctcacatctgatctgtgcccctgggcacttccagccttagagctatgtaggccaggaaggctgctccgggcagcaggggcagcaaagtgggggtgggggtgtgtgtggggtggtggtggtggggggtcatgacaggtaccttggaccctgcaaggatgagagattttagggtacctgggt

SEQ ID NO: 5720 - DNA, 480 bp, Canis familiaris
  misc_feature (1)..(480): n = a or c or g or t
ctgacgcnntgcgcatgnntgctggcgctggnnntgcccntaggccctcacagctcccaccctcctcgcccccgtgctgagcacccttgcaccacctgtcccagccccctggggtcccagtgctgagggctgggccccccagcttccctgccctgtgaggtggggccctgggatgggctgagatccccctcccgggcctctctctcacccctgcaggagtcagaagatggggcccttcacggctgctagaaggggacttgtggtcaacccttccaccaaccactccctcgctgcccctgtagggagggtacccaagacccctgccctcacctgtgccttcatctccccccaggccccgccccagagttggggcagagggcggggcccccagcacctggggccccctagtccaagcagtattacttctgagaactttgcacctgctcctccctcctcgtttgacatgttttgctgaggaac

SEQ ID NO: 5721 - DNA, 148 bp, Canis familiaris
  misc_feature (1)..(148): n = a or c or g or t
agnnncagcttgacccgcnncnaccaaaatgtctatgtatgcacagggncgctcttcctgcccagnnnggaggnnnnnnncaagtcctacgtgaagtatcaggtcattggcaagaaccacgtnnnggtgcccacccacttcttcaaag

SEQ ID NO: 5722 - DNA, 603 bp, Canis familiaris
  misc_feature (1)..(603): n = a or c or g or t
cacctannntcagtagctccccaccactgatttactactgaacacttggtnnnactnngcgggtcagggtgtggnnnttgtccaagggcatgcnnagggcacggccccaggcagggccggccagtggtcaccctgacctttgagatgctttcgctctcccttttgactcttgaaaaaccaaaccaagccaaacaacaaaggaaacccgcacaacttaaaagaaaacttgaaagggatcgtatactactagtttgtactaagtttttttcaggaaagggaaataaatttatatatatatgcaatatatttttacactgttttgttaccattagggagttctgagtgtatcactttatcagtgtgatggtgacgtagcgtcgacgtcttgggtgttctgactcagaaaggcacatctgtgggcatctaagagccgtgctcaccaggaacgtctatgggtacagggtggccctcctctccatccccagagcgtgaggcacggtgtcacctgtcagacctgctatcaaggcctggcttgcaaacctttagtgaaacagctcatgtctgtctgcatatttctcctcctgtgtttgctgttgttaacat

SEQ ID NO: 5723 - DNA, 371 bp, Canis familiaris
  misc_feature (1)..(371): n = a or c or g or t
gaagaattttgcaaatggcttgtccaaaatgnngaaaaacannngncttacagactgctaaaggcttcactgaagnnncaggtcatcagttatggtnnntgcagnnnaaaagtngnnnaaactttttacaacatgggcaggannnnnttcgccaaaggagagctcagaaaggccattcagctgttnnanaagnnnnngatgattcaaatctttttatatnnnagtgagcacagtnnnngcagagacacaaaagacctcctnnccttgttgcagagnnnnagtnnnagttcatccaggtggagaagagaaaccatnnnangaagaaggaactgnnnatgcaaaggcnnnnnggtatgacagaggacatcgta

SEQ ID NO: 5724 - DNA, 615 bp, Canis familiaris
  misc_feature (1)..(606): n = a or c or g or t
ctacngtctttgatccctnctggganctctcattgcccatcgctangcgaggnnatcccgaggtaactttaacggactgcatgaggctcttcaccaaagaggatgtgcttgatggtgatgaaaagccaacatgctgtcgctgccgagccagaaaacgatgtataaagaagtnctccatccagaggttcccaaagatcttggtgctccatctgaagcggttctcagaatccagaatacgaaccagcaagctcacaacatttgtgaatttcccactaagagacctggacctgagagaatttgcctcagaaaacaccaaccacgctgtttacaacctgtacgctgtgtccaatcactctggaaccaccatgggcggccattacacagcctactgccggagtccagtgacaggcgaatggcacactttcaatgactccagcgtcacacccatgtcctccagccaagtgcgcaccagcgacgcctacctgctcttctatgaactggccagtccaccctcccgcatgtagcagcgaggcgctctatccctctctcccttccccggggtggccccnnnnnnctaagtggtttttttttttaagacaaaaaaaaaaaaaaaaa

SEQ ID NO: 5725 - DNA, 638 bp, Canis familiaris
  misc_feature (1)..(638): n = a or c or g or t
tttcangnngccatcagcnnatgtacacatgcacgctgtagnngcaacgtttatccctttgcctgcagcctactttggnnaaaaaagtgccttactgactgtagccattacagtatccaatgtattttgacaggtgcctgtccttaaaaaaaaaaaaaagtttttgttttgtttttttttaattggtttttgtttcttactgttggccaactcttaaatccccagcaaatcactgggccattggattttttccattatgttcattacccttgtaccgtgtacctcagatctctttctctctcagttacagtttctcgtcttggacttcttttattattattataattttttttttgctttaaaatgagtgtgatgccatatcgagtcaatgttattctctcacagtgtactctataagaggtgtgggtgtttatttggtcgggatgctagcaagtgctaaagtagcatgatcggtataagcaaaaggtttttaggaagtatggaaaaatgttttattggttatgatggtgacatggtatagtcagctgccttttaagaggtcctgtctgttcagtgttaagtgatttttaaaaataatggcctgttattctgaccagcttaaagatggatttgcaaat

SEQ ID NO: 5726 - DNA, 639 bp, Canis familiaris
  misc_feature (1)..(639): n = a or c or g or t
ccgtggcgtaaatactttcacngtngccgaggtgcanactctcagtagaatacgtctaaccagagttgggaataaaagcaccgttggcacttgtgagctggtgcggtcctgctctggcgccccgctgtttacatcntagtcacccgactgggaagataaaatcttagaagaatgcgtgagcacacactctattagctgtacgagccgggacaccatcgcgtgtcatttaacctctgggaatcagcatcgtacacttggaggagtacaagtgtgaaaaggtgaacgacatttgaaaattaagtgtccagtttggtgaaatctgaccgatgtgtacagccctgaggcgctctaatcaggatggcgagcagccctcctctcggcccgcccccagccttccggtgctctctagaatccctccgtactcttctcagccccaggccgtcactgatcagctttgtcaccgtaggttagtttgaattttctgtaattacctaaaagtggaatcctaccacgtgaatacttttttgtcttctttcactcatcgtaattatttggagactcatccctgcgtgtatcactgatttctttgttaattgctaaatggtagcccactaagcggatataccataatttaaataa

SEQ ID NO: 5727 - DNA, 623 bp, Canis familiaris
  misc_feature (1)..(623): n = a or c or g or t
tcacagtcagaccaggnnnncactnnntctccccacaacgccatgcaacttcatgtacaagttttnnagcnngatgtacaaccgctttgaaaagggactgcagccccgacagtctgttacagattaccttatggcagtgaaagaggagacccagcagctggaggaagaactagaggccctagaagaaagactggaaaaaattcaaaaagtccagttaaaccacactaaagtgaaaagtaagccgagtgaacccagcaaacactcagggttttctacctcagacaacagcacagccaacactccccaggattacagtggaaatatgaagtcatttccatccaggagtccttcacaaggtgatgaagattctgctctcatcctaacccaagacaatttgaaaagttcagatccagatctctcagccaacagtgatcaggagtctggggtcgaggatttaagctgccggtctccaagtggtggggagtgtgcaccaagtgaagacagtggcaaggaccgcgattctgatgaagctgtgtttctcactgcctgaagtttcccttgtggagatccaacataaaggacacacaagaaacactttccaaaaataagggagcagtgcaatt

SEQ ID NO: 5728 - DNA, 550 bp, Canis familiaris
  misc_feature (1)..(550): n = a or c or g or t
ggcntgtagggccatccntgctccagagcccacaccgagnaggnctcggcgacgccagcagggcccggatacaccagagacggggtgctacacatgggattctccgctcaaataagctacccgagaatgatttccaagcacttttaattttttgccttttaaaaacatcttttttttttccttttttcctttgatgcactgaacacctggaagtcacctttacttgcctttgcagaaaacaggacttaaccaaacccaagtgagcatcatgccatgatgtttggctgtgccagcgtccagacagggcctggaggaaccactgccagcaccagaggagccccccttcttccatgacactttccttccttccttcttttcctttttctttccaggaaaaagagaaagagagaaagagagagaaaagaaaaaagactttttgctgtatcactgtgtgggaaacacctacagagctgaaagagccaggtattttacctgatgagcagaaggggttgttcattggcagaaannnnncctactttcagttgatggg

SEQ ID NO: 5729 - DNA, 541 bp, Canis familiaris
cagctattctggtccagaatcagtctgtagaacacagtgttaggtggagttaggaaagatccctggagtggactggtggtgagaggctgggagcagaggagtgatttctgtacttgttctgcagcgttacctaaagcgtatctttaaaggcagttttggtaggtctgaggtattggcctggtagctgacagaagagtctttttacttcattcacattgaaaatctataaaattagtaggtcctactatggtccttatatcaggaaaaagtgcttctgtgtttgtatcctacaattggccacgagatgtgtaagacagctgggcacgcttgttctgcagcagacctacaagtcttctgtgaattgatgaaattcttgtccttgctggtgaactgctctgactcccaaacctgagattttgtttttgttttgtttttttttttctgatggctttagttttcccctctagggaaaggagcaagaagtccgcttttaagaaatagaacttgtcataaattgctacttgcagttcgaatgtccttc

SEQ ID NO: 5730 - DNA, 662 bp, Canis familiaris
  misc_feature (1)..(662): n = a or c or g or t
agnccacgacgccanngccaaccaattcctggttttactctgaaaattttttagataaacagagtcgttttctcatatttgaaaaatcaatgttctacaacttggaagttttcattttcttacactttgctataaaaatcttggccattattcaagtggaacatgagctgtccactagctttgttgcagtgttcgatattattgttttaaattaatttcattttatacaggagagccttcaaaactattaattataagctccatgctaaaaacaattttacaaacgtttagtcgtagcaaaaataagtattttgaccgatggctcggtttttgcatgtccacgtccagaaggcgtacgtagtgcatggtagtccgtcttaaaggcttgaccgcccttgtgaaagctaggctcttaactggggaatctgctgttattctagcaacactacagtcacgttgccgatttataaactgttttcaagagctcagtttttgtaaatactgcactacaaaatcaattctgaggaagaaaatcacttatttatggtattagaaataatttctacagtaatctttaaactcaaaaccaagcaaaagatgtttgtagatacatagtatctatttggaacagaggtttttgtaactaatttgtttcatttttt

SEQ ID NO: 5731 - DNA, 152 bp, Canis familiaris
tgcctgctggaccatgtgagcctgaggtttctctacggtcagcacagggtcccctgggcctcctggtcactaccaagcaggcccttcaagcctcaagacagccaaggtacaggagcatttctcctcaacccagacactggagcaggacttca

SEQ ID NO: 5732 - DNA, 593 bp, Canis familiaris
  misc_feature (1)..(593): n = a or c or g or t
cgaccannntggcgcagagcccagtgccaactctgtgtcggcccacaacctgcttcggatgcacggctttacgggtcacaaagactggatggacaagtgtgtgtgtctcttgactgccttctccgagcgcatgcgccgtgtccctgtggcattgccagagatggtccgcgccctctcagcccaccagcagaccctcaagcagatcgtgatctgtggagatccccaggccaaggataccaaggctctgctgcagtgtgtccactccatctacatccctaacaaggtgctgatcctggccaacggggacccctccagtttcctgtcccgccagctgcctttcctgagtaccttgcggcggctggaagaccgggccacggcctacgtgtgtgaggaccaagcttgctcaatgcccatcacggagccctgcgagttacggaaactgttacaccaatgacttcctcgaccgtgtcaggcaggggcaggaggccgagcttcccagctggccggagactcaggcccagtagggccctgtgcatgctgtggccatccctgggcgccctgtcaccagannnnnnnggccatcctcaccatcc

SEQ ID NO: 5733 - DNA, 588 bp, Canis familiaris
  misc_feature (1)..(588): n = a or c or g or t
gtggctagtgcaagatccccagagggagtgnnncnggagacagagcgcaggtgagggatagcctgggtgcacgggcaagagccaccattctggcgtgcttcacctccattagtacgtggggtgtgcctgcatgtgcacacccagacacgggtctgcagtcagcaggtgcctgtgagaaggggctctgggactggactgcagagcgctcctatagggataccccacatctcctgctgatttgagaagttgaaaagatgaatcctaagagacttaacatcactcaaagacatccaagataaagctgtcctaagtcgtgcccacatggggcagagagaggagcaagaggaggggagttttgctccactgggagaagcaggccagccagacaacactgctgggcactggcagggggtgggggctggaaggatggggtgggcgactggccttcctctgtctctggctttcaatcaagggagtcctctaaactgactttaaaaccccagagacagcagagacctgactatcagcatttctgcatggtgccacgatctcctgagtgtctgatgctcatgtccagcccacttggag

SEQ ID NO: 5734 - DNA, 444 bp, Canis familiaris
  misc_feature (1)..(444): n = a or c or g or t
actgctacagtnnaaggtgatctacaggagaactatccttgcattagaaaatctctactcaaaacaatgatcccaagagcactattggagatgctatcaatgatggagcccccctccttttacctgagacatctagattcaccccaggagacttgagggaaaattgtgacttgtaggaaaggactagacaaccattgggagttctccagatatgctcagcctaacgcaaggaatttggctttgatctttttttctgatagcatttctagcaagttggaagtctcatgggataaaactgcagttcccctggttcagtagcttgaacagtgattttaaatgtccccttttctggatcctttgtaaacatgaaatcattccatggatggctgccttataattttgtctttccacattaattgtgaatggttaaaaaaaatttttttt

SEQ ID NO: 5735 - DNA, 638 bp, Canis familiaris
  misc_feature (1)..(638): n = a or c or g or t
ctatcntcttcatgttcatccagattgctatcatctccatcttcaagtcctacccaacggtgggggatgtggccctctacatggncttcttccctgtgtggaatcatctctacagattcctgagaaacatctttgtcctcacctgtatcatcatcgtctgctccctgctcttccctgtcctgtggcacctctggatttatgcaggaagtgccaactctaatttcttttatgccatcacgctgaccttcaacgttgggcagatcctgctcatctctgattacttctatgccttcctgcggcgggagtactacctcacacatggtctctacttgactgccaaggacggcacagaggccatgcttgtgctcaagtaggcctggctgggcacagggctgcatggacttcagggggtcaaagggccagaggctgggcccagccctctagccagagttcccagcagaggagtcctcaggcaaatgaggttcgagtccagggttacaaatctctggcaccagaggggagccatggctggcagcaaggcctgtggggaatagccaggagcaactccacttggacccccactttttggctctgcataccagggaaccccctccatgctggaaaggggaagaagcagg

SEQ ID NO: 5736 - DNA, 432 bp, Canis familiaris
  misc_feature (1)..(432): n = a or c or g or t
gtggggtcacgcttgcctcccggggtggttccgannactgatggtcaagaaagtaaagaacttgatattaggcctggatcgttagcacttagtgaacacttggtattaccgcgttgannctgtgaaaaggcacccccagagcagggcaggaagagacttccacgtttgagaccccagggcagagtcagctgtgaggtgcgaggtctggccgccaagggacaccaggtccgaaccctgccacctgcttggaattgtcctgcctggggggcaaggaagattctggaagactccnnnnnnnngtgggcattggctgttgccctcagctttggaaagcctggagtcctgaagatggaggctttgtcggggtgcctgggtggctcagttggttaagcggttaaacacctgccttcagctcaggncgtgatcccaggg

SEQ ID NO: 5737 - DNA, 642 bp, Canis familiaris
  misc_feature (1)..(642): n = a or c or g or t
cntaatgaattcatggcaggtttttatataatnncaaataaactaaaggaaaactaccaaatgctaacnctgnnaggtgatgctgaactggaacttgtagacagcttggatcctttctctgaaggaatcatgttcagtgttcgaccacctaagaaaagttggaagaagatcttcaatctttcaggaggagagaaaacacttagttcattggctttagtatttgctcttcaccactacaaacccactcctctgtacttcatggatgagatcgatgcagcccttgattttaaaaatgtgtccattgttgcattttatatatatgaataaacaaaaaatgcccagttcataataatttctcttcgaaataatatgtttgagatttcagacagatttattggaatatataagacatacaatataacaaaaagtgttgcagtaaatccaaaacaaattgcatctaaaggattttgttgaatttgtttatattccagattcttcaaattggatcagtataaattcagcatattgtattattgagattttctatttgtaaaggattataaattatgtaaaatatatattcctaaattggatcatgtaattaattggtttctattttatgctattaggaaaaataaagtc

SEQ ID NO: 5738 - DNA, 480 bp, Canis familiaris
  misc_feature (1)..(480): n = a or c or g or t
gcacgtcaacaccaatgccaacttctacaaggactcnggcattacctacctgggcatcaaggccaatgacacgcaggagttcaacctcagcgcctactttgaaagggctgcagacttcatcgaccaggccctggctcaaaagaatggccgggtccttgtccactgccgggaaggttacagccgctccccaaccctagttatcgcgtacctcatgatgcggcagaagatggatgtcaagtctgccctgagcatcgtgaggcagaaccgtgagatcggccccaacgatggtttcctggcccagctatgccagctcaatgacaaactagtcaaggaggggaaattgaaactctagggcactcccgctgcctcttctctagcggcagacaggggaggccctggtcgaggtgtcccaagccgccatgtttaggaaacacagtgtaccctgctcccagcatcaccaggcacttgcccacaagtctg

SEQ ID NO: 5739 - DNA, 132 bp, Canis familiaris
gaaatgtgtcaggcaaacccctccaccctccccaccggagctctctggtgtggccggggcattggaggccatggctgccatcttgtcaccttgcgatgaggaacacaagggacgctcgcccagaccttgagc

SEQ ID NO: 5740 - DNA, 557 bp, Canis familiaris
  misc_feature (1)..(557): n = a or c or g or t
caggtnnnngnnagcacgagggnnnnnnagcctgttaccctgcanctgnnnnngcccagagcccaggtgaggtccgcgctgaggatgctnnngnnnnncagcagcaannnggcgcaggagtttgtcaagagactcaaggagctggagaagtgcatggaggcggacccctgaggcctcctgagcccccgagctgcccccatcctgccctgcgggcagctctgcgcaggcagggctccttccccgaccccgccatgtcatgtgcatgctgtggctggccctccagctcctttctgccctggctgtgtctgcgtggtgtgtaccgtgaaccccttgctaccagcagcacccccaatctgggtctgggggctcactcggtggggcctggccagcagctgtccccctggatgcagagcagagcacgcccggccaccagcttcactgggcgggctcggaggccccagagcacagccgtgtcagaagcatggggatagagtccagtgccacgagggctgaggctgccaggcctgtctgtgtccccacgagtcctgctgtatctt

SEQ ID NO: 5741 - DNA, 603 bp, Canis familiaris
  misc_feature (1)..(603): n = a or c or g or t
ctgaannagagattcagcnnnnnnngcanncgtgccccaaaaccatngncntcatcatccactccttnntctcagcnnnagtcacccgcctggggcttttggnctagaggtcaccagatgcactagccctgaagagagggtgtctgccacgtggcgtgacctggccctccgctgactgcctgctcatcactgggctgagggaagggagaggaaaggaataagtgtgcaaagtcccggcctctaagggactcccttagaggctgggatagtcttgggactgggaaccagactcaggacacagtggatcctgcctgtgatggggtaacctcctagctgccccaccattcccccaccagtgccttttgcagagagatattttgtgtacacaaaagccattccgagcctgggacctgcccctgtggggatcttgaccccagacaacaactgccaggcctcctagaggcccctacaccaccctcagaggcctcatctgaagctggagttccctggggtccatggcaagagaaagaggaggaacctttctgttcatttctcccctcagcnnnaccaccttggggcnnnnnnntttcttctcatcctctc

SEQ ID NO: 5742 - DNA, 598 bp, Canis familiaris
  misc_feature (1)..(598): n = a or c or g or t
atctggcnaatgaaggaatgtnntcatgtttaagaaaatactcattttctgaaaacagaatacccaattctctcttccattttgatggaattccagaacaaaccctcgccgtcacaatcccagtaaaactaaagaaaagggattgtaggacatgcagactgttgatattacatatatgtattgtggtttcctcatgtcccctgcctctcttgatttgcggttttccaatgtcccctgtcacgtgcccagagaactttctttgaaggtaaaagctgtgcaaaaggcatgagactcaggcctattctttgtttaaatggtggaaaatataaattattttctaaataataaagatatgaaaattatcattgtaaataaagtctacagtttgaaatgactgctttataaaagtgaactatttgtgtgatgaacaactcctgactaatgagaagtgaataatcaaaaactcatttctatcctactctggcaggtatttttggtgcttctctgtcaatatgggatgtccattctcctcgccttttaaactagttcnnnaatcagaatgaaaaccacagtaaggatcttcctatcgtctcttcca

SEQ ID NO: 5743 - DNA, 451 bp, Canis familiaris
ccaggagagacacccagttgaggggccaaagggaagacccaaggcagagggagggaggcccgtggacgacccccggggggctcccccttcgctacactggaattttaccttatcagaaataccttgaaataagtgagtcgtcgctccagctcggaaaacgaaatgggaaaccacatgaatttgggcctgagaagtttgagatctgttgactatggacaaagtttacctttgcaccgtcagttaaaaaaagaaaaggcatttgtttagcaaattaaaagcataaaccacattgctagggatggcatatctagtccacctaaaagtatactttggaggcactttaggaatatctacatagaagtagcgtgtgcatggcctaatcatcaattctcctgtgtttgttcaagaaacactcgcaagaccttcactcagtgacattttgtaagacatt

SEQ ID NO: 5744 - DNA, 613 bp, Canis familiaris
  misc_feature (1)..(613): n = a or c or g or t
anatcnctcagcagatnacaaaggtcattttcctaatgacttttttttagagtttctacagtgattaatcaggtttggattaaacaaatcaatggtgtggggggaaatcaaaacagaattgcttaatatgttttccaaaggactgagtgtgtgtctgttatacaagaaagtatcatctgagggtgataatgatctttgagatttttttagagataccatttttaagggggctaatccttagaataccacaatcagaagtgaagctcttaaagaatgtaaaaatagaaaacaaatagttctaagaatattctggcataaaatcagtttatttaaccagtaacagaagccttctaatgtatctgtcggacaccatagagctgcttacagtgagttagggtcaaagaagatgcttgcttgcacttatgtttggcttgctatctctctagttttgaatgtcctttgttaaaattggaaaataagatgaaaaacgttatccgggcagaaatgtcaaattgtttattttgtgaactacaattgttcactttttaaaaatacgttaaagatatatacaaatgacttttaagttgatgttacagtagcaaaacagaaaacc

SEQ ID NO: 5745 - DNA, 665 bp, Canis familiaris
  misc_feature (1)..(665): n = a or c or g or t
taatccccgagtccaagaaattnacaatttagcaaaggaagttgacttgactcataaatacannnnntaaaacaattcaacagatgctaggtgagacaggtcggccaggcacatggcaggaaagagtggatcccgcctggtggatctggaaggctcatgggggggcggcgttgggccaaagcatgaccagggtcttagccacggggggaatggggggtgcgctcccaacacaggaaagcttgaccaagcaagcacctgccagagggaccgctagtaaagtgggaggaagcctgcgtttgttcatcttaacgtactgtcccgtgcagcccaggaccatctcgccccacggccctacatgaggtccctccctgggaattggaaaatggtcagtgagaagacgaaacattcctaaggatctaaacttttgtgccattgtcagtaagccacgttggttattgcttcgcctcagcacacaggccttttagggagacgtctattcggcccagggaaacagaaggatgcgtattttgttgccacttattcgtcaagaagcaagtgaactgatgagggagagcaaccatatgtcagtccaactgtagcagttaaatcctagtatttttgtaatttgcaatattttactataacataataaaacagcaaaaacn

SEQ ID NO: 5746 - DNA, 644 bp, Canis familiaris
  misc_feature (1)..(644): n = a or c or g or t
actggtgattctgccccagcacctgggttccatcatcggaccctgtcacctgtgagctcctgcaggcannagcaaaaaatacccgttgctagcaaacaaatctggctttgatgtaaaaccaattcgagtcaggttgttgatgaatccttcccccacacgcccccaccccacccagaactctcaccgagcttgtaccatcaggatccccccacccccccgttctggggctgttccccgtccctgagcgggtgggggtggcagaggtggccggccgtgcgggcctcgtgagtagaggtgggccgggagggctccctggaggtgggctatgtttacaagacaacagtgtgccaaagtgacttactgtggttgcattatttcttagtcatcgggacgatcccaccctctcactcccgtttttacaaatacagattctttcccaagagccctttgagcaaagcgtggcgaagtcagtcctcttctctctgatggtctttcttatgtcttcataaaagctaaaatgatggtatctgtgagtatgttttgcaaattcaaaatatagtttggtaattttttttccagttgatttttaaaaaagaactgctgtacagagcttgtactttgtccattttatagatggaaaccat

SEQ ID NO: 5747 - DNA, 586 bp, Canis familiaris
  misc_feature (1)..(586): n = a or c or g or t
aagaccaaannctgcggcgcttcccggnctttcgcaannnnnnngcggtgttccgccgcccctcaatcctcgctcccaccagcggcccgcggcccgcccacctgcccggatccaccccagcctcaaggtcngagggcgccccgcggcgggggcctggccccagctacctgctgagtcgccctaggggccgaggcacggctcctggtccaagaccctcagggggcatctctgcggagctggaggcagaagacaaggaaagcgggcgtgagggcagcggtccgcagcagaagcctccgccgcgctatggatcccgccgccccaacaacccacgccgccgcccgcagcaggcgcctggtgcccagggccaggacaccgtgggagcagaagccaagatcgggaagagcaagagcagcggcgctgaggaggaggacgccttggtctcggttgtcccctctgccgcccaggccgagtaggaagcaacagcctagctctctccccagggactcccaggcctgggctgcaggggatgtccccttgaggagatgatggcctttaatgcaatgcagtccaaacatccaccttgact

SEQ ID NO: 5748 - DNA, 612 bp, Canis familiaris
  misc_feature (1)..(612): n = a or c or g or t
tgttattatggaaaaagatgcgtatcatacagattttttttcttttttnnagagtgagcacaggggcaggtacagagagaaagtgagannngctcannnaggctctctgctgagctnnngncggactcagagcttaatgtcacaaccctgagatcatgacctaagctgaaaccaagagtcgaaagcttgacccactcagccaccttccacccaggtacctgtcatcctccaattttaaatttgtgctccttacttggacatctcctactgtaatgccatggattctattttaaaatcctataaacatctcaatgtagttatagttttagtctaggagccgcagcagcatcactgcaattataagatctcaggatcccacttcagactcctctgagttttcacaagaatcccaggtgatctgtgtgcacataaacatttaagcatcactgattcaggtcctggacttgctgggatgtcaccttctgtgggtagtatatttaacactagttggtataaaggatataaactctattggaagttgtaaaggacgttctgttgctaaagaaatctgtatgtatgtgtggcttatttattgtgtgaccttttcctgaa

SEQ ID NO: 5749 - DNA, 556 bp, Canis familiaris
  misc_feature (1)..(556): n = a or c or g or t
tttatttggtggaaaatgcttcattagtgaannagctcttgagtnnnnntaagagttcagaacctgaaggcagagtagtttgcaaaccactgctctgagggaaaggggttcagcctggctcctctgccccaagcacataactcagagcaaagagggaaaggcccaatgagagaagaaggaagatgtctgtgcacctgtagacttgagctaatatttgccaacagggcacctgagaagccagtggattttatgtaatcttgccaccaaatgattcttttaaaacacataagaaaacgtgaaggtgtcaggcagatgaggagagagatgtaagggaaatataattcacttacataaataagaaacacacacacaaggccttcaccagaagcttcactctacatcccccccccaacccttcctgccactacagcagccctttccagagagccagggtcaccacaagggacacctggcctgcccactcacatctgccaaaatgttgcatgccagcgtggaagacaaaccaaaccgcacaaaccccagtgtgtatttactt

SEQ ID NO: 5750 - DNA, 595 bp, Canis familiaris
  misc_feature (1)..(595): n = a or c or g or t
tcacnnnctttgagttttcaaagtttgatttttggatttgctggatcaaatgacccactttttctttaaaagaaaaaaaaaaggtngatttttccttctaaataatgaggggagtagttagggctagtgccgggttaaagtgggtaaggagggagtaaccttcagaaacttgtattgcaaactcctttgggtgttgcaagtagcactactgttcttaaaagggttttatttttaacttcatctgctctgttaacagccaggccagtcgagatgtgcacagagactatgcaaacactcggcattgggggagaccacctgactcagagggttgaagagaaaattggtctggacagcttgttgtcttttatcttaatgtaatatttttgtttgttttaaaggactaatgtctattacggtgttaataaaggtgtaacatactaagtgtgtagaataaaagtgcaatgacaagaggaagttaccttggcacgaacctcagtcttcgctttccctccttgtgctctttccataatatggcaaccaggaccgtgttgtgttttcaagagacaggactatgggttcagccctcatctagtgt

SEQ ID NO: 5751 - DNA, 196 bp, Canis familiaris
ccttcctcccctccatcttcttcagctgccatcctggtctaatgtcccccctcatcccctccccacacctcctgtgacctatttgcacagcccctgagcctctctcgtcttgtgttgagggacaggggatcttctgccccaggttgctcctttttccagccccatccttttgagggggctgggggtgtaaagggcc

SEQ ID NO: 5752 - DNA, 714 bp, Canis familiaris
  misc_feature (1)..(714): n = a or c or g or t
tcatgcnnnggtagtcagtccagaatgctacccaaccaaaaaaaccataccatcatcagtgnnnnnnaancatngggatnctgttatgtcaaagattgctcttgcnnnnnnnnnnnantaagccagaatattatgttannnntnaatatctgaanggtcatctgataattcatgagtgactttataagaaggtccattctgtatactggcatcctgtttgtgatactgttacatctctgagagtgttgccagtgtacacaattcgaatccttcatattgaaggtgactcatttttctgccacactttttcgacatgatgttggaagtgaggactgacactgattctcaattcaagaatccagtatgttgcacataaaagcaatctatttcttgcctatatttgtgttaagtctttctaccaatttctttaagtaaaaatatttttttaaatggatatgaattgtttggatgtattgtaatataattgttttggggtgtgtatatatccattctataagatcataaggagtccttgaatgtttgcttctatcactgtgcacatccattgagaggtgttcagagaatgcagttgaatttaacatgtgtgatctgccatgctggaaaagtactattggaataactctgctatgacagtatttgaggtttggctagcaccacaatttttctactgtaaatgtttcactctcctatagc

SEQ ID NO: 5753 - DNA, 564 bp, Canis familiaris
  misc_feature (1)..(564): n = a or c or g or t
gtgagtgagctgaagagagccctcagagaactggttcnagtcccccagaggctcacatggcaggggccacagctcagggccttcctcctccatcaggtgcccatctcagcccagcaggttctcccctgcttgcagggcttgcacctgggtggtgccaccttgaggatggcagacagcagagggccagtgacctgacaggcagccacacagaggagccacaccctgaccgtcattctgctgtctctgacctgtgactatgtactgctctggtccctgtggaacttaagggaccttacagcaacttggcagagtgttgctgtgtgagctcctttggtcccagtccctgccaggatgtcccagccttctcttctgcctgggacctgctgatgagtaggaaagtagccagtagtgtacctccagaatgtccaggccctgctctgtctgggcccttcagcctgcttgctgggtgttagagccattctggtttctgtgtggtggtagttcaggggctgcaggggaccgaatgggcaatgaacaagtgagtaaatggtgacagtggttagg

SEQ ID NO: 5754 - DNA, 618 bp, Canis familiaris
  misc_feature (1)..(618): n = a or c or g or t
cagtctcagacctgtcatcctcacgccccagcatggtgcccgctgaccctacgnntgcagaccnagtctgccttnnagctctggtgcccaacgggagcagaggggccccctgggactggacggacatgcgggccaggccactggtctcgcccacctgcttcccaggtggccagacgttgccatggagtcccgactgggagcggcggcagagtgtgagcccaaggggccattacaacagcaggccccgaggtttcattgaggacgggtgtttggagctggataacaggctggcaagaaacacggcttccttcccggccctcggctccttcatcgggagctccctcggggtgccagccgtgttggaccccacctgtggctccctgcagctggaggagatgccggcggctagaagggtgggctccgtcatgccctggaccatgagaggctgtggtaagggcgagcctgcggacaggccctgggctggcttgtcaggtggccgggggggtcccctggggaccccctccactgcctgatgctccggtgaggtcctacaggtgtagagagatccttttctatgtggagagcttccatacttcagtattaaagttttnnnannnn

SEQ ID NO: 5755 - DNA, 638 bp, Canis familiaris
  misc_feature (1)..(638): n = a or c or g or t
gaggttactacnntnnnancaaattccacaggatcatcaaagacttcatgatccagnnaggtgacccaacagggacaggncgaggtggtgcatctatctatggtaagcagttcgaagatgaacttcatccagacttgaaattcacgggggctggaatcctcgccatggccaatgcagggccagacaccaacggcagccagttttttgtgaccctagcgcccacccagtggcttgacggcaagcacaccattttcggccgcgtgtgccagggtataggaatggtgaatcgagtaggaatggtggaaaccaactctcaggaccgccctgtggacgatgtgaagatcattaaggcatacccttctgggtaggcttgctgctgtcttgggcacacccagatcttctgagatggcccagtgaactagcttccagatgacctagaaagacacgtacttaaacttcattttggcattgcaaatcacagagctaaagagacctggggtcttaagtgagttagagatggaagtatattttaggaggatgcttcttttctcttcccgtggtgcctaggttgacagagcatttgcagacatgctcataaatgatcattcacagggaaccgctcattgcaaatgagcata

SEQ ID NO: 5756 - DNA, 665 bp, Canis familiaris
  misc_feature (1)..(665): n = a or c or g or t
gcagctcacagccacccacgctgtcgncaggtgggcnnagnnggctcgcagtttggcatcctggcttgcctgttcgtnnngcttttccagagctggcaggncctggcacggccctggcgtgncttcttcaagctgtcggctgtggtcctcttcctgttcaccttcgggctgctgccctggatcgacaacttcgctcacatctcaggcttcatcagcggcctcttcctgtccttcgccttcctgccctacatcagcttcggcaagtttgacttgtaccgcaagcgctgccagatcatcgtcttccaggtggtcttcctgggcctcctggccggcctggtgatcctcttctacttctaccccgtgcgctgcgagtggtgcgagttcctcacctgcatccccttcaccgacaagttctgcgagaagtacgagctggatgcccagctccactgagtcggcgggccgctgggcccggggcgcgcaccggcaggccagagctgccctggcccgccccgggccttctgcgcagggcttgcgtcctgcctgctgccgggccctgacctctcgtgccttgttcaccctggtgaacttatcgtgcttcagggcatttactacactagttcccacaattatcttctannnagtttcttgacgaccacttcaggtgg

SEQ ID NO: 5757 - DNA, 649 bp, Canis familiaris
  misc_feature (1)..(649): n = a or c or g or t
actcagataaatcagttactagtgtgtcaacgttttgatcttctnnnngttctcggttgttttganactagtaagaaatatgangtcatgnncagccaaggacagagaatttattttgcagaagacagaagtaattgtttcctcagatacctctgtggaccttcaagatcttttaccattacaatttatgataacataggccgtgatgtcataactgtgcataaagctctaagatgtagctgttgctggagaaactgctacctacaaaagctaaaagttgaggctcctcctggtgaaaaaattggatatgtgtaccaatactttcacccattgtggccaatgtttaaaattaaaaatgcaaataaggaggatataatgaaaatcagaggaccatgtgtggtttccagctgtctcacggatctaaattttaatttattgtctctggatgaagaaatagttattggtaagatttcaaatacatgggctggatttattagggaactatctaccaatgctgataaatttggaatccagtttccacttgatcttgatgttaagataaaagcactgatgcttggagcaagtttcctcattgactacatgtactttgaactctggtcatgagtttcaccagctttcagcaaaatta

SEQ ID NO: 5758 - DNA, 508 bp, Canis familiaris
  misc_feature (1)..(508): n = a or c or g or t
aaaaaaaaccacacagttaagagctcatatcttggcaagacctgagaaaccaacattgtgagaatagctattttgaaacagtaattctccagaagttaacatctaacatcagccagacagtatcattgtactcttttgtatcatttgaaatggaataaatataattatgtaactaacaattacccaaatagatgagagagcaaataatgtgagaaaattcggaataccttctgtttcatagccacacagattttggacgttaagaaacattgggaactaaatttaggattggaaaaagtttggaagacgagtatcagaacagaagacattctaggagctagctattttaggagatgtccctccaaannnnnnnnntggannnnntgaatttggaaattaggttctactcacttggacatcccaacatcatggactcttgctgctccctgttgcatttgctcgcaatctcagctatttggaagccaccaggaatgctttctaattatca

SEQ ID NO: 5759 - DNA, 544 bp, Canis familiaris
  misc_feature (1)..(544): n = a or c or g or t
atcattcaatcatccatttcatcaaaaangtctttgtttggtaccagtcacccttttactatccaattgttctaaggctgatgttgatgtaatagttgatcttcggcataaaacaacaagtccagaagcattggaaatccatgggtcatttacatggcttggacaaacacaatataaacttcagcttaaaagccaggagattcacagtttgcagctgaaagcatgctttgttcatacaggtgtttataaccttggaacgcctagagtatttgccaagttatcggaccaagttacagtgtttgaaacaagtcagcagaactccatgcctgccctgatcatcatcaataatgtgtgacaacttgcacatttgtactgatatccacaagaatcagttttattttactgaatgagttttaacagcagnnnnnngaaatacctaacttgttatggaggttggtgttggattgctgcaaaatactttcgacttgtcagtgtgttgatgatgcaaagcacgtgggactgagaatacttattctttttttgt

SEQ ID NO: 5760 - DNA, 230 bp, Canis familiaris
  misc_feature (1)..(230): n = a or c or g or t
gctcggnnngggcagaaaggctaccannnnngcnnngagatnnnnaagaagatatnnaagattgnnnaggnctatctcatcaaggatggcannntgatcaagnnnnnngcttcnnntgatnnngntnnntctgacaagagcatcaaccnnntgggtggctttgtccactacggtgaagtgaccaatgactttnnnnnnnngaaaggctgtgtggtgggcaccaagannng

SEQ ID NO: 5761 - DNA, 573 bp, Canis familiaris
  misc_feature (1)..(573): n = a or c or g or t
catagggcnactngagaccnnnntggctcagaggggagagactgagnnngacccaaccnnncntctgtgccctgcacgtnnctganntagcccatggtcagtcagtgagggggcccccagggttggacaggcacattcccttgggacagaggctacagtttgtagctatttccccctgtccccccaaccccatccccacctctacttcagaacatggccccccgcccaactggccaagcgttaagtaatgtgcttatcctcgggagcagctccgggtgtctttttaaaatgtagagaaaaccaagtacggtgacagtttaaggaaaaaaaaatatatagaataccagaaaagccgtttacccggagaatttttttctccccattcttgttttgtttttactcaatgacaaaaattttagttttatttcctgatagcaaaaggaaagaaaaacccagccctcaaaaaggccaaggccccgtccccctgttgtcggtgatttgtttgtctttctgataggttgaaaattgtgtaatnnnnttgatgacgctgtcaatcttttatactgcattgta

SEQ ID NO: 5762 - DNA, 425 bp, Canis familiaris
  misc_feature (1)..(425): n = a or c or g or t
tctgtgactgcaggtnnntattgtctggaaannagatccnnagannnaataagaggaggaaggctgagggtgaccggccagactgacacactagtctggaggccaanagtcaatgcagagagccatagaaactttccaaagattcagttgtgattatgttagcttggatgacgagaaggaaagagatgccgccttgtactctaaaaagctctctgtataagcaaccncgtggcatctgaaagcacgaagcccagagtnnnnnactgtgacacttggaagatgttccttaatctctggctagccctggtgcctgtctataaacagggatatttanagtcccttcctcaagatcttatgggaaggataaagatgaggtagcaagannnanagcactcggccagtgcctggcccatggggaaggctca

SEQ ID NO: 5763 - DNA, 668 bp, Canis familiaris
  misc_feature (1)..(668): n = a or c or g or t
tatgatactaatactgagantanncttcacacgttgactcagcatancnggtatgtnnnaagnnntgnntnngcacccaatatnntcttacnngctannggntcaatngacaanncagtgannatctggcaatttgatctggaaacaccttgccaagcaaggaacacagacgatcaagtgaagcagtttattgaagattggtcagaggatgatgtctcgatgtggctttgtgcacaaggtttaaatgaccttgttgatattttcaaaattaataacattgatggaagagaactgtttaatctcaccaaagaaagtctggtcgatgacttgaaaatagaatctctagggctgcggagtaaagttctgaggaaaattgaagaactcaggaccaaggtgaaagccctttcttctggaattcctgatgaatttctatgtccaataactnnnnagcttatgaaagatcctgtcattgcatcagatggctattcatatgaaaaggaagcaatggaaaactggatcagcaaaaagaaacgtacaagtcccatgacgaatctcattcttccctcaatggtacttacaccaaacaggactctaaaaatggccatcagccgctggctagagacacatcaaaaataaactgtttatattgttaaaaaaaaaaaaaaaag

SEQ ID NO: 5764 - DNA, 521 bp, Canis familiaris
  misc_feature (1)..(521): n = a or c or g or t
anntcatattctgaaannaaatgcacttnntcttttgaacatccccagtagtttctttctcatgttattaaggaacatcagccaatgaatctgttcgggtttccattccgcagaactccagagcatgtactagtggcaaggcagaggttctttgaccttttcccttaactcttccttgggtggttcctgagggaaaaggaagcacacgatcatgggagtgatagcccagaacaaaaagaaatcttgtcttaccactgtggtttataagagagatcgggagacaccatcctgctttctccatggcctgattcctgaagagactgatccaaaaattatagcggcagggaactcttagtgcatttggcactgagatttaaatgcaaccagagttgtcctcaaggcccagccattaaaacgttgtctctcttgaccttctggtatcctgtcagagagcttttcactgtgaggaagtgtggaaatggctgtgtgtatgtgtgtaacctgttaggttggggataggt

SEQ ID NO: 5765 - DNA, 351 bp, Canis familiaris
  misc_feature (1)..(351): n = a or c or g or t
attcnnnctccttcatgccctccaccccctttgccaccccaggcccagtggagggctcanngtggacgatgaggtagacctgagtggtgtacggctggtnnngngnctggaaggagcaggtgtagaggccctcatcgccgagccccacctgggtgatgaggatggagaactcctcgggtgtgttgatgagcagcctcacccgtgggtcactggtccnnnggtcattgcccgcatacaggatgttggagcggttcannnaggccannngggtcacatgctcgtcaatgaagcagcttcagggaggacaagggaggagggctcttctctctcccaccccagaaggcccnnngg

SEQ ID NO: 5766 - DNA, 531 bp, Canis familiaris
  misc_feature (1)..(531): n = a or c or g or t
gctcgtnctcaagacgctgagatcatgacttgagctgaaatcangagtctgatgtttaagtgacngagccacccagatggcnctcctcttctcatttctgtatttaataacatgatctgacctttcagggaaaatgttccaaagggttcatttgttgctccaaatatttttcaacattaaagttttaaaggtgggtgttactggggacttagggaccataacccccacaaagtgctccaggtctggcctagttactggggatagaagcaggccctgcctccccatcatcccatgtggaacccatgagttaagataaagtgtgtgtcgctaaagatgtgggtgtgggggcacctggctggctcagtcggtggagcttgcaactcttgatcttagggtcgtgaatttgagcccacgttggggatcacagcttaacttaaaaaaaaaaaaaagacttggatgtgttaaacccccagcatgttgataagaaaaaagcagaactgtggcatacaagcaatcgtttagaaattattg

SEQ ID NO: 5767 - DNA, 586 bp, Canis familiaris
  misc_feature (1)..(586): n = a or c or g or t
ccacaccgaccgccaccccttcttctgccgcctgtgcagctacaaggccaagcagaagttccaggtggtgaagcacgtgcgnnggcaccacccggaccaggctgacccgaaccaaggagtgggcaaagaccccagcacccccacggtgcacttgcatgatgtgcagctggaggacccgagcccacctgctcctgctgccccccccactggacctgagggctgagagccgacgccacctcttggagggtgtggtccaagacgtgcagactggaagcagagctagcctggagcttggagcttaaggaaaggctggctgtgagctgcccgagtggccgaggccgccagggactggggctgtagtacttggaggttgatggccatataaaagagtgacacggaccacagagtgatttcctgttgaggcacactgtgttcttaaaccgtgagttcccgattccttcagcaccacgccccccgagtccccggctctaagaccttggttttaccccgtctatcttcttccttctggctctgtcaagtcctgttttctttcagcgccctcaannnactgtatctaactgcatgt

SEQ ID NO: 5768 - DNA, 262 bp, Canis familiaris
  misc_feature (1)..(262): n = a or c or g or t
ttagntctnnagcattgaaagctngactttttttttcttctcctgtaaaaggcaatgcctatgatcattgggttttttttgtgaggtgttttgtttttttaaccaaaatttacccatgacaggaaaatggtattttaactaagacttatttattaggattgtgatagtctaacatagtttttagtaatactgttttattaaagatgcagcatttaaaatataagtaaacaaaatctatttgannntggatccccaaagtaac

SEQ ID NO: 5769 - DNA, 530 bp, Canis familiaris
  misc_feature (1)..(530): n = a or c or g or t
gtcatgttttggtnnagtgtcctgggtcttggnncttttgtccanntagctggagcctgtgnnnnnngnnaggctgaggacagaacccagcattcnttagctgcagtgtctcagggcctgaggtggtcagggctgttggcttctcgtcctggcggcttctcgtcacagctgtgttctagggtcttcgccattcagcccgtccaccagggagtctcctgcttcccgaagaaactggaatcatgatgtacattcctggtacccacacgtctttccgtccgtcggtgcccagccctgtgtccacatccctgcatctttggggctgttctgggtagccccgtcctgttcagagacaagagctaaagggatgtcccgacgtggggctcagcctggagtctcagagcttgcttgtgtgctggcccgagggtcttggggcacctgcgggctgtggtgtttacacattggactcagggatcctctcccggccctgcaggggccgggagtgggaggggggtggttccttctgctcctgg

SEQ ID NO: 5770 - DNA, 515 bp, Canis familiaris
  misc_feature (1)..(515): n = a or c or g or t
gtgggcccatttgttngagttgcttacatactgtagttattnctgntaaggtttacttnnnaggtgcctgnnnggnntccagcatgtgacccttgccnncgttcatgtcatctgtgacagcaggaaaagannnnntgtgttcacggtgaagcgttaatgagaatatgtgtaggtcaggctgtttcagtagctgttggagttattcgttagcaataaccacatttttttagttatttgttagcattaagcaaaattgttttccaaattgttttcgttcttgtgatgaggctcagcnactctgtccaacaaattttagttttgcttagaaatcgcaaagtagtcccaaaagattttagagggaactgataatgatggcaaaagaaaatttgcagtcacacatttgcttgttacagttccttttctccaaaattttatttttggtaannnaaataaagtgttgcctctcttgtttgagattttacagctatactttgttgtgtaatgttatggttccc

SEQ ID NO: 5771 - DNA, 642 bp, Canis familiaris
  misc_feature (1)..(642): n = a or c or g or t
atgattgtgtcagtgnnngctgcttaaaagaatcaactttccaaaaagaaaaaaagaatcaactttcctattgtacgaggtnnacggatgttggacacattagaacnntaagatgacatgaagaatggatcatgaaagtctctgttcaacaagagctagcagagctgctaagacaagttcaattccataattctttcatctctcaagagctgtgttggcctcagcattcctggttacgcttttcagcagtagcctagcccaattctctacctcaaaagtttcaaggaataaaaggataatgtttatgaaaggtttgaattgtcttctgtaaaatgaataatggttgtctgttacatttttttaaattctagcctttccgtgagcagactaggctaagccctctgctttctatgctctctacattgttctgcttttatatgtacctgcatgagctgaagttattaatgcagtaataagtcaagctcttggcattctttgaccttccccaagatagggacatgacaatctcctttcttaaatggcctaaacctctttcttcatctatctcaaactaatgtcaattttatattgaaaaggaaatgttttacaggttttataaatgttttcatagttcagttttgc

SEQ ID NO: 5772 - DNA, 574 bp, Canis familiaris
  misc_feature (1)..(574): n = a or c or g or t
gatgagcgggtgctaccgtctatcactacagagatnntcaagtcagtggtggctcgctttgatgctnnagnactgatcacccagagagagctggtctccagacaggtgagcgatgacctaacagagcgagcagcaacctttgggctcatcctggatgacgtgtccttgacgcatctgaccttcgggaaggagttcacagaagcagtagaagccaaacaggtggctcagcaggaagcagagagagccagatttgtggtggaaaaggctgagcagcagaagaaggcggccatcatctccgccgagggcgactccaaggcagctgagctgattgccaactcgctcgccacagcaggcgacggcctcatcgagctgcgcaagctggaggctgcagaggacatcgcgtaccagctgtcacgctctcggaatatcacctacctgccggctgggcagtctgtgctcctgcagctgcctcagtgagccctgcctggcctgcctgtcctcgggcccccacagccctgacgactctttataccaccatccttctgcccccaccccagaaatcactgtgaaattt

SEQ ID NO: 5773 - DNA, 546 bp, Canis familiaris
  misc_feature (1)..(546): n = a or c or g or t
ggaatgcccaacagnntgaaccaagnngtcncannnnggtacctgacagggggactctgggcctggacaggggggcacgaagcccagagaatctgctgcctcccatgctgcttcgggccccccctgaaagtgtggagcctgcagggcccctggatgtgctgggccccagccatcaagggcgagaatggaccctgatggacttggacatggagctgtccctgatgcagcccttgggtccagagaggagtgagactgagctggcggtcaaggggttaaattctccggggccagggaaggactccacacttggggcaccactcctgctcgatgtccaagcggctttgggaggcccagctctcagccttcctggagctttaaccatttacagcacccctgagagccgagccaactacctaggcccaggggccaatccctccccctgagacgctctgctgtgaagccagccgctgaggggctggcctgcagcagcacgcccttcttagcttcctggtgccccttggaagaggctgaaaaaagaccctgcta

SEQ ID NO: 5774 - DNA, 531 bp, Canis familiaris
  misc_feature (1)..(531): n = a or c or g or t
gctctgactgcnnctgcaagaagatcagctggtaatccancagctgccattcaccctagagatactgcactcangtctcctcccagtctctgctcctgcacaagaaacattctgcagatcgatccggcctttgatcaagtttctatcaggctgtcccagtcctcaaagatcaatcaacctctcttttatttaagtcacataagtagtgtatttattcattcagttagtatggaatttgtgggatgagatctctagttgccaggaatatgcagtgaaagtgagattgctgggtagtgaaactcagaattggaatccatcagagtgactgagaactgagccaagggaacagcatgcagcccccagatctccagggaaagcccgctgctgctgctccaggggggctgatggtctacctatgaaggagatggagtagggacagtgtgaagcacaacagaccagcagtactgttgggggaagagtgagaagcagaagcctaaatgacagtcttcagacaccgcatggtccctnnct

SEQ ID NO: 5775 - DNA, 559 bp, Canis familiaris
  misc_feature (1)..(559): n = a or c or g or t
cggtggggttctatgctgnagaccagaaggagttcgagacactctgctcagagctgaccagggtcctcagctcctcctcagccactgagcgctaccccatgttcaccctggctgaaggccatgctcaggaccacagcctggacgacctctgctcccagctctcccagccaacactgcggctccctcgcacggggcggctcctcaaagccaaacgcccaagctctgaggactttgtgtttttataacgcgtggggttgggggagaagatgcgcactatttatttttttatttatgtcatgctgggtgtgggagcttgaaatctggaggtgatgggccttttcccatcaaccccttgacaactgcagctgagaccagtccaggaaacctctgaactggggcagagcctgtacacctgcctcccgccagctgggcctcctcacagggcgaggagggagggttcccggacacccactcagggcctgactcaagtactgtagtttgcactggaccacctgtgccnnncactggtcccaaannnnnnaccctgctgagatctggg

SEQ ID NO: 5776 - DNA, 549 bp, Canis familiaris
  misc_feature (1)..(549): n = a or c or g or t
tatcttggagcatccgagccaaagatgtgcctttgccacgctggtgtcagacaggttcctcaaggattactgtgagcgaggctgcttttctgatctggatctcattgacaacctggggccagccatgatgctcagtgatcgactaaccttcttgggaaagtaccgcgagttccaccgattttatggggagaagcgtcttgctgatgcagcttctcttctcctgtcattgatgacttcccagatagccccacggtctttctgggtaatactattaatagatgccttgccccttttggaagagaaagaggtggttttttcagcagagcaaacatatgagctgatgagatgtctagaggacttcgcctcaagaaggccagtgtggagagagcctggtgttcagcgactccaggaggacgtggagaacacgaagttggaaatgctgagacttgctcttgcacgaaatcttggccgggccattataaaagaaggctcactggaaggatcctgagnnnngccaagagctgcttcaatgtgtcattttcatatggc

SEQ ID NO: 5777 - DNA, 586 bp, Canis familiaris
  misc_feature (1)..(586): n = a or c or g or t
ccgagcagccaataacnnagcactgccccctganntcagctacatcactcgagctaggcacggtggtgaggactangtcntctccctgctnnccggctactgtgagccacccaccggcgtgtcactgcgagaaggcctctacttcaacccctacttccctggacaggctattggcatggcgcctcccatctacgatgaagtcctggagtttgacgatggcaccccagctaccatgtcccaggtagccaaggacgtgtgtaccttcctgcgctgggcatctgagccagaacacgaccatcggaaacgcatggggctcaagatgttgatgatgatgggcttgctatttcccctgatctacgccatgaagcggcataagtggtcggtcctcaagagccggaagctggcatatcggccaccaaagtgaccctgctccatggctgctcactgtcttgcctgagggggccctggagccgaggagccaccctccaggcctcagctggccctcttggccaaacccctctttctttggttaagagggaacggggcaagagaccaggttctggttcagacccttcagcccctgcat

SEQ ID NO: 5778 - DNA, 600 bp, Canis familiaris
  misc_feature (1)..(600): n = a or c or g or t
tgtagaagtgtgtaggtggttcaattaaaattcaattaaaagcttgatttggaagctctatttttaacctatgaccgagtgtttgactagattggtatgactaacatgctagacaaaattaatgtgtaggcattaannnnnntcacatcaacatattgttttatttttattttaaaaagtattgccaacactgtacagtgtgggaagcagacaatatttaaaagccacgtggctttccagcttattttgatgttatttttatttaaatatcagtgtgaacatctcacctcaatgtctgaggatctaggatcaattatcttttcacttctatatttgcttttggtatattttgcctattaaaacattgtgaacttcagaattaaggaactaaatgtaatttactatatgtgcaagttgagacctgagtatcatatctggttagaaccttggcagaactacttgaaaaggaagattttggaagctggggctatagatactgaaccaaaaataatcctttcttttggtttaagattactttgctctcctgacaaacacacgattaaatctaataggaaatatgtatgtgtactggtggggaga

SEQ ID NO: 5779 - DNA, 682 bp, Canis familiaris
  misc_feature (1)..(682): n = a or c or g or t
cagccccagtcctgtagcatcannnnngannagtntgcnngnnnntggnnnnnnnnngnnagtnnnnnaggagaagnagacactgaggtatttcctacccgacatgtggtctgtgctctccaaactatctttgagttcaacgtccgggcctttgcaggaggagcaatgggggctgtgaatgggatgcagccccatggtgtccctgacagatccagcgtccagtctgatgaagtctgggtgggtgtggtctatggactggcagctaccatgatccaggagggcctgacttgggaaggcttccagacagctgaaggctgctaccgaactgtgtgggagcgcctgggcctggccttccagacccctgaagcatactgccagcagcgggtgttccgctcattggcctacatgcggccactgagcatctgggccatgcagctggccctgcaacagcagcagcagaaaaaggcctccaggccagtagccgcacatggcacagaactaagcacagggcctaaacttggaccaaaggaagctatggcaaacccaaagtgagccctcagcagtcttggagggaggctctaacagcccagcctccagcctggcttttcctcttcctcttcactgcccccccccaaccccccagtctcctgcaatcctgagccaccaagacaatcaggcccct

SEQ ID NO: 5780 - DNA, 621 bp, Canis familiaris
  misc_feature (1)..(621): n = a or c or g or t
gtgcattgccactagatcagatagncaggaagggactcgtgatnntaaggaatatccttttagtgcaaaagatgaagcatgtcctgtcgaggtcagcctagaagaagagaagcagaagtaacactttgatactctggagaagttaacttactatgaaatttgagctcagatttgaggaatgaatgtatgagatgatgaggcaggaaacttgacattccaaggatctgatccaggaagtactctcagtggagactgcttgctttcatccccatgacattgtgggaaaaattttgcaatgtatgctaatcgaaatgtatttatatatcctatgctgatattttgtagaggtttgccaagaaaattcaacctcaacaacttcagaaactgcccctaatttgtaagggataaataaaatcggatttgagtgtttggaaggggctaaagaaaggaggataaagagcatcaggacagcatgggaagaagcaggcagaagcggaactgacatttcactttctatggaacaggatcattcctattgcagagtatgagtagtgaccagccctattcaccaccccccctttccctcagttaattggannnnnnncaggtgataattgagtt

SEQ ID NO: 5781 - DNA, 624 bp, Canis familiaris
  misc_feature (1)..(624): n = a or c or g or t
aacgctganntcatgcctgcccagtnnnaattccagataggaccctgtgaaggaatcgacatgggagatcatctctgggtggcccgtttcatcttgcatcgtgtatgtgaagacttcggagtgatagcaacctttgatcctaagcccattcccggaaactggaatggtgcaggctgccacaccaacttcagcaccaaggccatgcgagaggagaatggtctaaagtacattgaggagtccattgaaaaactgagcaagcggcaccagtaccacatccgagcctacgatcccaagggaggcctggataatgcccggcgcctaactggattccatgagacatccaacatcaacgacttttctgccggcgtggccaaccgtggtgctagcatccgcattccccggactgtcggccaggagaagaagggttactttgaagaccgtcgcccctctgccaactgcgaccccttttcggtgacagaagccctcatccgcacatgtcttctcaacgaaactggcgatgaacccttccagtacaaaaactaagcggactagacttacagccatcgaacccctcctaattaattctccatcctgcctccgtnnnnncccctctcttgactgtcc

SEQ ID NO: 5782 - DNA, 529 bp, Canis familiaris
  misc_feature (1)..(529): n = a or c or g or t
gatngagatatcganngtgaggatcagtcagatgaagatgactgtgacagttttttatgtngaccacccaagtacccttgtgctaatgacacttcagcctgcctgcagccagagaaactctgcaatggaagaagggactgtcccgatgggtctgatgaaggcgagctctgtgatgaatgttcactgaacaatggaggctgtagcaatcactgttctgttgttcctggaagaggaattgtctgttcctgtcctgaaggacttcagctcaacaaagacaataaaacatgtgaaattatagattattgtagcaatcatctaaaatgcagtcaagtgtgtgagcagcacaagcacacagtcaagtgttcatgctatgaagggtggaagctggatgtggatggggaaagttgcacaagtgttggtaagtagatgtgtgttttgctatattgaagaatagcgagtgcctttctggtttttttctgtgttgtgtatcttgttatatttaagaatacatcttgagaaagtaatacaa

SEQ ID NO: 5783 - DNA, 632 bp, Canis familiaris
  misc_feature (1)..(632): n = a or c or g or t
gcatgaactcagcaagtnnnnnnnnnaaaatgtgggaaaagctgttcaaggtgattcccaggcnntcagcgagccatttccatatctactgtgggacttgtgctttgatggggcactcacagaccctgtggggccctggncntaccagcaacgtccaccaacccactgcagccttcgggatgaacgagggctgtgtccagggcttcgagacagtggggaaccaagccacgggacacttcatccatcccgggaacgccagcaaccagggctcctggagaaagctgctgctgctgctgctgcaatttcctggtctggtgtggacttcagatgctccgcttgaggaggatgcctgcttcagatttggatcagaaaagcaagaagagggatgccaagactgggagggtgttaattggactaagagcaccaaggagattctatgtgcagcacggaagcaggaatggaagtcagctacggtgtggcgggtgaactcactgtccacacccgacaccgaccagagtccccacaagtcctagtcctttgagcgtcaaggcaggttcttgggacagtggtgttggcggcagcagcaggaccatgaggactttcaggggtcaaaagcaagaggaaattttatg

SEQ ID NO: 5784 - DNA, 645 bp, Canis familiaris
  misc_feature (1)..(645): n = a or c or g or t
aagaggttcctgtggcntggagtataacttagannacacagaacttggnntgaagaaattgagagngnntgggaaaaaccatggctttaactctttctctaattattatgacaagctgtactccccagattctagtggcatccgtggattgattaccattctggtactacttgctattgcttatggagtttataaattgttccttagtgatggtcaagattctcctccaccttattctgagtatcctccaaattcctatcattatcagagattcaccaactcagcaggaccccctccctcgggctttaagtctgaatacacaggaccacatggtgcaacttctggttttggcagtgctttcacaggacaacaaggatttgacaattcaggaccagggttctggactggcttgggaactggaggaatattaggatatttgtttggcagcaatagagcagcaacacccttttcagactcatggtactacccatctcatcctccttcctactccagcacatggaatagccgtgcttactcaccacttcggggaacctcgggtagctattcggcatcatcaagctcagagacaagaaccagaacagcgtcaggatatggtggtaccagaagacgataagaaagtaaaca

SEQ ID NO: 5785 - DNA, 431 bp, Canis familiaris
  misc_feature (1)..(431): n = a or c or g or t
cctgccacccccgcccccactgggcctgcccccaccccangaatttggccgggggaacccatttatgctcttcctctgccttgccatcctgcnnnnncaccgcgaccacatcatgcgcaatgggctagattacaatganctggccatgcactttgaccgccttgtgcgaaaacaccacctgggnnncgtccttcgccgggccaaggctctctttgctgattacctgcagtcagaggtgtgggactcagaggagggggnnnnngccacagccccatcttgatnnggctccttcnnnnnncaccatcagccccaccagatctctgttctttgccatgagagcctatacatnnnaccccagctccctgcctgccagccctagacccgttggnngggcaggaccctttctccccaggtctgagagtatggggctc

SEQ ID NO: 5786 - DNA, 714 bp, Canis familiaris
  misc_feature (1)..(714): n = a or c or g or t
tgtnnancatgtgtacgnnatccgggaagctgccaccnncaacctcatgaaacttgttcagaagtttggtacagagtgggcccagaataccatcgttcccaaagtgctagtaatggcaaatgatcctaattacttgcacagaatgaccactttattctgcattaatgcgctgtctgaagcctgtgggcaggaaatcaccactaagcagatgttgcctatcgtgttgaaaatggcaggagaccaagtagcgaatgtccgtttcaatgtggccaaatctcttcagaaaattggaccaattctagatactgatgctctgcaggaggaagtgaagccagtgctacagaagtnaggtcaagatgaggacatggatgtcaaatactttgcacagnaagccataagtgcggtggcccagagactgaggaagctagatttccctgtgaaggacagtgaggagcccagcggccctggggctgacaagaaccacttcctgagacccagagggcctggagaggacaccgggaagtttgtccctttgatgtctaggcacacagagagcgnnnggctcgggtggctcccgaggaggcagtaggnnnnncccggttcaggggtacagatgtggccaagggaccagcctatcagttgcatgtacatactgagacacacttgcccaactggaaattgcagaactagtgcatttttcccaaagcagagact

SEQ ID NO: 5787 - DNA, 498 bp, Canis familiaris
  misc_feature (1)..(498): n = a or c or g or t
gaagaaaaagaggagaaatctcagttaagagnancagnnagatgttttatcaagnnatagctgaaaatgttttctctgtaactgctgcaaacattgatctggtttgtttcctggccttgagagtggtgtgcccaactattttgttgttgcgcttgaatgagagccaataaattgtttgacttttgtaattaaacttaagaacttgattgaaggggattttagcttccctgaaaatgtactttaagttaatctgcttaaggggaattatctatttcttattagtgaaatcaaaacactctatgcctttctaactgatgatttctatgggcctggtcatgaatcttatggtcatgttaaacgtcaaatattatttgagggatttaaaaaattcagttgtcaaaaatttaggacttgacctttgatatttgttgttgacaaaatgtagagtcatnnnnnttttctttttcttcnnngatttgcctttttttgggtcctgct

SEQ ID NO: 5788 - DNA, 607 bp, Canis familiaris
  misc_feature (1)..(607): n = a or c or g or t
cagcgntatcgcatgattgactttctgcggttccggnctgagctggaaacaaagccaggaccttttgaagagaaggtcatcatggtccgctatgatccctgtagatcagcagacatagctctggttgctgggggtagncggaaacgctggatcgttgccacagaaaacatgcaggctggagatataatcctgaactctgaccacataggccgaatggcagttgctgctcgggaaggggatgcacatcctcttggggccttgcctgtgggaaccctcatcaacaacgtggagagtgagcctggccggggggcccagtatatccgagccgcagggacatgtggtgtgctgcttcggaaagtgaatgggacagccatcatccagctgccatccaagaggcagatgcaggttctggaaacgtgcatggcaacagtgggccgggtatccaacgttgatcataacaaacgggtcatcggcaaggctgggcggaaccgctggctgggcaagaggccttccagcgggctatggcaccgaaaggggggctgggctggccgcaagattcgaccattgcctcccatgaagagttatgtcaagctgccttcggcagctg

SEQ ID NO: 5789 - DNA, 561 bp, Canis familiaris
  misc_feature (1)..(561): n = a or c or g or t
tgtgttcctgtnnanngccccnactnnnnaatacttctctaaatgtcagagcgtccatacacagctcaaaccacnnncannaaccagcctcnctagagcagannaaggaagggacacggggatcgcctgggcctctcctgccttcctgtctgtctcctcacctagacttggttggcctccctcttctctaggctctacctgctaagcccctttgtcccggtctggaccctaggggtgggggacaatgtgagggagtagaggagaaagcctgtggctggttctggtttcctgccttcccagagcacgtgggggccgcgctgtatctgcaccctggtaaaggtgacccctgcaagtcgccagcagccccagcacattcctgttccacaaggataggatgaggagctccagaaactttccattcaaaggcactctctgtgatcggagcctgggttcttgttctttccctgcgcccttgtccctccctggggagtaggagtgctatgctaggacttcaacctcagacttgggtggcctgtgtnnnnnttgatattgagaactatt

SEQ ID NO: 5790 - DNA, 618 bp, Canis familiaris
  misc_feature (1)..(618): n = a or c or g or t
ctgagtgcgnnacacgggttgccctggatggcattcagtgcttcggtgnnaatggctacatcaacgactttcccatgggccgctttctgcgagatgccaagctgtatgagattggggctgggacnagtgaggtgaggcgactggtcatcggcagggccttcaacgcagacttccactaaccccaggacctttcaccccctttctcagcacctagaggcctttctttgggagtagagatacagcagcccttctgctgcccagctgcacttgtgtcagcccttggcctctgcatgaggttgaggtctctactacggctggcaagtgctgtgggcctcagagcctgccccccgagatgctgcaagttgaaggcgggcctgggggaaagggagcaacacttccagtcacaacttctggtctgaagatactgtaggacattaatgggagttgtggtgcgtggagggcctacctgaaaagtgttccatgggttcagatgaactcagcaagggatgcctgggtggctcaacagttgagcgagtatctgctttcagctcagggcatgatcccggactcccgggatcgagtcccacatcgggcaccctgtgagtagcctgcttcttc

SEQ ID NO: 5791 - DNA, 378 bp, Canis familiaris
  misc_feature (1)..(378): n = a or c or g or t
tgggnagnncntgccccaatttatcccctaacacnctgagaanctcctggttctatccagacaccctgaagaaggggaagggcttgaggagcnctaccttgtnnnataccatcaataaagtatcntgcatctagcaaaaaaaaaaaaaaagagagagagaggaagataaaagacaaacatcataatttttccattaaggtnntaaaannaaggcaatacagactatcatgtagaaggtcataatgtactccaaaagagtcagtctgtagattagagctttctgcttgctcatgatgaaaccattctttatctgctaagaagcaattttatctttcatcacaacagaaaaagaggtctccagatccttttaagnnnccg

SEQ ID NO: 5792 - DNA, 637 bp, Canis familiaris
  misc_feature (1)..(637): n = a or c or g or t
gcttctcggccatgtaccacttctttcggacacagaagatcatctggatgccacaggaactnnatgcctttcagccctaccctgctgaaataatgccaggcaagatctacctgggcaatttcaggcaagcctgcgacccgaaaattcagaaggatttgaaaatcaaagcacatgtcaatatctccatggagacagggccatttttcataaacgatgatgacaaccttctacacatcaagatagaagattccctggaagccaacattttcccctttttacggcacctctgtcacttcctggaaattcatctccagctaggctcggtcatcctggtcttttccacactgggcatcagtcgcagctgtgcagccatcttggccttcctcatacactggaatgagcagaccttgaagaagtcctgggcctttgtcaagaagtgtaaaaacaacatgcgtccaaatcggagcttggtggctcagctgtcagaatgggagaaggtgatcctcggagattttgtcacagacatcttggatccactctactgatcttctctgtggtccagctatgggtcctgaagaaccttgtgggggtggggtgggggtggcgctcttgtgggtagtgggccaggctgtgtaac

SEQ ID NO: 5793 - DNA, 503 bp, Canis familiaris
  misc_feature (1)..(503): n = a or c or g or t
tctagtngcaaagtacgcacacatattttgaatggctttatttttattgtgtaaaactgtcaaacatacaagactgatgcccaagttctacatgtgaggggtctgcattttacagtaacttctctcttgactgggtgatgaaacaggtacacatggacctgccattgttacattaagtgctttcattttctttacagttattacaaagttgtatttattttatacagatgggtttcagttttctggatgccatatgtttacttcagctgtcgacctgtttttctttctttgttatctgcatgttgtaatgtatgctcagaatgaatgtaaaggctgtgtcaactgtaattaatttttgtaaagggctggtcacacgtggatctggtttaggaatgcatatgggattattttagtaaccagatcaccttttcagaaatttagatgtgaacaccaaaagaagcgttttctcaacaacaacaacaacaacaacaacaaaatgaata

SEQ ID NO: 5794 - DNA, 593 bp, Canis familiaris
  misc_feature (1)..(593): n = a or c or g or t
gannatgaggnncagagagagaaaatctctgcaaaaaatgctttngaatcttacgcttttaacatgaagagtgctgtgagtgatgaaggcttaaagggcaagattaacgactctgataaaaagaaaatactggataaatgtaatgaggtcctctcgtggctggaggccaatcaactggctgagaaagaggagtttgatcataagagaaaggaattggagcaggtgtgtaacccagtcatcacaaagctctaccagggaggatgcactgggccttcctgcgggacggggtatactcctggaagggctgccacaggccccaccattgaagaagtagattaatcttatctgaagatggagggttctagggtgcctctaagttgaattttgttcccctcatcttcaaatattgttatgattcttgaattgactggttttgaacctaagttaaccatccttttcggatgctgacaaaagagtcttgtataccatcttttcacaatccctgtttctgactcttaagaaaactaggccgccctttgaaccatttgatgaatttgaatgtctgttatttatttccaacctccccatctttc

SEQ ID NO: 5795 - DNA, 542 bp, Canis familiaris
  misc_feature (1)..(542): n = a or c or g or t
gatgcacnagctgcaccagctggtggcccccgggacagatgtcgcgctgcacatcgacgtggccgctgcgcagacgggcgtgtctcggtttctagaagtgaatggtgcctggaggtacgacaagagggaagacgtgcggcctgggtcggggcacatgctggcctacacgcacctcctcatggaggcggcccccgcgcacctggcgctctacagggacacgcaccgtgtcctggccagcgtcccaggcaccacgggtgtgagtctgaacctcagcaggctgccccccctcgacgtcaacctgcagacaaggctggtgctcctggagagacgccgtgggccgtcctgaggcctcagggctcctcggtgtcctggcagatgggaccgcatgcgggacggtgggacccagggcacaggctccgctcctctgcagccccgacctcgtggctgccccccgcccaaggagcgcaccccacaggaggtccgtgagtccacaggaggactcngcgggcgcaggtgcacctgntccgtcgcacatggggctc

SEQ ID NO: 5796 - DNA, 200 bp, Canis familiaris
  misc_feature (1)..(200): n = a or c or g or t
ggcataatgctcacnagttccctttctcttctctatatgtaggcnnnnnntgattcatctgaaagggtagtgcgtgtgtgtatgtgtgtgtgtgcatgcgtgctcacagcaggcctggccctttccctcctgcaaggcatttatattatttggcttcttcctgacagggttaggactacacaggacagggatccctgggt

SEQ ID NO: 5797 - DNA, 539 bp, Canis familiaris
  misc_feature (1)..(539): n = a or c or g or t
cctgtccctcnngtcccacaattgtggttcctcccacctcctctgcatttgctcactctctgcttgaagtccatctgcagggagcgtgcttggtaaacagagtnnagctggctatggggtgcagtgatgtgcagtggtgctatgtatcaaaagacctactataatgggacctggttactctgagtggggggacctgtttctccacctcgtattagggaacatgtgctgaagaggccatctcctgatattacaatgctgacctaacactcaagagcccagacgtccttgagtattaacactctgtgacagagaggacccttaccccagttctaagctcagcaatagtgccactacttgccttccagagttgatggtttactcagttattggtgagtaccaactgcaccgatgcagttattggtgacatgagtcgtgtctcatggctcagggcatcagaagaatcacccgttggttgctgtgatcatattcagtgtccctctgtcccttccatccctannnnnnncctgccctactgtgtt

SEQ ID NO: 5798 - DNA, 556 bp, Canis familiaris
  misc_feature (1)..(556): n = a or c or g or t
gnntccgtngagctctcatcattttgatggcttctgtgtttggtcccattagtctccgttccacaggtnctcagctgccatttgattacctaacttgtctggaagtgtctccagaatattgatcactttttctttgaggcatctgacaaagccacaatgtctcagactagaaataattacccaatatgatcatggcatccaagaccaagcagagtctaggaactcattgagaaacagtttacttgtaatggagaatacctatctgtaatacaggtcccgtcatttcattcatctcaaattattttgaattttttccaaatggcttttgggtgtagatggtagtagggctgtgggccataaatcgaagcctttgagagccttgggtctggagagccatgaagagggaaggaaaagagggcaagtcttgaacctaaccaaggacctgatggattgctccaccgagacacagaagtgaaggctgtgtccacgtgcttcccacagactggagtttttggtgctgaatggaaagagcaattgctgaaaaaccgggggtttg

SEQ ID NO: 5799 - DNA, 298 bp, Canis familiaris
  misc_feature (1)..(298): n = a or c or g or t
atcttttcnacancccttgtaattcataatcagtagtaaagtagacccccattcatgccacgagcagatgtatatagcatgggttttcgaagtccccaggaagctgtaattgataagactagcttaaatgccagctgataggatttggctccagtgttaggactcacactttgccgggtagaaactggtttgagcctactgttggcctcttggacaaggagaccagagcaatttggaaatgtgttgagaggaacccacagagcaccagtgaaaannnnncatatgtgagtgactcagg

SEQ ID NO: 5800 - DNA, 535 bp, Canis familiaris
gtgaaagaagtggtcagtaaaacaataattatgggccccaagggggtgaataaaacacatagacctatcaactacttttggacaaacacttaatgcagttacattggtgagtaggagtgctggacggaggagaatcccagcgtttcatggagggttgctgcgtttgatgacagcacactttggaaagtgttttggtttcctgggacctttcagggaaccaacacctctcttccttccaggaactttcatgggacttgcctaggattcacactgctcacaaagctatcaccatcccacgttgccctccatcctgcataaaatcttgattgccagggagagaggagggagatgcaactttaaaatgtagatatactctgtgctcactttggtagcacatatactaaaattggaacaataaaatgtatatatcctcccttccatggccactctaatacctccctactcagagtgtggtctgtggaccagaaagcaggataccaggcccctaccctcttaaactttgtttagcactaat

SEQ ID NO: 5801 - DNA, 699 bp, Canis familiaris
  misc_feature (1)..(699): n = a or c or g or t
tgaagantagtggtgagcgtntacttccatccttgtgagttactannnnnnagatcacacanctagctgggtcatcctcatctctggtgcccagtcttctgagggnntccggtgtaagggccctgggctggaactgagcgggcccttcattcacaacaggcttgacttgagtacgaagtgattccttttttgagttggcccagtgcccatcaaggtcagcccttgagtatatttgcagtcagctctcagtcctaaccttgtggctggtgattgagcagagattgagaatttcttcctccacctccgtgtcctcaggtctctttctcccactgattgaattaaagtagccaaaaagggcaccacagacaactccaacatccaattgcaataccaaaggtttctcatcttgatttctcagctcccagcagaaacatcttattcctgaaccatggacacaaaatattatttcagtcacagaaagccttctttgtctctggatacctctggcattttctactctttgatctttcctattcacataatctttattgtaactcctttcctaattattagtaggacttgttagaaactgtctgggtctgcctctttctgagcaggtgagtttgaatatggataagtcagaataatgagaactattgttaacctctttaatactaaaaataaactnnnnntctattt

SEQ ID NO: 5802 - DNA, 463 bp, Canis familiaris
  misc_feature (1)..(463): n = a or c or g or t
caccatctcccacnnnagtttcacagtccccggccacgtgactggcagggagttgcttgcagccgtggctgatgtcttcccccatgtgacagtggcaccagcctggcctgaggaggcactgggcagtggctacagggaacagctgctcacggatatgctggaactatgccagggtctctggcaacctgtgtccttccagctgcgggctgggccgctgggccagaacatggtcggagttgtggccaggctgctggcggcctccccccgggccaccgtcacagtggaacacggcccagaggggggcgactatgcatccgtgcaggcagtgctgctggcagccagggctgttgacaggacccgggtctactacaggctgccccggagttaccgcgaagacttgctggcggatgttggcaggaactgagcgcccactggagctgggcaggcggagccctgggtcaag

SEQ ID NO: 5803 - DNA, 556 bp, Canis familiaris
  misc_feature (1)..(556): n = a or c or g or t
tgtacttgaagccacatgaannaactacagcaaagtgccntnnggctttaaattgttctcctaccctaaggtgacaagcttcaagttgtaattgaccccagtcaggggggttccagaccaataagtgcaacttacagaaacaatttcatgtttgcaggtattccaagtctctccaggatgtttttcatgcataccttatgtgcaggataaattctgtaatagccagctccaaaggagtattgaagctctttcagtaatggagtttttgttatttaaatgctgttgaaggggacaataagagtcccatagaaatcatttataacaggatttaacctgtaagatacaatatgtttttccttatttttgttttttgtttgttttaatgtattccttagcatttttataaatacaacttttatcctttagatcttaagccttcttttgctctcttcaacaatgtaagaggctaataaggtgttatcttcctaaaagttatttggtatccactcttttaaaaaaaaattctccaactttnnngttggaggtaacttttgtg

SEQ ID NO: 5804 - DNA, 708 bp, Canis familiaris
  misc_feature (1)..(708): n = a or c or g or t
agggtactccctgccccatgcagtcaccaagctctacgtnncannnagggacatcacagagcanctcacccggctgctgctggnnagtgnnnggtnnttcccgtgtgtgctggacaaagccctggtggatgacatcaaggaaaagctgtgctacgtggccgtggagcctgagaaggagctatcccggaagccagaggaggtcctgagagagtacaagctgccagacgggaacgtcatctgtgtcggggagcagctgtaccaggcgcctgaggccctgttcgcacccgaccagttgggcatccagaacccaggcctctcgaaaatggtctcctgcagcatcagcaagtgtgatgcagacatccagaagaccctttttggggagattgtgctgtccgggggcaccactctgttccagggcctcgatgaccgtctcctgaaggagctggagcagctggcttccaaggggacccccatcaagatcactgctccccccgacaggtggttctccacttggattggggcttccattgtcacctctctgagcagcttcaagcagatgtgggtcacctccgcagatttcaaggagtttgggacatccgtggttcagagaaggtgcttctgaagggctctgggcaaggggtaggagtgggcagtgagcttgccccttggcatcagcaggatgttcaataaaagacaaaacagnnngnn

SEQ ID NO: 5805 - DNA, 649 bp, Canis familiaris
  misc_feature (1)..(649): n = a or c or g or t
gcccgggaccgcgccaaccagaagctggtngaatacatcgtgaaagccaggggcgccgagngtcanntgcgggccatcctgaagaacaggaagccgtcccggtggttgaacacgttcctgagttcgggtcagtacatgacatgcgtggagacgtacctggaggacgaggagcagctggacctggtggtgaagtacctgcagggcgtctaccaggagacgggcagcaggacgctggctcgggtcaacggcgacaggatccggttcatcctggatgtcctgctccccgaagccatcatctgcgcgatcgcggcggtggacgccgtggattacaagacggccgaggagaagtacctcaggggaccgtccctcggctaccgggaaaaagaaatattcgataaacagctcctagaagaaaggagtcagcggtgctgacgctggagggccgcggcggtcggtggcgggagtgccctgcctgcagggccgggcctgggatgtgctcgcttctcatccgggggtgctcttttcctggcttttttggaaggtattgtttctgaaaggtttttgaaacaaaaacgtgttttatttgctgcatatcattacctgtgactgtactgtattgtcgaatataaggtgcacacttggtttttta

SEQ ID NO: 5806 - DNA, 621 bp, Canis familiaris
  misc_feature (1)..(621): n = a or c or g or t
agcagacattatgtaacagtcaagtaaatgattttacagcagcnntagnnnnaatnnagcagctattagaaatgtgataaaaagcaagtgaccagatggctcccccaggggaagccacttaggacatctgcttcttggccatgaccttctaggactcaccatccccagaatggaaacattttctgcgtaggattaaggacagtttaggcaagcgtgcgccacccttagactggtgggctctcctgaacctcacacatacattatcgaggctggcaagaggggcccccaaaagcttggatcagccttctaggccacaaagcagcatgccattagaatcaggagactaaaccaacgccagccagaggatcccaaaggtcatgttcagatgtgtaagaagaaaaccttaattgtacagtggagcacagaggctctacaggagacatcactgagaagccatgctgtccccttgaacttggaacacattctgtctcatcctggttgggctctatacctcattgtaaattaatgaacaagaagttacttgaaatggcttaataaatgggggtgaaggtatagatagcaataacacctacctgaannnatacaccttggagcttttaa

SEQ ID NO: 5807 - DNA, 662 bp, Canis familiaris
  misc_feature (1)..(662): n = a or c or g or t
tgtatgagttgtaagtaatcttgccaaaggtaaaagggnnngctgtaagaaattgtacataagattgatttatcagtgatgcctattgagttggagagaggaaaggttgggagttgtagatgggatccctagcttatttggtatcattcattgtaagtagcacattgcagcaacaatcatgcatatgaccaatacagtcactaggttgtagttttaaagaaaatgaaagagcagtattgtcctggttttaaacctgtgatgaaattctattgtctttattttaatagaatccatctaaatacactctatagagaatatgaattttcatatactgctgttcatgttaatcctctgttttaacactaaggtgacaatgacacaatcatatccatcgacgggagcgcaggttactgtgttgggttgtcgtgtgggtcttggtgggttttattttgtcctttaggttttgttctcacaagttttgtggggatggagattctagttttattagctgtgtgtccatctgtctccccactgtggtgagcagaacatcctgttgccagttgcagccacttgacctctggcaacaacgggagatcccatctcatttttacttttgaacgttggccttacaatcaaatgtaagttatatatatttgtactga

SEQ ID NO: 5808 - DNA, 608 bp, Canis familiaris
  misc_feature (1)..(608): n = a or c or g or t
catgtnnaggttcccatgcagttccccannnnnnnnntctctgtgatccttgaaaaaggaagtnnatcagccatgagattcctcactgctgtgaacatggaacacccagagatgttagagaaagtgtccagggaactatggatgcgtgtctggtcacgggatgaagacatcacagaacctcagagcatcttagctgctgcagagaaggctggcatgtctacagaacaagcccagggacttctggaaaagattgtaacaccaaaggtgaaaaacaagctcaaggagaacactgaggcagcctgcaaatatggggcctttgggctgccagtcactgtggcccatctggatggccaaacccacatgctatttggctctgatcggatggagttgctggcacacctgctgggagagaagtggatgggcccggtgcctccagctataaatcccaaactttaaggatagccagggaaagcctatagggatgaaagcagaccatctgctgcttacccttcttccaccgttgtgacacatctcttggggcctgatttctctgatagaggatcctctgtggccccgagagatgccatgtagggggcttcctggtgccc

SEQ ID NO: 5809 - DNA, 561 bp, Canis familiaris
  misc_feature (1)..(561): n = a or c or g or t
ttgtatancttttgnannaaaagccttaattttcatgtatgtatgtagaatgttcttcatcattaaccagcatctctaatgttgggaattttattttttcatcaaaatgatttgctgcttttattttggaccaaaatttatagttttctctttaaacacttaacaccctgatgtaatttgacagttgtcctactgggaatgatctaaaaagcttaaaaagttaattgttcttctatttccatcttaactatagtgcttttcctgtctgaagttatataaagaaacaactaagtggaatgtatgcatgcatatatatgtgtgtatgcacatgttcatatatgtatttaaagtaacaaccacttaaaaattattaatgaccttgaggtaaataagagaagattatatatatatatatatatatactctagatgattgggactttaatcagtgttgacatgttagaatttattacaaggttttccctttttcagtaatttaatgagttcatttaagtgtgacataacaaggaaaagcccaaacaaaacaagttttacctgctaa

SEQ ID NO: 5810 - DNA, 605 bp, Canis familiaris
  misc_feature (1)..(605): n = a or c or g or t
agaggacaagnnngacacagactccccactgagcagnnagncnnnnnggggggnnntaatcccacgaccccgggatcatgacgtgatccgaaggcagacgcttaaccaactgagccacccaggcaccccagaaatattttcatctaatatttgttcaaaatgaaaatgatgttttacactcattgcatgttttggtgaatatagttttttaaagtgagaactaatacagtgttcatttatgaatcattctgacctcagtgacaggaggtctgtatattacttttttcaagcttttcctaattttattcacgacctatgtagccagtaaatagcatttctgcccacagtcggaaaatgtgttgcacttaaagctcaacccttctgttaatagctgtacagtttctgatagttgtggtctgttctttggttcagaaattgcctcaaaatagttacaactagaacacacaaggtatgttttataaaatgattagaataatacaatattcatgactatagtactagaaataattcatatgtgctttaattcctgattttccatttaatttttctgtgttaatgaagaccttacattttatatgtattaa

SEQ ID NO: 5811 - DNA, 519 bp, Canis familiaris
  misc_feature (1)..(519): n = a or c or g or t
tttttagtagtactactaaagcagcagctgtagaaatgttgaagtaaaannntgcattgggacacaccttcataatttgtcatttgcagacttttttttttttaatcattatttagtaatagacacttttgggctccgaagatcatgtagaaccacattgaagttcggtttgggtcagtattcattgtcagagtccatcaggatgatttatttgtgtttggtaaatgcatgtccatttgcagctttattttcagatgctaactgtttgggcagtgatatctaactgcaggtcagattttctcacgcttaatctcaggctaaataaatgtaaaggatatttgtaaagttcgaataaaattctgtttactcatttcgagttaagtatgaagaaaagtgattgtacattcaaaaattgactttgttcattttgtgataaatgactggttccaggagcttccatgtccatttttgaattctnnnnngttacattttgctgnnnngtgatttgctctttttatc

SEQ ID NO: 5812 - DNA, 575 bp, Canis familiaris
  misc_feature (1)..(575): n = a or c or g or t
tctccnggnnttcatcatcaggggcatnnccatggcatcnttctaccacgcccgctgtcttcagctcggcttgggtgtcacaaaggatgaagcaacagctaaactctactattctaaagcttgtcgtctgaaccctgcactggcagaggaacttcactgtttacttattcgtcaaaggatttagaccatgacgcatttcaacaaagatcatcaaccctaacaccttagaataacttacatttcatatcaagaacttggcaggaccagaagccaggcctcacctggaatgttttcaagaagcttctgctgtgccctctgttttgtttcctgacttcgttctttgcttctgattgtggtcggtggtgccaatttcccatttggccaaaaagcatcccggaaaacattgatgtagtaaaccaacatttgctcactgaaaatccagctcactgtgtcccggatttgtctttaaaaaaaaaaaaaacaaagaaaacaaaaaaacaaaaacagagaaaacttcttggatgaggtttttaagaattgtttattctcaaaaggcatttatcaacgggtgggtt

SEQ ID NO: 5813 - DNA, 517 bp, Canis familiaris
  misc_feature (1)..(517): n = a or c or g or t
tgctcccccannaatatgttgtggnnnagagngccatcacatccaggtacnnnnnnnnnagatcacacacatccagtatgaacaaggggcccctttccttcannaatcccagatccagtatgtgcctgtatccccaggccagcagctggtcacacaggcccaactggaggctgcggcacactcagccgtcacagcggtggctgatgctgccatggcccaagcccagggcttatttggcacggaagaggcggtgcctgaacacatccaacagctgcaacaccagggcatcgagtatgatgtcatcaccctgacggatgactgagccccaagggcccaacgcagaccgtggatatcagggccaaccgtgctgggggtggggggcccactgggactcccctctctgttccgcctagggtctccagacactgagcagccagtatcctgcccctctaagagagccagacctgcgttgctgggtttaggggacaaccatgggccccagccaggacatgctggg

SEQ ID NO: 5814 - DNA, 595 bp, Canis familiaris
  misc_feature (1)..(595): n = a or c or g or t
gagggacattcacatggagagacttaagtatnnnngcatccagtgactgaacagccctgtcctttgccgggcccggcgccacactgagtcctccaagcagccctgtgaaccggggactcacctccatttcataggtgagtcaggggaggccagaagggagatgtcacttggtgaaggccgcccggccagtggagatggaactctgggtctaggacctcacaggtgctggagaccactgtcgtaggctgcatgtcaggaagaccaaggaggagctggctgtcaggataccagccgctaagcttcgccccctccccacgcgcttggcaccgccccgcaagggctcggaaccgtctggatgtgtgtaagtcagcacctggaccggaaccatcacggcgctcctgcgccccacgtaccgccgcgtcgctgccccggctccccgagaagcgcagcatcgccgccggcccggcttgcccctggggtatgtgtgtgcccgcagcccgggagggtttgctaacacaggagcagccctccgtgatgtgtgcgggtttcgtccgtctgtcatttggtcattaatgctgtttgtgatatactttgc

SEQ ID NO: 5815 - DNA, 501 bp, Canis familiaris
  misc_feature (1)..(501): n = a or c or g or t
ccagggcttatccctgggaatatggagtcagcaggagacagagcaacagaggaagggacctgggtacctaggctggaaagaagggcaaaggcttcctgcttggctgacagcccaggttcctccccacttgttcctgttacctctgtgtgccaccatccccaaaaggctcaacctctaagcttcagactccacctcttagtggctcagtcccccactccatttccaagtgcccccaggactcctgggccctgccctccagaaccctgttccccggaaccctgccctaggctggggggggtgggcagagaaggtcaccatgtaccacacaccaaagaagggggtcggcccgggggtgggccacacaggcagcttcttcnnnggcctctcggcggcagtcccagccttcccaaagcagcaggtgcccccaggctggggcccaacctagaaggcaggggtcagtttaacaaaaacataacgttgacttttttccccggtgggact

SEQ ID NO: 5816 - DNA, 484 bp, Canis familiaris
  misc_feature (1)..(484): n = a or c or g or t
agcagaaggtaaagaaacaggtccaagctttaannaancgaatccaatttctccaccagttttccatggnnnggacaccctcactgtgatgggcattgcgtttgcagcatttgtgattggagcactcctcacaggggccttgtggtacatctattctcacacaggggagacggcaggaaggcagcaggtccccacctcgccgccggcctcggagaacagcagcgcggcccacagcatcggcagcacgcagagcacgccctgctccagcagcagcgccgcctagccacctgccaccccnnnnnncagnnnnnnggcccagccacgtgtccacgcttgccagccttcgtcgcggtgcccttgtaaagagagggaatgtcaatctaaagaccacctgttnnntcctcccccccccagggctaacacccccacccctggacttctgtgccacactagaactcccggggggaannnncggtggtggcct

SEQ ID NO: 5817 - DNA, 594 bp, Canis familiaris
  misc_feature (1)..(594): n = a or c or g or t
cgagaaggactatgacagcctggcgcagcccggcntcntcgacaggttcatccgctggatctgctagcgccccagacccacgcccgtgccccccgcccggcggcccccgcctcgagcccccgccccgcttccagcccgcatctcaccctcccaccccggccccgcgcccccggccccgcgccccccgcgtcgagcccgggctccccagccccgcaggcactgtcctcctctccgtggtgctactcagactcacccagaggtcccgcacatgcagacaccaggtctccaggtgtgggtatgaagtcaggaagggaggacccccacccagcccagccccgcagaggatcccgccaccctgcacccctcctgtccccccatcggccccccgccctccacgcccaccctgggccccagaggcttggcagggctccggtggccagtgctccagatcctcatgggcacggccctggctcccccggccttgctcagcccagccccatccctggactccttggcccctctggcgcccccgaggtctccgcctggcctctggaggtcacgtgacccagactgagccgggacagcaggccctgc

SEQ ID NO: 5818 - DNA, 642 bp, Canis familiaris
  misc_feature (1)..(642): n = a or c or g or t
angagtaactgtccagagagtgcntgagactgtngatttacaannnnngcataannaacatacctgcaaccagagcagccacttgcctgtcagtaaggaagaggatttctattgagtttctgtgtgtccaaagctgaggtaccatgtcctttgaaatatgcacagcactgcctctctttctagggacctgtggctagagagctggctcctgagtgtggaaggaaagaggaaagatactggctggaagtgactggaaacgatgtgggaatgaggcagaataaagggagcagaggtatggggctgcagggatgctctcagtggagccaggggtactccagctctctggggtgggagggggcacacaccgtacgtactttcaagagtttaggccaaagccaccagtttgtaagtgacactgcactgctcaaccaccagccagtggggtgtttttatttttattattttttagacaaaaacttccctgttgcaatcataattaatgcttattgaggaaatttggggaatttttaaatgaatcagttcgccacccaaatgctaccactgttaatcttttggtgttaaatgttcctctagacatttctgtgcnnnnnnttttggtgtgtttnnnnngttgttattcta

SEQ ID NO: 5819 - DNA, 373 bp, Canis familiaris
  misc_feature (1)..(373): n = a or c or g or t
ttccttcaaaagttttacnnngttgtcagggtatctctttgcattggtctcttcaagaaaagctcgcgcataggccattggcccagcattaacctaatggggagaagagaattggttgagggcgatcccatttcctccttggatggtgccttctccagagctgaaggagtagcaccaatcactcagcacccaaatcctctcacagagcctgtctttatctgctgtccctcaactcagtggtcagtaagctcctgaaggaggcatctgagtgctgcacttcacggccaccccttttcaaactgtcacttgcccattgtttcacattttcatctgcacacggcttgcaacgttacattcttaatatctttggaaa

SEQ ID NO: 5820 - DNA, 523 bp, Canis familiaris
  misc_feature (1)..(523): n = a or c or g or t
accctcatggatatcgnntacatctatccctggcggcggaatgggcctcttcccctcaagtatcgggtccagccagcctgcaagcggctcaccttgcctacagcacccaccccctcggagggtaccaacaccagcggggcatccgagtgtgannnngtcagcgacaaggctcccagccctgccaccctgccagccacctcctcctccctgcccagcccagccaccccctgccatggctcccccagctcccatgggcccccggccacccaccctacctcccccactccccctgccacagccggtggggccaccgcagctgcgaacgggggtacctcgaactgcctgcagacaccatcttccaccagcagggggcgcaagatgactgtcaacggagctcctgtgccccccttaacttgaggaaagagaccctctctgtccttctccagccatgcctctccatcctccactttttctgggccccctttccacctctgactttccccagctcctcccgccttagggg

SEQ ID NO: 5821 - DNA, 502 bp, Canis familiaris
aatgcgaatcagtacttgtgaatgacttcttcttggtggcttgtcttgaggatttcattgaaaatgctcgtctcttcatatttgagactttttgtcgcatccaccagtgtatcagcattaacatgttggcagacaaactgaacatgactccagaagaagctgaaaggtggattgtaaatttgattagaaatgctagactggatgccaagattgattctaaattaggtcatgtggttatgggtaacaatgcagtctcaccatatcagcaagtgattgaaaagaccaaaagcctttcatttagaagccagatgttggccatgaatattgagaagaaacttaatcagaatagtaggtcagaggctcctaactgggcaactcaggactctggcttctactgaagaactgtataaagataatatgaaaaaaactataaaataaagatgaaataataaaatcactgtataaagagtgacatacattttagaaacagttaacatgttga

SEQ ID NO: 5822 - DNA, 530 bp, Canis familiaris
  misc_feature (1)..(530): n = a or c or g or t
gtgcaatnnnagtcagagggatagaggccagaagtatnnatgcaaggggccnagtcnntggccctagaggccctatgcctagtggaatccagggtcccagtccaattaacatgggggcagttggcccccagggatccagacaggttccagtcatgcagggagcaggcatgcaaggagcaagcattcagggtggaggtcagcctgggggctttagtcctggccagaaccaagttaccccacaggaccatgagaaggctgctttgatcatgcaggttcttcagctgactgcagaccagatcgccatgctgcctcctgagcagaggcagagtatcctaatcttaaaggaacaaatacagaaatccactggagcaccttgaaaggttttcaaaaatacctggcaacaaatcgggacactaattccataactttgttggaacgttgcaaaaagatgacttctgcatcctaacccttgaatgactcaaattggtgccaggtggagnantcacatcaccttnnnnnngaacaaaatc

SEQ ID NO: 5823 - DNA, 584 bp, Canis familiaris
  misc_feature (1)..(584): n = a or c or g or t
gttgctnacaatttttttaattttgtattttccaagtgtgcatattgtacactttttggnnntntgcntagtaatgctatgtgtgatttttctggaggttgataactttgcttgcagtagattttctttaaaagaatgggcagttacatgcatacttcaaaagtattttcctgtaaaaaaaaaaagttatataggttttgtttgctatcttaattttggttgtattctttgatgttaacacattttgtataattgtatcgtatagctgtattgaatcatgtagtatcagatattagatgtgatttaatagtgttaatcaatttaaacccattttagtcactttttttttccgaaaaatactgccagatgctgatgttcagtgtaattcctttgcctgttcagttacagaaagtggtgctcagttgtagaatgtattgtaccttttaccacctgatgtgtacaccccatgtaacagaaaagggcaacaataaaacagcaatcctacagaaagaatacggcagaaaaagatctgtaagcacagtcttatttccttttgttgtccagaataattataattctcgagc

SEQ ID NO: 5824 - DNA, 594 bp, Canis familiaris
  misc_feature (1)..(594): n = a or c or g or t
catggnctgggaangacagccactggctgccaagcctggtgcttgcccggatgttgttcgtgnntctgctgctgctgtgcaatgtccagccccgnngccacctggctgtggtctttgagcacgacgcctggttcatcatcttcatggccgccttcgccttctccaatggctacctcgccagtctctgcatgtgcttcgggcccaagaaagtgaagccagccgaggcagagacagctggagccatcatggccttctttctgtctctgggcctggcactgggagctgtcttctccttcctgtgccggtcaattgtgtgaccatggatggatagaaggactgcactgaccacctgctcctgccccctttcttcttcagggatgggctagggtggtctgaggttttctcttttagccagcttctgctttctcacggcctgttctgggcccaggtgtccaggccctgaggagggagcctctatggatggacagtggggacattgtgggcctgagggtcagaatcaagggggagggcatgtgggctctgcatctgctcaaccccccaacccccttggctctgaaggatccctgcttgagc

SEQ ID NO: 5825 - DNA, 628 bp, Canis familiaris
  misc_feature (1)..(628): n = a or c or g or t
caagatcacccgtcactgttgtgtgtcatacgctctggttaagtnngtgttgttgctgcaatgaccatcatgcnntnngccannnaccacttgatttccagcggctgcagtctacaacaaacctgctgatgacttttttttaaagtgacacttatgacaggcttaccttggaagagttgtcatttttactgccaattttttggacgaagatgtttttataaatctttcaaaatggtctgcacatcgagtaggaattgcacaactaactcaatgctgtgtgttctcaagacactcccttcatgaggcccaccgcatggcaccgagtctgcccgtggagggaaacgaaggagcagcccagcaggtgtcccgcccacgacttctcctggagtactcacacggtcactggcaactagaagacattataggacctagagcatctgtcctcagacttaaccctgtcttgccccaccctccccgctaacatggagatgtgtgcagttaccttttgagcttggaacaagcagactggaatttccctctgctacctcttgtgtacaaaaatcttgtttataaaatttcaaaaggaagtagataaacgaagggagaatcttaatcctaaatttggttc

SEQ ID NO: 5826 - DNA, 552 bp, Canis familiaris
  misc_feature (1)..(552): n = a or c or g or t
ccgagttagtaaagtngaaagagncctgattgcaacttcagatagacatgccattnnncgaacagaatcatatatttcagtgacggcatcatgacaaattgatgagtgtgtggctactcagggtacatctgcagataaattgtttcagccattgaggttccattagcacatatgcatctttttgccccctttccttgaaaattatctggaaaaaaaacaactccatacccttggggactcctgtctgtctgttaccatttatgaagatgaagctggaataggaaagaagtgagggcacattttgtggttcagatgcattaggcagctgctgggataatggaagtggaggccgttggtctgtaatcaggtgcttgagagcagtggccgaggacagtcttgaggcctggttctgtctgcaaaggaagtgtctgggcgagatgaaagactattataaagcctgaggggcctggggaccaggcagtaagatcagtgcgggtgcctcaaggtacaggtaatagccaccatttccctggtcagtcctgtgaatgagtc

SEQ ID NO: 5827 - DNA, 498 bp, Canis familiaris
ccggggaagaggtggccagggacctgagctggtgctcctcggccaaggtgagaggaagagttggcagcgccaccaccgagtccgagcgacaggaacagggcttcgtaccgcacacacaagttctctacagtgaatccagaccgtgaggtcccgacacgcgcaaccccatcccctgcagagatcccgtgtttccgcaaaagacctgcaccggcaacgaaagcgcgaacaacccatccgccccaggggccgccgaaatctgcccgtttacacacacatgaaagaaaagatcgtcaggaagaatcagataggagcagccggggtgttgcaagtcccgactacgcagagacgctaatcacgaatcatgcgagctccaatcatcatgttccgagctgccctcccgagggaggaacagtctgcaaggctggaagagagccttccgtttctccaagtagtgtggctaccccaggactcccctaaaagttttgtaagtcttgatct

SEQ ID NO: 5828 - DNA, 639 bp, Canis familiaris
  misc_feature (1)..(639): n = a or c or g or t
acccagcgaggaccctgacntnnctgatgggcatggtcnctacagctttgcccttggtcccaaccctacggtgcagcnggactggcanctccaggctctcaacggctcccacgcctacctcaccctggccctgcactgggtnnagccacgtgaacatgtagtgccagtagttgtcagccacaatgtccggatgtggcagctccagctccgagtggtagtgtgtcgctgcaacgtggaggggcagtgcatgcgtaaggtgggccgcatgaagggcatgcccacgaagccgtctgcagtgggcatcctcgtgggcaccttgatggcgataggcatcttcctcatcctcatcttcactcacttgaccctggcaaggaagaaggacctagatcagccagtggacagcgtgcccctgaaggcagcagtgtgaatggtccaggcagccccagcggagagcttggcctctatctccatcggagtccactgggggagggcccagcactgcccatcaatggggcggggggcggctaggacagatagagcccctttacctgcctgggggtggaggcaatgtcaccagacaaatctgtagagcctgaacactgactttatgggctgcccatgggaatcctccaaaaggtg

SEQ ID NO: 5829 - DNA, 630 bp, Canis familiaris
  misc_feature (1)..(630): n = a or c or g or t
cgctgnnngaccacgtgcggctgctgcgctcggatggctccggagacccgggggcctccccctcccaggtgactcnnggnntgggcttccaggagagccgcttccgacgccagctggccctgctcacctggacgctgcagggggccgccaatgcacttagtggggacgtctggaacatcgataacaacttctgaggccccggggcgggggtgggggggtggggtggggggcagggctggggggcatgtgcccccagctcctgcctggagctcctgcctccccgttagtattttctgggtgagggaggtgcctagtaccacctctcattgctgacctatttctcattggcctttcccatctctgcaaagggcccagccaaggtgcgggctcagacacccacaccctggccccacagtataggagtcggtgagcagtgccttccacagtgggccggcaatacagtcagctaatctgagagcctccgctccctcactgcacagccccttacccttcgggagagggccccccctttggaaggtttcctgggccctgggacatagctagccctcttgctgggagaatggctgaaaccacagcctagagcccnnnnnnntggtctgtggcaggaga

SEQ ID NO: 5830 - DNA, 637 bp, Canis familiaris
  misc_feature (1)..(637): n = a or c or g or t
ccagccccgtgcctgtgannagaccggccccactggcctgtgtgtagctgctgagaccagggatcccgagacgcctgaatgaaaagctgttccgtgnnnnncagccagtganatcttcctggcnnnnagaggtttaannagacttganaccgtccgtgaactcagctcctggcagctgaaagctggagnntttggacaaagcagccctcctgtgagtctctgtctnnaaaagctcaggcttgtcagaagaattgggcgtttgtcctagccaacacctgaagataggcccttaacctccctttctcagaacacataataaaacgggattccaagtgtgaattgttcttctgtccctttgagaggcatatatacctcctaaaaatgatgtgtgtctttctcagggacctgagagccattccttggaaatataatcatggggccagtggggctctgtctcccagactgtgtgggaggatagactcctaacttccataattgtcagctcgaagactccactggccaaatcacatttacactgaccaaccctttgtcatttttttgcttgaggaagtcatcccatccccacctgtcccttaaaaagcccaatcacttttgcacaaatgggaatggaggtcag

SEQ ID NO: 5831 - DNA, 174 bp, Canis familiaris
  misc_feature (1)..(174): n = a or c or g or t
tgggcatnnntggnntgcccaagnnagggcccccgcctgcctgcctccactcccaggggannnnnnnnggggctggagttttatccaggccnnnntgcaaatattattctngtgtctgcctgtgagcctgtggcccgnnncngccggttccctccttntnccnnnnngncnnnc

SEQ ID NO: 5832 - DNA, 574 bp, Canis familiaris
  misc_feature (1)..(574): n = a or c or g or t
tccagctgcgacaganncttagtnnntccctccaganngcggagaagttcaccaagctctacgacgagctgctgcagtcctaccaggagaagatgttcaacacgtcctccctgctgaagcagctgaacgagcagtttagctgggtgtcccaactggctaacctcactcaaagtgaagacccattctatctccaggtcacgacggtgggttctcagacttctgactccaannntcccgtgggcttcacaaaggtggttgtgaagctctttgattctgaccccatcacggtgatgatcccagaagcagtctccaggaacaatcctaaatttatggagactgtggcagagaaggctcttcaggagtatcgccaaaagcaccgagaggaatgagatgtgaacattgcttctccaaatatgggagggctgagttcctttgaccccaagatgagtgctaggcccctagagagagctctgcatgtcaccaagtgaccaggccttgcctcgaggcgctcctgtctcctaacccagctttccttcctctggactccgcactgtaacgcctacgtttgctgatc

SEQ ID NO: 5833 - DNA, 522 bp, Canis familiaris
  misc_feature (1)..(522): n = a or c or g or t
tgaccaccccatggtgcaccngnngcagtccctgaccagccttgcctccacagtccatcttccatacgacagccaaagtgatctttgacaaatagaaacctgatcatcacatgatggacaaaaaaactttgggccctagtttctgagtcctacgtttcccctttcatgtctcaaaccccatctccttggtctctctgctccaccatactggccttcctgctatcttgaagctccacctgcactctgatcccaggacctttgcacatgctctcctctcggtctaaaagccctgaactcatacctgcctgcatatgggcagctccttgtcactgttggaactcatctcaaattcctcattttcagagaggcctaaatgcccctcctaacttttttttaaaaactttgttttcttaatagcgcttatcgttaaatgtattataatgattgtttgctttactgtctgtctccccactagaatgtgagctccagaagggcaaggtctttgtcttgttctccatgatg

SEQ ID NO: 5834 - DNA, 637 bp, Canis familiaris
  misc_feature (1)..(637): n = a or c or g or t
tnnatattaangacagaaaagttaaggcaaaatctatnnncttccaccgaaagaagaancttcagtactatgacatttctgccaaaagtaactacaattttgagaagccgttcctgtggcttgctaggaaactaattggagaccctaacctggagtttgtcgccatgcctgctcttgcccccccagaggtggtcatggatccagctctggcagcacagtacgagcacgatctagaggttgctcagacgaccgcgctcccggatgaggatgatgacctgtgagaagtgcagctggaggccagcgtcagaagtctagttttataggcaactgtcctgtgatgtcagtggtgcagcgtgtttgccacttttattatatagctgagcagaacatgtgcttaatctttgggatgctgaaggagatgaatgggcttcggagtgaatgtggcagtttaaacagtaccttcatttttttggacctgcatacttagctgttttggaacgcagttgtttccttcctgagtttcagataatgagactgctacagtcccatcacaatatccagtggtgaaatctcgtttgtcactgtcattcccattccttttcgtttagaatcagaataaagttgtatttcannnnnn

SEQ ID NO: 5835 - DNA, 588 bp, Canis familiaris
  misc_feature (1)..(588): n = a or c or g or t
tgatcacagagtanctgnatgcccaagagtcagncaagagcgccaggctgaanntgtggcgctatnnagacttccnnnnngacgatgctgatgagtttggctacagccgctaannnagnaagcgggtctggcccccagccccgctcacaccagtacctcctcctctgcagggagggtgttttcagctccagaccccagatcaggggtgtagattgggtccagctttgcttcagtgtatggaaatgtcttgtggggcaccatctgggctggaggtgggatgggggagcccaaggctttcagagggcaggccattgtcttctgagatgacaggcactgctgtccacagtctgtcccagctgattttgtgtttttatttggcagttttgtttttaaagttgtcctcaaatcaggaacatgaaagactttgtcctaacatagggcatgatcctgacacccaaggccagctggcaccccacttctatcccagattgcctttctccccagctctctgtccacctgttgattgattatgtgattcttctgatacgtccattctcaaatgccagcgtgtctacannngccccctgc

SEQ ID NO: 5836 - DNA, 585 bp, Canis familiaris
  misc_feature (1)..(585): n = a or c or g or t
gaaagaatcctnataaacccaactgggtaaagatgaggtatggagcatggtannnnnngcccaagttgtggaaaaagctaataaatgatgaacctttaattgaccccaagttctcatttgaagctcaagacgggagatatnnaaagaagctccctgaacaggatattcttgaagatctttatggaacaattgcctttaaagatttcattctaagcaagggctacaggatgccaggcatccttgagaagttgttcaccannaagggatggaaatatgattctgttaggactcctatacaccgagtaataaaaatgcacccaattttaaaagaagattcacatgaagatgtttaaacagttttctatttactacttgatctctctctcattttaacatcaaatagaattcatgataaatatcccattgtgtatgtgcaactttgatttcacaatatctgtcaatgtaatacctaatgctgataaacattcttcagtgaccttctgcttggattcataaatattttattaactatgaaatcaatattcatattactcttcttacattcttatagcatggtgaatatta

SEQ ID NO: 5837 - DNA, 424 bp, Canis familiaris
  misc_feature (1)..(424): n = a or c or g or t
tcaactccctggaaggctactgccacagcttcggcntagacaaggactcnntcataatgctggnnnancagacaggccagccctggcacaagatcctngaggcagtacagggcctgaagnnnnnagtcactgaggcactagtggtcgaactactgggccaggcctccagggatgcctctgcattcacacaggagctcctcaacgtgcctgtcctaggcaccttggtcacctgtggcatctcctttgctaccatnnnncagatgctccgcacgtctctggataaggtgatcaaggatgcccagaaagtgctgacttaggccttcctcgacaagcccaaccacaagatcccagataaatccaatcaacaatcccagccctgaccctaggccagctggaagtggtagtgaagggctgggaggctata

SEQ ID NO: 5838 - DNA, 634 bp, Canis familiaris
  misc_feature (1)..(634): n = a or c or g or t
gtgagcttgagcttcaggaaacatgagtaaaggcttatggatgtatatagtctatatgtattgtagcgagaaaaaaaatgtatttattttgacacagggaaacactgacttatgttgctgaagaacttgaagctagtgaaagggtctttcctcagtctctgagagtggccccaagtgacataaggaccatccagcaggcagctgctgggtagctctggtgagccagccatggcttggcacgggagtgagcgacgttgtgaaagtgttgtccaggggaaggccagtttttctccctttgaggcctcgactccgggttgaaggggcaggggccgggtactccactgccacaagcttttaaggaacgaaggtgttacaaacacaaaatgtaagggggggtgcagagagctgggagtaattgaccaggaagctaatttatttgctgaaaaggatggtataggagtcactaccctctgttttgatctgccaaggatttcctctcagagctgttgcacaactaggggttgggcttggtaagacaccaaatgggacagacaacgcacctaaatttctaatgtgttctgtgggtttcaattctgaaaaagaaaaaaaaagaaaacgaataaagattnnnnnn

SEQ ID NO: 5839 - DNA, 492 bp, Canis familiaris
  misc_feature (1)..(492): n = a or c or g or t
aggtggtgttcgcnnnnntgacggatgagcatnnnnnngggacgctgcgctctgccaagctcttcttcgacctcttcctcagctccttccagggcctgctggtnnnnntgctgtactgcttcctcaataaggaggtgcagtcggagctgctgcggcgctggcagcgctggcgcatgggcaagaggctgcgggannngcgcccccccagcaggcaccccgacccgggccggcccgcaggcggcgcccccagcgagaagctgctgctttccaggggcggcgacggggcggcccgggacccctctgcagacaccggcctggtgggcatcccccctggggtggccgccagccccttcgagagcccgcaggagccccccggggccccggttggggnnggactcaggtgctgaaagtaggccacacgggacaagcccaaacctggtgccggcccggcgctggcctcccnnctgccccctctggggggctggcgcgggc

SEQ ID NO: 5840 - DNA, 572 bp, Canis familiaris
  misc_feature (1)..(572): n = a or c or g or t
gaattagaggactnggctgggaaccaggcttatgcggaatatcanntgagggtaggctctgaggcagagggctatgccctgcaggtctcctcctacgagggcacagcaggggatgctctggtggagggttctgcagaggaaggaacagagtatacctctcacgcgggcatgcagttcagcacttacgacagggatgcagaccagtgggaagagaactgtgcagaagtctacggaggaggctggtggtacaacagctgccaagcggccaatctcaatggcatctactaccctgggggctcctatgatccaaggaacaacagtccttatgagattgaaaatggagtggtctgggtccccttcagaggtgcagattattccctcagggctgttcgcatgaaaatcaggcccctggagaccaggtaggagtggaagtgagagtaatcttttttctttgtttagggaggtgaagaaaaaaaaatggggaagataaagtagttaagattctttacaatccactaaaaaaattcacaggtgctattttattatttcttgtactgtatctaaatgtaact

SEQ ID NO: 5841 - DNA, 665 bp, Canis familiaris
  misc_feature (1)..(665): n = a or c or g or t
gaaatagcgtnggcattggtggctgacgcgtnagnnggtccccccgactccctgggctgtccctggnnggaccgggccgctgcctggattgttaaaagnngcaagagtccccatgagagccgnaagctggccgggaattccatctttgggctgagtttggcttagggcaacgtcactaagtggactgccggctcacttggaactcgatggctgggcagacctccggcgctgccaagggcctgtctcccctcctacggcaggccttttccctccggaagttcctatttttgctctgggcccagctgttttagctcctcgcacatgtaggagccacactgactctggtcctttcttaggcgtcaaacacagctctctggtgatgcccaggaggcaccggtgcagccctgggcctctcgtcgtggccttgtctgcacaccgtgaggcctagagcagcagaactttggtccctgttcgtgccccggggtttgccataaaccctgccactccaggctccataggcctgctgctgccccctgtcccagaaaagcctgagctcttaggcttgagtccccccccaatctgttatttcatctatttggaaaaaaaaaatgttgagcaagacccttttgctagcacgggtgagggagagagnnnnnatttttaat

SEQ ID NO: 5842 - DNA, 649 bp, Canis familiaris
  misc_feature (1)..(649): n = a or c or g or t
tgctatcatatgatccagcagtcccactgctgggtnaatagctaaaagaattgaaaccagttactttgaagagatacatgtactcccatgttcaatgtagcattgttaaaaatagctaaaatgagaaaaaagcttaaatgtctattgatgaatggatgaagtaaatgtggtacatacaatggactgttatctagacttaaaaaagaggaaatcttgtcaccggtaacaataaagatgaatctggaggatattgtgctaagtgaattttaagccagccacagaagggcagatactagatgattccacttgtatgaagtatctaaaatagtcaaattgatagaaacagagactagaatggtggttgccaggactgaggggaggaggaaatgtggagttgttgttactcatgtactcatgcaacatgagtaagttctagagatctgctgtacaacattgtgcctgtaatgaatagtaccatattatggacttaaaaatttgttaaaaggcagtactcagattgaagattcttatcaataaaaaaagaaaaaaaaatccaaatatagatttaaaaactaatgcataaatgctttttgaactgcagttatagtgctcaaaaatcggaatctacgtaaatatccccaaatagaaa

SEQ ID NO: 5843 - DNA, 476 bp, Canis familiaris
  misc_feature (1)..(476): n = a or c or g or t
ctgcacannaaacggtgtcncannnnncggccccacnnagaactgagtcggggcccggnaggctcaggcaacacggatgcctgagcgctgacgccacagaccccggcctgggccatcccggagcctcctgagtcctctgggggagttgatgggtttgacgccaccggttggcccttccgcccgctcgcaagggcgcacggttcagtccctcgcatatgggaaatgggtttagcagctgggccttgttgatttgcacgttgattcaccctccttgccttgaacctcttttctggcaaatgaatgtaccgtttctacttggattgcaaagcgctagttggtaccagtagtagtagcagcgctgcccaagaggccgacgccacgctgctttcttggggtgggtcagccaacgccaggtaaagatgggaagatgtgcaacctctttgatatgtttgatgtcatcgtatctacattggttg

SEQ ID NO: 5844 - DNA, 525 bp, Canis familiaris
  misc_feature (1)..(525): n = a or c or g or t
ggcgnccctgggaccgtgggctcggtccgtcgtcaccagcagtgaacgcacggacgatccggcttctgctctcctaggcgggggataaaggcagctccgtttatctgtcaagagggggccagagtcacctggnnnccccctgcgccccggattgcagctttggggctgatctgaaggctgtgtctcccaagtcatgtcacctgcgtgtccagccagcttgttgagctctcccctctagcctggagcagagctccgtcggacgtgctgcccacctcgtacctcaggggaaggccccattctctccaacagggcagattttctgtttgggaggcagagagacccctggagaacctaaggctcccagtgccccccgctttgcctggngccaaggatgtgccaccggctactgctgggcccggcctccaccgagccaccacgagcgctccccgnnnacactgaggcccgctcggggatgggattccgcctnnnctcccgggcatccctcccatctttggtgttcttcgt

SEQ ID NO: 5845 - DNA, 497 bp, Canis familiaris
  misc_feature (1)..(497): n = a or c or g or t
ctcagcctctnncaatgaagccaccctgccctccagctcaccctctcctctcctggtgacccctaagcttcaaagcctcttgctccagccctgtggcttccctagaagccatggcttagagtggagatgttgcagaaccctggcccaccgtcagcctccaggcaagtcagctagactccaagcacccaggtcctgtgcagaacccaggccttcaggctctctttggatgggatcaagaggccaggctgtgtccaggccaccaggtcctgcccatttccatgcatccccaccatgctgtctaaagaatgtaatttattggggcacccccaagctgctttctctcctaactctctgccctcccttaatcacactcccagcttctcttctctacagatacatatgtgtatataattatatatatatttttgccggggtctggcttttgttcctgctcaggccctggtacccctttccactgtgtgtgtgtgtgtgtgata

SEQ ID NO: 5846 - DNA, 665 bp, Canis familiaris
  misc_feature (1)..(665): n = a or c or g or t
gaatgcnnccagtgtaaggccncgaagcctgaaggcttccttccaccacccttcccgcccccgggcggtgaccgtggcagaggtggccctggtggcatgcggggannaagaggtggcctcatggaccgcggtggtcncggtgggatgttcnnnggtggnngcggnnnngacnnngggggcttccgtggtggccggggcatggaccgaggtggctttggcngaggaagacgaggcggtcctggtgggccccctggacctttgatggaacagatgggaggaagaagaggcgggcgtggaggacctggaaaaatggataaaggcgagcaccgtcaggagcgcagagaccggccctactagacgcagagaccccgcagagctgcattgactaccagatttattttttaaaccagaaaatgttttaaatttataattccatatttataatgttggccacaacattatgattattccttgtctgtactttagtatttttcaccatttgtgaagaaacattaaaacaagttaaatggtagtgtgccgagttttttttccttcttttaaagatggttgtttaactaaagactaaacaatgggaaccccttgtgagcatgctcagtatcattgtggagaaccaagagggcctctaactgtaacaatgttcatgg

SEQ ID NO: 5847 - DNA, 652 bp, Canis familiaris
  misc_feature (1)..(652): n = a or c or g or t
ctctgtcccttcccattcatgagcccaaatgcctggaaaagtggaaaatagaaaatgaccggctcnnnagnnagcatcgccgaccactcccacagaagccccagccactttcaactggactgtccaaccaagaagggtcaactcaagcacagctggtgccctgtccaaattgctgccggacctttgccccagaccgccttccagtacaccagagaagctgtaaagctcaacctagtgggcaaaaaattcagaatttgactttagggagtaaaggtggcctaaaagagtccactaattccaagcaaccaaggaacatggcagcacccactgtgactgataagccaacaatgataaggcgtccaccaacagttgtttgctacatttgtggtcgtgaatatggaacaaaatctattgccatccatgaaccacaatgtctgaaaaagtggcataatgaaaacaacttgttacctaaagagttaaggagatcagaacctaaaaaaccagaagtcaggaccattactgctaaaggtttctatgatctcgatgccttaaatgaagctgcttggaccagtgccctgagccagttggttccctgtaatatttgtgggcgtaccttcctgccagacaggctgattgttcaccaacgatcctg

SEQ ID NO: 5848 - DNA, 427 bp, Canis familiaris
tcatacgaaatatatgcagatgggtccacacaacttccttctgccccttctccaaaagttttgcaacgtgaagggctgctgcccaaatatctggatttttctaacccaggtggtagctgtttggcccatagaagacccctgacagaggaccccagacttctggtgacacgtggctgtaggcagaggtcaaatacgtcatgcaacgggaagatttatttagagccactgtcctcagcaaagtatgcaaaaagctgacgcagacagcctcccaagaagaggtgacctcaaagggggactcagaagctcactgttctttcacgagaaccagcccctcacccacacccaacaggcgctagggaaatttcaaaacctaagaatcctttcaactgccacctgcaccctgtctatttggcaatagcgtgtcatt

SEQ ID NO: 5849 - DNA, 547 bp, Canis familiaris
  misc_feature (1)..(547): n = a or c or g or t
gtggttgctgagcaagccatgaagggacncnnnntcccaggnncactgtgggccaccagtgccccgcacccaggaggcagtgctgccacacacaggctttgccaacttggtcagagaaaaggcactctggggctttccaccctgcctctctcccgcagcaggctcgagccacaagggccagcccgnaggcccctggagcccagatctgtctgtcatctggtgctgccggctgtgctcactccggttttctgctcagggtctgaagcagctgctgtcccctacccctgccccccactccctgactctgccctgggcccggtgccagtcccctggaggggagggaatggctcgtgagccccaggggcagggagcccgaggccggcctctgcctctccctgccccccagcacaattggcagagatgaggtgggcgtgtggctggacggctgtgctgttgtggcgggggtctgcacagggccatctcctggctgtaacccaagcggtgggggggtctgcagcctggtcatggcccacaacaggtccctgtg

SEQ ID NO: 5850 - DNA, 576 bp, Canis familiaris
  misc_feature (1)..(576): n = a or c or g or t
agggggnnagcctgggtgttgcacnnngggggatnnagccacagggtacaagaggagggaatgcactctgggcgnnttctggaataaggattcaggctggggcgggggactcacccagggcttctctggcctgcaaagcctgagatgaccagatcttctggaaactggggcatcaagagtgcctgtaaacccgcccctcacctcggtccttcctggggcccaaggagcatgtccatttctcagcagtgggagctccaggcctcgagccaggcccagcaggcccagcgctgcccgccctgtgagttgtaaatattccttccttggccgtattaaccgcacggccgagcctcggctgccggaggtgccttcgccgggtccggaagcctccatcctgccggcctcgctctctccttcctgggccccctcctccttctaggtcccagggcggcttgggctcagggctgagtgagtggggaggctttgaggggctcctggctcccacccaggcctccccacatggggtgggccccaggtggtccatcactgagcagacnnnnnncgctcctcgctcggttt

SEQ ID NO: 5851 - DNA, 587 bp, Canis familiaris
  misc_feature (1)..(587): n = a or c or g or t
ccgctgnnctgctcctcccggcaggtgacgccgtacagcccacagcaggtgggacagcaggtgttccgctcttcctacgcccccctgctgagctacatccccttcgtccagcccggctacccgcaccctcagaggacacctccaaagctgtgcagccatccccgcgacccttccccgatggcgggagacgggccacagtacgtggtcccccaggcgtacgggttcggctcgacggctggcgggcccctggtgaacagcccctatttttcctctggtgggaatggcataaacttttagacgatcttctctcctccctcctcttaccttagccctcagatcggggctgagggctctggaactccgggttctgtaatcgcgtggccgggggtttggaaaaccaaagttccgaccaggtcacagacagaaaacggcaagaccaggctcatctcttgaccacctgtgtcacacaccccgcaccccacacacacgcctccctcgcacccgtacccccgccccccacttgaccacatatgcacctgtatttagctgacatgagtgatttttgtttnnnnnnttggtaaaataga

SEQ ID NO: 5852 - DNA, 506 bp, Canis familiaris
  misc_feature (1)..(506): n = a or c or g or t
gactccagtnncactcaagcaaagaagagnngaacacaatcaggtgggagaaaaaacagaggaaagaagaatagaaagggatattcttaaggaaatgtttccctttgaagcatctacaccaacaggaattagtgctagttgccgcagaccaatcaaaggggctgcaggccggccattagaactcagtgatttcaggatggaagaatctttttcaactaaatatattcctaagtatgttcccttggcagatgtcaagtcagaaaagacaaaaaaaggacgctccattcccatgtggataaaaattttgctgtttgttgttgtggccatttttttgtttttggtctatcaagctatggaaaccaaccaaggaaatccgttcagtagttttctttctaatgactctggtaaatccatctgaatgatatctctttggcacactcaatttggtctcctattttttctaataactgtataaagaaaatttgtgtacacttgttgacttgaga

SEQ ID NO: 5853 - DNA, 529 bp, Canis familiaris
  misc_feature (1)..(529): n = a or c or g or t
gagtctttgnccttccttttattctttatttaancctggatatgtaatttatcntaagtgagacttcattttcacctttaacataggagcaatgatacttgtttaactcccttgtagggttattatgagggtcaaataaaataatgtgcagtaggttacagctttttgtagactgtaggtagggcatgttgcaaattacagttactaccaggcactttcaagtggtactagtgaattacatttgcttttattccttgtgttaaatgtttctgagaattatgggttgggccaactcattggctaatataatctttttatctttaaaatttttttacaaattcattcatataccttagagagacagagagagagagagcaagtggagggaggggcagagagagaatctcaagcggacctcactgagcatggaggccatcgagtgtttcccatctcatgattcatgagatggtgacctgaactgaaaccaaatgtcagacgctcaaccaactgaaccacccaggaaaaccct

SEQ ID NO: 5854 - DNA, 448 bp, Canis familiaris
  misc_feature (1)..(448): n = a or c or g or t
agctattagctcaagcttcaggacctatatctctactcatgttctttattaaacaggcaatggtatgaacagagaggaaagggattggaaaaacactttcagtgaataaggtgaggtttttgtttttggcttgttttaacagaaaaatctgtacctaagccaaatctgagtagggtgactgctgggaagccagccaagaggcatctgggaattagtgggaacttcactagacagaatcaggagggttgtatcttacctcagctcttcccctacctgactgtgtgaccttgacaaagccccttnnnctnctactccttcattccaattcttacactgatgggacttggacaaacaagctggttccagtgagtttcatcattgtattcaaatttnnngctaaagaagaccaagccaaggtgagaacacagtacagtctctcacttacctt

SEQ ID NO: 5855 - DNA, 607 bp, Canis familiaris
  misc_feature (1)..(607): n = a or c or g or t
aaagactgttcaatcagaaaactgtcaagtatatccctattcattatgtgctaaatagcttttctcactatgaacccaactactacccacatagaccagctgaaccaattaatcatcaatatgtgccttatccattttatgcaaaacctgcagttgcagttaggacacatgcccaaattcctcaatggcaggtcctgccaaatgcctacccacccactatgatgcatcgcccacaactacatccatcatttattgccattcccccaaagaaaattcaggataagacaagcatccctaccatcaataccattgctactgctgaggctacacctattcctttcactgaaccaaaagtgaacactgcagtcacttcagatgcttcctcagaattcaccatcacaagcacacctgagactaccacagttccagttacttcacctgtagtctaaaaactctgaggaaacaccaaagaagacaacgcaggtcttgctgaaaccaaatgactactccaaactcttcctttggtcactcgtctaaattcattcaagagagaatgtgattttgatgaatttggctcctttcnnnnntcatctcacattttacatcc

SEQ ID NO: 5856 - DNA, 613 bp, Canis familiaris
  misc_feature (1)..(613): n = a or c or g or t
ttgtttgttcagcagccattttattttcgnantgtaataaactgaaaggggaattaagataatgcttcccccccattgctattcaactacctctatatgcttggtttctctttagggatttctttcctccggatctgtacaaaaatgcagtttcagcttatctatgttgtaacaacaatgtgattgatacagacagttgctgtgaaagctgttcattcattagaaatgtttactgttgtttcactttgtatctaacgaaactgtacccgtaaccttaggtcaagaatgacccaaaataagttatcattttgttggaagcagaatagaaaggaaagctatcggaccatctattttgttcttgttcctgtttgcttataatacatttgaccagatctttcaagaaagtagacttgccctcagagagtaagctctcatgtatttgagagtgaggctgccgtgagttagttaatgtgactgatgtgttagaaaatctggccataaactgttttttaaaaatgcaccagaaaatcctgttaaagacttatgttgtaaacatttttgccaacaatccaccccgggtttgtttgtaaatctgttcgtatgttgagtttgc

SEQ ID NO: 5857 - DNA, 526 bp, Canis familiaris
  misc_feature (1)..(526): n = a or c or g or t
ancctggggtgcagtggcctggctgcccagttcagccaccangncacacccaaacctctgntgcttggaaaggctccggcccatcagaagtnnacctaagggtgccacgcgncnttgtgtggtccaaaggacagagtgcctccctgggtcggcctgcccccgtccgaggtggcctccagnnngcgcacactgctccactgcggcagacagggccgggggttgccggtgcgctaactcctcgggctgtggccctgaggncgggcccgtggctacgcgagctcccgctctgaccgcacatctacctccaggggctgcgggctctatgtcacagtnncgacagcctcagcaaccccccaagggattagggacctgtgttggagttgtggacagtcttgtcagcttcgggtataaacgacctagaaagccatgttttcaaaaaatatttatcaacaggagaatttttacggcataataaagtgggaaaggcatatttgaaagcnatccatataatacagtatgatcccaa

SEQ ID NO: 5858 - DNA, 625 bp, Canis familiaris
  misc_feature (1)..(616): n = a or c or g or t
ggactnnagagcgagccacccgggtgacagctcaggctgcatgggcccgaagccaggccgggggcctggagcaggagtttgcagagctgaaaaaccaatatgctgttcttcaacgtaagaccagcgctatgggactaaccaaggcgacgttggaaagagtggaacggctgaaagacgtggcagggaaactggccgaggatacagaggacaagataagaagaatagcagatttagaaaagaagatccaagatctgcagctgagtagacaagaaaaagctgaccaactgaaacagttggaagatcaagttgttgccattaaaaatgagatcgctgagcagggaaataaatatgctacttgctacagttaggcagaggtgacatgcaaagtcacctgtgccttcttttctggcatctgacaaggaagcttcaggagcagagctgaactggggaaagggcaatggtcagccccgcctcctctgcttccggagccctgctccttgccctggatctgagctgggccaagcaaatgctgttccacgtggaatagaaaggaggaagtagagacacggtctctggctccagaaacctttcttcttgccttcctttccctctcaacacataaaaa

SEQ ID NO: 5859 - DNA, 494 bp, Canis familiaris
  misc_feature (1)..(494): n = a or c or g or t
agtggatataaanaacctattccagagnnnttcagngnaaaaattcannnnnacaggttaaaaaaaaaatnnnnnagcttccagaaagataaaacaggctatatacagaggatcaaaaaacaggatgggttttgactactcaagagcactnnnggaagctgaaagatgatgaagacataactagagctctgaagtaaaaagagtttgactctatattttatacctagacaaattgacaaatcaagggtaatgatagatattttgaacattcaagagcttcaaatatccctcccccctgcattctttttcggaagcttctaaagaaatgccatactaaaatgagggattaaccaagaaaaaggaagacatgggatccagaaactggaattttctttcctttaagaaaaaggcaaaaaataactccagaaagagaatgatggaatatatcaagaatgtaccaagccannggacagcaagagtgagaatggaacagc

SEQ ID NO: 5860 - DNA, 526 bp, Canis familiaris
  misc_feature (1)..(526): n = a or c or g or t
cccccctacccccacccccaccatttcacacacagcctcagagaacagggttgaccccgaaggccgacctgtgtggatcaagggagacaatcccacgccagagaattctctagggcccaaggagatgagttccctttcagctcacatggatgctttcagggggcctgatcacacaccccatctctccacagtccttgtctcctctccaggtgtccccagcagggagccagtggcctcaggcagctgggtctccaaggctgaggagcccatccatgctaccgtggacccccagaggctgggtatcctcatcactcctgtccccgactcccaggcagctacccggaggcaggcagtagggctgttggccttccttggcctcctcttctgcctgggtgtggccatgtttgcctatcaaagcctccagggctgttcccgcaagatggcaggggacatggtggaggggcttcgctacgtcccccggagctgtggcagtaactcgtatgtnnnngtgcccgtgtgagctgcc

SEQ ID NO: 5861 - DNA, 697 bp, Canis familiaris
  misc_feature (1)..(697): n = a or c or g or t
gtcactcatgccaacgcactcannntcatgagcaannctgtggnanntggggacaagcccaagatccagnaggtcaannagcagcgggtaacggggctgctggttgccctgcttgtgggtctctccatagttattggggacctgctccggcagatccccttggctgtgctctttggtatttttctgtacatgggagttacctcccttaatgggatccagttctacgagcggctgcacctgctgctcatgccacccaaacaccacccagatgtaacctatgtcaagaaggttcggaccctccgaatgcacctgttcacagccctgcagctgctctgcttggccctgctctgggcggtcatgtccacagctgcctccctggccttccccttcatcctcatccttacggtgcccctccgcatggtggtgctcacccgcatcttcaccgagagagagatgaaatgtctggatgctaatgaggcggagccagtgttcgatgagcgggagggtgtggacgagtacaatgagatgcccatgcctgtgtagttgctgcctggacccacagccaagggacggatggatagagggatcaggggctggggtgttctccccctcccctccctcatttttatttaaatgaataatttaaagtctccttaccatccccaccccccacagtannnnncttcggcccccacct

SEQ ID NO: 5862 - DNA, 654 bp, Canis familiaris
  misc_feature (1)..(654): n = a or c or g or t
acagcccctgtgagnncacactcaacattttttgatacatttgatccatccttggtttctacagaagatgaagaagataggcttcgagaaagaaggcggcttagtattgaagagggggttgaccctcctcccaatgcacaaatacatacatttgaagccaccgcacaggttaatccgttatataaactgggaccaaagttagctcccggaatgactgaagtaagtggggacagtactgcaattccacaagctaattgtgactcagaagaggacactaccacactgtgtctgcagtcacgtaggcagaagcaacgtcaggtgtctggagacagccatgcccacgttagcagacagggagcttggaaagtccatacgcagattgattacatacactgcctcgtgcccgacttgcttcagatcacaggaaatccctgttactggggagtgatggaccgttacgaagcagaagccctccttgaagggaaacctgaaggcacattcttgctcagggactctgcgcaggaggactacctcttctctgtgagcttccgtcgctacaacagatccctgcatgcccgaatcgaacagtggaaccacaactttagttttgacgcccacgacccatgtgtatttcactcctccactnnncaggac

SEQ ID NO: 5863 - DNA, 514 bp, Canis familiaris
  misc_feature (1)..(514): n = a or c or g or t
ggcgcaccgcgnnttcgccccgttgcgnntgctgcacgcgctcggggcgcnnnntccgggcggggcggtgcagcccacgggcatgcactggtactctcggttcctctaccgcttggcggaggagctactgggctgagcgcgacggacacggaagcctcgaggcgcctgctcaaaccccggcgtgcgggnnnnnagctgggggagtgggcancagaggatgctgactcgggggtggnnnaggaggggaggcggagaaccagaggcaagcctggaccgcttggtgtgggggcagcctccacccgagaggagatcctgggtcctaggtagatggtgggtactccttgacgaggactgtttcgcctcttcctcctcagtgcctcagccccacccgattattttattttattttctatttataaattgtaatataatgacctgcttgccccgcctggcaaggtgaggggccagggcacggcgttaacactgtttgannnngccagccaatctgatgtct

SEQ ID NO: 5864 - DNA, 434 bp, Canis familiaris
  misc_feature (1)..(434): n = a or c or g or t
atacagctatgaaggatgggnaactgtacctgactnnaggagnctnnngtctagacggctcagatagcatgcaagagaccatgcaggccaccatccacatcacagcccagcatgaagatggccccgaggatgatccgcagctggtggggatcactgcccggaacattccacgagaagcccagctggctgctgagaacctgggcatcagcctggccagtttgctgctgaacaaaggagccaagaacatactggatgttgcnnnnnnnnntaatgatgcccactaactgctctgtggnnnnncggtgnnngggtggctattgtccagtgcctacctcccagccctcagtgccccatcctcactgctgactgaggtgatcaccccagggagttgaactgcaaggtcagagacttgcctcaccttgaggctgtgaaga

SEQ ID NO: 5865 - DNA, 565 bp, Canis familiaris
  misc_feature (1)..(565): n = a or c or g or t
gntcggcagatagactcgtnnggtgccgatgacacccannagcacgaagaggtnnagctgagagggagtagnnnncagccggatctcatagagagcaggaagggggctcaaatagtgaagcgggccagcctgaaaagggggaagcagtgatctctagccctcccctcaaatggcctctctggaggatcacacctcgacacccaaaccctgaactccacacactctgccatgcacaccggaggagagctggagcggagggctgcggaagtggcacacctgtcctctaggccaatggcatgatctctgtaagggacttcctgtagtctcctattcgcatgaacgactgactgtagacgcatgacctacagtcctcaatcctgcctctagcgacgatggatctctattgggaatcaggacaaacgcctcaagaagggggggtggggagagagagagggatagaaaacaagcgcaagagagtgcgtgaacgcaaaagtcaacaagggctcttttgtgcttggggaatgatctatttttaaaaatcattttaattttgacttgttacagg

SEQ ID NO: 5866 - DNA, 621 bp, Canis familiaris
  misc_feature (1)..(621): n = a or c or g or t
gctnnccccatgccnntgcatatcactccactgggactgctacttctcatcntgtacnnnntcatctcaggnnnnncgtncgtgtacacagaactgctcatgaagcgacagcggctgccnntagcacttcagaacctcttcctctacacttttggtgtgctcctaaatctaggtctgcatgcaggtggcggccctggcccgggcctcctggagggtttctcaggatgggcagcgcttgtggtactgagccaggcagtaaatggactgctcatgtcagctgtcatgaagcacggcagcagcatcacacgcctctttgttgtgtcctgctcacttgtggtcaatgctgtgttctcagcagccctgctgcggctacagctcacagctgccttcttcctggccacactgcttattggtctggctgtgcgcctgtattatggcagccgctagcccctgaccacctccacctggactcctgaccctgaagattggccaccatcagagccacctcccaggcctcccgacccttcctcagcagccagccctnnncaagtgccttgtgataaaaggtggggaagtgagagcagccaggttagtctctagaagtgggtgaatgaagggtta

SEQ ID NO: 5867 - DNA, 644 bp, Canis familiaris
  misc_feature (1)..(644): n = a or c or g or t
ggacaaatgtgncntcttccctcaagctctcancntagatgcatcctaggtatctnnaagcatgggaaagaagactaatctgcttgtatatggccntggcaggtggggatacttaccattttctctacaatgaattcgtgctagttttcgaggtctttttttgccttcttaatggaaattcagggtttgttttttgttttgttttcttattaaaaaagaaaaaaggtatcaggtctaccttctgtctgccctcctacctcctcatcctatcctcccatatgagcacggctccccatggccacatactcctgcaaagcttttttgctgcttggcttttctctgaagagatctgaaattgctgctcctgtggttttctcaaaattaactttgtcatggttttaaaaaaaaagaaatcaaatgcattgttgcattaagcttttttaataaaggaaaattatggaaagaaaataggcaacaccagcaaattatatgtagacaataaactaaactatatatataatatatatatatatattatatatatataatcatctagttctcattgtcatcttactgaaaggaaataaaacctctaaggatcgccgtttctgagaggctcttggaaatctttatgtctaagtgat

SEQ ID NO: 5868 - DNA, 658 bp, Canis familiaris
  misc_feature (1)..(658): n = a or c or g or t
aagactgttgctcagatctatgcagacaagcnncaagttttataatttttttattactgattttgttattatttttttatcagccagagtcccctgtatctacaccccagacttcaccccgaatggctcagtacctgaaggtggggaccaagtcctgcctagacacttgccttcttcaccacgctaatctgtagggctggacctatgaccaaggacacactaatcgaactatgaactatgctgcttctaccccaagaggtagctgtggccactctcttctgaggcctggatcttcctaccctgagggtcaggctccattagggttcgcccttatccatctcttcctgcccaaccactcaaagtaattttgccttgcctgagaccagttgagagcactggagtgcagggaggaaaggggaagggccagactgggctaccagcttctagtctcctttgcactgagggccagacgatcaccatgagaggagggccatgggaggctgagaattcactgctcaagaagacatggacactcctgccctgctgtgtatagatggaagatatttatatatatttttggttgtcaatattaaatacagacactaagttatagtatatctggacaaaccaacttgtaaatacaccaccttactccttc

SEQ ID NO: 5869 - DNA, 568 bp, Canis familiaris
  misc_feature (1)..(568): n = a or c or g or t
ccaccaggctggtgtcaacgnagtgtctgatgacccgcccctgggtgtgcagcaagatggnntacacatgacgtgggtcaggccagcagtggccctccagtcaggctctgagacctgcctgccctaggttcctctcccaggcgaagcagtgaggacgggggcctctgcctcggcctctgctccaggccacacagccctggttcctggtctcctcggccccaggcaggtcctgtggcttagcagtcaaatcccacatgctcagtagtgtaggcatctcccaaacacacacatgcacgcatgcacaggcatgcacacagtctcttctggagttcagagtccagccttagtcaccccaactcccttcctggtcccatgctggaatatttcttccccatgtatccctggtgcttggaggaaggatgggcactgacacagattgcattactgtctgcacatttctctcctgggtgctggggaggcagggagggtgggctgccccacatagggccccctacagccaccctcttggccttgcccagggttctcaggcaggcccctgctgtgtctg

SEQ ID NO: 5870 - DNA, 580 bp, Canis familiaris
  misc_feature (1)..(580): n = a or c or g or t
gaaacangttntgtgtacttttagantggcatanaaacaaaaacaaaatnncannntggctaaatgttataaatgatctagaaaatcatactaagcccaaaccagcccctaaaaatatgttgatcatttctaagtaaaaacagtttttgtacaactgacctatattagacagagtgaggaaaagaaacatatagggtaaaaggtagaattctaaactctacagcctaactttagatttaaaggcatatcatttacccacttttggtgggaataattacattgaccagaaaatgctcagctctatgcatgttgaacaattaaactcaaaggtcatttctgcattaactgtttgatccttatattcattatgtggtcaaagccatgtcctaaaatcatgttctaaaatagtacagaaagtgtttgtttttttcttagttctttatataatattgtggttttcaagatcttgttatgtttttatataatattgcatgaaatgccattctgttttttgtttcttattcccaccatcaccaaactgcagtcaaatgagcctaaaatatacattgagtgaaaattg

SEQ ID NO: 5871 - DNA, 650 bp, Canis familiaris
  misc_feature (1)..(650): n = a or c or g or t
attatcgccatgaaatgnnncttttggagttcaaatttaatntactttcaaataatctatgtgaggaaattgagaaccatcaaaaatggacaaaaaaccagttcgtcagctatgaaaaagaccacnttggccacataaatcaatgtctgaagctcctccaggagaaactggaaaagtccgaaaacaaaatgaaagaaaaactattgcagctttcaagcaaattagagaatttcattaacacagagaaacaggaagcagaactaagcaaagtaaagcatatagaaaataagctgtccaaaaagatgcagcaactggaaaagcacatttggggtgaattagagaaaatgcagaatgaatatcaatcaggatttaaatcaattcacgactctctcaactccctccaacaaatacagaaaacaaagatggatttagagaaatataaagtacaaaaagacctaaagaaattacagcgtaagatagtggaactccaggaagtataaaacttttcagtcatctttttcaccaaccaaaatagtggtttgttggtaaaaagctgggaagaagttactgtctctgggatgtttactgcttcttatgtctctgtacttcttaccacatttttaaggcgatgaatgtgccagaaaacccaa

SEQ ID NO: 5872 - DNA, 572 bp, Canis familiaris
  misc_feature (1)..(572): n = a or c or g or t
tgaagcatacaaactgtgacatcgtgtgctccctctgtgtgctgcccaaaacgcagcacgacctcagctccctcgtggtngacatgtggttccagacggagaagatgctctgcttctctgtcaatggggtgttcaaggaagtctatgcattgtgaatgatgagctgttcgtgagagatgccacccctggtgagactcagagtgcattctccaaccaagagaccttcagctccatgcctaccctctcccaggagcagcaggaaatggtccatgctttctccactcagtctgggatgaaacttgagtggtctcagaagtgccttcaggacaatgagtggaactacaccagagctggtcaggtcttcactgtgctccagaaggaaagcaagatcccagaggaggccttcaaacaaatcacctaaaagaagccttggatgtccacatcatcattgttcctcttttctccggcctatgcccatgcccatgactgggaaaagaggcctggctgaccaagaagccaaagttatattccaggccaggtgacataccaccgggaggatcagttgttccgtg

SEQ ID NO: 5873 - DNA, 581 bp, Canis familiaris
  misc_feature (1)..(581): n = a or c or g or t
tctctctctctctctcnctcttnctctctctctcacatgaataaataaatnannncnttaaaaaaaaagagaagatgagtggaagaagaaagaaagaaatacagagaaacnnaaacactagtgcaatgattttaannncttatngtagcaaagcagaaaagagcaaagttgtagaggtcaaacttgagaaacatctgagaatgcaagtcaaagggatgtgttgagagctgatgcccaggaagcagaatagagtcacctccttcggatgataggattcctgaggatgaagccagaacggttggaacaaaggtggcaacaaaaagtaaattcttatgtcctcctgtattcccattgctaaaaccaacatctagcacattggaggtgccttggcgaatgcatgctattcagtgaatttaaggaaacttttttgagatggaaagaaaaaatgagtgtgcaatttaaaaggaaacctgtgatggtcacccaataacgtcaatgtacttaatgccactgaactgtacacttaaaagtggttaaaatggtaaattgtatgtaatgtatattttacaattttttaaaag

SEQ ID NO: 5874 - DNA, 485 bp, Canis familiaris
ccctagagaggctggccgaggccccatcgcccgcacccaccccctcacccacccccgtggaagacctcgggctccagaccagcacctcccctggacgcctgtccccagattttgctgaggagctgaggtccctggaaccgtctcccagccctggcctgcaggaggaggacggagaggtggccatggtgcttctgggcaggccgtcaccgggcaccgtgggccccgaggaggtgacactgtgcagcagccgccgcccagtgcggccaggacgccgtggcctgggccccgtgccctcctagaggctccagaacctcccctggacttggggtaggggccctgccagctgcacaccacccttgccctgagtcttttaacctgggtgttagcattttaaagagatccctcaggagttctggcctctgactaactgccccctccccagctggcacccattggcaagactgtaactagtgatgtttgtacaa

SEQ ID NO: 5875 - DNA, 649 bp, Canis familiaris
  misc_feature (1)..(649): n = a or c or g or t
agggggnnggaagaggtnnaggaagaaggncgctcagaaccagagctgacccagggccaacccctgtcaggcaaccagaggtcaaggttctcaagtccacagcatttccagactctcctcaacccttcaggtcctggtttgggcaaccggctgacccgcctcagcctcatggaagaggatgaagaagagttggaaattcatgagttaagtgaggaatggcaagaaacagacaagcacacttcccccagtgagcacgggctggacctcttagattctacagagctaaaccttgaggatttctgacaggactccatgcccctccccgtttccactccccacctcaacggggaaaaggcaaacaggagaacagagaagaaggaaccattacttccaggccccatcctggtctttgaagggaaggagagtgggctgtgcctttctaacctaatgtttctcctatgatgttgggatagagaagccttaggccccctgtccttcctcatactcctggctctgtccctgtgtggagaatgcctttttcctgctgtgtctggaggaggtggcagctttacctcagtactggagtggcactgcctccctgtactgaatagaaagaacccagtagtttcttgtatttttggaacaactt

SEQ ID NO: 5876 - DNA, 172 bp, Canis familiaris
  misc_feature (1)..(172): n = a or c or g or t
atttttacagnnatgagtgcgttccttaagaatannacctaaggaactgatagtgcccaatttaagatttctagtgtataaaagcagaatgtatgagggaaaaggtgcctgagcagcttactaaagctttaaaagaccgtcggcctcgtgttttaacacaactcatttattg

SEQ ID NO: 5877 - DNA, 609 bp, Canis familiaris
  misc_feature (1)..(609): n = a or c or g or t
tcagtctaaatggtgagacagaagtttggnttttccttgcctctatgtgaaaataggtnntaaatgaatggcttacttcactgcattagaccccataactggtctcacggacactctgtgcccagctgtcactctcagcagcttccttgcagcagagcagggctgaggggtaaggggctataaatgtatgtgttgacagggcagggagaatcttatgctgctccatcataaactgacaccagtgcccaacaatcaccctctcccccttccctctccctagatgtagaggtcggacctctggaccagctgacacttgggctgctgctgggaggcctgggctgtttttttcttaaatatattttgtaatactgtacaaccaaatctactctcccaggccctggggcctcatgggttccactgatagaacacaccttctcttccatggacttgactttaagcccagtaggaaagagaaatgggaaggagaaacagcaccatccttcttccaggcccttgaccgccccttttgcattgggccaaggtttgtacctaccacaccatgcatgactcagacgccctcaggtccctttctttacggtatgtatcctg

SEQ ID NO: 5878 - DNA, 591 bp, Canis familiaris
  misc_feature (1)..(591): n = a or c or g or t
ctcacctnnacncatcccactcacccnngtgctttttttnnaantaagaaagtttcagggaatcaaaagaggtcnnaaattttttaatctagcagaagtatagagtcatatattttgctacaattattattataatatggagaatccactttgcccgtgtagtgcgtggagagtgtgtgtgtgtctgcgctcatgataatttgaatgttgaacagccctgtggcttcagagtagcattttgaaggataaaccacaccgcttcaggaaacctgccccgagtaccacacatcccttcccttaccggtttttaaagagctgaacacccggggctggggctctaggcgacacatgcaggcctgagatcggcgcagggacacgtcgtccttcgcacgtttggctcacggccgccctcaccccgtccctccctcgtccccacggctctgctcactccgtatttgaacaaatgtgtttcccttgctctttcctggagcttcaagcctctacacaccttagagttgtgtaaacccgccaggtaaggtcccctccgtcacaggtggtgccgcccttggtttgctgtggtactttgctgtg

SEQ ID NO: 5879 - DNA, 544 bp, Canis familiaris
  misc_feature (1)..(544): n = a or c or g or t
atagggctttcaattcagaacacatctcggtttcccctactgttacattttcatatcatggaagccatgctgtatgnnttatnaaacaaaacgttngnnnangatggccagcatcgggtgctgagcatgaatcgaaatggagtggggaagcactttgaactgatgattggggacacacggactagtggaaaagagctggtgaagcagctcctcacagagtctgttctgaaggaagaccctcgggtcgtcttccctaaggagaagattgtacgctacagacagatgttttcatctactgagcaaaagagagcagaagagttatatgattccctattacaagccgttgccttctatgaattagcagtttttgacaccgaaccttaaaatgctgaggttaatataaagaactctgatgttatattaatttatatttattagctctaaagccataaagccaactgtttttaacatccatgtttatggagaagaaaacatgtttgtatttggatgtttaaagtcagacttccagctgttgaattgttca

SEQ ID NO: 5880 - DNA, 492 bp, Canis familiaris
  misc_feature (1)..(492): n = a or c or g or t
ctgtctcctacatnnagcaaatgaaaagantntaaagctggaannaactgaggacctttctgacattctggtgaggcaaggggattgagtttgcccaaaaaaagttggcagaaggaggctcatcgcttcagtgaccaggacatctccattctgggagctgctgtgtggcgggcctgtggcaaagctatataccccactatgaaagtatcagttgttttgtctgttgctcttcccttctctccctcacagtctgggaatcagcaccctggaactatgtctttgattaaagttttctgccctgtggtgaccacctagcaaggaggagatggtgaggatactgttcttgattatgaaaacctatatccatactttgtatccatgtctagtttttgtctcctaacttgatctttgttattttccacaattttgtagaaaataatttcccagcaggccctggttgtcttttaaatagctatctaaactatgtacata

SEQ ID NO: 5881 - DNA, 427 bp, Canis familiaris
  misc_feature (1)..(427): n = a or c or g or t
gcagcagcagcagcacaaacagctcannnacatcggcatcggcatacaggcagccagtcaaaaagtaaaatgaagagaggcacgccaaccactccaaaattnngagtcttgnntatttttttttcctcttttttaaaaccataagagcattgaatcaaaggattcttgagtttctacttcattttttttttaaatgtcagtattttacattgtgaaatgtacaaactttatacagaagcacaaccctatgatttttaattaaaaacagggaaatggtctaacaaaccattagggttggtttgcctaagtcattgctttttaaaaagtggtctcactgtacatannnnnatatggaagtgacctaagaaaaatactagaaacatctttctgaagaatgtagtttgatatttatttagtataaaaggtt

SEQ ID NO: 5882 - DNA, 230 bp, Canis familiaris
  misc_feature (1)..(230): n = a or c or g or t
gtcnggnnngnnnnnnntcagnnnnnnngagcccagaggtggcccacattccaaaccctnnnntnnntgcacagtggcnncctttgnannnanggtggggcnaggcccagggctctccttccccatcctttttctnnnnnctgagctgccccaagatgatgagaggcagcnngtngagggtgaggaggggatggcggcnntaagctgtgagccaggagggcagatggaaa

SEQ ID NO: 5883 - DNA, 510 bp, Canis familiaris
  misc_feature (1)..(510): n = a or c or g or t
aagcctgtcgccagcctcgcagcagctgcgtgcccacggggcanngtcctgtnnnnnctgctggaatcggggcagaggcnnggcgctccgtgggctcgcccccaggtttccatcgtgtgcatggnnagcagcgcgtagctcttcagaccagcccccaggagggcggcacctgacggggatggaggggggccaggcatcgggctcacaggccacagccgcgggcagtgctggggcgaaaggcccaccaggacctttcctggcatttggggctgaggccagtcatgggctctgtggtgttagtgctcccggaagtatgtatttgattttcttaaattccttttaaagaaatctagtttcacggttctggtttccggttgtgaacgttgaaagtctggggctgcagctgtcgtcctgccagttcttttactgtcatgtaaccaactccctttgtacgtggatttcagtgtaaagtctgcatgttccttttgtgtgtatttaatcatgaaattt

SEQ ID NO: 5884 - DNA, 622 bp, Canis familiaris
  misc_feature (1)..(622): n = a or c or g or t
gccagagcagcgannngctgcgggcgcgcttngnntcccacatgcgcaagctgcgcnagcgggtgctgcgggacgccgaggacctgcagaggcgcctggccgtctacaaggccggcgtgcgcgagggtgccgagcgcagcgtgagcagcatccgcgagcgcctctggccgctgctggagcaggcccgcgagcgcaacgccaaggtgggcgccctggccacgcagccgctgctcgagcgggccgacgccctgggccagcagctgcgcgggcagctggaggagatgagcagccgggcccgcggccacctggaggagatgcgcgagcagatacaggaggtgcgggtgaagatggaggagcaggccgaccagatacgccaaaaggccgaggccttccaggcgcgcctcaagagctggttcgagcccctgctggaagacatgcagcgccagtgggacgggctggtggagaaggtgcaggcggccgtggccaccatccccacctctaagcctgtggaggaaccatgagcgccccgcatgccacctgctgggcctcccccaactccttcccgtgccccctgcctgctcccaccggcctccaggaggcctgcccctgcccccagctgtcc

SEQ ID NO: 5885 - DNA, 513 bp, Canis familiaris
  misc_feature (1)..(513): n = a or c or g or t
gtcccagcgaacgcaccaggcccaggtggcnntccaggtgtgcgtgcgnnngggctcctacaccccnnnacccccttcggccaccctccgagaacctcccgaccctcacttcagccccgcagaactcgagtggataaccaaggagaagggggccacactcctctatgccctgctggtgcgggtggagtgagggctggcctctggacgacaagcacagtggggcccccccggccctggcttagcatcccctgccgcggcgggtgctccccgagcccccggagcccccagagcccgacgcatctctggagcaggaacgcatctccgcgtgcagggcccacgcctcccactcggggccggcagtctcccctcatgcactgactcggggaacacgactccctggactccctcccccggatcacttaatttatttccgttttcgttcctgttactgtgaatcccgaggagcctccccgggccgccgggcggagtgggggcnnnnnnngggaaggtggg

SEQ ID NO: 5886 - DNA, 504 bp, Canis familiaris
  misc_feature (1)..(504): n = a or c or g or t
ccagnagcacagaccctgnngnnaactccagctccaaatcacgtgccttttctccggtattcctgtccaggccactgggacggcccactctgcatgtgctgaagcccctgtacattcccccctcgtcaaagtaacccccgagaactcagagggctgccaagctcccgtcccctccaggcagaactgtgccctcttccgtcttctggtcatctaaggcaaagcccgggagagcagagcagagccctctccaaggctggggagagggaaacccagcagatgcacctgcagtggtccgcacggcgccccgggcagtgctgagactaggagattgtgctgcttccatctggcacagagtggatcagagggcacagggcttgtctcatccacaggagtcccacctgctgggtcgtccgggatcggggcccctgttnnncatctcacccagggccaggcanttccccttattgctctgaggcaggggtcagcaaatgatgacccctggcc

SEQ ID NO: 5887 - DNA, 671 bp, Canis familiaris
  misc_feature (1)..(671): n = a or c or g or t
tatnnnggtgtgcactggtgtgtacagtcccaagggcccagnngncactaggnntgctcannntgcagannaggctccgttccannnnnaccgggacttcagcttcagtnnagggctcatgnnngcatcccacatcgtgaatgatgtgaacgaggctatacagctggttttccacaaggagggttgggctttgtagtgagggctgtccgtcggagacaggggcaggcgggatgagctccaggggagtcctgttgactagcttctggcctgggtcactgggtgtcaggtcagggttgcttccgtgacactctgtggccccacaatggatattactggtgccttggaagaagacactggctttttctcctgctgggcagtcgccccagaattgtacccgggtaacgttttgggtagaacagccaggattttctggccctgttcctgtctgcttctcctggcagtctgacctcaggccagtcgctttaactctgtgcctcagtttcttttttcatttcggtagggacttctgaaaaaaggggaagtggtgtgaaataacgtggaaatttctgcagagcctggcctgcactgaaggcaccactgcatgccagcagtgtgtcactaacactaaaatactgctttttactgtattttagcttattgcccagagactt

SEQ ID NO: 5888 - DNA, 609 bp, Canis familiaris
  misc_feature (1)..(609): n = a or c or g or t
cacttcttgttgctctcgtctgtgacatttttttgtacactggtttgctacccatggcacgaaacaaaacacagcaaaagttgtttcaagtaaaagctgttgttttggaaatttgctttcttccagtgtgagttttgtactataaagacttctccatttatatcggtgttattgtggtagagagaacaaggtagtcttatattgccaggaaatcagcaaacgcctccgccctgctcctcaatccctccccattcccaggtgggttcctgtgcactcggcacacccctcccaggggccccctttgaaccagcctttgtaagccccccagacaggggcaggggcaggattttgccaagctggttctcgggtgctccatgcccaccccaccccccaccagtttgctcattcccccgctccgccccggggcattttataaagcgttttctctgttttgtaaaaccttttgattgtaccgaaatggtttctacagtcacctctggaaataaatggtcattcattcgtgtacttagcatcctgaattttagtcttcggtgtttctgttgttgaagatccttgannnntaaagaattcttccccatgggacttact

SEQ ID NO: 5889 - DNA, 605 bp, Canis familiaris
  misc_feature (1)..(605): n = a or c or g or t
gcggagtaaggacaaggaccgggagcggaagcggcgnngtagncggagccgagaacgggcacgacgggagcgcgagcgcaaggaggagctacgtggtggcggcggcggtggcggtgacatggcggagccctctgaggccggtgatgcgccccctgacgatgggcctcctggggagctgggtcctgatggccctgatggtccagaggagaagggtcgggatcgtgaccgggaacgacgtcggagccaccggagcgagcgagagcggcgtcgggaccgcgatcgagaccgggatcgcgagcacaagcggggggagcggggtggtgaacggggcagggatgaggcccgaggtgggggtggtggtggccaggacaacgggctggagggtctgggcaacgaaagccgagacatgtacatggagtctgagggaggtgatgggtatcttgctccggagaacgggtatttgatggaggctgcaccagagtgaagagggcctcccccactgttttatttggacgtgttcctacccacccatttactgtcatcctctcccccaatcttcttggccaccannnaagtttgccagccannnntaggagtctccctta

SEQ ID NO: 5890 - DNA, 705 bp, Canis familiaris
  misc_feature (1)..(705): n = a or c or g or t
gnatcgatgagagcattcacntgcagctgcnngagaaatacggggataagatgctacgcatgcagaagggtgacccacaggnctatgaggaacttttcagnnactcgtgccccaaattcctgtcacctgtggtgcccaactatgataatgtnnnncccaactaccacaaggagcccttcctgcagcagctgaaggtgttttctgatgaagtgcagcagcaggcccagctctccaccatccgtagcttcctcaagctgtacactaccatgcctgtggccaagctggccggcttcctggacctcacagagcaggagttcaggatccagctccttgtcttcaagcataagatgaagaacctagtgtggaccagtggcatctctgcccttgacggtgaatttcagtcggcatccgaagttgacttctacattgataaggacatgatccacattgcagacaccaaggtcgccaggcgctatggggatttcttcatccggcagattcacaaatttgaggagctcaatcgaactctgaagaagatgggacagagaccctgaggacattcacactcttgttaggaactcattttagggtctttgtaggtggggcctatttttgtctccatgaagcctttgcctagatcagccatcagcaattcagctgagttgaagtttatttggattaaggactatttggattttaaataag

SEQ ID NO: 5891 - DNA, 675 bp, Canis familiaris
  misc_feature (1)..(675): n = a or c or g or t
agaacatgcaggtgtnctcgangatnntacacacgagtgatgaatattagagnnnaggctgctcagacgtatgcggcgatggcgtttagaaaccaagggaacagctcctacgcacagcgcgccttcccccgcggccnnagcacacatgctctatccaatacgcaacttcacagggactggctctctgatctcagctcaaaaggtgaaaaaacagacaacgtgacacaaaattaatttataaatcagtttatttacagattttatcttttcttaaagtacatttcagttaacaaatctatttacacaggtatacatgggaattcatcccacttattttacagatcatacttacaaaccacaccccaagtcttctgtgcaaagctgcactggatgtgactattggctgaaaatggcctgaagcccaggctatttacacgtacacagtaaacgggtttgtttttcatgtctgcacagtacagtacacacacggaggccaggcctcccagagaatgctttgcaatgtgtttcccaagaaggctttgcaaagtccggaaggaaaagctattaaacataggttaattaaaatgacagtacctcctttacatcagtttacattgttttcttcacattttataatacaaagatattttattgaattgctgcacaaccagttca

SEQ ID NO: 5892 - DNA, 544 bp, Canis familiaris
  misc_feature (1)..(544): n = a or c or g or t
gnnnaagggtgnnagctggtgtgactnntgagtgccccatggggtgcnnatctggggggtagggtgagtgngannacagagcatgnnagctggggcggggncgctgcagaacagggtggcgcataaaggcctgctggcttggggcgcctgcctccctgctcctctgtcctagcacagcgagcctgggcttctgcccaggagaggccctgggcccatggcctgggacctggacactggcctgctccgccttccctccccaccttcccagccagatggagagcttggcctctggaactgccttaggaaggagagaaggggcacggaaaggaggtggggttagaggtggcaggacgtcnnnnnnccgttccctgtgggcatcaccactggagcctgctggagtggggggccgggggtggacagccgaggttgggtccagtgtcttgtgtacaccctcacctcagcccaggccggccccagcccagcccacactcacacctcggcggccttnnnnnattttattcccctnnnnnngccacttccctgg

SEQ ID NO: 5893 - DNA, 486 bp, Canis familiaris
  misc_feature (1)..(486): n = a or c or g or t
tccctgctcagcagggagtntacttctccctctttccctccccctgctctctctctctctccctcaagtaaaataaaaatccatcccctgttgtcaaattttacatcatatatatgtgaagtagagttccatgagaataaagtaaaaagagcattagtgagaaatagtgcaaatctttttatcatttgtctaggagaggaaggctctatgtcttatctatttcttaaaattcagaagcaagatgattgtcataagacatgtattaacatgattacttaaaaaatgagaaacctctgatagaaagtaattttatttggctgattatttaacaacgaggactgactttgccaataagaacgtcacagatggggatccctaggtggcgcagcggtttggcgcctgcctttggcctagggcgcgatcctggagacccaggatcgaatcccacatcgggctcccggtgcatggagcctgcttctccctctg

SEQ ID NO: 5894 - DNA, 537 bp, Canis familiaris
  misc_feature (1)..(537): n = a or c or g or t
agggcccgtgcaagtgttnnaggaccaggagctaaaatcccagccagagcccnnggtggtcaaggggaaaaangtacnnnnnnnccctcagatgatccancntagcctagacgggaagcgtctgtacgtcaccacatcattgtacagtgcctgggacaagcagttttaccctgacctcatcagggaaggctccgtgatgctgcagattgatgtagacacagtaaagggaggcctgaagttgaaccccaacttcctggtggactttgggaaggagcccctaggcccagccctggcccatgagctccgctaccctgggggtgactgcagttctgacatttggctctgaagtccacccctggtagccactcacatctgagcccacacttccacagagacttggcttcactctgctccctctcagcccccaacccatgtcagattgtcccaccaaagccaaactgaggctgttggaatgtattgagtagtgtcttcatttacagaccactgttgtgtgctgctcattggctgtttttacat

SEQ ID NO: 5895 - DNA, 550 bp, Canis familiaris
  misc_feature (1)..(550): n = a or c or g or t
gtgtnnaccagatccatatcaagccaggggccaaggtgctctacctcggcgctgnntcaggcaccactgtctcccacgtctctgacatcgtaggcccggatggtctagtctatgcagttgagttctcccaccgctctggccgtgacctcattaacttggccaagaagaggaccaacattattcctgttattgaagatgctcggcacccacacaaataccgcatgctcatagcaatggtggacgtgatctttgccgacgtggcccagccagaccagacccggattgtagccctgaatgcccacaccttccttcgtaacggaggacactttgtgatttccattaaggccaactgcattgactccacagcctctgctgaagctgtgtttgcctctgaggtgaagaagatgcagcaggagaacatgaagccccaagagcaattgaccttagagccctacgaaagagaccacgctgtagtggtgggtgtgtacaggccacctcccaaggtgaagaattgaagcccggcgccanntggattaccagagnnnnnnnt

SEQ ID NO: 5896 - DNA, 601 bp, Canis familiaris
  misc_feature (1)..(601): n = a or c or g or t
agcccagggaggttggnncgctgccaccattgtgnntgtttttctccttggtgttcagaagactgnctctagagtccccacagtgtttggtttttgttaactttngctgcgctgaggtctaattgacacacaaaattgtgagatacgtgaagtgtacgtcattgcaatttgatgtacgtatgcactgtgaagaggtgctccatcccattaataacctcacatatttatcccgtgcgtgagagagagagagagaacatgtaagttaagctctcttggtaaattccaatttatacaatagtgttaatgactgtcatcaccatgagatcctcagaccttaggcagctgagagatttaccaaccccttctgatttccccactccccagccccaccactctactctctgtttctatgaatttaatttccctccaattccatgtatataaatggtaccatgtagtatttgtctttctctggcttgttcatttggcataaagccctcaagatcaatccctattgttgcaaatggtagcatttccttcaccatgtcttttttttttttcttcaccatgtctttatccatgcatctgtcgggggacattt

SEQ ID NO: 5897 - DNA, 546 bp, Canis familiaris
  misc_feature (1)..(546): n = a or c or g or t
gngnctcaaagaccccccaactctacnctgattcagggtnntcgaatgcagttttccctgcataccgtagcgctggnctcttttactcttgtgcatttcactttaaatgccatatcctcaagaggcttctccagcaaacctctctaaagacagtttacctcacaatgcttccatttctttctaccttaactctttatttgttcctttattaaccttgtcctcatagtaatttttttttctattggaaaagtttctgatggaactttggtttcacctgtgtccttcagcaaattgtgagctcaacaaaggcaagaatggatcctgtctaacttgttcccactgtattctcgctgcttagcacaatgcaaatgaataaatgaagaatttgaatctcagtaatactggtaagagttttgtagtccttttcctcaaattggagttgcagtgtgattttaagactttggacagggccatcttggtgtcacagtggttgagcatctgtgttcagctcaggtcatgatccgagggtcccggaattgagnnnca

SEQ ID NO: 5898 - DNA, 573 bp, Canis familiaris
  misc_feature (1)..(573): n = a or c or g or t
tcgtttanntnnggtggtgagtttcatagnnagcagcaatgccaatacannactcattgtcagcctagaaaaggaacttgctccgttatttgaagaattgagacangtggtngaagtttcttaatctggcagtggttttgacgtaaaccttttcatcataacagacacaatatcaatccagcaatctttagaccacaacaatacttgtatccatgtactcaagaaagggccccttttcccaccttacactaaagaaagagcctatagttataatttatggacagattgattgttatcttttcttgtgtagggtcttttcttgacttagtgagatctggggttaccacagaaacggctcattacatcacagctcccatggagttagtccagtcacagatatgcatgagattctattcattggatcagaatcaaaatgatactttgatccacttgagccattaagtgctccctattatataatatgcccaggcctgcagaatgaagcagaccctttttattgtgaataataatgaggacatatttttctttatnnnnttttatttctttgcattg

SEQ ID NO: 5899 - DNA, 596 bp, Canis familiaris
  misc_feature (1)..(596): n = a or c or g or t
gcaaaaaaatgatcacatgatcttcaaatagctnngtaagaacatttttatcacgnntcctgaaatcatctaacttgtncagggatgtcacttattaatgattggtttcataatgaagttttatagatgagtttttttggggggttttttgagagcacataggagagtgaggaggaacggggagagggagagaatttttttcaaagattttattcatgagagacacacagaggcagagggagattgaggctccctgcaaggagcccaatgtgggactcgatcccaggaccccagtatcatgtcccgagccgaaggcagatgctcaatcactgagtcacccaggcaccctgggagggaaagaatctaagcaggttcagcggtcagtaggactcagggctcaatcttcagatcatgacttgagccaaaatcaagagtcagacctttaactgactgagccacctaggtgcccctatagatgttttataacaagtataggtgaacttatagaaaactggtaagttgtgatttttgtatctggcaaagatgtcaaaccctgaagttttcagttttattgtactttggtacagtaatgtttt

SEQ ID NO: 5900 - DNA, 676 bp, Canis familiaris
  misc_feature (1)..(676): n = a or c or g or t
ctnnaatactgcangaacacagttcctcagcgcagcttatgacagatacnntaaactctgggacactgaaacaggacagtgtatatcaagatttacaanccgcaaagtgccctattgtgtcaaatttaatcctgatgaagataagcaaaatctctttgtagctggtatgtctgataaaaagattgtgcagtgggacatccgaagtggagaaattgtgcaggagtatgaccggcatttgggagctgtcaacaccattgtttttgttgatgaaaataggagatttgtgagcacatctgatgataagagcctaagagtttgggaatgggatatccctgtggattttaagtatatagcagagcccagtatgcactcgatgcctgcagtgactttgtctccaaatgggaaatggctagcatgccaatcaatggacaaccaaatcttaatttttggagcacagaacagatttagattgaataagaaaaaaatttttaagggccatatggtagcaggttatgcttgtcaggtggacttttcaccagacatgagctacgtgatttcgggagatggaaatggaaaattgaacatctgggactggaagaccacaaaactctacagtcgatttaaagctcatgataaagtgtgtataggtgcagtgtggcatcctcatgagacatct

SEQ ID NO: 5901 - DNA, 561 bp, Canis familiaris
  misc_feature (1)..(561): n = a or c or g or t
cgagacacgacaatgaccttcacatgctttgtgttttttgatatgttcaatgcactaagttccagatcccagaccangtctgtatttgagattggactctgcagtaataaaatgttttgctacgcagttcttggatccatcatgggacagttattagttatttactttcctccacttcagaaagtttttcagaccgagagcctaagtattctggatttgctgtttcttgtgggtcttacctcttcagtgtgtgtagtagcagaaattataaagaaggttgagaggagcagggaaaagatccagaagcatgtctggttccgggagaggagtggacagcagctgattgagatacatccccatctgcagacagcactgccactgacagaagatgtgagctgtgtctaagtccagtctcgtgcccggccgcgtctgctccttcactctttggaactcttcatacaacatcctagcaccatcctcccgcagatcttccttatctagacaaagaaacaacccaagggcagtatttccaaaaacnnnnnntagcctgtaattttctct

SEQ ID NO: 5902 - DNA, 444 bp, Canis familiaris
  misc_feature (1)..(444): n = a or c or g or t
gaaaatacaattagaaatccctctcatgaataaataaatannnnnnnnnaaaaatgaaannnnnntccctctctttccatacctttcccattacttatacaaacatatacacataggtatttttttaaggtataagaacatatctattatttggcaatttactttttatcagtaaaccagatattttcaattaatgtgctgatatccacattctaaaattatgtaaaaaatcacaacagtcaactctgggggagaaaggcttttacttttattctgtacttttctgtattgttggaattttctggctacataagtgttactttctttttaatgttcacaatattggtgcagttatagactgttttgtatgtttgggtttttttgttatatttctctgtactaaaaaattcccataaatgtttaaattatcctttgccatgcaga

SEQ ID NO: 5903 - DNA, 436 bp, Canis familiaris
  misc_feature (1)..(436): n = a or c or g or t
gaagcatatcccagtttgatcaactgcagtttgaaaagccgaggcctagatcagggatcaacaaacaaggacacactgcagtgtcagtcagccctgttcgtgacaattaaaagagaaaggcagccctctccacctttttaactttctattcagcttgctcttcttaccaggctccnnagttgggtaaaccctcactccagcaaagctgggtttggggcttgggatgggggctagggtccttggagtggggaggggagggcactatacctccatctcagcccagaaatgctgggtacaatcatctaggctctggcatgttggttttttctttttcttttctcccttgactatagaagagctacttcattttaacttattatggtgatcatgtacgtaagacaaaaaggagananaaatgtacctcnnnnactggaat

SEQ ID NO: 5904 - DNA, 508 bp, Canis familiaris
  misc_feature (1)..(508): n = a or c or g or t
catcnnnaatctaagactgcttaagtgagggtnntgactcctgggtttgaccggtatacataatcattccccaatttctttcctgttgccccctggttaatttatnctaatcccttatctgaaattggngaagcacttaaggcctggattgctgtagaagtgaattcttgaaaaatcaagagtagtatacatagcactgaaggctgccttcagcctgctgatgaggtggatgaacttcaaagagctatagaaacaaaacacagaacttgtactccctaatcttttctattaatatttaacaccaaagtatagagttctaaggctgtctatctgggtaaaaggaaaggtcagggcagcccatggatagtgccctcttctcacgtatcatgtgaattttanntattcctgggccgagaggctggacgacttcacttccaaagtcctnntagcttttngnangacaccagtgtgtaaagcttaggagattgtggaacaatgttctgaggag

SEQ ID NO: 5905 - DNA, 553 bp, Canis familiaris
  misc_feature (1)..(553): n = a or c or g or t
tcatgtgatatacagtctacattnnaatgtcatnnactaatcttttccaaagattttttcccccaattttgctgttcaaatttagtgtgtaatctctgtggaattaacttttgtgtagggtgtaataaagggatctggttttcccactatgcctagccagttgtcccaacatatttactgacattcatccttccaaatgagcccagcatcactgaatcaagtactctggatactgctcccccgtcttcctcctcttccattgccggaaggctaaatgctcagctacatcttccagcttcttaggtagggtagttctttgagagttgtgcctgctgagatgctggagacagtcagttgaggaggttctcagtgaaaagcgtcagatagcagctggtgtggctgtttgcccaccctcttcttcctgctggaatgtggaggtgatccccaaagatgcagaggccccctgtggccaccagggcagaagtgaacaccagagcaaatggagtgtgggtccttagggcatcacnnnnnnncggccacagccctggactcc

SEQ ID NO: 5906 - DNA, 489 bp, Canis familiaris
  misc_feature (1)..(489): n = a or c or g or t
atatggcagtagctagactatgttactgaagacttgaaagcaaatgaggcatnnnnncctcacagctgnnnttctgtgtggaggaggcctgtccagtgtagggaggctgaggcagggaaggctctgggtggaattggggggcacgactcctgtctcctcccagcgccgggcctttgcctgcagggaaggggcccctgttgatggaagcctcactcagaggcggagggaccactgggcctcgcggcaggctgggggagagccacgggcatgtaggattcggttccggctctcaggcatggccacacagtcccttggtccagcaggtgttgcccatcacgtgcccaggccannnnnngagccagtggcacctttcagtgtttggccagcaggcccgagtggccagggtgaatgtcctgtggctcctaagggactgcaggtctaggagttgctgaggtgcctcccgaccccgagcttcctgcccggccttgg

SEQ ID NO: 5907 - DNA, 664 bp, Canis familiaris
  misc_feature (1)..(664): n = a or c or g or t
ctgannagcatgcatatctnnagaggagnaatgtgttgtgcagatttcgttttgatagtgctatcaggactgaatgtaaatcacaggggccagtactgtctttaatgctgcttgttctgatgggtaacagggaataatcagagctggtggaaagaagcatttggtgcaagggtggttgaaaagaaaaataagatgctgtgaatgtacagagtgaagacgtgatcatttcacaaaggtgaccaatacacaggaagtcctgtgaaactccatgaaaagtagaacactggaagttttcttcaactctccaccttaatggccgaagataccacacagacctgtgcgatgtcatcatattcatacgttctctttaagaacgtgtctgttagtcttaagccggagacactctattgagggaaagagaaaggcataaatatctgggaaagtaccaagggaaatgtggaaacagtaaacgaccttgggttacccgtgcccaaatactgaaattactgagaagagagcacacctgcagtccctgcaccgaagacagcagggtgagagccaggcagagggaggaacttggatgtagctttccgagctgtcttcctgagatgccacaccagtggatagaattggtattgcacatttccaaaaccagatccatagt

SEQ ID NO: 5908 - DNA, 545 bp, Canis familiaris
  misc_feature (1)..(545): n = a or c or g or t
gcaagaccaaggtggggttatcagatgcatgactggggggcctggatccaaaagtacccccaagcgccccgtgaagccagatccccaaccgacccccaagagctcctttgcagggctttttgtcaatttcctacaaggggaatccgatttagtncttccgccacgcagtccctctgctgcggacaagaagcctccagatgcggtaggaaaaggaaaaggcactaaggaaaaaggcccaccgtggcacacaatcaccctgggatccacaccccccaaagaaagctgccaagccccgcgccacagctgtctctcttactgacccacgtggaccggaaactgacggatcacagcatcttctcctaaatgctgtgactgatgctttacccacatacacacccttgatactctcacctgccagcgaggttgggagcgcggccagaggcctctcaaaccaatagaggagtctcaagcccgagaccacacggcgcgtccaagaacacaggtcactgtgtgcgtcccttatcccaagagagcttttgcaaaac

SEQ ID NO: 5909 - DNA, 480 bp, Canis familiaris
tgatgacacactcatgctgaaagaagacagcacgctgcaagccgctggaatcgctcatgaaactgaaattgcattcttccgtgaagaagattataagaactacaaagctaatcccatttcatcctggtgaaaacctcttggggtcttcctttttgcatacctgtattaagctctttattccactagtgagtttttgaaattgacaaatacactaaaaattaatctcaggctctgctgtttgagctgaagtctgttgtgttttctccttctgcaggtctgccctttttctttcttgttggaaaatagtatatttatgagaaaaacactttaaaaaaaaaaagtagaagaaatagttatccaaaaatcaccatggaggggtccctaggtggctctgttggttaagtgtctgcctttggctcaagtcatgatcttaaggttctgggatcgagttctgcgtcacgctgggctccctgctcagtg

SEQ ID NO: 5910 - DNA, 667 bp, Canis familiaris
  misc_feature (1)..(667): n = a or c or g or t
tcgacttgtacaagctgacccccaaggatgtcannngctgcctcaacgtgaaggccaccatgtatgagatgtactcggtgtcctacgacatccgctgtactggagtcaaagccctgctnnngagcctgctgcggctgctgtccnannnngcccaggtgactnnacagttgctcatctacnnnngctcgtacatgctccgagtgcttggtgacnnnnnnnagcaggctcctcccaagtcctgctccagacgggggttcacatgcagataggcaagctgcaggggacccctcaggctcctgacccaaatgttccctctcaaatgatgattttggagatattgctgtcctgaaccacatacacttgtacactgtgggtcacttgtgctcaggagggtcacccaagggaaagaaaaggaatcaatgcacatgaaagggagagctgcacagcgggatgccctgaaggggcctctgtggggggaggactgaacagcaggtgtctttggtggcttctgagcaacacaaactcgcatgaggccatacagctcctcacctcctgcagtaaactgaccatgagagctacttttcacacaggtaatgcttccttgtgtctctttcatgttccaaacaaacaaaacttctatatataagcaaaactcaggggtgctctg

SEQ ID NO: 5911 - DNA, 527 bp, Canis familiaris
  misc_feature (1)..(527): n = a or c or g or t
cgacctcagtttctngagcnagccccannntctagcactgcagtcttatcttcagagnntctgtcgaccaggcttcctcccagagcccgagcccctggctccagaccccgtcaagatccccacaagactggactgagccactatgtgaaattctttagcttctgtgctaagatgcccatggagaagaaggctgttgagatggtggagaaatgcctggacaggtatttccagcatctttgtgacgacctggaggcatttgctgctcatgctggccgtaagactgtgaggccagaggacctagaactgctgatgcgacggcagggcctggtcaacgaccaagtctctctgcgtgtgcttgtggagcggcacctgcccctggagtaccggcagctgctcatcccttgtgcattcagtggcaactctgtcttccctgcccagtagtggccaggcttcaacacctgcccagtccttgcctaggggactgccccacacattcttccagttttcttccccagttccccannnnn

SEQ ID NO: 5912 - DNA, 476 bp, Canis familiaris
  misc_feature (1)..(476): n = a or c or g or t
tttattgtacaacagagtatgcttaattggttagaaaactgcnaggtattactttgaaaatatttatagtagttgggaaatagtccctttaaatccctaagggaaaaaaaaattaaatacatgaaaggttacctatcacactcattacatttaagttcagggatagctacgagtacttgtaattgtatcctgtcatacatagctgtgttttgaggataaagaacttgcctttgaagtcaactacttataaatagattgtttaaagcactggtctggttcctaccaaattgttttccctgtcatttcctgtcacaattttcctgtatggtgctttagctcttaggaaaactttgttttcttggaggtgttctttcttaccccaattcttttgcactttcctttgcctgaaatacttacactttaagttgctgaattttctcatttcatcttgagtgtcataggtgaaacttccctga

SEQ ID NO: 5913 - DNA, 321 bp, Canis familiaris
  misc_feature (1)..(321): n = a or c or g or t
atacattatcgtcacagccatnnngcagccagcagttttgtccaaaagtgccctgggggttcttgggttgcttggactgagagnnngnngggannagnnnnncccctcctcccacagggaaggcnnnnatctcagctcggnnnnnncagccctccacatgggtaccctagacaactctgtaaacacagacacttagaaacacaattctggtcccaagcagtcaacctatggcttccactgacaaggctgctttctcacatttacctataagaaggtagaaggagctcttncttccctgaaaccgcagcacctcnctccaga

SEQ ID NO: 5914 - DNA, 543 bp, Canis familiaris
  misc_feature (1)..(543): n = a or c or g or t
cccgccaagacgttggtgcaggtgtccanntatgccatgggccangaccccancttctttctcaacccgagcaagtttgannnnnnccgctggctggggaangacaaggagctcatccacttccggaacctgggctttggctggggcgtgcggcagtgcgtgggccggcgcatcgctgagctcgagatgaccctcttcctcatccacattctggagaacttcagagttgaaatgcagcaactcagggatgtgggcaccacgttcaacctcatcctgatgcccgacaagcccatcttcctcaccttcaggccgtttaaccaggacccaccccaggtgtgatgagagggtggacactgcctctccccccttcaggccagcagggctgccggaggaagtcccgagggggtggagctggggggtgtctgctccccggtcctcggtgcccctccgctgctccctttggaccagctctcaggagacagagctggtgttcagggggcagcggctgcagctcagcggggacagccccctttcgcgccacct

SEQ ID NO: 5915 - DNA, 635 bp, Canis familiaris
  misc_feature (1)..(635): n = a or c or g or t
aacaaaagaattcgggacggcccagcccaacatcaaatacactgtcaaagccccggttnnaaactgcacccgtggcttcaagttgtccctgccttgcgttatattacttgtgggaacagtgacagcacttcgagacccaaacccaaagaaggaagctgtactgaaggggtggccgaggccgctgctcatggtgaagtccctcatcagaaagccagctcagattggtagattttttagagagtaatccccccagagctttagtggctcagggtggggaaggaggggcccgaggtcctccggcgccccagaacccgtagggatcccagctccaaccctggcctggccacatgcctgcaagttggctcccccatgaggggtatgggctgagtggcagccgcgtggggcagggcggcaacaaagcggcctctcagaccagttacctcacccccgacctttacacagcctctgctgagccacgggcctggcctggctgagcacccgcctggttctctggcgggagggagcagttccccaggctgagtggccgtgacttaccatcttctcaaggctgtcgcttgctcagagtgtctatttgctatgctgaatgcagcccaaattactttttacgatttgtg

SEQ ID NO: 5916 - DNA, 218 bp, Canis familiaris
  misc_feature (1)..(218): n = a or c or g or t
agctgtattncttcactgacacctcagaggccaactcctaacaacaggatctgtncttagacatgactaccacctcgccctgaccctgtntgcaaggtgnctggaagatagaggattctggaggaagcctcccaacttacttggagtaaccatgagtcctctgtctctctggcatgtgatgattttgctccatgattacagtganctgatatctgaac

SEQ ID NO: 5917 - DNA, 504 bp, Canis familiaris
  misc_feature (1)..(504): n = a or c or g or t
tgagatttaatctantagtcattcctggtattctagagaaaaccatggcttccaagggccctgacagccagccaaagctgaaagcctcagctctgggtcctaggagacgatggtggaggggatttacaaaatgaggttttgagagatgacatgggtcaactgaagagaggagaacaccaagtgggcttagggatgcagatgttacctgcatgctgccagctgggcctcctctgcgggcaccccccagctgtgagctggttcccccaagtgggaaaaatgcccacatcttatgaagggtcaagatgcatagtaagattcccttgactctgcagggcatctgttcccgtcacagaaaaagggaagaaaagagcagcaagaagaggccaattagggatgcccgggtagctcagcagttgagcatctgcctccggctcagggagtgatcacagggtcctgagatcgagtcctgcattgggttcctcacgcaagagcctgcttctcctc

SEQ ID NO: 5918 - DNA, 589 bp, Canis familiaris
ctttgacgctgaccgagtggctctgatgggtggttcccatggtggcttcctctcctgccacctgattggtcagtaccctgagacctatagggcctgtgtggcgaggaaccctgtgatcaacattgcctccatgatgggctccactgacatccctgactggtgcgtggtggaggctggtttcccttatagcagcgactgcctgccagatctcagtgtgtgggctgagatgctggacaagtcacccatcaagtatacccctcaggtaaagacgccgctgctgctgatgctgggccaggaggaccggcgtgtgcccttcaagcagggcatggagtattaccgtgccctcaaggcccggaatgtgcctgttcggctcctgctgtatcccaaaagcacccatgcactttcagaagtggaggtggagtcagacagcttcatgaatgctgtgctgtggctgcacacacacttgggcagctgaagctctgcctccctgcatgagctggttggcataagccacacttcggtcttggagagccccagggtctgaaagatcagcaagaggattcttggactctggactctgtggatgggt

SEQ ID NO: 5919 - DNA, 425 bp, Canis familiaris
  misc_feature (1)..(425): n = a or c or g or t
tagtaaattatactatgtcnnnagtnatggtaaagaacagcccaggattttcattaatttctgaagcaaattttgagggatcataaactnctttgagaatctgatgaaaaacactgttcactgttcttgagaaagaaaaagtttcaaaggtgcatagggacaaatacttgcataaaattttgggatatttgcagtttgagttgaaggtaatctggttataaacattatacagtagaagaggaaatcttaaaagttctcatcacaagtaaagaaaccataactaggtaggatgatggatgttaactggacttgtcatggtgatcatttctcaatatatacaaacatcaaaccattatgttgtaaacctgaaaccaatataatgtcacttatacctcaatgaaaaaaaaaagaggggattcctgggt

SEQ ID NO: 5920 - DNA, 657 bp, Canis familiaris
  misc_feature (1)..(657): n = a or c or g or t
gaccccagcgacaccgcccttctcaatctgcttccaatgctnnatgnnntcaggntcaccgctgatgttcgttctgtgctgagccgaaaccttcaccaacatcggctctggtgacagctgctccccctccacctgagttggggtgggggggaaagggagggtgagcactcgggatgccgtctgatgccctgtcccatggtgaggactgtctgggcagggtctgcccctcccgcccctctctgccctgggagccctgcactccacacggagtctggatggacacatgggtcagactctgcagcagcctcactctaacttcgtgttcgcactctctggaaaccccagactgggacataagcggaggcccaggagagtccaaactgtctggtggagacaggactggccagaatgacacacagacattcggtaatccgggaggctcaaagaaaagccaagccagctttgttgtgatttgattttttaaaaactcttgtacaaaactgatctaattcttcactccaagggctgggctgtgggtggggaactgggattttgggccactggattttccccaaacttgtccccctgcccccaacctttccctctacattcccttcttcctatactctcagacctgtaaccggcgcgctctctttt

SEQ ID NO: 5921 - DNA, 537 bp, Canis familiaris
ccccaccccactccccagtcacaggctcaatggccagctactgggtgacccgagtggagtcgcacagatgcagcaatctctggctcttcctggaaacagggcagctccccaaggacgggggcacagatcagcgcagctaggacagctccagctgggagcagaagacctggggccagaaacttctagaacacagccctaagggcctccacaccccacactcccccgtccccctcacataggccctcctcacaccctaaggggtgacccagcggtgtcccctacatatgtgcatggccaggtctgccaaccctgagcaaacctttgctcatgcccctgcccagatcagaccagagaggccatccctggggtggttggcctcccatagggcagtaggaagcatggtggacactgagaaatggacaagaccagagaggccctgggcacttggtagaagggacttctgcatgccctggggcctgatactccctgtctggtccccgcatgccccacactcagaggggacaatggcttcggggg

SEQ ID NO: 5922 - DNA, 696 bp, Canis familiaris
  misc_feature (1)..(696): n = a or c or g or t
tgaatattaatgcttagaaagttcatgatnnnattctccccaaagtgaaaagttnnnaactcnnattnctgnnnnagctattaagnnnnnngatcatctcattctttatctgggagtnnnnnnnnccntataaattgtcgtggtagtaattcccnncattggtgtttctgtannnattgtgnnnaaggcgtgtttctaaaaataataatgtatgtctagcttaaaatagctaaagtaaaattctaaaacannntttccaaagacgaatagatatcagatatgaaagnnnattggaaatggaaagcctccaactggtggtgccctgatggcattaagactcgatgaaatcatcaaactctttannnaaaaaatgcttggatctcagattaagttcttaactgctgtaggttgcagactttcaaatatgtgtcttcaagatgcttcaagatnnnactgataggatctaaaagtcataaagatacatgttttgtttttgttttcctctagggttttatcttgtttctaagaaaaattattttcaaaaattcttctgggattttggtttcagtgtttagttgatagctctttcttaaactagttggcatgtaaagtatttaaaactcgcctttaaaccacctgttaagaggcaattaggtacctgcactgaatgataagtcttactggacacttaacttt

SEQ ID NO: 5923 - DNA, 626 bp, Canis familiaris
  misc_feature (1)..(626): n = a or c or g or t
actgcacnnnnctgtgaagcagccctgaacacaagacagtgttagatgggcctgggcctggaaggacaagagagaaagaataaactgtaattgtaaccatctgtaaaggaatggnactatctggaccttggggaagcagcatgattggtcagtcagaccactctggtccctgcacacaaatcacagatgggcttctttagatttatcagtattaagcagccccttggtggccccacataatttagccccccacacttctgggatctttgtgacactgattcaacagctccatgttgccccagatggtttctcctggaattcctagtacatggagtagtagagccttaataaattttacagggagggtaatattttctgggcattatgatttattcctcttcctttatgtggccatttccttagtgttccacaaatgtattctgctcattaggcttataaagattatctttttctctgttagctgccttagaggtacattaaacatatatatatatatatatatatgatgtaaggttaagaaaagtacacatgatacagcaggtagagttaataagaaaaaggcatttagcctgtcctctcctcactcccgtatctccctaaaccca

SEQ ID NO: 5924 - DNA, 595 bp, Canis familiaris
  misc_feature (1)..(595): n = a or c or g or t
aatatgtgtngcacaatattgtgaccagaagaatgcaagcaataaggcnaaagaaacttctgttttcatgaaaatcttcatcctcagtcattgctctccaatataagtgaaaatacaaaatttttgaacaccacattatctaagacactacctgatttttcaggtatagtagttcttgatgctaaatttctcctttcacttggtatttcaagaaagtctaaaatatcctgagtaaaaatgatttgtattttaaagtgactatttgcagaagcaaaactctgattgtgtgtgcatgaggatgtcctgattatgtgcaggaagtcatctcacatgcactgtttttcctgtctgaatgacagacaagctgacactagtctctttgatttaagaaaagaaatcataatgtcaaatacgatcaaggtataaccactatcaatatttaggagaagtttaaaagaccataagctggcattggaaggaacaccatggtagacttttttgtaaatttattttgtatttaattaaatacggtataaaggctggtgaagtgtaatnnnnttgtgtaaacaaatcctgttaatagagagatgtacag

SEQ ID NO: 5925 - DNA, 691 bp, Canis familiaris
  misc_feature (1)..(691): n = a or c or g or t
aattttaaacccattnnnctctcctnnagctatcgctagtannnnnnctgtnnntttgtgttgtgaagggcacnnngntctaataannagttctaataatttttaaggagaaaaataaactcccttaaaataatcagtgtaatcaataccatgtgaaattcaatgcaagtngagggggcaggaggtaattgtgtgtaatgatggggacctttgaaaactaccatcctttctataacccaaacactaccacactttgagttcaataatacaaatcctgatataaaacttgttacagagtttggctcactttcagccgtttccctgctgctcagtggcaagtgcgagtctaaacttcctcccaaggccggtgtaccagactcagcactttaaacttaatcactgataaactgcaccatgtactccatctgagttactacagaacttcaagttgcctgcttcttaatgattcccaggaaacttagttctaggcatacattttataaagtattatacagtgttaactatgcaaataagttctaaatttacacaattatgtgtaatattttagtccaattactgtgatttattcgactctgttcattccaaagttatctggaattgtcatgctgtctcattttatagaaatctggtttaatatttataaaggcatagcagtcattttgttaagttt

SEQ ID NO: 5926 - DNA, 665 bp, Canis familiaris
  misc_feature (1)..(665): n = a or c or g or t
tatgtgnagcttagaagtannnntagaattnncttggtgttcctttttatcataggtgttgaatgtatattttaatggctgtagaacttgaattgctctagaatgtgaatgactagnnttgtgttttattcctttttgacttttgtaaaggatctcctgtgaggagnncttttagaatttaatactgtgtagttacttccctgactttagtgaaagatgttcgaatacttggtatgtcagtatctaacgtcaactacaagtattaaataagtatatcttttacattcggtgcaggtgccataaccaaaagagagctcttattttggtctattgagaggtagttttctgctgtatatgatggcagttacagatgtggacgtcaccgggtcagaacttggatcatagaagtatacttctagctatttcgtatttaggtgtannnnncacagcgagaacnnnntgcttagaatgtagcagcaacaacggagggtaactgcacactgcacatggtgtgagcatgtgacactatccttttgttgggggagcagggtatacagatacacatacaggagatgtagaatagctcacggtaaagttttatatgtatgttttaacttccatggtatttattattttgtagagannnnnnngattgtttagagtta

SEQ ID NO: 5927 - DNA, 655 bp, Canis familiaris
  misc_feature (1)..(655): n = a or c or g or t
tgagcttctnnacaccaagctctgtgtttatatnctgagaggtatcatgtagagcgnnctattaaataagaaggttttgaaatgttttctttccctcctccttttgtcagtttgtcaattcatccacccatccaccctcttcccctgaacccagcaaaaccctaaacaccactctcatttggaaagtaggcacaaagtcctatccagatacaagaggaaaggataatgggacacgttgaggagggaatatgtatagaggtgtagaaataggggcctaaaagagcagtttttcatagacttgctaatttctcatcctgaaatatgaggcagagttttgacttacctgcatagcagcgccttttggtacctgtcataattaggcctggtctgataaactgatttgtttttggatgatttcttgcacagcaggaacagagaacctgcacgatactgaatatttttgtttgtgattgaattataaaaacatgcaatgaccacagttgtgatgttaacagttgctcttttgggcaagttgactgctcttgtgccatctaatcacattttgtgttctgtactatgacacctgaagatgttataagttacaggttgctaaggcctttgttgnnnnnaaacagccagtaaaatagaaaaannn

SEQ ID NO: 5928 - DNA, 414 bp, Canis familiaris
  misc_feature (1)..(414): n = a or c or g or t
ccaggccanncctcagcacatatatgttccaaacaattanctgnngccaactgnnnnnnaaagatctgcnnttcnnnnnggtgttcgnngtgaccttgcaaatnnngtcatgcccaggaagcnncctttccctctttttccnncttaagtattttttaacctcttttatgnnnnngtttnnnngtaatctttatntnngtnnnctatttaaatagaaacaactaacttgcaagcccatggaacattatacagtaaggacttcaccnnccattggtctttnnnaggnntatatcacattggtaatcaaataccacttcacttccaaattaccactctcaaatctantnnntgcaagagaaataaggccagaaagaaaaaaacagacctagtctttntactttgnnnnnnngcact

SEQ ID NO: 5929 - DNA, 705 bp, Canis familiaris
  misc_feature (1)..(705): n = a or c or g or t
tttgatggnctctgtgaaatgacatttccctatgagtttnnnnctcnncaaggaatccacgacatgctggaacatggggnnnncaagattcttcctgtcattccacagctcattatcccgataaaaaatgccttgaatcttcgaaaccgacaggtcatctgcgtcacccttaaagtcctccagcatctggttgtgtcagctgagatggtgggtgaagctttggtgccctattaccgtcaaatcctccccatcctgaacatctttaagaatatgaatgtgaactccggagacggcatcgactatagtcagcagaagagagagaacatcggcgacctgatccaggagacgctggaagccttcgagcgctacggcggggaggacgcgttcatcaacattaagtacatggtccccacctacgagtcatgcgtgctcaactagtggcaggacatgggacgggcgcgggtgtccccgcatccccgtcatctgtctctgctgctttcggcatctcattacttgtgacttctacggctttcttttctacagctgctaaaatagtggcttatgggccattggaccgttagtcctattgagagcaaggctttccaatacataaatagtgcctgtttcttagattacaatagcgtactgtgcttatttgttctaagagaagaattgcctctttatatggctcggacagaagcagga

SEQ ID NO: 5930 - DNA, 744 bp, Canis familiaris
  misc_feature (1)..(744): n = a or c or g or t
ccggaatcagttcatcgatgagctcatnnagctcgagatcttcttgtcccagagagccgtnnngatgagtgannnnnnngacatttngtctgtgagccagttccaactagctccagccatcctgcagggccagactaannagaagatggttaccatggtgtcgacactacaggacctgattggccggctcaccagtcttcgaatgcaacacctgtttatgatcctggcctccccaaggtatgtggatcgagtgacggggtttctccagcaaaagctgaagcagtcccagctgctggctttgaagaaagagctgatggtgcagaagcagcaggaagcgcttcaggagcaggcagccctggagcccaagctagatctactgctagagaagaccaaggagcttcagaagctgatcgaagctgacatttccaagaggtacggtgggcgccccgtgaacctgatgggaacttctctgtgacagcctccacaggtccacctgcccgtcttcccagccttctggcaggaggggaagacagcctgggctgaagtggcagggctcttcctagccagagaccaggggattggaggatggaaagccacgtgaaggagccatctcctcgatggtgacctttgacacttgctatactctctggcaagaagctatcttgattggccctgtgaccctcagtctgagaccacagtttctggggcttctcatcatctagttggacttaataaaaaaggaag

SEQ ID NO: 5931 - DNA, 494 bp, Canis familiaris
  misc_feature (1)..(494): n = a or c or g or t
ccatccctacatgccagnntngngtgctgaccagcaaaatggacaagatcacagagnncagcagcagttttttgttttcttgttttcttnnnctttattctttcagaatttaaagcaaatggactcatgcacagaacactatgcattttgaaacttgttcatcctggattttttttttttttcctttttggttatttgtgtctcagaacttaaaaaaaaattaggtgtgtcttctgcacggactatgtgaaagaagatgctttgcatatttgctgcactgcatcagcatcttactaaaaatgtgaaatgaaaggactattgtacactgaaatgcttaaatgtatctgaaagcacaaggtgatactcatttttgatggtctttccatttgtgctggtttttgcctcttgacatctgtcatcagtatttagagggtgagaagtgaatgtaaaagatataaataacatttaaaaaaaaaaacttaatagctttgctg

SEQ ID NO: 5932 - DNA, 662 bp, Canis familiaris
  misc_feature (1)..(662): n = a or c or g or t
cagaaaatgtnnaagctttgatagagcangaggngnagaatggcatcnnnnntnacagaattgttttgggangatttnctcagnnnnnngctttatctttatacactgctcttaccacacagcagaaactggctggtgtcactgcactaagttgctggcttccactacggacttcatttccacagggtcctatcagtggtgttaacagagatatttctattcttcagtgccatggagattgcgattttttagttcccctaacatttgcttctcttactgccgaaaagctaaaaacattagtaaatccagccaatgtaaccttcaaaacctatgaaggcatgatgcacggttcatgtcaacaggaaatgatggatatcaagcatttcattgatagacttttacctccagttgattgatgtcactaagaggccttgtgtagaagtgcacaccagcatcgttacagtagcgtataaaccttctcctgtgcccaatcttgaaacttttaatgtttgcagtgttaaaatgttttgcaaatacccaccgatgacacagactacatagtatctccttgtgggaaatatggtcttttaagtttctatacatgtatttgtataatatgattcagaatatactagtattaaaataagtgaagcatctaagct

SEQ ID NO: 5933 - DNA, 614 bp, Canis familiaris
  misc_feature (1)..(614): n = a or c or g or t
cccnagcactgctgctcccaaagccactgcagcgagcactgccaaaaccaagggactggctggtnnagacagggccagtcggccgctcagcacccggagtgagcccagtgacaagggaggtcgggcacctctgtccagaaagtcctcagtccccaagacgaccactcggggcccacctgggtcagctggcagccggccaggtgggtcagcagcccctccagggtcccccgtctaccttgacctggcctatctgcccagcgggagcagtgcccggctagtggacgaggaattcttccggcgggtgcgtgcactctgctatgtcatcagtggccaggaccagcgcaaggaagagggtatgcgggccgtcctggatgcactacttgcgggcaagcagcagtgggaccgtgacctccaggtgaccctgatccccaccttcgattcagtggcaatgcacgagtggtacgaggagactcatgctcggcaccaggcgctgggcatcaccgtgctgggcagcaatagcaccgtgtccatgcaggacgaggccttccccgcctgcaaggtggagttctagctccgttcccgacacccaccccctcagcccagaatctgccact

SEQ ID NO: 5934 - DNA, 690 bp, Canis familiaris
  misc_feature (1)..(690): n = a or c or g or t
agatanntggaaagaattagagaagaacanattaaaaaagttgaaaagctatttgaacaaagtaaattgangcgataccatgcctgtgatggttggaagaaaaaatactttgaaacaagaaaatcacagcatcattagaggaagttttaagaaaacttcaagaagatttggaactttactataaaaaattgctcatgcaacttgaagccagggagatcaagatgagaccaaagaatttggcaaacattacagactctaagaattaccttataatccagatcactgaagtgcagcatgcaattgaccaacttaaaagaaaactggatactgataaaatgaaactcataatagaagttaagatgaagaaacaagcagtttcagatttacgtacattgaaagctgaactggcacagaagaaaattgacacatccttaccatctatctcaattagttcctggaaatgtgcttagttaggagctcagcagatgattttgtgtatgatgtatcaaccaattcaaaagggagcattggctgctgcaatacattctgacaaggccagacttcgttcatcataagacatcacaaagagaaagtcacaagcatctgcaattccagtgtaattatagcaccggtttttgctctttggagaccaagatacatcaaaggttacctgtggaaaaccatgccatt

SEQ ID NO: 5935 - DNA, 638 bp, Canis familiaris
  misc_feature (1)..(629): n = a or c or g or t
catccagagctgtgtcctcctgttgaaagcgaaggaaacctcactgatgcagaggatgaaaattcagaatgcacatnnaatgaaagaatctggtgctgagacttcttccttttattcagctttactgcgtatccagcccaaaattgtgcactgctggaggcccatgcggcgtaccttcaaagcctatgatgagggcgggacagggcttttaagcgtggctgatttcaggaaggtcctgagacagtacagcatcaacctctcggaggaggagttctttcacattctggagtattatgacaagacgctgtcttccaagatctcctacaacgacttcctgcgggcgttccttcagtaggtgacctgacctgggacgcatcttggccgacggggaccacggggcctgtccctgacttgaatgaaaccgtagcatcggggggtgggggggtcatgaaccgtcagagcgtctccagaaacacacccagccctgtgtcttcacggcggccgaggctcagagccgccccacggctccagcatcagcgggcggctcgggggctgccccgctgagccccaacacccctcactccgctggagcgaatagagatggtagtctttgcaggagtgattctaagacttcaaaa

SEQ ID NO: 5936 - DNA, 601 bp, Canis familiaris
  misc_feature (1)..(601): n = a or c or g or t
cggcccaagtcccccctnnattcccccaccgactcgcnggcagagacctccacgagcccctcgtccccgagcaagccggtccccgccagctcctcgcagaccatctcggcccagccccaggtgcgccccccggccggcacctcccgggtgcccagcaagtccagagtgcagcttcggccgcgagccgcgtccagacagtcctccgagaccgccggccagcagcgtccccagccatccgccaccgcctcgggccaaccccagccagcccaagagtcctcaggctccgcgcagcaccccaacacctcctccagccagggctcgcagtcccccagcggcaccgccgtccccgcgcagtcccccaacaagacctcagatgggcccggggacccggcccccaaggcctccaagtccggcagacagaatgggaaggagttcttgacgcagcccagcggcagctcctcggtgcccgagctgcctggctccggcccgtccgagtcctccctggagtacacctccgagtccaccaccgaggtcacctgccgctggccccaccccaggcaccggctgcgctgtctgcagcactgctggcggctgaaacacc

SEQ ID NO: 5937 - DNA, 584 bp, Canis familiaris
  misc_feature (1)..(584): n = a or c or g or t
ggacnngcagaccccacccctcctgaaggctgctnnaaggcccagcacttccacacccaggcactaacagcactttgtcccagctcttcaggacttctccccaccagtcgccctgctgcctcctccaccactggagagccaggcccatggtcttggaaatcttttattgagaatccagacagggcatccccaagcagaaaggcaacagtgggaggtgggatgcccagctcccaggatgtggagaccataactgcagcccaccctgagagcctgtcttccagacaggaggggaagtcatggccacctggtgcccctgggctggtctgtccccctcgcgagtttccccaccaaagctggctatgggagcccaagtgtgcagagagagagaaagaggagccagccctgggcatcaccaaagtacctgatgcttcaggtgacaggaggcaggacgttccatgccgaagctgccccgtcacccaggagtctgggcccaacccgctccggaggggccgagacccagggggccctcaaaagcatcaggacttgacattggtacctgatgagcttttaaagcaaacatagca

SEQ ID NO: 5938 - DNA, 533 bp, Canis familiaris
  misc_feature (1)..(533): n = a or c or g or t
gatcccccccgtcatcccgnntccggcttcagcgactgtnntcggggnnnngtgagnngtccggggtctccgcgcgcactcannagcgggggccccggannnaccagctcggannagccccccgcgtcgaagcccccaggccgcccgagccggggccccgcgcccctggaggccgacgacgtggacatgcagcccgcggaggccggcagcccccaggcccgggggcgggcggccaggcgctcggggtccccggacgaggactgcgggatgtgggaggaccgctggccccgggcgcccggccccctcctccccgccgcggggccccccgagcctggcagacacgcgcagggccgcggcagagcggcccggccaccccccaggctcggcagcgagaaggacaaggggcccaagctcaccctctccaagaggaaactggaacttttacttgcggagcctgagaaaacgaagagaaagaggcagtatgtggcccagagcgaggcatgaactgagcacgagtctggtgccnnnggccc

SEQ ID NO: 5939 - DNA, 550 bp, Canis familiaris
  misc_feature (1)..(550): n = a or c or g or t
anntcatctctcnnnaccccacagacctgtctcgggatgggaacaactttgtgggcaaagtcagatctaatgtcttgggcactaagttcaccatctttgacaatggggtgaatcctgaaaggaagaatttcgtcccggagaccgctcgcatcagagaggagctgggggctgtgtgttatgagcccaacatcttgggattccgaggaccacggaaaatgaatgtgatcattccagaaatcgatgcccagaaccagagaatcagtgtccagccacaaaacgggctggagtcactactgagtcgcttccaacggggggccacccagaggctcatcctgctgcaaaacaaaacccccttgtggagccaggagaacggcacctacgtactcaattttcacggtcgagtcactcaggcctcggtcaagaacttccagatcgtgtatccggatgacnnnnnnnnncgtgctccnnnnnnnnnnngccccnnnacgttcaccatggacttccgcttcccgctttgcccactccaagcctttgccatctgcttgtccag

SEQ ID NO: 5940 - DNA, 486 bp, Canis familiaris
  misc_feature (1)..(486): n = a or c or g or t
aaatatggtnnagctcggattcaaatgcaggtnntctgattcttattcnagtgccctttccagcataccacgttgcctctaagaattnnagctcctcagcctcccatcccatcctttcttacacactgtgtatttccatcaggattgtattcattgtatttggattctgttcttttttgtttctagagaaaaaaaaaaaaaaatctcttccaccagctttcactcgaaccaacttggaaaaagcttaaatgctgttgctgatgtacaacttaaaaatgtgaagtttgtagctttaactttttgtaataaaaactaataacactggcttaagtgctgacttgaaatgctattttataaagtttggatgtaaataatcaatcgaggtcagcagtttgtatatgtaggagacatagcttcctccctgcaccccccatttttttaaaatttgaggtgcttcctgtgtgnnnnnntgttagaattgttctc

SEQ ID NO: 5941 - DNA, 476 bp, Canis familiaris
  misc_feature (1)..(476): n = a or c or g or t
cataattttactggcnnnnncgcctaaatatgtttatgatgcttnnagnctcagaaaagaagtatgcatacttcaaaagctgcaaaaggattttcactgcctgcctcttgctgaactcagagttatgccctggcactgttctgatccaagcacctgtgcttggtttgttttcaatgtcaagaggttatattaaaaaacaattttcaagaaaatgtgttgcaagagagggacctaaaatgtgtccttttgtaatagttcttgaaaataatgaccttgccttgtatcagtgaaaaagtaaattgcttggaaggggaaaaaaaaatcaaatcattccaaaactgctaaagatcatttcaaaaaccatgatttagtttggaattatgattgtagtctgttgaatagtatttaccatggcatttcatacccatggtattttataccttctgactatcaattttagtattattagacatttg

SEQ ID NO: 5942 - DNA, 704 bp, Canis familiaris
  misc_feature (1)..(704): n = a or c or g or t
taccgagaggcantggaagcagatatgaaggncgctgctgaagctgcagctgaagccaaggcgagagcagagattagagctcgaatgggcattgggcttggctctgagaatgctgctgggccctgcaactgggacgaagctgatattggaccctgggccaaagcccggatccaaactggagctgaagctaaagccaaagcccaagagagcagtggtgctagctccagtgctagcgccagtgctagtgccaatggtggctttggtgccagtgctagcctgactgccactctcacatttgggctcttcgcaggtctcagtggagctggtgctagcaccagtggcagctctggtgcctgtggtttctcctataagtgagatttcaggtatctacttagactgggttggaatagctggggcttcatgggttgggatgaagagctggctggttatagaaaggccaaggttgcaggaccatatggagcatgtgggaaaattccattattggcattttgttccttcccttttggtggttcttgggtgactttttgaatttcttttacttgtattttcagatactcctaatcccagcagtctttctcttcgagccagggtgcatcctcagaaacctactcaaatagcactctaggcagccactatcaatcaattgaagttgacactctacattaaatctatttgccnnnnnn

SEQ ID NO: 5943 - DNA, 444 bp, Canis familiaris
  misc_feature (1)..(444): n = a or c or g or t
ctgccacttcctgtggcaaccgaaaacgtccccacatcaccacccctcacggcagacagagcctctgactaaacagtgcaaggtgggcattttgaacccgatagcaattccggaatgcagtctggggcagttgcttgttcagttgnnngaatacaaaggttcccttctcaggggttcccattccaaacgtcccttagagaagggcctgtattcctgtggttcacttgagcctggaggtgattcagggtgggggaggggtgcaggattttgctgcctggcagggtggcggcggtggccgtatggctggatngagggtttctctgttgacctcaagtgtaagggttttccaannntgtctnnnnnnctcnnnnnnttctggtggcaagtctttgaatagtactggtnnnncntgcactttgatttccccaggtgnnnccagcaagg

SEQ ID NO: 5944 - DNA, 568 bp, Canis familiaris
aatgaaatcagcatgaatttggttccttttcctcaactgcattatcttgtgtcaagtctaacaccactgtatacgctggcagatgttaacattcctacccgaaggttggaccagatgttctcagatgcctttagtaaagatcaccagctaattcgggctgaccccaaacacagtctctacctcgcctgtgcccttatggtgagaggaaatgtacaggtttcagatcttcgcagaaatattgaaagattgaaaccttctctccggttcatctcctggaatcaagaaggctggaaaaccagcctgtgctcagtaccgcctgtgggccattcccattcgttattagctctagccaataacacatgcgtgaagcccaccttcatggaactgagagacagattcacgaggctctacaagaaaaagttgctattttcattggtgacccgatcagatattcccatcccacacgttctggagcaaggagtccactttgttgcttgcacaagacattttcctttccaaataagcgggaggttcctataagctaaaataaagggggggtggggagagt

SEQ ID NO: 5945 - DNA, 606 bp, Canis familiaris
  misc_feature (1)..(606): n = a or c or g or t
gagtctacaacatgtttaaagcagtnanntaaataaggttatttaatgtaacacagcgtatatacttagagtgatctgagtgattattgataacatatggcttcaatttgctgctgactgaagagtatgtcaggtggatcagaagacaacaatattcaaattagatgaactagattccatttttaatatacagactttgttttgcctactattttgaaatctccatcatagtatttctttgcatatttgtttctaattaagtggttagcacagatgagatcttcttagatgtctaattgaaaacctaatacccaaattttcaaaccattataaagaaatatatcctgaatcatatacttacttactctatatactgattgtatggagtgagaggaataatctaatgtgaagtggagaaacttacaaaattacaaaattgtgtgttgtagacaacatacaagtattgattttttaaatttttattaatattcctataataatcatactgaaaaatcaacaattttttttctgatgaatgacctgattttttctttcttaacacattttgactgcttattctaactgataaaatacaagggaaacaat

SEQ ID NO: 5946 - DNA, 614 bp, Canis familiaris
  misc_feature (1)..(614): n = a or c or g or t
ctnnctgcaactccctcgnngcagcatccagacttcctgctgtctgactcctctgagatcctgccccttgtggnaggtctgctcttctccctctgctggtgctgatggagcacactgtgcacagccggtgggggttcagggtcagagtcaggtaaaaaatgaaagaagctaacatagtctcctggcctgcttacctgtcctcagtccaaccccagccctgagtgccatcacaggattggaagtcagctgggggtagaacagggatagaaacagcaatcaaggacccttttttggagtaaaccacatggcggggcattgcaattgtcttttgtgagtggccgaaatcccccactcacagcaaatgtacttctcaaagatgcaggattttttaataaacagaggaaatgataaattatgttgtaactccactccaaaggcatttggttcttaacagccaaatcctctgtagtctttaaataaacaaaaacttatttggtgaacagacggggagggagggggatggaaaatgaaagattttctgtacttgggtcccacatgtcaataatttctctcctgtgtgtatgttggccannnnnngtatatcatgataaatg

SEQ ID NO: 5947 - DNA, 457 bp, Canis familiaris
  misc_feature (1)..(457): n = a or c or g or t
tacntgtngantaaggaaaataagtttcctgtcctcangagctgctatcacctgcttgggggctcccacagatgggccagtggattcacccatgtggaaagcgacagtatgagcattgtaggtatagaagccagaagcattgggacgagtattctgaggtcatattgcttcaacgtgcagcatggttcagatgattgcgtcgattgaagataatctcactttggtgaagagcttgtctacatacaaactaaattattttatcaacattgggaaaggagcaagcaattctcaaatgcctcttatgagacaggcacagtgctatgtgactttaattttcacaacaagccaatgaaggacgtatagtgtttctgtttgtcagacaaggagcatgaccagtaacagttaacccattactgacctgttgttcagctgccatgccacctgcccacgcttactc

SEQ ID NO: 5948 - DNA, 385 bp, Canis familiaris
  misc_feature (1)..(385): n = a or c or g or t
tcacacacttgtggattgcatggnnntgttnnngnaaatagctgtgaatgaagtttattcattgtttgaagaaacctataataatccttgttaaactaaagcatctgggtncgtggnncttccacttctctgagtcacagattcctttgagactctgagactgtggattcccttctcagggaaagaaaaaaatccaacacaaaatttagttttcagtttcagggagtatatggctctttggaagcccttccaaaaccacaggagagaagaacacctctcattcacttagggcatttttattgagtgcctaatggatgctagacattgtgtcaggagctatagatttttgttttagaatttttatttattcatgagagacatncat

SEQ ID NO: 5949 - DNA, 632 bp, Canis familiaris
  misc_feature (1)..(632): n = a or c or g or t
gagtgaatgttnnagctgaggtngnnctagaatcactcatngcaggcttaaggataacgtagcattcaacnntctgccttggatcggatgtnnagggtctgaagtcaaagatggtggggagaagcggtcggaggtgatcatggtcttgaggaacttgtccttggccctgcaggaacggccatctaaacttggagccctggggataaatgtgcagagagcatggaagaggcggcagcagcagaagggtgttgtccccttcctgggcaccttcctcactgacctgttcatgctggatactgccatggaggagtacctggagggcaatgaggtcaaccaccggaagaagaataaggagtacagagtcatgaccgagatcctgctgctccaggtggctgcagatcggtaccacatagagcccgagtatccatttagggcctggttccagtctgggaagtggctcagtgaagaggagagctacatcctgtcctgccagctggagccccgaacctcctcacagacaggaagaactggccgcagtcaccctcaggcctgagcacggggcctgtctgctcgacaccacttcctcccgcctcttcacttattgggaggaccaatatttcattgtcttaact

SEQ ID NO: 5950 - DNA, 617 bp, Canis familiaris
gcagcagactactgagcactccctgccaaaatgattctccttcatgagggccaaaaccttgagcacaaagagaacaaactttttatccctgcctgctcgatgtctgagaaaagcccagtggacactgccagattcatcaaaacaccttacattagttcagatttactttactcttattactgccagagttacaagggatatcataggataagatcctcatatgacctgcaaactcatactcgcctcctgaaacctaccacctaggagaatcttagctatggcagggtcaatttatggcagtttggactactttctatcctcctgaccactgaccaaccttcatttcaagaggtccacactgcagccccaggtgaactccgagagtcaacagtggcttggctcaagaacagccaaggtgaggactcatccctcatctattgagaaaaccaccatatgccaacatctagattctttcaggaaactcgtaactgaatctggattatggcatggctttatctctgacaacctaaagccactgctgttaagacacttttacatgtctagatcacaggagagcttccttttctaagaagtttgtggaattggaaggatggcag

SEQ ID NO: 5951 - DNA, 611 bp, Canis familiaris
  misc_feature (1)..(611): n = a or c or g or t
tgcaaaactctttcagttcagcccacaactgcagcccttgtcctgacaactggattcagaatggagaaagttgttaccatgtctttgaaaactggaaaatttggcacaccagtaaggaggactgtttgaaggagggctctaatcttctacaaatagacagcaaagaagaaatggactttatcactggcagcctgaagaaggtcaaaagtggctttgattactgggtgggactgtctcaagacggactcagcaaaccttggctttggcaagatggttcctctccctcccctgacctgtcgccagtacagacattgcaatcaactaaccagctctgtggatannnnnangacaagttcctttcttctgctaactgcagcatttggaaatatttnatctgtgagaagtatgcattgagatcctctaactgaaaaaaaattgtacttgaagagatctattatgatagtatgttgaataggccattggaaaacctgccacaaaattctaagagcaagtgcagaagtaaacttatgtgtgggttactaaactcactacctgggactcaaaacctatctnnncatttacacttggtannnttcttcaatactttccag

SEQ ID NO: 5952 - DNA, 555 bp, Canis familiaris
  misc_feature (1)..(555): n = a or c or g or t
acgccctggaggagtatgcagagcggctgcagaaatcaggccnnngcctccgaacccactgctaccgggcagcactggagaccgtcatccggggtgcccagcccgagctgcgtcggccaggcgtgcaggggatccccagggtccacgagctgaagattgaagaatacgtgcggcagggactccggcgggtggggctggatcctcagctgccactgaatctggctgcccttcaggcccaccaggcccaggagaaccgagtggtggccttcttcagcctggccttgcttctggccccactggtagagacactgattctgctggaccggctgctctatgttcaggagcagggcttctatgctgagctcctgccgatcttcagtcctgcactctcacccagaaacctggttctggtggctaccaagaggcccctgggtgaagccttctctcttctggagatggaagacagctgacaaaccctctctgaaaccacctagccaccacacttgcccaaagaaccagcattctatgttcctnnnactctggtttctctgtgat

SEQ ID NO: 5953 - DNA, 586 bp, Canis familiaris
  misc_feature (1)..(586): n = a or c or g or t
tccagctgggggctctcttccntatagcatccagacagctgaaaaacagaattggctccattcctattttcacaaatggatggctgacacatctggccgcagcaatgctatgccacatattaaaacatatatgagatcctctccagacttcagtcaaattgcttggttccttgtcacaagcgcaaatctgtccaaggccgcctggggagcattagagaagaatggtgcccagttgatgatccgttcctatgagcttggggtccttttcctgccatcagcatttggcctggacagcttcaaagtaaaacagaaattcttctcagggagcaaggagccagcagccgcctttcctgtgccatatgacctgcctccagaactgtatggaaataaagatcggccatggatttggaacattccttataccaaagcaccagatacacatgggaacatgtgggttccctcctgagaatcttaaaacactgaaatttaggtgtaagacgtcgtgccccaagtattatattcttatttgtactggatgttcacccttacagttttatctacacccctaacaaaactctgcatagnn

SEQ ID NO: 5954 - DNA, 608 bp, Canis familiaris
  misc_feature (1)..(599): n = a or c or g or t
tancttcatcaaaagaaatccttccaggaaaaagacatggggcatcaagacatatnnacttnnatctaaatgctcatcttacatctggtttctgtagtgtagtggctatcacatttgcctaacatgcaaaaggttcctggtttgaaaccaggcagaaacacgtgtccttcttgcttctgtatttgtttcctttaggacatgaactggtcctttcttttggggtctcacacataaaaacaaacacaaatatttgccgccctgaaatatgccacgttagcttaagaatgatgttgagctgagagcatttgaggaagagcaagcaggaagggctctctgaggaaaagcagggcatccctgtctggttgtgaaggtgttgcctcccagttctcctaccagagaaacaaatcctgctaaaataacccagcttccactagtttccccatatatttaccttcccataaaatgttccccctacaagtccaaactctccttttctttgtctacccacttccctttgtatcaccctttactaaaatgatttaaaagctttcaattctaacttctttgggttctcttctcttttctgtgaagccttcatgcatgtaaaa

SEQ ID NO: 5955 - DNA, 567 bp, Canis familiaris
  misc_feature (1)..(567): n = a or c or g or t
gggggagcctgccagctgagcatggagtgttgtnccgccagcttcgtgccctccccagtgaagacccccaccagctnnagctgcctgccctgcagtcagaggtaccaaaggacagctcagaccaggagctccaggcccctggcaactcttgctgcccgctctaccacctgcctcaggctcctggtgctgagtctcccttgaaattgccacttcctgtcccttcctcaaagtccccctgttcctgtcccctccttcccctgcatgcaaatttcacaagagatgggggatggctccctacacacagccccacatctgttatcttacagggcagatattcaggctagatgtctaggtgggggatgcgaagccagagcctggggttcctagtctgtgtccaagtgaaaggagtgggagggggctaacctgtgagctcctgtgtcctgtgtcaggaagcctgagagttcaaacacaccacacttaactggctttctgggtcttttatttgtacccatgtaagtctaccaccccatgaatgggcctggggtaatcaactgacctccttgaaca

SEQ ID NO: 5956 - DNA, 507 bp, Canis familiaris
  misc_feature (1)..(507): n = a or c or g or t
agtaagtnggactgggattttgacacgcagagacaaggaggggtggcatgccataaatatgcaatggcaggagtgtgaataggaagcacccagaggttcccctggagagagaatgtgaggaagaaccggtgggaagagaaagctgaggccagatcgtggaaaggctcagtgcagaggattctgacctgcttccatgggtggtaggaagagaccagaggcagcagggccggagagcagctgttagactttgaatcaaggagacatgctcattcagtgtacccnnnannnnnttgcattattaagatttattagggcatagactttcagctagaactgaaccccaaaatacagtggctcaagtacaggatttaggggctcctgggtggctcagtcagttaagtgtccagctcttgattgcagctcaggtcatgacctcagggtcctgggatggagctcagcactgggctctgggctggacacggagnnnnnncaaaattctctatccct

SEQ ID NO: 5957 - DNA, 591 bp, Canis familiaris
  misc_feature (1)..(591): n = a or c or g or t
gnngctcccctcaaaagaagggaataggagataaacctcctctgnnnnacagtctcctcccctgcctcccaagctggccacacccattccttcccctaaaatgatcctgccaatctaatatgcctgtgaagctttgcacaataattctctctgtctagtctccacttcctcactgcttaggagaccaactgttactcttggaggtcaaggatggtggagttgctgggcatttaggaatcgctttttatagtataggtagaatttgaaatttttacagagcaagatcttgctctgcgtcttagatatttctctgttaagatatcattcattcttttgtgcaatatattgtttttctgaaagagtttctgttccttgggtgtggacctgggcaaaaaccaggttcctggaacttagaaccttgaatgtttttcatggggctccagacaatctcacacattagtcattcccagggaaccccaggacaactgcctttgttctaaaatatgtttctagtatgacttgagacgtaacagaagtgaggccctgcacatnnggctgttttctggctggtatgttagaggaatagtcctg

SEQ ID NO: 5958 - DNA, 508 bp, Canis familiaris
  misc_feature (1)..(508): n = a or c or g or t
gnaaggactgatcagccatttcaaacagaacttaataccagtatgatgtattactatgatgatggtacaggtgtacaggtgtatcctgtggaagaagcattgcttaaagagtatattaaacgccaaattgaatattacttcagtatagaaaatttagagcgggacttctttcttaggagaaagatggatgaacaaggtttcttgcctatttccctgattgctggtttccaccgtgttcaggctctcactacaaaccttaatctcattttagaggcactgaaagatagcacagaagtggaaattgtggatgagaaaatgagaaaaaagatagaaccagaaaagtggccaattccaggccctcctccacgtagtgtgccacaaacagacttctctcaactgattgattgcccagagtttnnncnggccaagccttttgttcacatacaggtaacagcttttcttctagagcaagcagtgtaatggtgggctattttgtccaatttgccta

SEQ ID NO: 5959 - DNA, 69 bp, Canis familiaris
  misc_feature (1)..(69): n = a or c or g or t
ggagaaagaagatgatgaagagnnnnnggatgaagatgcttccggaggtgatcaggatcaagaagaaag

SEQ ID NO: 5960 - DNA, 589 bp, Canis familiaris
  misc_feature (1)..(589): n = a or c or g or t
tacacacagtcatgactctngaacaacaggacatggtgtgctatacagctcagactnnggtnngtatnntctcacatggtggttttcggaagattcttggccaggagggtgatgccagctatcttgcttctgaaatatctacctgggatggagtgatagtgacaccttcagaaaaagcttatgagaagccaccagagaagaaggaaggagaagaagaggaggagaatacggaagaaccacctcaaggagaggaagaggaaagcatggagactcaagagtgaccttcctttctcttcaccccctttcttgtccaaggggaagactgcagcctaagttaattgctcctggctttaataagggggcatttctgagggatagaggagacaggaagtgtcattccactgggttctgattggctcagtagccagaagtcttccatttatgacatatgccatccatgtatagtgaaacaataccagcctttctcctaagacttcagaaaacccagttcttgaaaacctctccaaccagtactttgttgttgaaatgttgtgaactgttaagtgtctggatttttttttttctaaga

SEQ ID NO: 5961 - DNA, 575 bp, Canis familiaris
  misc_feature (1)..(575): n = a or c or g or t
cactgtnntncagatagaatacagtngaaatgccatnnctctgctgatcctacctgacccaggaaaaatggagcaggtnnaggcagctctgcagccagagaccctgagaaaatgggatcagtggcttttgcccagcctgctggatttacatctgccaaggttttccatttctggaacatataatcttgaagaaatacttcccctcattggcctcaccaacatcttcaacttagaagctgacttatcaggaatcactgagcagctcaacaaaaccatctcccgggtgtcacacaaggcaacagtggacatgaatgtgtggggaaccagggcaggggctgcctccagcctcctctcccagccccaggccctgaatgcaacattggcctcacaggctcgtttcaataggcctttcctggtgctcctgtgggagatgaccactcagagcttgctcttcctcggcaaagtcgtcaacccagctgctgggtgaccatggtgggaggccaggtggtggctcatctccccccagaacaattaggaaagccagcaccagtctccaccacggactgctgtgagaa

SEQ ID NO: 5962 - DNA, 650 bp, Canis familiaris
  misc_feature (1)..(650): n = a or c or g or t
atatatatgtgtatataagaggttattgataaacttctaanncagatagnngtctcacttctttcatttttgttgtgtcttatgaactgattgtgttttttgcttggataatgtgattccaaaaataaatctcatccaagcagtttagagtccagcctaatgaaatgtcataattgtacctattgaaagtttttaaataatagatttattatgtaaattatagtatatataactagttaatgaactaaagataatgaagaaggaaattgataggaggttgtttaaatgggagaccatgtaaaatatgtaaattctagtgcctgaaatcctttcaacaaatttttatttagcaactgctctctaccaggtgttaagctagaaactgggcacttagtagagcctcacaacatttaagttttcttcacttctgttaacctcaagaaactcttatttgtaatagattgtttctctcttggaacttttatctatttctttctccttgacatgaatgtgtcttcctccaaggtatgtacctggtatagacagaagattcttttgactaggaatggtttactccaacaaaacacactgtgctggccattctttgtacttgcctactgtatactacagattttagttctggacagttt

SEQ ID NO: 5963 - DNA, 680 bp, Canis familiaris
  misc_feature (1)..(671): n = a or c or g or t
tgcaaaatcanntcgctcgatctagggnnaaggggnctgaatggggagagnngcgatnnagtntattncgaannctgctgctanntcctctgtggggtgtnnatggagcgcgcaccccagggcctgcggtgggcatgcaggggacaggtgacctggcagcggcctgcgcagaacactgaagaaatcgtccaggcagggacccaggagtcctggcgaccagaaaatgtggtgggaacggtgacaactggcctcggtgaggacactggtgctgctctggtcctgtcctgtctctccgtctgcatgggggaagaaaatacgcactcgcataggctctgaatgcacaagctggctgcgtctcacttgggaggactgaggtgacctggaggggacacatggggagattcactgcaactcctgactccttctggaacgcgccaggcctcacgtaccccctctccctccagagcaccgggcaccaaggagcaaccaacgtgatgccaagtgggcaagataagctcacagagcctccgtgctctggcccaggcctgtcaagggtcacagagcagagaggtccagcccggctccaggcctaccctggcccagggccgtggtcctttgcttcacaagcctctttgagccagtaattatttagggagctttaaaaaatannnnnagaaaaa

SEQ ID NO: 5964 - DNA, 675 bp, Canis familiaris
  misc_feature (1)..(675): n = a or c or g or t
gcttngtgagcatagcccctcgttgcacgtcnactacgagctgtcggggtcgtcagaattattccgccgaggtnnagtcctccatcagctgcctggccaacatgcanntgcgggcctccaacacctacctctccctggccttctatttcgactgcagcgaggtggctctggaggccttgggccacttcttccgcgagttagcccgggagaagcacgagggcgcccagcggctcttgaagttgcaaacccagcgcgtcggcaacgccctgttccaggacgtgcagaagccgtcccacgacaagtggggcaaagccctggacgccatggaaactgctgtggtcctggagaagaacctgaacgaggcccttctggatctgcatgccctggcttctgcccaggccgacgcccatctctgtgacttcctggagggccacttcctaggccaggaggtgaaactcctcaaggagatgggcgatcacctgactaacctccgcaggctggcctgccccctggttgggctgggcgagtatctcttcgaaaggctcaccctcaagcatgcctggcagcctctggagcccagcggcctttgagggcccccctctgtgccagggcctctgtttgttttgtccagctgccgccaggcagctttttaaccaccccggactgaatggaaac

SEQ ID NO: 5965 - DNA, 487 bp, Canis familiaris
  misc_feature (1)..(487): n = a or c or g or t
tcntcaaattccaaacatcacagacanntctcacgatgaatataaacaccaccgccctgagtccggggtatcattngaacttttgagtgatgtacccaatgagaagaacccaacanncaacacagacacactcgctccccctagcggtgaatcgtgcnnagattctgagtttttagggaaaacatataaccacagtaactgatccctggcaacttagtgtacgtgacatggggaaaaaatcgccaaagtgggtgccaccgccgcctcccactcccaagtcattctctaacctgtgtacccttccaatgtgtcgagtgggcccgtttgagttttttcccctcctggttaacacacctcagacgcacacagttcacggagaccaagtgccttcgnnagtcacaggaattaaaaaggagacactgctccagcgggtaagagcaggaatgttacactgttttatatgcaccccgattgtnnnnnggacacc

SEQ ID NO: 5966 - DNA, 562 bp, Canis familiaris
  misc_feature (1)..(562): n = a or c or g or t
aggnacacgactcactccagcagacaaagcagagcacatgaaacgacaaagacaccccagattgcgccctcagtcagcccagtcttctttccctccctcccctggcccttctcctgatgtgcagctggcagctctggctcagagagtcaaggaggttttaccccatgtgccactgggcgtcatccagagagacctggccagaactggctgtgtagacttgaccatcactaatctgcttgagggagctgtagccttcatgcctgaagatatcactgaagggacccagtcccttcccacagcctccgcccccaagttccccagctctggcccggtgacccctcagcccacagccctcacatttgccaagtcctcttgggcccggcaggagagcctacaggagcgaaagcaggcactctatgaatatgcaagaaggagattcagagagagacaggcccaggaggctgactgagcacaggatggcacccagagccgcaggacggaggctgggggcagccctcaccccacttacaactggctggaagggtgggtggtaaaaagggag

SEQ ID NO: 5967 - DNA, 587 bp, Canis familiaris
  misc_feature (1)..(587): n = a or c or g or t
cacatnnntcgactcttctannnnnnnnacgagaacaacgagaagctgtttaatgcttgggctgctgtatttnnaatcacgcgnctcttcatcctcacactcgccgtgctggccattggctttnnacttgctcgtatggaaaaccaggcctttgaccctgagaaagggaacttcaacaccttactttgcaggctctgcgtgctgctgctggtgtgtgccgcccaggcctggctcatgtggcgcttcatccactcccagctgcggcattggcgggaatactggaatgagcagagcgccaagcggagagtcccggctgcccccagactgccagccaggctcatcaagagggaatctggttaccatgaaaacggagtggtgaaagcggagaatgggacctccccacggactaagaaactcaagtctccttgaggccaaagtgccggaacagggatcctgtcgtgggcgcccagcaggaaggtggggagcccggcccccaccactgcctccccccgcctgctcctgatgctgcgtctcaagcagcaggaacctgtcttcgaacggggcttttcttctttcttctttcttgg

SEQ ID NO: 5968 - DNA, 578 bp, Canis familiaris
  misc_feature (1)..(578): n = a or c or g or t
cgcaatcaggtttacccagagaatgggctggacccattcccaggtgagggccgtgtggtgngccgacagaggatgcacaagcccctggacaggatggagcactcaggctccaggatgactgctgagaagttcctgaacaggctccccaagtttgtgatccggcaaggtgaggtggttgacatccggggacccatccgggacaccctgcagaactgctgcccactgcctgctcggatccaggaaatcgtggtagagacaccagccttggctgctgagcgcgagaggaaccaggagtccccagagtcaccagcacgcctgctctccatgctgcgcatcaagtctgagaatggtgagcaggccttcctgctgatgatgcggcctgaggacactgttggtgatgtgcgcaccctgcttgcacaggccagggctgtggatgccaccaccttcgagatcttcagtacattcccacccacggtctaccacgacgacacggccacactgcaggcagcaggcctggtgcccagtgcagcgctgctgcttcgggcgagccgggccccaccgcctgacccaggacccag

SEQ ID NO: 5969 - DNA, 632 bp, Canis familiaris
  misc_feature (1)..(632): n = a or c or g or t
gtgatcatctctgacaatgcggnngncaatgacagcnnctacgtnnagatgatccaggacagtacccagcgcacagctgacatccctgctctcttcctgctcnnncgagatggctacatgatccgccgctccctggaacagcatgggctgccatgggccatcatttccatcccagttaatgtcaccagcatccccacctttgagctnnngcnnncgccctggaccttctggtagaagagttgttcccacanaccagccttaaacaactctgagctgggaaaggaaaatccaggaagtctgctctttcggatttggggatagcatttggggacagggggagccgggcagaggaaaaaggcttgggccttggctatgctaaaagaagccatgccgctagccttcccttcctcagggaacccccaaacatctcatgccttgggatgaggcaagagtcagaccccagagcttcttggctagaatctggaacaaaagaggctaaaggcaggtggccagagagccacttgtgacttgtcccatcccacctggctccagcctccccctcccaaggtctccttagtgtacttcacagcaattgctggagtggttcaaggagctggtgtttgaggaattaa

SEQ ID NO: 5970 - DNA, 602 bp, Canis familiaris
  misc_feature (1)..(602): n = a or c or g or t
agctgtnnatctatactgtgtctgtcngcaagaaaggnngtgaaaaatacagtgtttacttgaaattttaactttgtaactgcaagaattccaattcagccagacaagaggattaaccttattttacttttttttaatttttttttttaactctccttaatatgtcagtaggattttcagtacaaccaaaccattttggatttttgctccttgcctcctcacacatcaggctcattaagagtgctttctttgtaacactactttggggtcacagagtaaaattttccaaccgctgtctatttattccagctcaataccatgaagaaggttcaaccataatgaccctccggagctaggaaaactaccacaagacctaaagctttggctggtcattaacttccaactatggtctttatttcttgtggtgaaatgatgtgcctttccttgcctaaatcccttcctggtgtgtatcaacattatttaacatcttctaattcagtcatttttttttataaacatgtctataaacattgaactttaaaaaatcttattccattactgtagcacttgacagattttaaaaaaaatgtaacttagtaatt

SEQ ID NO: 5971 - DNA, 536 bp, Canis familiaris
  misc_feature (1)..(536): n = a or c or g or t
tgntgatcatccggaccatgctgtacacccnnnanganatgaaacagatcattaaaatccgagcccagacagaaggaatcaacatcagtgaggaggnnntgaaccacctgggggagattggtaccannacgactctgaggtactccgtgcagctcctcacccccgccaacttgctggctaagatcaatgggaaggnnagcatcgagaaagagcacgtcgaggagatcagtgagctcttctacgatgccaagtcctcggccaagatcctggctgaccagcaggataagtacatgaagtgagacggccaaggttcccttcgnnnnncacctggagggcttggctgggtgtagcctgtgggccgggggggggggggggggctcgcactgcgctcagctctgtcccccttcggccgtggctggcggcaccaccagttcagtggggaaagggtctttttaaattatcgtaacttctgcagtggctttgaaggaaccctgcctcacctggcgtgttttctaataaaatcttgtaggttattt

SEQ ID NO: 5972 - DNA, 529 bp, Canis familiaris
  misc_feature (1)..(529): n = a or c or g or t
aacatggtcannggcatcgctggactattggaatttcnntaatctgaaatttcttattataggagatgattgctcccttattgtataaggcagtccaggttgccttttggtataggattatttcactgtccctgaaatttgacaaatttgtagactctgcttttgttcagtcatgtaattcttctctccagtaagtaccgatacccctcacttttctggaccagaaagttgagatcttcccttactctgcctgcgtttgctgttactgttcttcgcccacccacgtctgtgccctcaagtattcattatggtattcatctgtcagattcttacattggatatgcaaggttttaatgtcacacctaaaatgttgggagacacttgctaagtattcacactgtggtgctggcctcttcggtaatgctctcacacaactcctggcgaagctcagtgtaagatggaaattaaaatcctctttctacaagtaagaaaacagaactttggaggaactnnnnnntgtttagctggc

SEQ ID NO: 5973 - DNA, 568 bp, Canis familiaris
  misc_feature (1)..(568): n = a or c or g or t
ctcgggctcccattcctacagccccatcannntggagtcagatttcagcaatccactgtatgaagccggggatacacgggagtatgaagtttccatctgaaccccaagactaaggctgcaggacccaggacgcccctcccctccccattctggacagggaggagaacagaaccttgtctctggctcctttcctccctgctgtgtaaatagtctcctggggaccctacagtaaataaaccagcatcctgccgcccaagcctcctcttctcagttgccaaacaaaggggcctgcctttcccctctggccccactggcttttggaccctgggaggggaacccagcccccctgcaactccaggggctccttctggctcaaggcacccccacccacccacggactgcctgagagctctgctgttcccttggccttgaaggctcttcccagatgctctggccctgggcctcacccctgggctctggagggtcagaggaagagggatgaggggggaaaagcgggggaaaggcccctacctcgcttcatgccatctcccaatccacaacctcccca

SEQ ID NO: 5974 - DNA, 523 bp, Canis familiaris
  misc_feature (1)..(523): n = a or c or g or t
gcttcatccggaccagccgcccagaaaacgccatcatctatnnnnnnaatgaggatttccaaatcaaacaagccaaggtggtcctgaagagcaaggatgaccaggtgactgtgattggggccggagtgaccctacatgaggccttggctgctgctgaactgctgaagaaagagaagatcaacattcgtgtgttggaccccttcaccatcaagcccctggacagaaatctcattctcgaaagcgcccgtgcgaccaagggcaggatcgtcaccgtggaggaccattactatgaaggtggcataggtgaggcagtgtcctctgccttggtgggtgagcctggcatcaccgtctcccgccttgcagttggtgaggtaccaagaagcgggaagccagctgagctgctgaagatgtttggcattgacagggacgccatcgcacaagctgtgagggaccttgtcgccaaggcctagggagggtaggggatgtgaggtaggggttctacacattcctgaaattctggcaa

SEQ ID NO: 5975 - DNA, 626 bp, Canis familiaris
tattttcaatacatccaattgccaaagttttgctgcatctttgaaaaagaactatgaaaccaactgacaaggaaaaggattctaactggattgctgactgttcttactgtaacttcctcctgattaggaatatgaccgtttgactgttcaatgactatttgtatttacagttttcagagtctgccattataataggaacaatctttgctgtatactttttttaaaatactgtgctatttctcttgctggaactgttgaaagaaaatatgatctattgctcatcagctttattttttaaacataccacttattttgttggaattgtcaaagactgtatttagatctcatgatgctttcgttaaatgtttacaacagtaaatagtttgaattcaataaatattattggtcactgtactgatcaatgcatgttacccattcatccattctgtagattacaatttattttgtgtttaaaagtctggaatgcttttgttgaaagtactcatttccaaattgatttttttttttttacacagttatccatctttgaacttctgactacttgttctatctgctgcatatttagtttgtatagttttgcttctgtatatgtatttttgtgaaat

SEQ ID NO: 5976 - DNA, 319 bp, Canis familiaris
  misc_feature (1)..(319): n = a or c or g or t
gcacagtcgatattgaccagtgnntcaggaannnngtgaccatggattgtaaaaccccttccaacccaactgggatggaaannngatacgggattccccagggtgaagcgctggatatttaccagataattgaactcaccaaaggctccttggaacagtgaagccagcctggaccctagctctgcctggaggtgccctgtatttgctcccgtggagcttcatcgggacggtgtgggctcccacacccaggctttgcgctgtgcttgtgcagaagggcttgcgggaggtcagccctcctcggtagcaggacctgcctaga

SEQ ID NO: 5977 - DNA, 549 bp, Canis familiaris
  misc_feature (1)..(549): n = a or c or g or t
cctcacagnnagcttttccgttcatctgagtaatgagttgtttccagannagacagcctgtgtccccttgtcacccccaagaccctgcctgctggggccgcagggccgtgtggacggagggggcacacgcacctgcttctgctcccgtgtcgaggagtcgccgctcctccatgtgccagcatggttcacgtccaaggccgctctgtaaccggggagtaaattaattcctcccttgtacgtgcaatgtgaggaaatccagcctgcctcgaggtggtttattccagatctgtcggtaacggggctcatctgtgctcctggcgctgtgcctcagcgcggcggagctcacctgcctcccagtcactgcgacgggggacgcgcctgtgcacctcgtcgctcatcgcctctcatttttattaaacacgctcagtagctttgttgagaagaaaatgggttctttatcctaaagatgattaccgttttaaagtgctcttaacattttcatgaatcctttttatttttttcctcgcggttttgtactccgtattctgg

SEQ ID NO: 5978 - DNA, 489 bp, Canis familiaris
  misc_feature (1)..(489): n = a or c or g or t
atgtcaacgtgatcatnnnanccctgcaggggctgggcctggccancgtgtggtgggacagaannnggcccctgtcccagctggccctgtcccaggtactgggactgatcctgaacctgccctcacccatgtccctggggctgctgtccctgccactgcgccgtcggcactgggtggccctccgccaggtggatggcgtctactacaacctggactccaagctgcgggcgcccgaggccctaggggacgaggatggtgtcagggccttcctggcagctgccctggcccagggcctgtgtgaggtgctgctggtggtgaccaaggaggtggaagagaagggctgctggctgcggacggtctgacccagcagaggcaagaagtgggccacctgtcgtgcagtctctacgcgtccagatctggcccctgcgtgctgggaaagggctaggcccgcacctcatggaccccnnnnnnggccccagcccccttcca

SEQ ID NO: 5979 - DNA, 631 bp, Canis familiaris
  misc_feature (1)..(631): n = a or c or g or t
cagctttaaggtatcttngagcaacatgttttttttccatcagatgtgaccaaacaaaaattaagatggtgagacctcgatctgagaccaaatccttatcctatctttgccctaactgcttacagaatggatcatgttccccttatgtcgaggtgaccacttatttgctctcctgcctccttgaaagaaaaaagagaattatgttcgccactgatttagccacatgaatcaaactcatctcatcacccttttctgggtccaaagctgctgcctctaaacgtgccatctcattgtgctttgtatcagttagtgctggagaaatcttgaatagcttatgtacaaaactgtttttaaattttatattattttgaaactttgcttctttagggttggggcacattgaccaccccgtctggctgagaactctctacagtctatgggctgacagtgtgctgatcttttaaaagtttctttccctccccaactccccttttaggtgaggtttccgtgaggtctgttaggtgtgcatcctgcagcttattggcttaaaatgcactcttcctttggtggcctctctttgggggccgattgggagaaagaaaccaatagtgcaaactgttttgatactgaa

SEQ ID NO: 5980 - DNA, 287 bp, Canis familiaris
  misc_feature (1)..(287): n = a or c or g or t
acctgccncgcagccacggcgagggnnngcgggtccgagagcacgtgcgccagttccacgggccaccgcgcctccaaggccggcatctcgcgctgggctgccaccagcaacagaagcgaccttaaacttgcgagccgcttagcctggtaattaaaaggacgcctttgctggcatttgttttaaaatactccaccgaggggcgcctggggggctccctgcgttaaggggctgcctttggctaaggtcatgacccccggggggtggggtcgagcccacatctggccctc

SEQ ID NO: 5981 - DNA, 558 bp, Canis familiaris
  misc_feature (1)..(558): n = a or c or g or t
ctagcactgtgctgatgctctcggcangagagcatnntggggaggtnntgggatgctgggctttactcactgggtcatttcctctggaagagatggaccttgtgcagatcagaccgtcaggtgacaggagcagggcatggggactgtgggaaagaggacagctcagggaggagtggcctggggaggtcctgtttgtgtctgacctgtctcaactggcccagcatcccgacttctctccagggtaaagggtggtgcctagcagcctcaggaggcctgcccaggctcccatggagcttccaatggctgcttgacccctgaggctgcccccccttgaggactgcacaatcatgcttgccacattatgaatcccactgggggctttcggcatggagggtgcagaaaagggagtgccaggccccctgaattgtgggtcttcctcccaatggctatctcatggactcttggccccacacacacacatgactctggctggccccatagcaccacggaatgggcctagctgccactggcctcatattctgctctgctgaggttgga

SEQ ID NO: 5982 - DNA, 257 bp, Canis familiaris
  misc_feature (1)..(257): n = a or c or g or t
acttatagtttgtcatggtggtgtaaggggcacatattggaatggcaaacagtaatacatcttcaggatnnnnnnnccctgtcaaagagtcaaagagattttcctaaaaaagggaaaacaaaaacaatcagaaaattcataccagtcctaaaaaaggaaaaatctaatatctcaacatatttttatcttttnctgatagacctatatagttttcagctctgcttnnnnnttatagctctaaagannntaagaccaat

SEQ ID NO: 5983 - DNA, 617 bp, Canis familiaris
  misc_feature (1)..(617): n = a or c or g or t
tagagaaacaaaagcacttttccaccttgtacatggnatataccaacanngctacaatgcaacaggcctgggtgtccaaggcttgcttggcctacgtccatgcttaaacctagggaagggggggattctcttggattcatggggtgaatggcagatgttctctccatgctggggaatgaggagggaggagtcagccagctttcatgctcatggtggcctggctttgactctccaaggagcaacacatacaactcagaggagtatctggctccaaagtttagggatggaaagacacttcttttggaaagacacccctttaggttcagagaaatagggggtgctttgctcccttggcctaccttatacagttgtcaatgcacacaaaatacagcctcatgctccctaaggcaagacccctgaaagtgatccatgcttttggctggcattctgcatgtctagtgattgtcttgggaatgtttcactgctacctgcacccagtgactttgcagcacagaacccgtttaatgtaactatgcagagctgtttggacttcatagtatgttgggtccaagtgaggggacctgaagaatcaatcatgtgagtttgtttnnnannnn

SEQ ID NO: 5984 - DNA, 548 bp, Canis familiaris
  misc_feature (1)..(548): n = a or c or g or t
aanngcagttttaaagtgaatcgtaagagaacctcagcattgtgcacgataagagaatgtgtcagtatttcagggttctacattttatctgtaaaatgtgacttttttttttatcacaacaaaagtaaaatgttgctttgtacctggtgtcttttattaagaatttactccccccatttctcacagagataacagtcgggagtcattgtcacaatataatagaaatgttagcaaccagattcatgtaaggactaagcagtcctcatgaattgcataagactctgtactgctcatagtacactccatcctctctgtagtttgctgagtagtggagggggaaagcttcaacagtagtttctgacaataactgggaaggctttttcttttttttttttaaataacaatggaattggcataattgggaatgaagataaaacttggaaccgagatcgagaagatggagtgtatgtagaagggctgttaaaaatgtaaaccttggttgcattatttgtggaggctcaaacttgtgaaggttcannnccatactt

SEQ ID NO: 5985 - DNA, 43 bp, Canis familiaris
acctgtgtgcctggcatctctccctaccagctgtgcatctctg

SEQ ID NO: 5986 - DNA, 603 bp, Canis familiaris
  misc_feature (1)..(603): n = a or c or g or t
agttcccatgaaaggcagagaacgatngaaaatcagtnacccccatggntcaaatttcatcactccagacaaagactggagtctctaaaccactgtcaggaaaaacatgaccatttcttcaagaatctgtggcttccaaaccctgtgcaaggaaagacccccatccctcaggctgcacaacacagaaaagataccagccacctctgggagcagggtcccaccagagcccatcaggctggagatcaagaaggccggaggcgaaggtccagggaggaggggagagaaggacgcagcaaggaggggcaggttgaggggaagacaaagcatcatgaggatggagattcccacaaagagagcaagaaggccagggtgcagccagtcagcacagagaagccgaaacacagaaggaagcgccaccaagataccacaaaggagggaagaaggtctcagagagagaagaagcaacctggcaaagaaagcacgccggagagggacctgtgggatgaagctatcctcggcagttgttactgattttggaggatttggggccctgatataaaatgatgtggagatgttggaaaggctggattaaatgacattgaa

SEQ ID NO: 5987 - DNA, 354 bp, Canis familiaris
  misc_feature (1)..(354): n = a or c or g or t
gggagggtgcagccatgctgttccatgctgttccacctggccctcctgcaccctctgctgggcatgacctgggatactggggcctggctgggtgggtcggggggttgcactctgaccgctcagagggtggacnnnnggtctgaatgcacttttttgggctcctnnangctgggagagccttcaaggggtgggcacccatgatggggcccacccctacttttgtgagaaagtagctgggagcannnnnncacccttccaacggatttgannnnttccctccagcaggacaaggacaatttggggggaacttcggaaggagttggttgatccttttgcttttccaaccctatcacc

SEQ ID NO: 5988 - DNA, 583 bp, Canis familiaris
  misc_feature (1)..(583): n = a or c or g or t
catgcatgacgacagcgtnccttatgtgtgcacnngctacgannnntacatcacccgcgagccctgtgccatgtgcgccatggccctggtacactcccgggtgcagcgcgttttctacggggcaccctcgcccgacggtgccctggggacccgcttccgcatccacgcgcggcctgacctcaaccaccgcttccaggtgttccgtggtgtcctggaggcccagtgccgccgcctggaccctggcgcgtagacagcggggcccgcgggcttccggaccttgctctgctccgacggctcggcctcctgtcagactgcacccgcaggcctttgcctgtctcgttgccgcccagcggctgtggtcctgttgggcagttttagggacaacttgcgtctccctccctgaagccagaccccatgccgttcccactggtgtgtggggatgcatttgtgcccagactgagctcgtccctgggcctgagcttagcgcgggtccagcctggcccggaacctgggcacgtgctcttccttgctccaaccaccttcaggcccgagcccaagggtcccnnnngacggtgtccccttt

SEQ ID NO: 5989 - DNA, 574 bp, Canis familiaris
  misc_feature (1)..(574): n = a or c or g or t
ggttttccccagccctggntacagaaatgctgcctgcccgcccgcccgccngtctgtctgtctgtgcgatgggggggggggggttgtgtgggcagcagccagtaggctgatccagagcatggagccccttcactaacttggaagccccagcctggcttggcagccgatcagttgtgtgtcccaggacccctcacccaagtagttcctcctcctgcccccccccaccccctggtctgtgcttcgggcccggctgcccaggcaggacctctgggctgagcccccaccccgggccaggctgttttctgggttcctgcccctggcctggggtcgggagctgggtgctgctggccccacttgccttcctgtgtaggcccatcgaggaaggggccggccaacgcctaggacaagcaggaaggagcagaagcaggaagggtcgggccaggggacagaagccagccttgtgatgccgttggggtcattctggagctcgaccccagctaggagggcattgactggtccagggtcagggaaggaggggagggggtggtgccgnnnncnctgcagctccccgctc

SEQ ID NO: 5990 - DNA, 439 bp, Canis familiaris
  misc_feature (1)..(439): n = a or c or g or t
cccgtcggaccctgaccnnnctgcggccccctcccagcaccagccccccagctgttcaggnannacggcannaggccagcggggggctggcttgtgtgcgcgaggaggaccctccacgttgtacacgaaatgctctgtagacaccgtggaaagctttggagattgtttccttcccccgagtctttgtgatgcttgtatagttgaggatgctcacggtttgtttgggtttttttttctttttcttctgttcttttttcctttcattctttttctttcttttatttttattttattttattttagtctgaaggttctggtaacctgtggtgtattttttcctatttccctgtaactttttttttttcttcttcttcctccccttcaccttatccatgtgtcttcccactatgcacagataaacttcacctacaaatcctta

SEQ ID NO: 5991 - DNA, 459 bp, Canis familiaris
  misc_feature (1)..(459): n = a or c or g or t
gaaaagagccaanttgtcataantgggacccagacagattggnntgagatccaaaaagacnnnnaggcaccccannnngcctgcccatnnngctggatgcccaccccacccagtgttacattctgcctcttgtggggtgggtgctccaaggccgtctgctgacgctcctctgtgtcccccagcaagcagctctcccagggtcctccgccatcctgacccgggcccccatctgacctcctgagccccgactgtggctgtccatcttttctccctcctcaactgtcttcagcgggactccctcttgggtcccccccaccatcacctgaagaccccccacgcgccaagcaccgaatgtcaccttgcccactgtcgcggcccatctgtctggcagtggctggtgtgggcctccacttgacccctttaacatgctgatatttctggcaaaattcattgcttggg

SEQ ID NO: 5992 - DNA, 626 bp, Canis familiaris
  misc_feature (1)..(626): n = a or c or g or t
atgaattggacaagaacttgnngnncatcaagcccatgcagttnnnnnnnnntgaagagancgtgcgtaaagccatggaagctgtggctgnnnagggcaaggccaaaaagtaaaggcgagcaggcagattgctttcctgaggataccttccctgcccatcccatttctctgcacttcttccctgcacatgtcacactgaccgcatctgtaggcatcttaagttttagctgcagatggggaccagtggctcctaattttgtttagccattttgtttcttgcacccactcccttcatatattctagtcaaatggcacttctggggcatgggtcctcagtccaagctgagagaagactcgtatccaagagtagagaattagtaactctggggtttttgttactgctttattactaaggacctgcttgagtaggggatggggagaagccctgctaggtgtgaccaatgagaagcaagagagcttatgtgtattcccaggagctagtcctgtactattctgtagtcaggtgagggcagtgtgtggcgggctctagtcattccagtggaagatgaatgtaacctgcacggtgattaaagcagttatttcccctctgaccccaaagagctggc

SEQ ID NO: 5993 - DNA, 538 bp, Canis familiaris
  misc_feature (1)..(538): n = a or c or g or t
ccctctagtagcaaagggaatgaggagtgagggagggagcaagtgtttgtccttggaggggttgggcgncctctggtgttaccacttggaggcctgtcccctttccacgttttctccacttctggtggtggagggcannntgcaggaacttgacccactgtgggaacctaacctgttttgggggttaggacccacagtcgtcttggacagttttggggggagggttttttaattttttaaaaattttgcctccctttgtgaaaacgggatggggaggggaagggtaaatngacaggaggtggtggtagggggaggggggcgtgcactgccatgactgccatgtctatccttttttttttttttttttnnnnatgggggtttctcttcctgtccggtgtccggactttcctaattggagtttgaggccnnnangctggcannnaccccaacccatgttctctattccttccctccctgtgccccctccgccttttgtacgccaattctcagaaataaagatcttttgtccattttttta

SEQ ID NO: 5994 - DNA, 567 bp, Canis familiaris
  misc_feature (1)..(567): n = a or c or g or t
gtcagccagcgnnagctggagccatttcnntttggcatccgcattgactatgtgctgtataaggcggtntctgggttctacatctcctgtaagactcttaggaccactacaggccacgatcctcacagtggcacccccctctctgatcacgaagccctgatggctactctgtgtgtgagacacagccccccgcagcacacccccgaccctactcagggaccagcagaaaggtcgaggttgatcagcgtattaaaggaggcctggacagagctggacctgggcgtggctcaagctcggtggtgggccaccttcgctggttacgtgattggcctagggctgcttctgctggcactgctgtgtgccttggcagctggaggaggggtcagggaagttgccatactcctctggacccccagcgtgggagtgctgctgggggcgggtgcagtctacctcttccacatgcaggaggccaagggcttatcgagggctcgcgctgagctccagcacgtgctgggaagggcaagggaggctcaggatctgggccnnnnnnctcagccagccctgctc

SEQ ID NO: 5995 - DNA, 601 bp, Canis familiaris
  misc_feature (1)..(601): n = a or c or g or t
atttattacatgtctttcagtgaaatatttggntgccccaggcatcagctaaaatgaattaggaagataaagttccctcctcttttgagtaatgaagggagcagtctagagaattttgtgcatgtttgcatggggttattgaggtattggacacatgtgaagtacctaggaagacactcctaggaaattcttaaatatttgtctccttccgtcttcccttaggaaggatgctatctttcttctgattaggaataaggagtacttttagtgatgctggagcttggatgatctttagatgatcagatttgcctggagtaacacgagttggagggaaagtctagggtgactgttgtaggtgaagggagtagctattcttaggcttgacctgacttgaggtgattactctcnnnnntgacaggttcattttggtaaggaaaccattttttttttttaaagctacaattggattgtcaatatattgcccccctcccccatccaaagaggcatatttaggctacagaaatctcaatctcttatgtatttgtgtttatgtaattttaaaggattatgtagttgttataagacttctttgtttaatatg

SEQ ID NO: 5996 - DNA, 617 bp, Canis familiaris
agatgtgctccagccagctgggttttggtttccatattcaccgtgtgtctgtcgagaagtgggggttgggtgggggtgaggctgcaccccatgggttggttgcctggtaggcctggggaaggtgggggtagagctagggaattgggatagaatccccttccttcacagatttgcccagtctgtcttgtgcaaggggccagagaatggtgaatggaggcccgcgtagaatgggaagaggctcgtggggtcaggtcccaccccctgctcatctcccctgtcaaccccagccctccccctgcagctgggctgggagtattgctctcctgctttgtaaatagggcacgatcccctttcacaaggccgccatcgcatccaggcctgtgctaggaagctcctgctgggttctgccttcatgtttctcaacactactttgctgatactaaggcagcatcttctgagtgagaaatcacgtgactgctcagaatgtgtctccctcagcaaatgctcgtccgtttaatggtgatgccttacgtgcaggatctggttactgtgcagtggtcaacacccagaaattaggcaggccagtgtctcgtatcatgccgtttaaaagttcctga

SEQ ID NO: 5997 - DNA, 557 bp, Canis familiaris
  misc_feature (1)..(557): n = a or c or g or t
ctttccaaagtgannactttcaaagatgattttacttaaaggtgttaggtctttaaaaaaaaaaaaaaagattaggtcctagaattttttaaatgtatgtcttatgaggagcacgtgggtggctcagtctgttaaacatcttgatttccactcaggtcctgatctcagagttgtgagatcgagccctgtgtccacactggatggagcctgcttggcattttctctctccctctccctttgtcccttcacccccaataaaaaataaatgttaaaaagtcacaaacagctagattgtaaactacttaaggacaaggacaatataatgttctcatatttttcctcaaagtatttagcactgtgctgggcctggtaatagatgctcaatgaaacacttatttttgattgttaaataaaaatagatcaagttgtagaagatctttttaaaagtcagagttctaatctatcttgatctaatatgttcttgactgtttgtggtatttgccatgtgccagtatctcttttttttcccaaaacaatgtatcaattnnnacaattgg

SEQ ID NO: 5998 - DNA, 537 bp, Canis familiaris
  misc_feature (1)..(537): n = a or c or g or t
ggtcagtgtcctccccattgggcancaggactggctcaannnnnnnncagttcacgtgcaaagtcaacaacaaagccctcccatccccgatcgagaggaccatctccaaggccagagggcaggcccatcagcccagtgtgtatgtcctgccgccatcccgggaggagttgagcaagaacacagtcagcttgacatgcctgatcaaagacttcttcccacctgacattgatgtggagtggcagagcaatggacagcaggagcctgagagcaagtatcgcacgaccccgccccagctggacgaggacgggtcctacttcctgtacagcaagctctctgtggacaagagccgctggcagcgggagacaccttcatatgtgcggtgatgcatgaagctctacacaaccactacacacagaaatccctctcccattctccgggtaaatgagcaacacgcccggcacccagcaagccccccacccttggctctcaggatcccatgaggatgcctgagcccccatccctgtgtacataaccccg

SEQ ID NO: 5999 - DNA, 442 bp, Canis familiaris
  misc_feature (1)..(442): n = a or c or g or t
caattggctgatcaaaagacagctgtatccagcatgacaaatgctgtttctcactgtgcatcatgtggtggtaacttggtgcacgtttgggggcacccgttctagtccttaggctcagacagagacacccttgctctgccccacctgcccatcctcattctgccccccccccccccacagaaacacccctgcagtgctgtgctgagctcaagggcttttgaggggccctggggagcgccgggcattctttgccatgatggtttttctcctctagcccaagtataataaaaacaggacacgtcaagggtttacttctacacaagcatggacatttactttgtagatccattacatgcatgtctgtcccgttttctaagacatcgtttccagggagcagattgtctagcttgctgttcttctgtctctcttnnnnnnngtcctt

SEQ ID NO: 6000 - DNA, 654 bp, Canis familiaris
  misc_feature (1)..(654): n = a or c or g or t
caannagctccggtgtccactggatgacttcgagctnntnntgtggtcatcgnnctctcgnngcnngagctacccactgtgcccctattgctccaaccacccgcccttccgagacatgaagaaaggcatgggctgcaatgagtgcacacaccccacctgccagcactcactgagcatgctgggcatcggccagtgcgtggaatgtgagagcggcgtgctggtgctggaccccacctcaggccccaagtggaaggtggcctgcaacaagtgcaacgtggtggcacactgctttgagaatgcctaccgtgtgcgggtgtctgccgacacctgccccacctgtgaggctgccctgcttgccgtggacttcaacaaggccaaatccccgctcccaggtgacgagacacagcacacaggctgcgtcttctgcgaccctgtcttccaggagctggtggagctgaagcacgcagcctcctgccaccccatgcaccggggagggccagggaggaggcagggccgagggcgggctcggggccggcggcccacagggaagcccagtgccaggcggccgaaggacaagatgtcagccctggctgcctactttgtatgacggccccgccaaccctcaccaggctccacatagtttcccgtgggcca

SEQ ID NO: 6001 - DNA, 615 bp, Canis familiaris
  misc_feature (1)..(615): n = a or c or g or t
gnaactcccgngtctnnggctagcaatcattcctcatttcannncangaacacccctgttgtgggnnngctgcctccacttcttccaacccctnnaaagcagtccttcccgggctctcatctcccccttcctgccaagtccccgttgttaggggacagaccaggaggggctctccttccaccaccaggcttggtcaatcccaaaggtctgtttgcccctcccctgcttccagcagccatctccaagagacctgctcctatggggtgcccccaacccaagtgtgtcaagcgtcccctacttggggagaaaccaggccttctagtaccaccaacagttcttctgtcggtgctacacaagcaggcggtgcagcccatgtctctgctcaactaaggaaagctccctggagccaggagaacaaggtggctgctgcccagatggcagcttcaccctccttcaaggaccgaggccccggttggacctgcagccctggtgcctgggcagtgggtacgaatgtgcttcccttctgtttggtatgtggtcccatggaaacctgtttcctgttcagagtctctttgtgccaaactagagatatatggaaggtcattgtagtagaaa

SEQ ID NO: 6002 - DNA, 556 bp, Canis familiaris
  misc_feature (1)..(556): n = a or c or g or t
cctgacnnggntgtatcagatttggntgatacagttaatactgaccnnnnnnaaaacacatcatccagtaccaaggaatctgaagaaggtcagttgaaatctcctttggaagctggnnaggtctcatctgcattgacttgccactcctttggtgatggattgggggctgcaggcttggagttgaactgcaagtcaatgggagaaaacagtatgaagacagaaccgacttctcctcttgctgagttacaagagatttctactgtggcagtaacaaatacttttaagaaaacagatgattttgtgacatgtaaagcaccagctgttgacctagatcacaagttcaggtgcaaggttgtggattgtttaaaatttttccgcaaggccaaactgttgcactatcacatgaagtatttccacgggatggagaagtcaccagagccagaggagagtccaggaaagaagcatgtccaaacgagaggctcttcagcttcagacaaggccaaccaggagagcttgaccaggaagcgggtctnnnnnagttctccaactgcaaaag

SEQ ID NO: 6003 - DNA, 389 bp, Canis familiaris
  misc_feature (1)..(389): n = a or c or g or t
gtgtgaaagggggatctnnacttcagactaactcaaacccctcaacannnnnnntgcntgttaannnnngtgccaannatatnnntgcccccatgtntcgtgtcntgccttctctcagtgatnngcagaacagagacatatgctgagtagtcccagcttttcattgatcatttctctcttctcatccccaggacttgacagaagccagggaaaagttcctgggttatgtctgaacatacctgtgattgttggggtatggatgggtgtgggcaagagtgtatgaatgcacaggcgttaaggagctgtgtattgctcatgttctgatttttgcaactcgactctgtacttggagtcggtctgtacaattattatgtcattgtaatgatttc

SEQ ID NO: 6004 - DNA, 560 bp, Canis familiaris
  misc_feature (1)..(560): n = a or c or g or t
tccttttcggggatcttaataaaccaatatctaaggcatgcgagttacataatggaacgtcnnatgcccaatgtcagctaattaagcatggctgagactcggaaagatcctgtaagtgataagttaaaatattaataccaattttcaaacttcatgaatagcgaagttggcacctgaagagttaggatgtactcctgacattttatattaagggtttgcctcaaagccgctttccgaacaagtgggaatttctctacagcatagtctatgatttcaacccagaaaggctcatgataatcctggaggtgacacccctgtcgacagagagagaagatttcaatcaggtgatgttcattgtctgatagaaatgatctttatggctctgttgttcttcatcaaagagcgctgattacacaccttcatgccctgtggtttgtagaagagagcagagaaccaaaaaatagactatttggcccccattaaaaatggaccctatttaaagcaacatggtattaaaacagggcgaagtctaatacaaatgcacgttcaataagcgttat

SEQ ID NO: 6005 - DNA, 614 bp, Canis familiaris
  misc_feature (1)..(614): n = a or c or g or t
acttgagatcctctctctccctctccctccaccctttcccgctcatgctctttctctnnnntaaaaaaataaaagtctttatccatcttcagaactctatattaggacattaaattggtaaattagattcagcagcagaaggttaaaaggatattgctgaaatgagggctccctaaagatgacatttttctccttccctggccaataccccgactcttgactttcttctctcacnngtgggaatgcaaggtttttttttaccttcagaatatnnnnnngcatagctttctcctctccttccttttcctgtttttcctctcccatagaaaataccttctaatacacattcggtcctttgaagcacacagaccatgatttgaatataagtaaacgtagagtaaaaatcatttcgtggatcagatnncnnnnnnnnnnnnnntctctcttcacctttctctcctccctccttccctactttctctctttcaatctctttctccctctccttctgcccccccggattctctctcttttataggacagaattattatcttaatcaaatctatatctcgtgccatatnnntgattgtgnannncatgctacttcctcaat

SEQ ID NO: 6006 - DNA, 585 bp, Canis familiaris
  misc_feature (1)..(585): n = a or c or g or t
catggaaacgagggcngncnnnnnnntccccagccaccagaaatccgttgaaatttgtccccagggattactggtgttcgcaggatcttccgaacaggattccaacttngncaagcagttctggatcgctgcgtcactgtatcctactactgaatcccagttggtgctgccccgaggtagcagccagcgcctgcgggtggcccggccctctaggccccctgggcatgagaaagtttacctccagcctttctcccttgagaaaaacaagaatacagatgtcactgctgaaaccataaagattcaggaatctgaggagaaagaaaagtatcttcaaaaggctaaaaggagagnnnnnnnnnnncaactcttaagaaaacaaagagaagaaaggatcttgaaagaactggtttcccttccttataagccaaaagccaaagtacacaaagcaaagaaagtgatattaaagtcagataaggaagaccaagaggaggtcaaagccttggactaacacgcttggcacatggcagaggatggctcatgtacatctttacttttgaaacaaccttctcttatgtcaggatcact

SEQ ID NO: 6007 - DNA, 480 bp, Canis familiaris
  misc_feature (1)..(480): n = a or c or g or t
cagcttcagccagtggaacacgnnagagcncaatgactctatggggcgcgaggactgcgctgtgatgctacgcaccgggatgtggaatgacgcaccgtgcgaaaacgagaaggacaactggatttgtgagaagaggcgcagctgctgaccccgccaggtgcccaccagctgtacccacagcctgcgggtcgggggggggccatccgcgacggtcccctgggctgttcaccgtcctggcgccgcccaccaccataactactaagagccgtccacccaacccaggcaggtgcgggcgctgggacctccactccaacctcatcgcaagccctcacacagacaacctagcctccacccccacccaaatcccggctcctgggccggtccctgggccccacctccctccctaaccaaagcaaggcaactcaagcatggagctggttttctcccattctaccccagactgnnngccctcacagatag

SEQ ID NO: 6008 - DNA, 607 bp, Canis familiaris
  misc_feature (1)..(607): n = a or c or g or t
aaaaaactnnagcactcgttactttcttccactgcatnnnnnctcaaatgctatttgtcaacctcctcataactcctccacctgctctgtctcctggctctctcccgcgacccccttcccccaccctccaagcacaaaataaccctaagatctaggagtagaaagggaaatgatttctcataggaatacttagttctgactgctagatttttgaaacctttgtgccattttagatgcaaacaaatcatggaagattgcatattgtgtggtacctttttttaataacattccttttttcttcagtctcttgagaacattgtaggctgaattttaaaacttaacagtttactttgggggaatggaacctccctttatcttttaagctagattctcagattttttttagacatcacagctcgttagatctgttcctgtcaccctaacttggcatgagtgggttgagttcatccttctgctgcagtgttctgagcatggctgaagcattaaaaacttaattataatgtttagtaccttatagagcaaaattaatggaaagcatttggctgaatctaaagacccacagtcaaattcttcaatgtggtttatt

SEQ ID NO: 6009 - DNA, 584 bp, Canis familiaris
  misc_feature (1)..(584): n = a or c or g or t
attaannncatcctgtgggatgannagaaaggtgcctggtttgactatgaccttgagaacagaaagaagaacctagagttttacccatccaacctcactcctctctggtctggctgtttctctgacccgaacgtcgtggacaaggttctgaaatatctggaggacagccagatcttgacctaccagtacgggatcccgacctctctccagaacacaggccagcagtgggacttccccaatgcctgggcccccctgcaggacctggtcatcagaggtctggccaagtctccctcacctcgggcccaggaagtggctttccagctggctcagaactgggtccgaaccaactttgaggtctactccagggactcggccatgtatgagaagtatgacatcagcaatggtggtcagccaggtggtggaggggagtacgaggttcaggagggctttggctggaccaatggagtggtcctgatgctcctggagcgctatggtgaccggctgagctcaggcagccagacagttttcctgcagccccactgcctcacagctgcccttctgctcagcctcctgcttggcctcct

SEQ ID NO: 6010 - DNA, 554 bp, Canis familiaris
  misc_feature (1)..(554): n = a or c or g or t
taatgagttaggattaaatnngtcaatcaaatgctccttcgattgttcattctccaaagtgggatggggaaaggatgtcatnataacaaaagnnnnaaatccctgcagccnnagccaaaatgcagtatggctgtagctgctgagtcaaggcatccttaaagcagaaaaaaatgatgtccacaatgaagattaagaaattgagtggccaaaaatattagaagctagtttggttgagccttaagcagagtggtcagggtttatttagcgcaggtgcctctatcctctggtgtagttttgaaagaggacttcaactacctccactctgacctcaacctttctaactgatcaagttctttccagcttatctcttaaatctggcaaaagacttgtgggcaaagcgtcacaactacgccctcaagtagtaagggctgccctgagccagcaagaccctacccatgacaatgatgatctgcnntgcccacctgcatnnnccannnnnnctatcccacatagggggatnnnaagatatccctatccttgtataaacctaagta

SEQ ID NO: 6011 - DNA, 655 bp, Canis familiaris
  misc_feature (1)..(655): n = a or c or g or t
tnnagctcgggctgagcgggtgctggaactggtatccatcacagccaacaagaacacctgtcctggggaccgangcgccatcacacctgggggcntgcggcttggggccccagccttgacctctcgacagttccgtgaggatgacttccggagggtcgtggactttatagatgaaggtgtccacattggcttggaggtgaagaacaagacggccaaactccaggatttcaaatctttcctgctcaaggactctgaaacaagtcatcggctggccgacctcaggcagcgggtggagcagtttgccagggccttccccatgcctggttttgatgagcgctgagggcgcttgggaggtggggcccacggactggagtttattctcctctgtctcctgggaccaatggaggggagtgacggtttcaattttttgccggaggaggggagggctcttacttagggaaacccagctctatcctggactctgtagctgagatttctttccgtaactagacttagaaggaggaggcctggggctttctgccctgaactctcccattatttcagtgttatagactccttgctcttacctggggagagggcagttgcccctgtgagcccgaggaaggggcgagtaagcacccacctttctgttttt

SEQ ID NO: 6012 - DNA, 537 bp, Canis familiaris
  misc_feature (1)..(537): n = a or c or g or t
gacactgnagggcatggtcaccgggnngaaactgnctcaggacctcgatgatcttgccattctctacctggccacagttcaagccattgcttttgggacccgcctcattatagaggccatgnaggcagcagggcactcgatcagtactctcttcctatgcggaggcctgagcaagaacccactttttgtgcagatgcatgcggacattacaggcatgcctgtggtcctgtcgcaagaggtggagtctgttcttgtgggcgctgctattctgggtgcctgtgcctcgggggatttcacttctgtacaggaggcaatggcaagaatgagcaagttgggaaggttgtgtttcccagacttgaggataaaagatactatgacaagaaatatcaagtattcctgaagctggttgaacaccagaaggaatatgcagcgatcatgaaaggagactgaagagagtttgcaggtgccagtgccagaaggttctgcgtcactgcattagggacctctgtcttctcctcttgtatttgagacccttta

SEQ ID NO: 6013 - DNA, 525 bp, Canis familiaris
  misc_feature (1)..(525): n = a or c or g or t
gataaggatgaagatgaaggttctatctatcnngcagaggtagcgtnnaatccctttcccccaaaaaatttgatttgaatgttgagagtggagagggaggctatgaacaactaattgctcacttaattgaggtctctggggggagcaggcctgaaccttattgaggagaggaaggaaaggcacctggtgtgggtttttatttggttaagggataaggcgagggctcccatgatttgcatctcccaccgacagcaaagaagggagcccccacgcttgctcaccagcctgcccaggtgtgggaccagaggcaggatccagcttagaagctggcatcatcaagctttaaagaatggagtcagacacctgttacaatgaagaaaaaaaagaactggggtggaagtgttagtattaacgaacctgatgtttatcgagtgcttattcaaggccactctgtgttctaagcactttgtagnnnnntttgtctttttttttttttaattgagataaaattggggatccctgggt

SEQ ID NO: 6014 - DNA, 558 bp, Canis familiaris
  misc_feature (1)..(558): n = a or c or g or t
ccaggatcgcgnnctgngccaaagatgtcagcccagccactcctgctgattcagcttcactgctcagcaaccattcagatgccagatctacccaacccttctatccnctgagtggcaccacacaactgagtgggataccaggcccagggcaccatggcagcagtggcctatgggacaagatgaggcctcagaaaatgaatgcatctgggcacctgtcctccttctcctcttcataccagcccaactccaagccctctggggctgacctactggaaaagaatcttgtcgagatccagaacctgcgccagcgcctggaggagtctatctgcatcaatgatcgcctgcagaagaggctggaacatgtgctcagcaacaccgaacaaggaaaaagcaccagacagtccattccaggtgtctcccttgcaacccctcattcatatgctcagagtcaccctttgcgctctgctcaagacgtcttgtgacatgatgtctggatgtctagaagaatggtctccagaactttccagccctatcaaacagcattcttggctgtgaact

SEQ ID NO: 6015 - DNA, 593 bp, Canis familiaris
  misc_feature (1)..(593): n = a or c or g or t
atttttcactgnngtcaaaaccatcaccattanncactgatnnnggncagtagagaagctgttatggtcaatgcnnggctgtagactcagtcatccagtgcagtgagcagatataccagcataaattccagccacaacttggcacagcaggttttctctaccttctcctcagtaattagtactttaatttgctgtcaaagagaggctattttcactatggagtcaaagaagagaagacttctgaacagggaggcacagaaaggaagccaagtaattgtcaggctccttgtctgttgtgtcttcactttttgttttcatcattttgactgaattcttggaaatttacagataatttttttcatgtttaagtatatatacatatgcacatatacatatatatgtaaatgatgataaacataacatggaatttgtcagagcaggcatatatggtagctcccactaaatatatctaaacaagaacaaagaaaaataaaataatgtctacttttggagggaaattgaagcaagaagaggaaatagtttgatccatttctactatggggtctaatcaatgccaattcttcgtgtctgta

SEQ ID NO: 6016 - DNA, 593 bp, Canis familiaris
gcctcatacccgtcatgctgtttgaatattcttgctttctatcaattcagactaagtgtaactttgggatttctactattgtatgcatgcttcctattctgtttttgtttctagctttgtctcttccaaaatatgtagcttagtcttttgtacgacaacaaaaatttcattgtgacttttactaaacatactgtaaggatggtgattgatcttatttccttttttatgtattcgtaaagatttttggcatatgaatgtaataatattgaagtcagtgatgctctaacttgcactgttttgcattatgtcaacccttttcggggaataaaaaagccctactgtgtttttaaagactatcaagtacagcccagtgctggagcggatgtgcgcactgcatgttttcatatgtggcactttcatgtatcgtgtcgggttattgttctagatgggactgttaaatactatgtttgaggctgggttgtcatttttataactgtcttggtgttttatcgccattatttattacttttgatatacagaatgagctgcatgcatttatagagcaataagaggatgtatttaatgtgccttgt

SEQ ID NO: 6017 - DNA, 620 bp, Canis familiaris
  misc_feature (1)..(620): n = a or c or g or t
ccaggccccttgctgccagagnntgttctactcagagngtcgagcaggatggcccattcctactnngtcctcntagttctacctcagcctctgaagaaacactctcaccctaacaagcgagctgggtccggtcccacagcccttcgtggtatccacgttcattttctttgaggccacagctccctgggagcctcagaagcctccagctgcctgcttgtcaccaacaaaaatagtccatgggtggtttgtattaactgtaggtccttaacacgtagtaaagatagaagggctgttctacattttgcatttttacttcacactcaaactctacatacttgtggtttgaggatttagttttttgttaattctgagttaaataacttagttcttgcactgattttggggaaaaggaggctcagaagttcaaggggaccatgaaagccctgagtcagtacctggtctgaagccaaacaaatcttttcaaattgaggatggctgctgggggtctaagtgatggtctgggccaagtcaaggccactcccggccccgcccctcccactgcagcatggctcgcacagaacgtccacgcagcacggttttaaataaaatngattnnnann

SEQ ID NO: 6018 - DNA, 487 bp, Canis familiaris
  misc_feature (1)..(487): n = a or c or g or t
tccgtgtcccctactgtaaatgcgtgtgccttagctcaagccccagcntgcactggctggccctggtgtgggatggggcccannnagnnnnctctcccttccctccccgactggccttctgagccaggtgatggttcgaggggggcttgccgcttgtggaacctctgccttccttggtctccttgttgccccaccagaggcctgctgctgctgttgggagggtagctcccaggctggggggtggggggactgcttccaccaggggctgggaaggagacacggctgcagtgttcttgccaggacagtcactttattgagaggaaggagcccggcccctcggcccagcgcggggtgggctcactgtgaggtctgataacagaactctaggagaggggactgcgagaccacccgcccctcctgctctctctgcagaggcccccggcagggctgagggggggcccagccaaagcttgtgccggagcctcac

SEQ ID NO: 6019 - DNA, 528 bp, Canis familiaris
  misc_feature (1)..(528): n = a or c or g or t
ccagactaccatacctgtgtgaaggtgacatgtataatgactactacgttctggatgatgctgtctttgttctnnnaccagtatagacacgtnnaggcccangtcttcagagcccaccccaagaatgtacactccagaagagggtctgcgtttgcggttatgtgaagggaggacctttggggactgccattctaaatatcatgtaggaatttaaaaagccaaaatactaattatttctttgtagtgtgtaaaaggaatgtttttaaaaaacaaaacccaactctttgaggatttttatcaactctttactcagtaatacaggtcacactccaagtatggaagatattttttatacttaattgcagtagggactcatccccagtcaaagcaatagtcacgacttcacatggannnnataaatatggattgtttttaataaaatgaagactggcaataaagctgtccattcagttgcaaatatttggttacaaggtatagccactgatactctttcatgtttagaaattc

SEQ ID NO: 6020 - DNA, 633 bp, Canis familiaris
  misc_feature (1)..(633): n = a or c or g or t
atccaattgttgtgcctcatngagatgactttcacacgacctgccaatcacagacaactcacttttgaagaaattgccaaaagtgctaaaatcactgtgaacgaggtggagttgctggtgatgaaggcgctctcagtggggctggtgaaaggcagcattgacgaggtggataagcgagttcacatgacctgggtgcagccccgtgtgctggatctgcagcagatcaaggggatgaaggaccgcctggagttctggtgcaccgacgtgaggagcatggagatgctggtggagcaccaggcccacgacatcctcacctagtgcccctgcctcaccgtctgtggcagctgggaagacctgtgttcctgaggaagtagggggtgggattgtgtttgtggagtggggactgttctccctgctgtgaaatcaggacgtcactcatggggggcccgcctgcagagagaagcctcctttgtgggggtgtcccgtagttctcagtggggaggggtcacgggtctccagtgaggaggaggcgggcaagagtgtgtgtgcgccccgaggaacgaggagtagccctcaagtgtgtggggatgccactcaggctcatctccaccatctacctgtgtcaacatctct

SEQ ID NO: 6021 - DNA, 598 bp, Canis familiaris
  misc_feature (1)..(598): n = a or c or g or t
tgatcgaccagagctnnctggtgccaaagtggtagtatctggtggtcngggtttgaagagtngagagancnnnaagttgttatatgatttggcagatcaactacatgctgcagttggtgcttctcgtgctgctgttgatgctggctttgttcccaatgacatgcaagttggacagacgggaaaaatagtagcaccagagctttacattgctgtaggaatatctggagccatccaacatttagctgggatgaaagacagcaagacaattgtggctattaacaaagacccagaagctccgatttttcaagtggcagatatggaattgtcgcagatttatttaaggtagttcctgaaatgactgagctattgaagaagaaatgagttctcatgttttaagaaggaaaatatgtcaaagtattcaactgaacagaaattcatggttatcatagtgaccgttggaaaccttggagagctacataattcgagaaaaagttctcacagatgccagaatgcttttttatgagcctcttattacatttcttttaattatttgtggttccaagcaattatttttgagattttgctaaaaagtaataat

SEQ ID NO: 6022 - DNA, 647 bp, Canis familiaris
  misc_feature (1)..(647): n = a or c or g or t
ggttgtnnngctgtgcatctngnnacatgtagntccagncccggttgacttgtcattcgctgtgaactggggacatcttgtcatctgatttgactgtggtaggggtggcaataatgtggatgaaggggtagtggaccaagcttcggttcccctgacacctgttggtagcgccaggcttagagcgtacagatcagagccctgtgccatctgggaggctctcatcctgtgggcagtcctgggatccgaggactgccccgtgggatggatgggatcgggcgtgggcaggcagagagcttggaaggggaggcggccagtgtgagagagtgtgtctgtgtgtgtctgtgtgtgtgtgggcaagaacacgcacgcgcgtggtcgggattggtgtgtgatgggtgctccaggcatgttgctgcttgtatggcttctttggcctctgaccctgctgcccattctttttctccaacaccacaagtgagctgcctctcctcctccctgcctggggagccccgtggccggggaggggagtggtggagccagggtggtgctagccctgtgacgttgcatctcagagacctatcaaagccagctgggctgagctcagtccgagagagaaacactggaagtcaataaagnnntttcgnnnn

SEQ ID NO: 6023 - DNA, 647 bp, Canis familiaris
  misc_feature (1)..(647): n = a or c or g or t
tggctgctggcaagaagcatcttgcctgccaagannagctgatgccagacgatctacccgacatgtgaaagcggaaagcatactgtcatctctgccccttggtccccttgcttctctcaacacagtgagacgctgcagaagcaaaatggtggcctctgctccaggcaagacagctggctctgtctggggagttggccctgggcttgggtgccatgtgctgagatggcgtaataaaagcaaccattttttgccaacagnnnnnntggctccccacatttccctatcctgcactctagggccagaccactctctgcatggaccagatcatcttcccaaacccatggtgctttttttcccccccactcaacctagactccaaggtggggagagatgggtcagaggccctagtggcccctgggtaatcctaacaaggggtggagtggggcgaggcagagggagcagcccccaacacctgcactgggccatatatgggaaagaacacaggttgattgcagtggagttgtctggccacgtgtatttggatctataactgtactttgcctggcgctgtgcgcaaggtctgaaaacttaactgctattacctagaaccataaacggcttcccagccaaatcttaatgtaaagtag

SEQ ID NO: 6024 - DNA, 669 bp, Canis familiaris
  misc_feature (1)..(669): n = a or c or g or t
atttttcatcatgnnnnnagtgtatgtgcgatncngnnnnctgtgnagtagtgtatccagtcactnncnagggtannnntagaacccggcaggtgtatgttttcaggaagctgagctcacagagatgtgtattagaattccaagtngaacttttgcttctaaagaccttgcaaggaaagccatgtcctgaaaatggagtgttacacctcatttgatgaagcttacccctttgtagaaagtctcttttgggggcagaggctttctctgggtgttgagctatatatgttagggaacagtagattgttttattttggtttttttccctcccagtgtttttacatttttaaaatagcactgagtggggcattttctttctctaatagagccatcagtgagatctggcttagcctgtgctagcaacagtctgaaattccttcagagaaggcagcccgttggaaaggtttttgactgtatctaatcaacattccttttgttggtgacatttgtgattttcagtaatttaagtttttgatggccttgtaaaaaagactccactatgtgaaggttaattgctgtgctgcaaagatcttgtctattggcccctgtaggaagttaacctttttgttttccttttatgacattttgcttattgcacaactgctttaggga

SEQ ID NO: 6025 - DNA, 536 bp, Canis familiaris
  misc_feature (1)..(536): n = a or c or g or t
gggtattaaactcttcaggcataattaatacaaacagagccaagatgatacacatattaatgatatgtcatgtctgtctctgaaagctcagtgacatggaaatactggaaacccacttaatttgcaggaaaggtgctttgccttgcttctctcagaggttttggactatgggaggcttaagctgcagaaatttcttttgtacttttgttctgcccttattttttgaaaattctaacatatgactgctgtatcagaagaaacatttcaggaaagtttcctattggaaattaacagtcctgaccatcagctgatgactttattaccccattcatctaaagttaataattaaaaatttttatgtttattttagattcaaagtatctggtactgatatgttaaggatgactgaaataactccaaaggagttatgctggagtagttgtagagaaatacatttgagctagtgtactagaaaactacaatacagtggaaatttcatgtacttgcaaacatnnnctttgtaaaattaccttcat

SEQ ID NO: 6026 - DNA, 610 bp, Canis familiaris
  misc_feature (1)..(610): n = a or c or g or t
tgtctgtctctctctgtctcnngtgaataaatnaaatctttaaaaaagaaaaatgcaaatataaaaatttgaaggattgttctgttttccctaggggaggctgctatataactttttaaagaactaaatattaggaaaaggtcgatgcttatgatgtgaattttttattgatcccattatggattatttatcttgacttttttcagctggagtcttctgtgcaattgtttctcatcctgctgattctgtggtatctgtgttgaataaagagaaaggtagcagtgcttctcaagtccttcagagactcggatttaaaggtgtatggaagggactctttgctcgtatcatcatgattggcactctgactgcactacagtggttcatctatgactctgtgaaggtctacttcaggctccctcgcccacctccacctgaaatgccagagtctctgaagaagaagcttgggttaactcagtagattgatcaaagcaaatgtggactgaatctgcttgttgatcagtgttgagaaaagtgcaagaggaacttttatatatttgacagtgtaggaaattgtctattccnnnnntaattactgtagtattcttgccta

SEQ ID NO: 6027 - DNA, 567 bp, Canis familiaris
  misc_feature (1)..(567): n = a or c or g or t
gatgnagaaggctttcctcccccaccctcnnnnggggcttgtggcaaagatcctatggttatcactgggagcccagnncttctccatcggacttgaattcgtcagcttcctcctgctgctaatggacctgctgttcactgggaacccgggctacgggctcaagctgagtgccttcgcggcaatttcctctgtcttgtcagcgtggcctgggtttccttcacctgctgcatggcatcagcagtcaccaccttcaacacatacaccaagctggtgctggagttcaagtgtaagcacagtaagagcttcaaaggaaagctgagcttcccgccgcaccaccaccagtgttcccttcagcatctgtcatgcgcggcccacacggggggtactttgaccagctaccaccagtaccacaatcagcccatccgctctgtctctgaaggagttgacttctactcagagctacaccgcaagggattccaacaaggacttagccggggactaaaggaagaggtggcagggtcatctgtagaggaagaattgtgtnnnnnnnagtcgggtttagagggc

SEQ ID NO: 6028 - DNA, 338 bp, Canis familiaris
  misc_feature (1)..(338): n = a or c or g or t
gannnnnnnnnnngatgacagcagcctgactgaacagagtgtgnnnnnnnnnntnnagtctgccaannaacnnannaaatggtcgnnactgaaatgaaggctgtgcattcagggctccntgcccccagagcatttccccgatcctggcaaaatctcaaagatccagggaacaggagagacccatctgtatccctnngccctcccagaactgactcctgaggtctctggccagggactctgagatgcaaagatttggcttcagtactgactcaccccttctcactgccctggcctgtccctccagccacgagaaccnnnngagctgccttaactcagac

SEQ ID NO: 6029 - DNA, 612 bp, Canis familiaris
  misc_feature (1)..(612): n = a or c or g or t
gtnntgtgtggnnnaccctcgtcgctgtgtgcaggtgncatctgttactattattaagatcatcgactctaacacatnnagtagcgaacctggcccacagnctatttttgtgaataaagttttattggcacagccacatgcccatttgtatccatgtaaggtccagacgctttgctctatggtggcagagccaacaggtttacgagtcgctccctgacagtgggacttcgtcagcctctgtctgggtcgcccagctctacacttcctgcttgttccccacagcctccaggggaaggtggccaacacccgtccacacctcgatttccaggctcacaccgcacctgcgactctgctgcctggggtcaccctgaggacagagaccacctgcccttgcagtgtggcacagggaatgaggtacataggatccgtttagtgagtaatagttaacgtctgtgaagtactccccacttgccaaacctgtgctaagctggttgtgcagattcactcgtttgagtttcccaaatcaagtcgctcactcaaaacatacatatatgtataatttatatataaaatagatattataatatgcatataatttatacataaagttta

SEQ ID NO: 6030 - DNA, 298 bp, Canis familiaris
  misc_feature (1)..(298): n = a or c or g or t
caggannnngccagaaattatgcaagaaaaagtgaggtgtcattanncaggannngngggaggggnnnnncctgctccccctcagccccaaccctnnccncnngcccccccacccatcccaattttagtttcatgcaataaaaaggccgaactttttattccataaaacatgaaggacaaaactcaaaataaaaatatatttcaagtccatgaccagaaaactcccaccccttgccattcccaaaaggaccttttatgtacgnnnnccttttnngttgtttgttttgtttggggtttt

SEQ ID NO: 6031 - DNA, 453 bp, Canis familiaris
  misc_feature (1)..(453): n = a or c or g or t
gaagtgagtccagntcctcccccactcaccaagcgagggaaccagaccctggaaatcctgggaagtctggggagaagtgcatctgctacctattattttgttctcttttttacttttttttttagatggacattccctgctcttacattaatatcagccatcccataaaaatgtctaacatgaacctaagatcaatataatcaattttcagttctaaggtcaaggctaagctcagaaatgaacagaatcaagtgcttagagaatgtctggttctgggacttcttttctttggtggtttgtttgcttgccaccagccctccttttcatttattttgaatagataatgtagtcacatgttccagaaatcagaaaatataaaatgatgttcagcaaaaaaaattcctttcctcctgccccccatcnnntcagttcctctcaannnacacacccaca

SEQ ID NO: 6032 - DNA, 524 bp, Canis familiaris
  misc_feature (1)..(524): n = a or c or g or t
gatcactgtgagaagagtnncaaacagcgttctgacctttttaaacaccagagaatccacacgggagagaaaccctacgaatgccaagaatgcaggaagagctttagtcagagtgccgccctgattaaacaccagaggacacacacaggtgaaaagccctacacctgccccaaatgtggggatagcttcaggcagagctcacacctcaaccggcaccagagaattcacgtgggagagaaacacttcaagtgtaatgagtgtggggaaacctgccgcactgccaaccgtttcagacaccagagaatacatagaggagagagaccctatacatgtgaagaatgtgaaaagagcttcaaacggtgctctgacctctccaaacatcagagagtccacactggtgagaagccgtatgggtgttctgtatgtgggaagcgcttcagtcagagcgcaaccctcattacccaccagaggactcacactggagaaaagccttatannnntcttgaatgtggggaannnnttag

SEQ ID NO: 6033 - DNA, 492 bp, Canis familiaris
  misc_feature (1)..(492): n = a or c or g or t
tgaagcagcnnnnnngggcccannnngagtnntgnnnagccactagccgccacggtcctcctggtcggcaggtctcctcccccaaccacgcggggaccacgtgggtgccgagtcagaggtcccgcggtggcgggggtttggacggcctatgcctttgccagcccgcatcttaaacttgctggggtgaccgagctcaccaggactcagacgatgcagcggccggccggggagcgtggccccgaggtgacacaggctgccgtgaggcccactgcccgccggactgcctctcgctctacatagtcgtggttcacgtgatgctccgagtgtgtggagaactgtcacaaactcggcctctgctcagctgctcggtggccacggctccacgtgggaggacatggggctgggactgcggcatctcggttagccagctgcccgagtgtgtggccgcctcagcccttgtcacggtccctctgcgctcnnnnnntttcccaa

SEQ ID NO: 6034 - DNA, 632 bp, Canis familiaris
  misc_feature (1)..(632): n = a or c or g or t
tcccagaggtgaggtggaacatgccctcctgccttttcccnnnctggctacagtttgctgnnctagatgttcaccctctcttcaaacctaagaatgttccctatttccagcccccagctgcccagagggctccttctgcccaggggcctctgattacctcaacccgatcttctttctctgtgttaggaactggtaagagagccatgtgtcagctcccccacctgctaggctctctgtgtcctggtctttctttcccccaaccacagtgctggtcccgcacctgttccatagctggcctggttccaggtcctcctccaagttggtggcacctccttcccactaagccacttgagcaaacttcagacacctcctccctgacttcagcaattatgccaagggccattaggctcccagcaggactatttttagagatcccgtgtctatcacagagatgtttttccctgtgtgaagatatcctcccatctgcagccaccacccccaccacccccgcccgtccagttgaccacctctctgctctccctgacccagaaggggccttggtccactctgtgctctgcccccattgcttgagcccagtgggagcaggaggacaggtgctggcttgaaggaga

SEQ ID NO: 6035 - DNA, 547 bp, Canis familiaris
  misc_feature (1)..(547): n = a or c or g or t
cctgctnnnactcatccccacacccattcttccataatctctcctataccaacaggactagaagtctgaaaaccacatttctcagatgcctttgtcacttaattccagttaggttccaccagtgggaaccctcacatgaggaaggtgagaagaaggcagacatcctcctgctcttgtcagtgcttctggcaacatcagcagcagtggttcctgcctagcaaaagtggaagtagttccagtagcatcagcaatataaactccaggtgcatcaacagctagtgcagatttgtagattccagctccttgatctttgggcagtaatttttctctgttttgctcctctaaaccaagattggtggtagtttcctggtctctgggtaactgcttttgtttttatgcttctccaggcttcccttacaactttgttgttgttgttgttgttgttgttgtttttaagtaaactctgtgcccaacacgaggcttaacctcacaaccctgacatcaagagttgcattctctaccgactaaaccagccagacactcccct

SEQ ID NO: 6036 - DNA, 428 bp, Canis familiaris
  misc_feature (1)..(428): n = a or c or g or t
ttggcatcatgttatgctgnggnnccagtattagnnaaacttggccctacggtgtttgctcctgttaaaatggatcttgttggaaatattaagaaagtaaatcagaagtatataaccnncaaggaagagttcactaccctccagaagatagtgctgcacgaagtggaggctgatgtagcccaggttaggaactcagctacagaagccctcttgtggctgaagagaggtctcaaatttttgaagggatttttgacagaagtgaaaaatggtgaaaaggatatccagacagccttgattagctcngagggcagctccatcctatgaagattttgtcgccgcattaaccataaaggaaggcgaccaccagaaagcagctttcagtgttggaatgcagagggacctcagcctttacctccctgccatggaaa

SEQ ID NO: 6037 - DNA, 630 bp, Canis familiaris
  misc_feature (1)..(630): n = a or c or g or t
tcncagncttgcntagntgtacagatggncaggggtgccactggtatctgannnagtgcaggttttactagacttctagcttccctcgntctgcccactaattaccagtagcattccagaacatcccntctagcccattttaaaatgtgctagggagatggggggggaggggttcttctgagaaccacagagctagactcctcttctggtcatttggggtctttaaaccctttctgtcctgtccaaatgttgggagttttcacatttgtgcgttgggcttctggtgttaggattgagtcctagaacctagtggttccctacaaacccttccagtctctgcccagagccagcatactggtacttcattcagatccccaagtatccctcatttacctttaaagaatagcgttagactctggctgccccccaaccccagataaaccctgtatttcattctctactcatcagttacgaacttcactgccagtggcctgatgatttaagtttgggagttggggagtgaggcccttactgaaggtctggccttgactctgtagcctaaagtacttaatcagtcggtgggagaagccaggagcaaaccagagatctggtacagaaaggaagggatat

SEQ ID NO: 6038 - DNA, 610 bp, Canis familiaris
  misc_feature (1)..(610): n = a or c or g or t
tnatcagnnagaaaagaaagcacaaaagaatggtgactcatnnngactcttacatgttttggaatgccactacttcanngccatttctgatcgnnttcttttgcatgtaaaactgtatgnctggagtcttttgccatctggatcgtagtacctctctattatgtgcaatttgttcctcaggtgtagaaattcctactgcgattgactacatttgatcctcttgagcctgtgaaagatttctgaacagcgattgctctgtcaataggccctgggaagatgtgccctgctggtagcagcacactagtttacttactaaccttggtagcattactgtgcctagtcacggggaaagaaatggggctacgtatatcatctaaaccatttctaatgaggtacattccagatggaatcaataacatttttttttcaggtccccacacttgatgtcacagtgttactgttaagtgacatttttgtctctagtaacaccaccaaccctctcccttctagatttgagctgtgctggggtttgaactcaaaagccataatgtgggatattgacatgtgtaagaagcactttcagaatgtcctttttcagacaaaaattctc

SEQ ID NO: 6039 - DNA, 665 bp, Canis familiaris
  misc_feature (1)..(665): n = a or c or g or t
catccaggaagcaaagatcaactaaaagaggtatgggaagagactgatggattggatcctaatgactttgaccccaagacatttttcaaattacatgatgtcaataacgatggcttcctggatgaacaggaattagaagccctgtttactaaagagttngaaaaagtatatgaccccaaaaatgaggaggatgatatggtagaaatggaggaagaacggcttagaatgagggaacatgtaatgaatgaggttgatgctaacaaagaccgattagtgactctagatgagtttttgaaagctacagaaaaaaaggaattcttggagccggatagctgggagacaatggatcagcaacagttcttcacagaggaagaactgaaagaatatgaaaatcttatctctttacaagaaaatgaacttaagaaaaaggcagatgaacttcagaaacaaaaggaagagctacagcgtcagcatgaccaacttgaggctcagaagcaagagtatcatcaggttgtacagcagatggaacaaaaaaaattagaacaagaaattcctccatcagggcctggtggaaaattgaagtttgagccactcatttaaagtccgaagaccaccagaacttggaagaaaactgttaaatcagcatctgtgtcatctttttacca

SEQ ID NO: 6040 - DNA, 173 bp, Canis familiaris
ccccctccccccaccgcctccccctccatttcactgtcgtggatggatagcagaggacaccatgcgggcttgaggccgtcctatgtgagtccatgatcacttctgttggggttttgttgtttttgtaactgtcctaaaccagcaggtgtttggaaattagggggaaaattaaa

SEQ ID NO: 6041 - DNA, 205 bp, Canis familiaris
  misc_feature (1)..(205): n = a or c or g or t
gcacccgaannagcctatcnnccctctcctgctcttcntgnnnnanggatggggtggctggatcatnnnnncanntagtgtccattttcatcatccgggtctgtaggcatgccggngagnnagaggagaacttggcagnnnnacccacacagcagcacattagtggagttttaaatgaactgggtngggggtggggggtggtcgt

SEQ ID NO: 6042 - DNA, 643 bp, Canis familiaris
  misc_feature (1)..(643): n = a or c or g or t
aatgagagaaatgagaacttagaggattgttttgangcattgtaggtattaatgtgtttatcagagatagtaaatattacagtttcaattatgcatctctttgaacatcataaacacaccttggtgttggtaagtgttttaagcatttgtgttaacttttaaggactatttgtttatttagtgcatcttacaaactacaactcttaattggtatattttgaaatggtcatgtaaatttttggcttatatatcatgaaaataatcataacttaatatttttttcctgatattcactgtaaaacattcaggggtcctaccatttctgttcaggaaatcttgtagtttattgttatttaacagtattaagtgaatttttgtatatttcattttaactttatttgtgaatagtgattgtggcatgtttgggtgttattttaatatttcatgatacagaaattttaatttttaaaaaaattttctggaagaaacagattcatgtgtaatggtgaatattggaccactactgcttttcacatttgtaaattggttttctgttaaaccctgtagcctaacaaactgctgttatttctaactgacagacatgtattaatattgtactttgaaggctataaatattatgtgg

SEQ ID NO: 6043 - DNA, 583 bp, Canis familiaris
  misc_feature (1)..(583): n = a or c or g or t
cctcatcaacatgatcagcagcgggtcttccctnnncctggccagctttgtcctngtcttctttgtggcttctatgggagttcgatggatgattggcgtgacagaaatcgacaaaggctctgcctacggcaacatcgacagcaagcagaaacggagcgactgacccgacacattagcgcccagaggagaccttggggactggtggacgctgcctgtcatccttagtgggacccagggacaagcggggtgagcccctgctgggaaggcagggagtttggtctcaatgccagatggggaggaagatgttcttaaatctttttttccccataatgctttagtgggttttgattttcttttcgtgtgagtgtgtgtgagtgtgtatgtgtgtgtcagggaaagaatacctatgtgagaataacgtgcagttgagtgccagccttattttgtgatcattcagaggggatctgaggcacagggggagggcagggacggggaacagaggattccccttcattctttggtgctgagtcttctgtactggattgcaagagattgaaaggcgcttaggtaagatgactaaatt

SEQ ID NO: 6044 - DNA, 512 bp, Canis familiaris
  misc_feature (1)..(512): n = a or c or g or t
atattggcanctgtgaagtccacttggtaattcacaatgtagcacatatgctgctcatgnnagagagggtgctgggatgaatgcccacttttgggaagcttcattattctggctaaggaaatgctcactattttgtatctgtgtgcattctaaatgttcaagtaggggggtagaggccctggctgctgtttggttatggctctatctctgtttactgtccaaagggatggcaatattctctttgaagaacaaatatcaggggtatcaagatgtgtgatgtatcttggttcctgctccctcctccaagtagttgttttactattgaaaaaaccccagtgaatcatggcccctcaattagtgctcttagaaacaaacgacaagggcgcatgggtggcgcaggtggttgagtgtcctgagctcaaaagctcagggtcgttggatggagccctgcatcaggctctgtgctcagtagggagtcagcttggggttctctctccttctccccctgcccc

SEQ ID NO: 6045 - DNA, 578 bp, Canis familiaris
  misc_feature (1)..(578): n = a or c or g or t
catgctgaagttccataaatacaccatcnnnnacgnntngaccaccgactacgggtgctcggacagcaaacaacactttgaatggcttatcaagtactcgccgctgcacaacgtgaggctcccnnnnnnnnacgacacccagtacccgtccatgctgctcctgaccgccgaccacgacgaccgcgtggtcccgctgcactcgctcaagttcatcgccacccttcagtacgtggtgggccgcagccggaagcagagcaacccgctgctcatccacgtggacaccaaggccggccacggggccgggaagcccacggccaaggtgatagaggaggtctccgacatgttcgcgttcatagcgcgctgcctggacatcgactggatccagtgagcggcccccgcgggcccggcccggccgccgccgggaccctcaagggctttcacaccggtcacggtcacggtcacgcggagaagccaccgggcctcccgccccgcccacggacgccgggtccctgcgctccacaccgccggcccacggaaccgccgcgggagttttatcttttttaggcttctccttttta

SEQ ID NO: 6046 - DNA, 600 bp, Canis familiaris
cgaccacgaggtgtgcaaggagggtgatgtgctgaccccagagcaggcccgcgtgctgaagcttttcgggtatgagatggctgaattcaaagttaccatcagatacatgtgggatgcacagtctggaaggttccagcagatgggagaggacttgcccgagagtgcctcggagtctgcggaggaagaatccgaaggggaggacgatggctgacaggccctggaccaggactgaggggcgccacccactgggcaaacagcagggagggcgagggacggactgcttttctgtaaggaataaagctgtctgcagggtggctcccgtggacagcaaagagagaacttttcctaggaaaaaggcctcagctttgggcttttgttttgattctggattccttttgtttaccacgagccagcttccagcactggctcctgcttgacgtgacggctgggaacgtgagagctgccaccagagccggggcttctcttctggcccttgtgcccctgctcgaaacgggggtttgccaagggatggaggaaccctggtcacccttcctacccctttctttctcttcctccacccgcacctctgtccccacccag

SEQ ID NO: 6047 - DNA, 561 bp, Canis familiaris
  misc_feature (1)..(561): n = a or c or g or t
cgtcnagtggctcttcngaacgtttcggacccagaagaggtgactctcagnnnnnngctctnnncagccaattaaggtggctctgagccccctgtcctgctgtgccctgagccttcctaggtnnaggagaagaacagcnnnnactccgaccccaccactcagtgtttgcctgtgcaccgctcccttacttgggggccatttaagagcccatccttccccacgacttcacacggacgccttctcccctcccgcccaaacaccggtggagtggtgcacgcccccgggcctgggttggccgtgactcgggggcggggctgcctggtcagcctctgccctccccagccactgggtcacctgactcttctcccaccccggcctctcccggtggaggcccagctcttgggcaagttgggacttgggctggggcctgggaaaatgattggctgggaggctgcgggagggaggccaggaggcccggccgagttggggggaggggagcgagctccgtttcgctggcctccctccccctgcacacgtacactcaggannncttcacggaag

SEQ ID NO: 6048 - DNA, 489 bp, Canis familiaris
  misc_feature (1)..(489): n = a or c or g or t
cncctctccaaccctcaccacttaccactatttgacgttatgcacttgttaactggaatatcctcaagctcccccactggaacatcaaccctcagaggacagaagcctgccttgatctgtgttctattctcaaggcttcgtgcagtgccccgtacacaatcggtactccgtaagtacttcttttaatatgttcaaatgcaagacattctaccgtctctcagtaattccaagaggaaatgtcacagttcacgcaggaatggcatcaaacagctttataagcggcccaataattccttcactcggctccacaggagggtactctacacctttctctaaaaccaagacaaactgagcaacacccattggaaacccaaacttctaaaaaacgagtccataccagctttaaggaggaacgtaattcaaaacatgaaaatttattctaagttgtatcttaacatacgagatctcagctttagatgaattttaatg

SEQ ID NO: 6049 - DNA, 633 bp, Canis familiaris
  misc_feature (1)..(633): n = a or c or g or t
tgttaaatnngttaaggaatgttcacnnggtatatatgatnnatatgtcgattcaaatccatattgcccggagaagatattcattctgcattgttaaatgagaaaggtaggttagatagcagtgttcatagaatgattctatttctttttcaaagatagtaaaacatatattgaagtagacattaacaactgtggaattaaaaaaaaaaaactgtggaattataaatatccaaacagtaactggtatatttgagtggaaggataatgaatgatctttaccattttactttttattcatttatgtattctcatttatatgaaatgaatattgtttttttggaaatttttgtaaaagaaagtgttgggaatgaagcaggtgattggagcatgtactgagtagaaaacaatttagattaaaaatgagataggttgaagcttcctctctgaaatgatagacgagtgatgaagatggggcttgtcatgaagattaagttaaataatacatgcaaaatacttagaatgtcctggcacagagcagttaattaagaaaaatgagcacccttaactccctagaatgtagggttgatggttttnnntggttgacctttgttnnnctgggggcattctgccgtg

SEQ ID NO: 6050 - DNA, 572 bp, Canis familiaris
  misc_feature (1)..(572): n = a or c or g or t
gnnaacaattannaacaggaaagagcatgtgaaagcaaacacaaatgcatgagcaagattgannnagcattannnnnaatcataagggtttagnnnnngaatagaatttcatgacgcctcggagttaccaccacatcagaaaaaaaaagtaaagtaggcagagctaggtttattttcttttcaaccatttttaaaactttagaatgtaaaaattgggtaaatttactactgaggggagtgcacttatttatttttaaactttcttatcnggtcacagccccannaaacctaccaaagcnagaattnacgacaactggtgggaaaactagcatttcctctcctgaagaacaaatgtataaattttatttttgatgttatatataaattctatatcctaatttactaacactcatcaggtgtcagcctttgctctccattttgacggtaaaaaacaagacaaaacagaacggatctagagatacctcaaggatatcatttctgattttgtgttatagtacaattntagccaaaactggaaaacaaaaccaatatacaaattggccgctgattgg

SEQ ID NO: 6051 - DNA, 288 bp, Canis familiaris
  misc_feature (1)..(288): n = a or c or g or t
tttggctttnnnccagaagaacctgggaaccccaggaatatnnnnngcttggtgctttggtgattcaattttaantttggacatttttttttnnnnnannnnaaatccattttgaaatcttaagctctttgnnnntgctntnnagnnnattagggnnnnnncaacccttaggaaatctaaacatcagcctggaagagtggaaagatcttaggctttgttaaagagtcagatggtctgagttnnnatgttgtgtgatttgagcnnnnnnnttaacctccttgagcctgt

SEQ ID NO: 6052 - DNA, 651 bp, Canis familiaris
  misc_feature (1)..(651): n = a or c or g or t
tnntccttttccctttttataattctactaatcgannnanntatcaaaaaactgctacaatannctaaaataacntatgtnnataaagtttatnctctngatgagagaatatactaaataaagaatttttaatgaacttcggctnnaaaaagggttaatccttcaaagggagaagacaggagaactttaacctgtatgtggccctttgtttgaaagtaaactgattaggaagaaatgtttcatgttcctgttaaggtgctggagtactgaaatgccttcatgtgactgataagcattttgcagtattggaaccatactaattaagagaaactaatacaaagatacatgacctcaggttgttactgacatgaacatttagggaactaccactctaatgttctgaggtttgtctttgccagggcaatttagcatgtattgtcagttcttgttttataaacctagtttaaccattaagtcaatagatcacaacagcttagtatttaatctctatgaggaagtttctctgactttaaatctgatctgagcattctctatttcccatgttattttctgttcttaacattggtagggttgggttgccagtttattgttagcaactgagttttgctttttgtaaacatcagtgcttaa

SEQ ID NO: 6053 - DNA, 620 bp, Canis familiaris
  misc_feature (1)..(620): n = a or c or g or t
actagatctccatcagctgaggantagataaacaaatnntgnnnnnnnnatacnncagaatatnnnnnnntaaaaagaaataaagtaagtacagatacatactacaacatgatgnnnnnncaaaatgtnaggctaaatgaaagnngnnaatcacaaaaggccattttatngacattcgtgtgaaataaaataggcaaggctatagacacagaaggcacatcagaggatgcctaaggctggagtaattagggctgaggggatggggagggactgctcatggggacagggtctcttttggggttgataataatgttctaatattattgtggtgatggttacataactgtgaatctaaaaaccattgagtttgattttaaatgggtgagttgtatagtatgtgaattataactcaaaattgtcaataaataagtaaataaacaaatgggctcaacttgtccttcaatgtgatgtaaatgacctattttcacagtattttcacctgtgaacccaaacaaaatgatcagaagttctgatagagaaatcttgttctattatcaaaaacaaaaactctagagtgttccttgaattgtagtttaatttagaataatttttaaattgta

SEQ ID NO: 6054 - DNA, 526 bp, Canis familiaris
  misc_feature (1)..(526): n = a or c or g or t
tgaagccaagtccacagaatggcgccacgttcccttccnnnnnannatatggccaagggtcactaatagccgatgaagagtcccaggagtttgatgacttgatatttgcattaaaaactggtgctggtctcagtgtgagtgacaatgaatctggtcaaggcagccaggagggaggcaccttgactgactctcagattgtagaactcaggaggatacccattgctgacacccacctctagtgcttcagtaacaattagaatgatgctttcctgtttgtaatggctttgtgctaaactctgtaacttttttttttaaactctgtaacttttatacacacagctatataataggaacctgtgaattgtactggacgattaaccccaaggtgattgttttttttttggaatatgaactacttacctgtgtgcaacctgaaaattcactactatgatgaaagatgggatcagtttatatcaattaatagttcacacatattccaagaatattcattgttttttaatcatct

SEQ ID NO: 6055 - DNA, 675 bp, Canis familiaris
  misc_feature (1)..(675): n = a or c or g or t
gnnaaaaaattcctcactcagggcaggcntcgaaggcagcaactgagatgtttcctctgagggcaaggttccagaggagtgttcgtggtttggggctgtgctgtaagaaagccctcccaatttcctggctagaaagctcccacatttccagttcttaagagagtacatccagcccatccattggcaaagccagcggggaccaagcagggctccaggtggcagtgtggccccagcccaggagtcatttccacagatgactggggccagttaggcccttgcctgttggtctgcagggtccctgaggaaagggtgcatgtccgtgccgctgctgttcctgctcacctggccctgctgccctgcttgggtcctcttccaacacctctgcgcaaacagcccaagaattatcattagttaccaagaattacccagaatggttctgtttctacgtgtactcatgcacgcacatccacaccccacgtctccctctgaaattggtgagaaaattgagagccggctctgcagggtcttcacaggcccctgctgcagtgtcatggcagtcttgcaggttaccttggcaacgtgtacattacttttttttttggcattgtacagtcagtactataaatttgttgttttgagttttgtaacttgtagcattttaggtgccgttgtgtt

SEQ ID NO: 6056 - DNA, 534 bp, Canis familiaris
  misc_feature (1)..(534): n = a or c or g or t
tcgaggagttgaagaacgagaacnnnnngctnnncgcccagctgcagcagcacaacctggagatggtgggcgagagtgcgaggcagtgacgcccagcccgcggcgcgagggggcttctccggcccctgctgccccttccccagcccttagcacagagagggacagacgcccctcccccagctgcgtttttttatagtagatttttaacaaaacggggagaaataatgcatttctgtggataagctcccaccgctctcctcaacttgagaagcgatctcctccctcccctgtctgtctcccttctctcggcccccactaaagccccagcacttctagtggtctcgcctggaggcaagagggaggaggacacaggccctgccctatcccgctgcctccttggtctctagaggtactgagacagggtgctctcgggaaggaggggagcctttaggggggccaccctggggcctggacctgagcagggaggccatgtcccaccccacctcttgtttctggatccctgctcccctttga

SEQ ID NO: 6057 - DNA, 210 bp, Canis familiaris
  misc_feature (1)..(210): n = a or c or g or t
agcagtttggngactcctgngggtctggcgtngccggnnnnnggctgnngnnntgagnnncagcattgccatcnnnnnaggctgnangntgctttcccannnnnttctcttcccccnnannctggtcagatgctcccccaacctcaggcctgcagaccntggccggntaacaggatggcccgttaacccctgccaggcnntcatcttcac

SEQ ID NO: 6058 - DNA, 670 bp, Canis familiaris
  misc_feature (1)..(670): n = a or c or g or t
agggggactagcgagagtnnnagatccatactgtgaatcctgcgcagtgcctcatcaaggctgtaatccactgtggctcccggnnagtcgctcttcatctgacccacttgaggctgcctcgaggcccaggcacctgtctaaggatcacagtcacagttgggggggacctggtttcccctgacttccgtggcctctctcctctggccactaccccttctgtgctctgagccaaagccttcgtcttttctcatccctcacgttatctgtggttggcctgttgttgggaagactctccgtcgtcccatcagtgtggggccccagttgttagcaagtgacatcaccgtgtcagtcctcaaggactagtgctgctcagtctttatcaaacccactattctaatcttcaaggagagaagagaggtgttgcctctcagccctggagaaagttgccctcacacccagaatggaccaaatagctctttaccacccaagggaagaaaaaagacaataaaacttgactatatttgtttaaagggaaagtttatatcctgcttttcaggccatagtccatttaattctcataaaatctctaacccacccccacacgggaaactgatcacattcatcatttttgagacctccccataggaagagcacttgtgatttatgtttt

SEQ ID NO: 6059 - DNA, 189 bp, Canis familiaris
  misc_feature (1)..(189): n = a or c or g or t
agggggccccagatgaggcannngcaaaagggaaatgcatctctacacagtagatccaaggtcantgccnnnnnngcnnnctgggaccatgtctcccatctctcaacagctattctttctaagacatgaaacatcagatccactgagtctgtggaccttgggaattcaccttataaattccggggagat

SEQ ID NO: 6060 - DNA, 616 bp, Canis familiaris
  misc_feature (1)..(616): n = a or c or g or t
gctcttcatgtgcccacctacttccctgcccacctannagnnccttttcctctgttctagctgactctccgtgttcctaagttcttaagtatggcagtttatgttctaatttcagaaccattngcaggttgcatagtgtgggagaatcaaaagagggcctaggcctgcttctattaggtccctgcagcaacggggctgctgccggagtatctctgggcccttccagtctgcatggtggagaactctgggccaaaggtgcttggggggagagggaggaaaccagctgcagtgaaagttaacaccagacggtgcccctcgtcagtgtccttttaaaaaaaaacatatactgtagttcagtaagatagcaactgtataaaattgctaaaatagattttagaatcatacagtgtgtctcttggttcatcttcaaaatcagactgatctttgaaactagcagtttttaatcaaagctggctttataggaggagtataatgtatgcactactgttttaaaacaattagtgtgtgtgtgtttttgtatgattgagcccattcatcgtaagtctaaacttgttagcgttaatgtacccatgtagactagcaaagtagtatgtag

SEQ ID NO: 6061 - DNA, 640 bp, Canis familiaris
  misc_feature (1)..(640): n = a or c or g or t
gtggccctgaacagcnngcagccgnncggcatgcgaggcannnngnnngnnnacttccagtgcttccagcaggcgcgcgccgcggggctggccggcaccttccgggccttcctgtcgtcgcggctgcaggacctctacagcatcgtgcgccgcgccgaccgcaccggggtgcccgtcgtcaacctcagggacgaggtgctcttccccagctgggaggccttattctcgggctccgagggccagctgaagcccggggcccgcatcttctctttcgacggcagagatgtcctgcagcaccccgcctggccccggaagagcgtgtggcacggctccgaccccagcgggcgccgcctgaccgacagctactgcgagacgtggcggacggaggccccggcggccaccgggcaggcgtcgtcgctgctggcgggcaggctgctggagcaggaggccgcgagctgccgccacgccttcgtggtgctctgcatcgagaacagcgtcatgacctccttctccaagtagggccgcgcggcccacggacaggcgggggagggggcgcccgcaggagcatccgccgccccgggggggcctggccgggacgcttgcctgcaccgtcacgtttaatgtaatcctcgagaaataa

SEQ ID NO: 6062 - DNA, 632 bp, Canis familiaris
  misc_feature (1)..(632): n = a or c or g or t
cccacccccannngataagttccaannnnagctgacactggannannnagaggannannaggtgtctactgccccaggtgcattcgaagtacagggattgtccatggctcaggatccgtccccagccgaggacctgttggaggctgatggccaggatatgcccatggaggtgaaggtagaggaaccgtgcttcacacagcaagcagactcagcagatagtgtggctgcaggcaaggacaaggccaggtccccagatgcatccgtggatgctgtgggctgtggtggccccctggccctgtctgtcaagagcccccctctgcctgctttgaggaccctgccccctccagaggaagccccgggcctcccgggcctcccctccatggcggccgaggtgggggcccaaaaagagcaggctgccaagagggcgtgcagtgcgtgcacgggaacatctggcgaggaccccccgacccccccagctcctggcgggtggggatcagccggaggtcctacctgagtcccaggccctactccctgttgctctccctgcctccctccaccaccaccatcaccccccgaccacctccgccactgcctcaaagnnnnnngggcctcccaagaaaaaagaannnnnn

SEQ ID NO: 6063 - DNA, 615 bp, Canis familiaris
  misc_feature (1)..(615): n = a or c or g or t
ctgagcgcaccaacggtcccgctttcagccccgtctgcacaagacacccagcactgaaagtcctgctgcacgaacaagggatcctttgaaagcacccacccttttgtgccttgtcggggacaccagtgacgcagagcgcgtgtggatgtttaggagtcggcatcggggagcgggaggggagggccagtggactttttgtaaagctttcgactcaataaaatgaacctagatggaaaatacttgaaattgaactcactccttctgcttcccttcccttctttcttctgtcccaggaaatagacccacttttgaagagatttgtctaggaaaaattgtgttctattcctaatttaatgtgttctttctcgactgagtttttaatttattgttgttgaggttttgccggatggctttcgcatccactttagactgaaccgtggaggtgacttggggccttcgccgccctgcctgggtggagggcgcgggtctcgggtcatccccgggttcccacattgtctctttcttatcatgagcctgtggagatctgtgcttttgtacttctgggcttccgggggcggtatttaactttctnnnnnntgatgattgttgggtttt

SEQ ID NO: 6064 - DNA, 544 bp, Canis familiaris
  misc_feature (1)..(544): n = a or c or g or t
cagcctcacatggcctccccaggtatcggcggtnnttgtcacccagcaagggggctgctgcacctggacccaggtggctgcctcttcacctccagccccagggccctcagaaggaactgtcgcgggtgggctgagctctggcaaggcggctgggggcggctggcaggagggggcctacccccggcctggcacagagagggcaggtccgctctctgcagtgtccacttccgtccctcaagatggttccgggccatgcgtgggggccatgcatgcttcacccacctggggccaggtggcaccaggtgtgcagggtacacggccaagccaaagtgcagctgccccccacctcccaccacccacccagcccactcctatgtccatttcccccgacaccgtggagacagaagcattcttttctgtgctgtgtcacagctggtcaggagaggagaggagggccagggctgtgggggcagctcccctcacccatcacaggaacagatctgatttatttattttggttaaaaaaaaaaagaacaaaaacaac

SEQ ID NO: 6065 - DNA, 535 bp, Canis familiaris
  misc_feature (1)..(535): n = a or c or g or t
gattatgctctgcaaaagaagannngnacnacatcaatgataagtttgaggaaagaaaaaaagaatacagaaaatgttgagggttgtgttaggtggatnnnnccacaggttgttttcatagttttcaaattatnnaattacttaaaatcaatactaaattaattttaaaatgttgacagcttctaaagctgggaaagggtacgtgggggcttataacactattttaaatttccatgatacaaacctcaaaaaaataaattgaatacattgtaccagaaagtggcaaatctttaatcaacaaagttgttgtggtacactattatcatatattttatttactcatatatttaaaaatgagatatactctgatatgtcacatttaacaagttgctgagtgtgaactaactcatctatgacattaattcataagcccattaacattgtgattatacatattagatttttaaaacttgataaaatatcatggaataatatatctgttaaatatatttttattgaaatgaggaataagatt

SEQ ID NO: 6066 - DNA, 684 bp, Canis familiaris
  misc_feature (1)..(684): n = a or c or g or t
tatgataccatacactgagtagtctgntacctttcnncaaaagatataatttcaaatcaggtttnatagtctattgaaaaaactgatagcatgacttcctttgaggataatcattgagctcacatgtatttgatctgctcagaagtggtaactggagtggagttccacagttcttacgtatttcaggcttctgatttatcctagcttggcttcacaatctgcctgtctgatcttctgtattttctacaaggagcagaagtcaagacattatccacttgcatgagcatcattattaaaaattagtgttgcttatgcatttaagggaatttgagattgttttcccgatgcagcattttaaagggaacagattcatttgcatcacaactcttgtgttgcttttttggtaagaacccatgcagaagagggaattagctgtttacatggtgccaaatttaggtggggcaaagtgtgatctttattgagtggtgtgtgcttgataaataaggtgcatttaaccttgaagtcttttgaaatcaaatgcaattaaaaatatcagacattgttttactgagctgtgaaacaggctgcaaacaaagccatttggcagcagaatgaccaaaagctgaaataaaatttcttattctgtgatgcttgtggcatcctttttgctaatgagtaaagctc

SEQ ID NO: 6067 - DNA, 540 bp, Canis familiaris
  misc_feature (1)..(540): n = a or c or g or t
tattttatgattctggtttcactttttattcgnngcctcatttttggttggaaatggcgaacagacaagcaagtggcataaaggtccccatgtaggaaattcacagacaatccctgaacaatccctaattacatttcattctttcctcgagggaaagaaaacagaaactgcaaaattaaaatcaactttttttgagtcaaatgaaaatcatttaaaattatttactttataacaacaccacaaattgaagagatttgcttaaaagttgtttacatatgtctcactctttttgctgaaccggtttagagtgtttaatgtgtttttttcctcccaagtttcttctgtgttcctagtttcagctcctgcctgtagccagagatcacaggtcttgtctgaaacttttttctttctgtaagtgtgtggtttttttagcagttgactcctctctccttcaaatggtaggaagttctacttctgtcattcagaacattttatgtaaaacagtnnnnnnagaaatccttgtgcatactgtatacttga

SEQ ID NO: 6068 - DNA, 519 bp, Canis familiaris
  misc_feature (1)..(519): n = a or c or g or t
gnattacaaganttgcaggtgactgacatccttccccagatgatcacgctctcggaggcntatattcagatttgnnnnnnncgagataatgatgnnnnnaaccagcagggggcttgannnnnaagtttagggctttgctcccagtgcctttggctgaagatgtaataataccaaggctgtagctgaacatannctgattggcacattcctnnngccagctgttttgtngatttgggttcacaccaggacatcagaggggctcacctgcctgggatgnnnntgcactgtccccnnnnnnnnctttgatcagttgattatagactgatgcccccttctccntcgtatctagctcccctctagttttagcaggccagaactcttttacatgtgtgtgtaatttttttctgggcatctnnaaatatccaaaggacaagataatgtcttctgcacatcacagcctcaggattctaggaatccannnnnattcttctgccatnnnnnatattttttggtgtggct

SEQ ID NO: 6069 - DNA, 678 bp, Canis familiaris
  misc_feature (1)..(678): n = a or c or g or t
gcgatnaaatcaaatngtgctggttttgatccacnnaatctaaaaattgtacttgctgacacggtggctgcttcgggtgtgggtcagnngcgnntctagttccagtgatgagtactaacccagatggtttcctgagcggtggtcttgccaccgtcctggctggttttcaatggcgaggattccgtaccagcaagcacgcaggtccggtcatgcagccaagccacggcacggcttcaggtgggcctgacgcataccccgaagggaaggcaaagttctgggaccagcatttgctgaaaaccagcttaagatgagaaattggagataattttttttttttaatgacagaagaaaaaaatcatctcattcgttgttcacaatgggagcaagcatgatatccagaagcatcaactgtccctagtcgtgaatgtcagaagcccttttcccgttttttgcattccagtttgagtagttggtattgaaatttgattcctatcttgtgtatggttcggtgtgtaaaaggaaaaatccgtgtttttacttttgggatgtgcaggacaaacgggcatgatgttggtttgttgtaagattgtattctgtatatatgtttccatgtaaataaatgaaaatctatatcagagttatattttaatttttattctaaatgaaaagaaacccttt

SEQ ID NO: 6070 - DNA, 528 bp, Canis familiaris
  misc_feature (1)..(528): n = a or c or g or t
gggcttgctgcactcgcagnntctgcccttgcggagcggtcccgggccggggtgggcgaggatgccggcccttcacatcgaagatctgccagaaaaggaaaagctgaagatggaagttgagcaacttcgcaaagaagtgaagttgcagaggcagcaggtgtctaaatgttccgaagaaataaagaactacattgaagaacgttctggagaggatcctctggtgaaaggaattccagaagacaagaatccttttaaagagaaaggcagctgcattatttcataaataactctggagagaaatttcatcctcagtagaagaactagtttgttttggttttctgaaataaaatcgaaattcctttcagagaaggaaaacaaaatttaaagactttcttaaacacttatattgtatggttatgtttaaaagnnnnnntgcttctcatctttgctcactacgcaccctttttaagagagcagaaagtatcaaatgtacaattatggaaataaggacattacttgtgcatgact

SEQ ID NO: 6071 - DNA, 440 bp, Canis familiaris
  misc_feature (1)..(440): n = a or c or g or t
agcggctccgggtggcccctcccagacagcagtgcagcnctcctggcctcagctcctctacacgtaccagttgctgcactctttnnagctcgnnttggctcgggnngtgagagacttgctgntactctcccaagcnnnaaacccagccccacccgtggggcactccacatttggctcccagccctgatggagcgacttctcagccccattccttcaccacccttcaggacctgggggctggagtctgggctggcaggacagtctgcatccagctcatttgccttaaacaaggcaaggctccaccggcttcccaccccaacccctactcaataacttaagacacctccagtccctgccagatatttatttcttggatatttatttattggttagggaaacgatggtttatttattgtttcagagcctgctagttgtcctcg

SEQ ID NO: 6072 - DNA, 522 bp, Canis familiaris
  misc_feature (1)..(522): n = a or c or g or t
agcgggttcccatgagcatcgtgcagcgtggacaagttgaggcggtaccaacgcagatgctcgtaggtgtagttgtctgccnggcagctcaggcgcacctcttggccctctaggggctcctccgatggttcggatnctatgctgaagccatcggggatgtctgcggagcgaggaggagcctctgtgacgggcacccggagctggctcacccacctgcccacgctggtgcttgctctcgcttttccaactgcttttgaactcactctgccctcagccaagacttgtaccacctaagtctggactggggactttctgggtactcttttccccagcactgaccaacggggccctccctgaagtcagccccactgacttctcctgcctcaccttcttctagctctctaccgtctgagccccaacctggctgctgcccctacactcccgggagcccaggtcatccgtgtggttcttgtcagcacacttggtgcggtcccgttgcatcctgccttgctgctgaccacg

SEQ ID NO: 6073 - DNA, 677 bp, Canis familiaris
  misc_feature (1)..(677): n = a or c or g or t
annattcaggtaagaattgatatataaaaatgtacatatttttactttatattttgatgncaactgattatactgaagtaatagcaccggctggtagttattgaacacagaataataaaggatatcctactgataggtactgaatccttctattgttcgtttgaaaacgcccttacttaaaagctcgatatatgtcaagttactgatttcatcaggactacttggtaggggacaagttacaccaaaaaaggtaattttatttaaccaagtcacnnntgaagaaaagacttattctgctgtatgagtatagtatatgcagaagccatcaaaaaaaagggggaaatttaaactgcaataataagctaaagtatgtaaaatactacattctattatattcggtcttagaattttttgtagaagaggatgaacttcagccaaatctttgctaaagactggttgtaaagactgaagagtgttggtaaatgctttgtgtgtttttatgtaaaatattttctaaacaaatttgttaaagtacatgttctctgtagtaaacatataaatatatatatatatgaatcatttgaccctaaagttcagaaatctacacttgtgaatagagaaatcctaaatatccatgcagtaaaaattatgcagtctgttaagaaaactgagtaatt

SEQ ID NO: 6074 - DNA, 552 bp, Canis familiaris
  misc_feature (1)..(552): n = a or c or g or t
ggtgtcgcagctgacagctggnctggcatcacagacgagagcangaaaggtggnnnntgtgccctgtgcagacggtgacctctcccccannaaccacctgtcgggggcggnnagcactaagccccaccctgacctcggtggggcttggggtgtggacagcagctccgaggaacagagcagggggcagtgaggggccaaggcaggaagggtggaggtgaccaagtggcggggagggggtgaggttccggctctgccggcagaaccacgggctccacatgtactgcacagcctggcaacgtgggtggactcatagctctagcctgggtgagacgcctgtggaaattctttaggtggatggcaccagttggcccacttagaggctcatggggcacttgcacaccatctagaacatgcacagctgcctgctgcattgttcctagttaggaaggcagagtgtcgccatgtttgcacgtttcagctcatgccggaaaagccgtcctcagggtctccataagaacggccctgagtccgctttcccccagggcaggacgg

SEQ ID NO: 6075 - DNA, 648 bp, Canis familiaris
  misc_feature (1)..(648): n = a or c or g or t
tgtcatngaatcaccaccctcaatggtccattctgaagcacaaacactgatgtcaagactagaattgaactgagaagcctgaaaaatcagagctgattctggtgagaaaccagagaacactttactgaaaccccacagaaaatagctaagcactgggatgatgagccaactggaatcccaagcaggtatgaactggttcagggacggggcccagctgcccaagcatacagaagcagagccagtagcgaaccagatctctgttgagaaacggtgcttaccctacttcacaaagccatgtcgtggagagaaagcagcaaaaagttccacagaaaacaagactactggcctcctgtctttactgctaaacagagatttgctattttgagaagcagatttatcaaaaacaaaacaaaaacaccctcagccaactgaagaactgtctcggttctgtgcccagactttaccaaaggaagaaggtcaaacgtgtaaacacacagattaagagaaggtggagcagcaccttcagagccctgcagtagggcttcctgcagaaagctgtgtatactgctaagaacagctctgacgatccaggacagcgctaatttcacacattggatctcactgtcatttataccttctggcagatga

SEQ ID NO: 6076 - DNA, 588 bp, Canis familiaris
  misc_feature (1)..(588): n = a or c or g or t
cattantgtatnngaggttcccagaagaaaggaatgttccttgnntcctggctacnntacaggtgtctccagccagagcattggaggccagcnngctagctggtggccctggtgncttatttccccagggcacaacctgctcacctgctctgttgaggtctggtacatttcaatttcagcctgattaattggcacacagggtgggcacccagccctctgccacacgggcccccaaagcactacaggccaagtggggagaccccacagcccatgacatgaaagcaccttgaaatttgcaccctttttcttaaggtatttttaaatgcagtgtttttatctaataatttaagcatatgcaacactttggttttaacggatgctttgttctcttggaatggtgtttctcttaagacttttccgattcctttcccttttaaagtggacttttgctgtttgcccacctggagagggggcagccagccccatctgatttctctaagtggatgtgtcacctctgaccagccagtgtctgtcacaactgggttaaaagtgtcagcaccaagaatcaggttcatgacagatggccac

SEQ ID NO: 6077 - DNA, 592 bp, Canis familiaris
gaatggtatgatttaaaatttataagtttgccttcagggtaatgcccagtattacaatgagcagttctgtaagttggtgcctctaagcacatttccatgaatatattgcgtcagtaggctgtacttattttggtagcactgataccttcttaggcaattgactgaagaaaactgcaaaatattttcttatgtaatggctgtatagagcaatagtatcaaagaataaggaggcactaatgctggatgacagtttagatttagaggtgactggggatcatgtgtgtgacggttgtatattttgtgtaaaatatatgtgtgaaaatgatctaagaacgagtcactcagcactctcaagaattatgcagattctgcattttcctatgccgtgtgcctaaaaacctacttgatatttattgtggtttcaagattactcatagtatatttatatatacttgcaatgtatatagatgtatattatacatctacgtactgatttgaaaacttgaagcaagatggcattttatttcatatctttctgttttgcttctgttttatgcaaatataaatccttttttaagtgattgttaagatt

SEQ ID NO: 6078 - DNA, 432 bp, Canis familiaris
  misc_feature (1)..(432): n = a or c or g or t
tttatnncaaccaaaatggnnttgtttgaaatgcccangcattactttgtcatttttattacattcggccctgtctgtctttaaaatacctttaaatatacatatttttagctagatgttgcacaatgagtgctgcaggaggagctgctgttccagggggtgccgtgaggtggcatgtgactaagatgtgaccgaggcattcttcagtgtctcgtgtgccagacctgtagggtcggcagcttccaagacacgtggagaaattgtaagaagacgcttggaaagttagatacatagacgtccttggagcctgaacactcctgaaccgtacatctgtccttaaaaactttatttcatacctatgcctctaagtctcctaactcaaatggatttctagaacatctgtggtttgcctaggaaaatgttacctctggg

SEQ ID NO: 6079 - DNA, 573 bp, Canis familiaris
  misc_feature (1)..(573): n = a or c or g or t
ccatgctgggcctgtgtcttgagcccagannnngcctgctcctgccaccccctgccctgccagagccaggcccatgtgctgcctgcccannnnnnnnnctttgtccccaaggcaggcagaggcggaaggcccactgtgccagaggccgggcatcagccttaaccctcactctgccagcacctcttccctttccctgagtcagcacatctggcttattctcttccttctgtttggagcctatgagggcaggtcctcatgccctgtcactacttctcttctggggaatgtgggtgcaaatccagggttgggggcctctcccctcaccccctcccacccaggatcctagccccatgccctctggcatagcttcttcctgcagaaaaacaaacctttggtctctacctgagaagccatgtcccttgtgctgtctctcgcctgtcccacctgtgccctgccctccagcttgtatttaagtccctggggtgcccctcactcccaggttcccctctggtgtcatgtcaggcattttgcaaggaaaagccacttggggaaagacaaaggacaaaaaataaa

SEQ ID NO: 6080 - DNA, 656 bp, Canis familiaris
  misc_feature (1)..(656): n = a or c or g or t
tcccancgagcgcangacttggtggtcnctcctgtttgggtggtggtttnnnaagatcctgggtgggnntctgtgcaatctcagctttccatcagctcgaggctctannnctgcagannnngcactcccagcctgccttggcctggggtttcctgcgggagctcagtccccactcactgttnnaaccggcccagggagactgctcccagctcctcccggccccgagacctagccttgggttcccatcaggcctgggccaaggattgcctgtagaaccgtccctcctttcacagaggtggctctgtgtggactggcccctcggtggcccattgacgcagccggttggcagatactcacatcagcctgctaattggatggcaggtggctggggatccataaggggtgactttggaggacagtttttaatgggccctaagagtactggcccttcctctgggagctcccccatgggctggcccccgggcaccccggctgtgcactgtggcccgtggtcaggtggtaatgccgcccgggcagggcatagggtctgccttcctccaaattcctcactgctccccggagaggccagggctgtcagctggcgagagatgctgcgggtgtcctggctctactgatcctacactggaggtggcagt

SEQ ID NO: 6081 - DNA, 565 bp, Canis familiaris
  misc_feature (1)..(565): n = a or c or g or t
cgnactgttngagcttactgatacnggtagtgagnnatactcnnanntcacagactctcagagcgatttaagagattcttttagtgaaaaagttgtagacttggagaaacagctacacaaagatcaagaaacccagccaaaagaaagcatgcagccacaatttgactatcttaaatggagcccagagaaagttgcagagtggattagtgagctaggcttccctcaatacaaggagtgttttactacaaacttcgtctgtggccgaaagctcattcatgtaaactgctcaaacctccctcagatggggataacagattttgaggacatgaaggtaatttctcggcatacgcgggcactcctgggaattgaagagccattgttcagacgctccatcaccctgccctacagggacaatattggcttatttttagagcaaaaaggtcatactggggtaaaatctgattccttgacgttctctgaatttgtgcaagcagcaggattacaggattatgctccaaaaataactacccctgaatcaaatgaagaattgtattacactgaacca

SEQ ID NO: 6082 - DNA, 612 bp, Canis familiaris
  misc_feature (1)..(612): n = a or c or g or t
gccagaggacccggaacagctagagggcaggggctttgggctatagggtacactggncttcatctccacctaccctctgtgtccgagtttgaggtannagggtccctccatcatccccctgtctgtctcccccctccaccccacctctgccgcctcccatcattgtttcctctcctgtccatttctgaatctgctccccttttccctccccagaatcatgtttggccatagtcaacatctgcactcatctaacagctgagggactcaggcctgcagggaatttggggagcagaggagggcctgcaaacctggcctcccgggaagctatgcagaacaattgtgcagccagggacaggagagccagcctggatgtgaggcagggagggtttcaggaatggtggccttataacaatagaaacaaaaaagcaagccaagtgaccttggggaaatgtatttgggcaggaagccaaaaggcagccaagttcacagagcaggtgaatttgcaggtagatggggaagtgggcaggctgggggatggccatagttggtgactgggagttcattttagctctgggaagaaatcagtgtttgtgatgagggtgggggaggggc

SEQ ID NO: 6083 - DNA, 638 bp, Canis familiaris
  misc_feature (1)..(638): n = a or c or g or t
tggttgccatcctcctccatgggatgaagacatctgacaccattatccgggagggcaccctgatgggcacagccattggcacctgcttcggctactggctgggtgtctcgtccttcatttacttcctcgcctacctgtgcaacgcccagatcaccatgctccagatgctggcactgctgggctacggcctctttgggcactgcattgtcctgttcatcacctataatatccacctccatgccctcttctacctcttctggttgctggtgggtgggctttcaaccctccgcatggtggcagtgctggtgtccaggactgtgggccccactcagcggctgcttctctgtggcaccctggctgccctgcacatgctcttcctgctgtatctgcattttgcctaccacaaggtggtggaggggatcctggacacgttggagggccccaacatcccgcccatgcagagggtccccagagacatccctgctgcactccctgctgctaggctctctgctactgtactcaacgccacagccaaggctgtcgcggtgaccctgcaatcacactgacccacctgagccccttggctggcccccatcccccnnnnngcggagcagaggaagattaaagaacagnnnnnn

SEQ ID NO: 6084 - DNA, 631 bp, Canis familiaris
  misc_feature (1)..(631): n = a or c or g or t
aaccacgcttcagcagtgtgaggtggntatccgccagctgtggaacgccaacctcctgcaggcccaagagttgcagcanctcaagacnntcctggaagggaagcagaggcccaaggctgccccagaggaggctgggcccagctctccgaaggaccaggaggcacctcatctgggagccatgcagctccccaaggtccccaccaagggcgtccccatgaaatgcctgattctaagcccgatgcccgtggcagagcgctccgtgctgcccacgctgaagcagaacctgaagagcagcttcgctgagcggcagaaaaggctgcaggtggtgcggagccggcggctgcaccgctcggtgctctgaggccagcggcacggtgtgcgtctgtgcggcaggtcacggccaagcccatgaccccagctggagacgctaataaccctctctggatagcactaccaaagacttctaatgcgtttaggccaagcgaaattccagataaaactcatggcagctaaaggacttggtctcagaactgagaaactgtttagtttcttgcttagtattttgctattctgcatttacatgaaaacatgttatgagattcatattaccctacctgttgaagactgaaat

SEQ ID NO: 6085 - DNA, 649 bp, Canis familiaris
  misc_feature (1)..(649): n = a or c or g or t
tacttcantatatttggataaaatattgaagtcaagtttaaatgctctgaaatttgttcattatcgagttagnnnngccatgaggattgctgaaatggctagacatgactatgttttgccagtttttattttttccagaccattttatgtgcatagtattgaagctttgtcacaggagacctgcttatctgtgcaaaagtccatccaagggccattgggccattatgctgttaatgtgacatctgcagccaaattctgcagtcaaagtctatgtaacaataatggaaggtgtatccgaaaaacacctgaatcctcctcctatctgcatatgcctgaaagtagcactaagaaatacatcctaaataagagtttcagattcatcatttcttcaaccagtaaactgaagacaacaaaggtcatgaagaatggatttgtgtgtcattgctattatggctggcagggagaatcttgtcagcaaccctcttcagatatcttgagagggaagaataaggctccaaggactagctttattgtaccagtttttctcagcatgaccttatctgtgattctatggaatgttatcacctcctcttacaacgtcaatttttccttgaaatactgaagagtaaaaaaggctgcttttctttcc

SEQ ID NO: 6086 - DNA, 720 bp, Canis familiaris
  misc_feature (1)..(720): n = a or c or g or t
acctatccatgagcactgggacaaggctagtgtcagcagtctccaccgnnngtntccgcctgccactgccagagaggtagaccccctcnnnattcacccacagcacccacacacaagcnngcagcctccctggtgtgatcccctgggcccatttgctgtcgggggagaggacctggacccctttgggtgtcgaagaggtggcatgatcgtggatcccctgagatctggcttcccaagagcactcattgacccatcctcgggcctcccaaaccgtcttcctccaggcgctgtgcccccaggagcacgctttgacccctttggacccatcgggaccagcccatctggacctaacccagaccatctccccccgccgggctacgatgacatgtacctgtgaaggcctcaagaatgtaacatcccagccttccctccactctcctggagctgccactgctggccccatcagcaaccgtgttcttgcgggctgggggcaagggactctgcccatgtgtttgcgggccggctgggattgcctcccccctacctgtcagagccaaggcacttgctgcagctttccacctggctgcatataggtcccatagagaaatcagtgtttctctccccaccagctgccccacacttctcaaaggagactccggcaacatatacacttggtccgatgcagtcccagctgcagcgctataagaacagaacgcattt

SEQ ID NO: 6087 - DNA, 605 bp, Canis familiaris
  misc_feature (1)..(605): n = a or c or g or t
agcctgaccccgagttcgnnnnnntnctagacanngtggatccaaacagggatggnnncgtctccctgcaagagtacatggccttcatgatcagccgtgaaacggagaacgttaaatccagtgaggagattgagagcgccttccgggccctgagctccgagggaaagccctacgtgaccaaggaggagctgtatcagaacctgactcgagaacaagccgactactgcgtctcccacatgaagccctacgtggatggcaagggccgcgaactccccactgccttcgactacgtggagttcacccgctcgctctttgtgaactgatcctgctcccagcctagcctggcctgcgctgcctgccccgccgtcaccttgctgcatgtcacctcctctctgtgctcaagtattccagtgtcacctcccactgtaagcttatgtctgcttagcttgggataagacttagtagaaatggtgcttcactaagccacttccggtccagtggcacttgccctgtggttgtggggacccagattcctgttgtgaagccagctgccccattccgactcgagaaatctaaacagctggctatttcccttcttgttctcc

SEQ ID NO: 6088 - DNA, 607 bp, Canis familiaris
  misc_feature (1)..(607): n = a or c or g or t
atgactngagctgnaatcaagaatcaggcactcaacccactgagccacccaggtgtccctgntggatctttcnnnncagctacataagctactgaggaaaatcagtatgattatnnaaaatcacatcttggtttttaactatcaactttaatgaataggatttaacctgattaactttggctgttgtgctaatagtgtaaataaaagaagcctgactttataaagtaccaatttttaagacaaagagttgagcagtttttaaaattatgcatataaatagacatgtgtgtaatcagttggctgcccaaatgtttgggagtgcaaggaattaagcatcccaagatagaagtcataggggtatgtaaaagtcatgctcattgtaagatgagcagtgttggtgttttatatggcattaagacaataaagttctacacaactgtggaatatcctgcttataccagtactgaatttaggattccaaactagatctcaacaggttagaatccgaataatttggtgcgagaccatgataagaccatgtaggatgtatgctttatttcttgttggccaacagcttctttctaatgttcnnnnnaatattatttta

SEQ ID NO: 6089 - DNA, 666 bp, Canis familiaris
  misc_feature (1)..(666): n = a or c or g or t
ctgccctccctccaccccagcaacagggtgctaatgcctctagaaggtctcagagnntcaggnnnctttaggagagggtgaaggnnaggccactttacagagtgagaccacccagacatcactcactcccaggatattcacgggctactgaagccagcaccaagttgacatacccgcccctctgtagtgctccccgcttctccatccaacctccagctgcgatgcaaccccagttagaagagactcagcaacgagccacaccctaagtcatcctggcaaagaaccccatctggacacagggtgatacaggtccttgaggttgccctacagacagcaaaagcaaactgaagagcttctttcgaaaggaaaagaaaacacctgtagagcatacacgaggcaggcagatttcagagcagctgctatgaaccaactctgcaacctgtgaagacacatgggagccctgcacttttctgatcccctggaatgactcagctgtggagcaagggcatccagggcaaagactcatactgccgacctgctgcaccacttgcctggctctgcagacctctgagcatcagggaaggacagggacggggtatctgtgcaggggaacatgagctcattctttctcaggggcaagatggctgtaccacctcttcctggacc

SEQ ID NO: 6090 - DNA, 588 bp, Canis familiaris
  misc_feature (1)..(588): n = a or c or g or t
gggggccntcctgagtacctgggtcgnnggcaaaggctggaggatgaggaggatgaggaggaaggtgaaggtggagggctggctagnnttcgccaattcctggagggtggggtattggggtcaggtgggggacctccacggggtcctggcttcttccgnnaagagatcaccaccttcatcgatgagacacctctgccttctccgactgcttccccaggaccctctcctcgccggcccagacccctgggcctctcaccccgcaggctctcccttgggtcccctgacagcagagccgttggacttcctttggggttaagtgcggggagacgctgttccctgacagggggtgaggggagcgcaagaccttggggaggatcctggggcccaggtaaccccatcttcccccagctgaccctgtgagcccacgtgggcctacaagactcagaggaggggctcagagtgagtaataccacttctggccctgagcctagagcagctgcctccagactccatggagatgggcactggatctggggcctggaggctccccacccctctgctgcctcccatctcaatgaccagatgtcc

SEQ ID NO: 6091 - DNA, 563 bp, Canis familiaris
ttatacaagacaagttgtagattgccaacttgctgatgttaataacattggaaaatataggtctgcaggagcatgtacagctgcagcgttcctgaaagaatttgtgactcatcctaagtgggcacatttagatatagcaggtgtgatgaccaacaaagatgaagttccatatctgcggaagggcatgactgggaggcccacaaggaccctgatagaattcttgcttcagttcagtgaaaacaatgcttagttcagatgctctaaaattctttcattctgccttaaatgggcagttaagcctcaaaatatttttgaatgaatggaaaaatatcttttaaaggaaacaaagaattacatttaaaaatgtagaacaaaagagaatttgattgccttgatttgtcttatgtagagatttataaaggtaaagctaatctcttgcttggccaagatttttaagatattctatgaatgactaaatgtttaaaaactacctaattaattttcagagtatatgtttttaattgatgtgcgaagtcatcttttagctgtgatgctaggaataa

SEQ ID NO: 6092 - DNA, 704 bp, Canis familiaris
  misc_feature (1)..(704): n = a or c or g or t
tactgctgnnnnnncaccagctactgtgactacccctgccagcaagcccannggcccgagcatatgnngtnntgcacccagtcagctaccgctcctcagcaggaagcagatgccgaggtgaatacagaaacactaaacaaatcatcccaggggagctcttccagcacacaggcagcccctacggaaacagccagcacctccaaagacaaggagtcatcagcagagaagagcaaagacagcgggtcgaccctcgacctttctggctccagggagacgccctcctccattctcttaggctccaaccaaggctctgaccattcccggagcagtaagtctagttgctggagcggcagcgacgagaagcgaggatccacacgctccgagcacaatgccagttccagttcgaagagtctcctcccgaaagagtctcggctggacaccttctgggactagggacaagtcacgacacaagccacccaccccgtggaggaaaaaaaagccagacaccagggcaataggaagcagtaaagaaacgtgaggcagaagagcccccttccgactgcagagctccagacacgtggacttggcctttgcccttggcgcagagggcagcctacactacatagcgtccggcattagcatcagctgaggactctgacccacacgaaacctatgctttagctgtaaataatgtacaannnnnn

SEQ ID NO: 6093 - DNA, 576 bp, Canis familiaris
  misc_feature (1)..(576): n = a or c or g or t
aacaagtnngagagtctnnnnncaatatttagacatgggcagccttcttcaggattatcaccgaggcccccgtgactttgaatcccctactctccagaatccaggggctaagacagagactgcggaaataccaagaccagtggttctacaactggtcacatatgctattggccatgaccggtttgtggggaaagggctctgaagggactcttgcggtgcacacggaaggcaccaacctctcaggctttagaagaactgcagtagttcacacaagcccaatactgaagacccatgtttccatctggagaccttcgggaagaaggccttgggttcctnnnngtncnnnccgcctccctgtggctgggacaaggtcacggcctcaggctccctctgggacctgtcgggggtgggggcggggggataggcaagcacctttaccgttacacggattgaggagacactggactttttacccattttcttgaatcttcaatattaatgttgtgtttacattgatgagaacaagagtccacgcctactctcgnngaggctgtttgtactaagttgcaatgtgac

SEQ ID NO: 6094 - DNA, 592 bp, Canis familiaris
  misc_feature (1)..(592): n = a or c or g or t
attngcatggctcatctctgnnacttccnntctgctgagttntattcatgnngctttttcatctttcatnnannntgtccntgatttctattcagagccagaattctaatttaganccaagttatctatggcagcagctnnaggattgagacttctggattattagctatgtaactttggggcagtgggcagggaactgctttttacagtttcctgatctgtaaaatggaggataataattgtacttacttcatagaatttaacacttgaggggtgcttagaacaatgcctggcactcaaaatgttaacttttatttaggaatgctataatagcttgttgactaatctaactccattttctctttccatcaaaatatatcctatattgtcaacagatctatcttcttaagctaccgctttgatcacatcacacttctgctcagcagttccccattacacacagaaaaggtgcattttgcttagcctgggtaagaacaatatcctcctcaaacttacttctttagctttccttcaattaatttccttcataaaatgagtcaattcactgtctctgaaaaattttccatgttct

SEQ ID NO: 6095 - DNA, 620 bp, Canis familiaris
  misc_feature (1)..(620): n = a or c or g or t
aatcaaataccgacantgccttatcaagaaattctnaagctctgttgaaggcagcaaagaatttacattttccctactagatgcagttgatactttgcacctttgttggagggctgtaacctcagagactattgtcaagagctatgaagaggcaggattcanatctcaaaaggaagaaagtgacaggacaaatgcagagacagacactagtcttgatttggttgcccatgctcaggcagcaggcgtggaatttcctgaaggcttatctatagaagagtatgctgccctcgatgatgatttggaaacttgtgaagctgcaccaaaaggtgattcagaatggcccgaagaaaataaatctgaggaaaccggattttatacttctgatgaagaggatgatggtggatctctaggcactgaactcccattaccatcaaaaacggaggcaataactgctttggaaactcttaaaaattttcttagaagtcaagatatgagtgatgagcttcataactctttagcagaccttgaaatttttattaactcatcatctaagtaattatttgtggtacaacaaatgaagagtaatagcttttcttaatgtattttattatataaggtat

SEQ ID NO: 6096 - DNA, 546 bp, Canis familiaris
  misc_feature (1)..(546): n = a or c or g or t
atgnnnggatgtcatncagnnntaagannnaaaaactccgaccntgctacacacgcagcacacgcagacctggaggacactgcgagnngtgaagaagaggacaacacgacgatcacacgagagatcccggaagtcaccaaattcacagggacagaagctaggatgggggggggggcgggggagaggagttcatgtgtaacggatacagaatttcagatttacaagattaaaaagagctccggggatggatggtggtgactgctgcacagcgtgaatgtactgaatgccactgaactagatgcttaaaaatggtgaagatgatatatcttatgtttttttttttttaagattttatctactcatttgatagacgagggatagagagaacatgagcgggaggagagggataagcaggccccccgctgagcagggagcctgacccggggcttgatcccaggaccctgaggtcatgatctgagcccaagggacatgctcaaccgactgagccactcaggcatcccgataaattttatgttctgcgtactt

SEQ ID NO: 6097 - DNA, 683 bp, Canis familiaris
  misc_feature (1)..(683): n = a or c or g or t
ggtgagcccctgggtgnaggggaaaatgcatgagtgggcagagaagagcaagcattcctgggtagagcannaagcaaaggtnnagaggtcatcccaggactcaacgggaccttccgaagtgtactatctccatgagctggaatccannannnntnncacagacacannntccccacctcccatcnnncngnnngcatcagagtnnnngagtacacnnnagtcgcccatgtcactgagccccatctcaaagatnnnnnntgggatatnntcagagtcnagcgtanntcaagagccccannagctcaaagagatgtcagaccatagcnctctgaccatcaccgacttgtcctcagannncttgccctcacccttnnnagctgagagtgtgacagacgtagcaaccagtggggagaagacagatgaattggatgcctttagtccttcagccagcatgcacagttgggaaagccctcaatagcaggattccgaggactccatctcagttaccaaagtgtccaaaggagcccagcctggccaggcccctagagtgcttgcacctctaccgtaagaagcagggtgccgaaaaggccaggcggggggatgctccctctccggtagagaccagagctatctatacgtttatatattggggggcggggggcggggcaggggagagccggcgg

SEQ ID NO: 6098 - DNA, 455 bp, Canis familiaris
  misc_feature (1)..(455): n = a or c or g or t
canaaatggagctcgattctattgacttgaaggggnaggggttcctgggagcagcccnnngaggancntgctcccaagtctagcacaagttcaaaagcagantgtagggtgaagcgtccttactctgtttcctcaagatgaaaatggctgcaaggtcccaggtcaccatttaccctgggcctggaagcaggacaggatccccagtacttgctgatgacgctgacatgtgcacagggaaagaccagagtcccatcatccctggggagtttagccagggcgcatcaccctggactttcctcccctggaccaccagcggatcccccaacacggtggccgaacatccactgcgttataactaaatgaaatcccagcagctgaagggtcacgcaacacaaacgttccctggcaagacccgtannnnnncggcttaggggaaataaaaatctctccgctnn

SEQ ID NO: 6099 - DNA, 576 bp, Canis familiaris
  misc_feature (1)..(576): n = a or c or g or t
tgtttaatgctccttttttannctntatnnnnnnncatatntacagaaattttcttcatccttgtggtgcttattcatcngagnngtctccacagtctccatgnctttgttttgttttccttctgtagtataaggcttttgcttttgccttaaggtttccttagggaatcaacaggtcttttcattttgtacagcttttgaagcatggatcaaacattggcttacaatgctaatgtgtgaagagaaaaattatctgaagcaggtgagctttaatgaacaaatgtatattttctctgagtttgagtagggtgtgtgtgggatttttttttaaatatcaagttaagtccagttctctcaaatattaatcagtcataaaaaagcagaaacaaaaataaaacctgctactcatttttgaaaaggtgcaaatgtaaaatttgggaaaatagggtgggggctggaaccatggaaagaatgcttatataagcaggttcattaattattttggtttcgttgatagtgataagaatggtgcagtactaggaaggttctggaagatgctgtcaattttactttaaa

SEQ ID NO: 6100 - DNA, 400 bp, Canis familiaris
  misc_feature (1)..(400): n = a or c or g or t
acgattttccactgggnnncnnngtnngacnnaaagtgtgtngnnncatnanngcaggttttacnnnacnngcaaagaagagtgacatccactcaaaatacaccataaatccctttcacgggatggaatgtgtcagcctcactgccttggcataaaggacaggagggaccgcagcgtaagcagccccaggaagcannnntgaggacaggtgcaggacgcgcgacgccactcgggggaccccacagcatcccccgcccaggagggccccctgcaccactccgccaggggcttcagctccgtgcttcctcaagcaccggctccgcttgctgattctcacaagccgccttccgtccccactgcgactctggatcactcctttctatttaaaacaggnnnnnnn

SEQ ID NO: 6101 - DNA, 549 bp, Canis familiaris
  misc_feature (1)..(549): n = a or c or g or t
agtatactcttatatgcattaagatttttgcttcaatccccagtatnntagctttctttcctgtaaaatgaggtttaatnnaacttacttcataaggttgttttgaagattaaagaagatgatactggtagtgtggtaaagtctcagtaactattatcattattttacatatttagatttttttaattattattctttcagttacatggtgggataaagatcattatttccattttatagaagaaaaaaattgnnncttatagtggttaggtatcttgttttagnnccaggcttggcttgcccatttgtgtgactatggggcctgtttcactagtcattcttctccagagcagtgactttcaattttttttttttaatttgaccatgacctacagtaagaaatacattttaccttgnagcctagtacatgcatagatgtcaatatgccaaactgaaatgattttgttatatgcagtggtctgttttcaaaattctgttttcttttaaaaaaannnnngttgcaactactnnnnnnatatactactggcc

SEQ ID NO: 6102 - DNA, 544 bp, Canis familiaris
  misc_feature (1)..(544): n = a or c or g or t
cccagcgnnatcgggaggctcagccccgagcagaggctccgccctcatcccacggacactgtgcgccggggctgcgagccgggccggggccgagtnntgcaggctcagaggaggtgtctctgctcccccacaagccgatgatggaccggaacaaggcagccgagctccccaaactacaggttggcttcatcgacttcgtgtgcacgttcgtgtacaaggagttttcccgtttccacgaagagatcctgcccatgttcgaccgactgcagaacaacaggaaggaatggaaggccttggctgatgagtacgaggccaagctgaaggccctggaggaggagaagcagcaacaagaggacaggacgacagccaagaaagcgggcacagagatttgcaacggtggccccgcacccaagtcttccacctgctgcatcctgtgagctgctcccgggttcggacggcgcccccgcctctaagggtttgctacatgtgaggaagccccagaaaatgactaaagacaattttggatatcttgaaacttttttaa

SEQ ID NO: 6103 - DNA, 459 bp, Canis familiaris
  misc_feature (1)..(459): n = a or c or g or t
ggtncttacggaagcattacnnaaccacaactgattaaatcantngccatgtagcttgaactcaagctcaatctctctctcctccccagaggttgaaaattccaacgctttaatcacaaattagtgtcttccactccccaacgcaggccctatcctccatcctctggagcatctaaaagccacttcattaacataataaaagtcacctttattgtccttatccctatgaaattccaaggattttagaagctctgtaccaggaatagagataaagaccaaatagatatttgttgttgttgttgttttaataatccaatggtgtctttataagaattggaagagataccaagatgcatccgcatagagaaaagaccatttgaggacacagcaagagggtagccatctgcaagccgggaagcaagggctccagagaatcccaaccagccaacacctcgatct

SEQ ID NO: 6104 - DNA, 584 bp, Canis familiaris
  misc_feature (1)..(584): n = a or c or g or t
tnnnaccaggcacanngncaatcagcggtagaagcaccacaccaacatnnagtcccttccgggctacttccacaagtccgaacagccagtccagcaaaatgaacagcattgtctatcagaagcagttccagtcagcccctgccactgtgagaatgacacaaccatttcctacacagtttgcaccccaggcaaagcagagagcagaggttcttcagtccacgcagcggttcttctctgaacaacaacagagcaaacagataggaagcaaagctccaaaagtggacagtgattcaagtaaacctcctgaaacactgactgaccctcctggtgtctgtcaggaaaaagtagaagaaaagccacctcctgcacctaccatagccaccaaacctgttagaactggaccaatcaaacctcaggccatcaaaacggaagaaacaaaatcataaaggctgtggtttattgcagggggttgggggggggggagaggggaacgagggagaatgaagtcggataatgccagcagccaaaggggtaaaatggtcnnnnnnttatccagtntagagctgggaggtgacaggggacat

SEQ ID NO: 6105 - DNA, 388 bp, Canis familiaris
  misc_feature (1)..(388): n = a or c or g or t
atgttttcccagatggaaacgncaacacatacataaagaacaccaagcggacagctgaggtgtggatggatgaatacaagcaatactactatgctgcccggcnnntcgccctggagaggccctttgggaagagcagtgtcctacaggtatcccccagagctgtgttccagcttcatcggagtagacgaagacagggaaggaattctgtgccagatgccgtaaatacaatcctgctgctgaagattctggaaagtatcagccgatgctactaacatactgcggccatcagtgtcaggcaggcccgtagtagggctgtcagtcctgctgcctttcctggccatcattctccccagtctccgttaaacctctctatccaggatctctgggt

SEQ ID NO: 6106 - DNA, 618 bp, Canis familiaris
  misc_feature (1)..(618): n = a or c or g or t
agtaccctgtcccnntaattaaaagagcatgggaacttggtttaatgaatacacatattccagagagnngtggaggtcttggacttnnaacttttgatgcttgtttaattactgaagaattggcttatggatgcactggggttcagacagctattgaagcaaattctttggggcaaatgcctctaattattgctggaaatgatcaacaacaaaagaagtatttggggagactgaccgaggagccattgatgtgtgtgagtatgtgcggctgctgcttggaaagaaggatgctttttctcctttccaatacaaatgtgtacactgggctgtgacatattaagacaaaagttagcaatatatttaggtatgatgatgtttctgggttaccaggtaagtgtcttaataatctcctagcttatttccaggaaagaaatatctgcttaatggagcactctgcaggcagttcaggaactgcatgattgtgtcaggaagttcagattgaatgtatgacaatagtctttgaactactagtcttttgaactaataagaaattaatgtgactgaaaagttattttatttgttgaatgactgaatgacttgggaagaatatttatagaa

SEQ ID NO: 6107 - DNA, 343 bp, Canis familiaris
  misc_feature (1)..(343): n = a or c or g or t
gtgacttcacttccgnngccgccggccccgccccctcgttnnntccccgctgccctttgagaccaccggagggcgcgcgagagaacgcgcgacccccgcgnnctcttcttaccccgggctgcacgcgtggtgcgagtgcaggggccttttcngcgtncctggtgggctcccggaagtnctgctggattctctttgggagagcggagttgggccgagcctgtgccccgacacccgcccatccttcaggaatgttggcatgcagtgagtgggggcgctggggactgaaaaatagaccttaccgcagcagttacctaaaatacatgaacaccgaacaggagcgtct

SEQ ID NO: 6108 - DNA, 617 bp, Canis familiaris
  misc_feature (1)..(617): n = a or c or g or t
cacaaatgttcaggtgnnntggcttatggcnnacgctatggtcacagaactctactgggtcggaaaagtgacaaaaagcagccacagcnnatgaagtcagaaggatcnnnnncgagacannattccaaaannagaccacaggtnnaatacnctgagaattatccggattcctttcctgataaggatgatcctgagttatccaagacagaaccctctaaaaaggacatcagtgctcagaaggcggttgtgctggcatcccaagggaggagcccagaggacctttcagacagcacatctagaagaaggtggagccctgagctcaaactgctgaggattcttcaggccactgatgatgaggatgaggaggaccaactctctgggtcacagagcgcagagtctttcaagacttcacagggcagcctgactccagattaggatgcttagaatcctgaggaccccaaccttggacataagagcagaaaagagagaggacttctgctccctggagcctttaccagggcctgactgcagggattcggctttcttcattcacttctccttccctctaaaataagtgagggagaaaaagcctcaccctttttaaacgtagattattt

SEQ ID NO: 6109 - DNA, 325 bp, Canis familiaris
  misc_feature (1)..(325): n = a or c or g or t
agagggaacctgtgcgtgaacgtcatgcggggccgggagcgcatgcagaaggtggtcaccttnnnngactacgtcnnnnacaccttccaggtcaccacgggcagtgtggtcctcaagctgagccagggggannnnnnntacctgcaggccacagacaagaactccctgctgggcatggaaggtgccaatagcatcttctccggcttcctgctcttcccagatgcagaggcctgagctgtggnnnnnaatcccttcctcccccgcccaacccccagcaatgctcacnnnnnncccaacaccacccnnncccggccaaagcacacag

SEQ ID NO: 6110 - DNA, 414 bp, Canis familiaris
  misc_feature (1)..(414): n = a or c or g or t
gtttgcttacctctccacagcgcaccccaccccnnnccgtnnncntcattctttccgaacttcnaaaccaaccaaaaagtgaaagtatttttgtaccctgtgtaacaaaatatttatgcatcataaaggatttttcgtgtgtgtgtgcaattaattattaaagagaccttgttcgccttgtcagataagtttaatgtttagtttgaggcatgaagaagaaaaggttttccattctccagcannnnnnntttgtgtcaggtgttcgtttcagaaaaatgaaggaaaaaaaaattgtgcaatttttttgttgttgtttcgtgagcacatcagtgctttgcctttggcnncagctgtggctgncttgacgttttcagacttgggagacgaggtggnnnnngtaattgcagatcctgt

SEQ ID NO: 6111 - DNA, 273 bp, Canis familiaris
  misc_feature (1)..(273): n = a or c or g or t
attgatanngagtgcttatgaagaacagaggattaaagacatggatctgtgggaacaacaggaagaagaaagannnaccaccatgcnnntagaacgtgaaaaggctcttgaacataagaatcgaatgtcacggatgcttgaagacagagatttatttgtgatgcgactcaaggctgcacgacagtctgtttatgaggaaaaacttaaacagtttgaggaacgattagcagaagaaaggcataatcgcttggaagaacgtaaaaggcaacgtaa

SEQ ID NO: 6112 - DNA, 615 bp, Canis familiaris
  misc_feature (1)..(615): n = a or c or g or t
tatnacttgcctctgaatccaaacttaagaaaaaggaagcccataagcaaaggtactgnntcttttcctgccaatttctagaggtagaaattcatcctgctacagagagagagagagagagagagaagagaaagcaaagatagagagtgagagagcacactggcatttctacagggggtagtaagctgacgctgtaaatatttttacacaaaaatttactaaagccacaaattttcctgaagatccacactgggtgaggttttgttctgacattagagatcactgtggaagaaagaatacatttcctacatattttatttatcatttttgaaaaaaaaattctttaaatcctacagttgcaaagtttcagaaaaatatggaattttcttcctgaaattttcaagggtttcttttacttttgccagaaggcggggcaggactgggcctcccagggtgtaggacccttcctgcttggtggaggggaaaagcggagctgggtggcagaggagggcatcccaactcgttttctagtgcggccccctgtcccctccacatgtgctactcctggctgtggccacagtgactgttctcactgttcaaccttgtgctgtatgg

SEQ ID NO: 6113 - DNA, 335 bp, Canis familiaris
  misc_feature (1)..(335): n = a or c or g or t
cccccacctacagcgaggtcatcggccactacccagggtccccggccttccagcaccagcagagcagcgggccgccctccttgctggaggggacccggctcccccacgcacacatcgcccccctggagagcacagctgcctggagcaaagaaaaggataaaccgaaagggcaccctctctaggcaccccggggccggggcagcggtagggagaagacaacacgctccgcacctcttagacgagaagacagaggaggaccgggcggcagccaccacacgcggcgcgtaaccatcctnnncccctctctctgtgtataaatatttacatgttctgtg

SEQ ID NO: 6114 - DNA, 605 bp, Canis familiaris
catattatcattttgacttaatgaataatttggaacctgcccctggtccctgggaggagtatttggagagattcatgactggaaatgtggcctatggttcctggtttaatcatgttaagagctggtggaagaaaaaggaagaacatccaatacttttcttgtactatgaagatatgaaagagaatccaaagcgggaagtccagaagattgctagatttctagagaagaatttgaatgatgaagtcttggataagataattcatcacacctcatttgaaatgatgaaggacaatcctctggtgaattatacacatctaccaagtacagtgatggatcatagcaaatcatcttttatgcgtaaagggattgcaggtgactggaagaattacttcacagtggcccaaaatgagaaatttgatgtcatttacaagaaggaaatgtctggaaccacccttcagtttcgcacagagatttaaagatcctagtgaccaatctgaagaaggaagaacagagctgtaatttgttaaaaaggaggccattaggcagtcaaatggatttataaagaaggagaaaatgtgcttttaaaatgaaaaaaaaaaaaaaag

SEQ ID NO: 6115 - DNA, 70 bp, Canis familiaris
  misc_feature (1)..(70): n = a or c or g or t
agtggtccccagcannncngatccgnnnagttctgctatcgatccaggctttgttaagtgctcccaatcc

SEQ ID NO: 6116 - DNA, 456 bp, Canis familiaris
  misc_feature (1)..(456): n = a or c or g or t
cggaaaccagcagcnnctctgcactgagtcatgcttgcttctgctatgcactgatctgttcttttccagtctctgcatatatcattttggtgacgtccctgcgttaccatttatttatatggagcgtgttttctccaaaacttctttatgagggaatgcacatcctcatcacagctgccatctgtgtattcttcacagccatggatcaaaccaacacaaagtcttagacactggaaaaacaatgtatttttaagtctactattcacttcatgcatttgagtaatgggggaaaaaatctgtttaaatgcaaggacattctaaagaaaaattgtggattctacaaagttgaagaatagctttcactgctgtacttgaatttagattaaatagtgatttaaaagatcactttaaaatatttagtttgagggacacctcagtggctcagtggttgagctt

SEQ ID NO: 6117 - DNA, 449 bp, Canis familiaris
  misc_feature (1)..(449): n = a or c or g or t
tatgctcattttcattcttccttcatctctttatttaannnnnacnnnccaggatggagataaaggaactcaaagaatttgggtctgatgaagttcaaaggcatcttgaaggtggtgcacttnnnnnnagtaagggaagcaggggtgaagtggctgctacatgagtaccttctggagcaccattttgtttggcctcggagaaggcttctcagctgccctcccagatagtgctgcccttttcttgggcctgggggtgttgttttccctggtcagcattcccttggtcatctacgactgggcctgctcatcaagtagtgacgaaggccactgagaccagctgaggacaggaatcgttccagcccgctgccccgtcatgtcaccacacatcagcaatctctcatcacttctttcgcaagtttacagaagcaaacagaaattcacaagacacc

SEQ ID NO: 6118 - DNA, 518 bp, Canis familiaris
  misc_feature (1)..(518): n = a or c or g or t
gacgtccggcanctcgttcagnngtcatcctgggatccggggctgtggcctctcctgtctgccctcctcttggagntacgagccctggggttggaggcggctcgnctgctgaccgtagctgccggggccgctcctttgacctgacgtgtcctcagacccgacccagacagcagccgcagacacgacgttcctcctacagacgcctggactgagccacggggccagggggagccccaggggcctgcgagacggggacagaggggcctccggcacctgctctctggactggctcccaccccagtgcttggactccgcaggcaggggtcagagcactccctaatttatgtgctataaatacgtcagatgtacatagagatctattttttctaagacgttcccgtccccgctcctctcccaccacgtgttagtggtcagactgactcctctgggccctgggccgggccagcgaggggcggggagatgctgggaccctcaggatggggctcctggctcctcct

SEQ ID NO: 6119 - DNA, 453 bp, Canis familiaris
  misc_feature (1)..(453): n = a or c or g or t
cgacnnngtcaggcacaggctgctggtgctggtcaangacaatnncgagnngccgctgtcgnnnngcgtcacgctgcacgtgctgctggtggacggcttctcgcagccctacctgccgctgccggacgtggcggcggccgaggcccgggccgacccgctcaccgtctacctggtcatcgccttggcgtccgtgtcgtcgctcttcctgtgctcggcgctggcgttcgtggcggtgcggctgtgcaggaggagcggggcggcgtctgggggtggctgcgcggtgcccgagggccactttccgggccacctggtggacgtcagcggcgcggggaccctgtcccagagctaccagtacgaggtgtgtctgacgggagggactgggaccagcgagttcaagttcctcaagcccattatccccanncttccagtcnntgacactggtagacatacagg

SEQ ID NO: 6120 - DNA, 504 bp, Canis familiaris
  misc_feature (1)..(504): n = a or c or g or t
agtctgcagacactgtnnnaaatagtagcactcaatgcttgacacaaaaacatangcactgtggatggggnnaggggtgcgcaaagcagcagcagagctgtgtaactgacaaatacatacctactattcaaacacacaaatgttactgtgtatccacctatacatgcgcacacatcccttagttcaattccctttgattcaagaaatgctatttaggatgcaggggtgttctggttaaacaaggcaaaaggactaccagcatttatagctcactcttccaacatcccctaaaatgaaaataaacaacaaagggcacccaaaagtcaaggacaattttggcagacaaggaatagtcagtggaaacagatctcacagactgaaggatcctacaaacaggactggagagagctcaggaggccctgagaaggggtgggtacttcttactgggatttaaccatgggagggtttcttgcaanntnccctcccactctggataaattaaac

SEQ ID NO: 6121 - DNA, 551 bp, Canis familiaris
  misc_feature (1)..(551): n = a or c or g or t
ccaccgcacaccgcaccccgcgcggcgccgggcaggnnntgggcaccggataaacgatcctgggggttctccacgagagagacacggagacctcattaaatccaaccccctcgctttcncgaccggaaacagcagnnngaagacgtcgcgttcctaggcggagtgtggttgctgattcagggccagggtccatacggccaaggagggnnntgactgctcctagagatcttcagaaaagagaattttctcttctacccacactaattgaaagcaaatgctcctttatgccaataagattcctcacactgctacctcaagccannnaggtcaactcccactggcaggattctctctggagctgcttcgaaactgcctttgggacgcaaggtggataaaaacagaagctggcctcnnngagacttcctacaaacctaccctcatgctggtggacctcatnnnaattaatcagtaggcgcctactangcnnttgcgttgagcccagctattgtttggcctcacaacaatagataccgttggactgagatttattg

SEQ ID NO: 6122 - DNA, 548 bp, Canis familiaris
  misc_feature (1)..(548): n = a or c or g or t
ccagggccacagggggcacagccagggccagggggcacagccaggcncggagggggcgcagccaggcccggggggtgcagccaggcccggagggggtgcagccaggcccaaggtgggtgcagccaggcccggagggggtgcagccagaacaagggggtgcagcttgggcaaggcactctgtgctcctgcccaggtgccagaagcacaggcagcggctgggtctgtcttgaaatgttattttaagccttctaggaggtgaaggtgaaaggaaccaagggccttaatgctggtcccccaaggtcccagtggtcccccaagggcccaacaccagccacatgcctgtgcctctcacccgctcagcccagttgtgcaacatggattttcttgcatcgttactggaaaggccagcaacaagacacctcctgtggttcattatggggagctgagcaccgctgctccaggcaggcccaaggcctggaaccggagtggggggtggggctccgttggtgttggcaggnncccagggatctggaaccttcnnnnnnnnn

SEQ ID NO: 6123 - DNA, 447 bp, Canis familiaris
  misc_feature (1)..(447): n = a or c or g or t
acacgatgcctgaccctggtgaaacacannnctccccactggacagaaggccgtgtcgccaactgcacgaggttgccgagggggcgatgtaggtggcctgtcaggaatgtggggaaagagaagagagcctgagaggcannnnnngtatttctgtcactgcgctcttcccacannnnnnnnctcccccacttttggggtggactgtggccccgttaactttccgatgtcctcctctggattctgttctttcgttttgtctctaagcccctttcacgggtgtatgggcagctcccctccccgtgtcctcccgggagcccagagctcccctaggctgagccaggagacatccgagcaccccacacacatgagcgtcctttatgttaacttattggtcctgggcaatgcctggtacagttgcaggggctgcctcctaggctgcgaggctgg

SEQ ID NO: 6124 - DNA, 541 bp, Canis familiaris
  misc_feature (1)..(541): n = a or c or g or t
cngagagtgtgctggagcgcagctnnnnnnnngcgaaggtnnatgtgcccaaggcgnnagggcnnggcnnnnnnnnnnagcgcgtgcactttgagaagtataannagcgcttcggcaacgatgggctgcacgagccactggactggacacgnnaggaggcgggggtcacagcattcaaggagcagcacatctaccccaccatcatcagcactgagcgccacgaaaggtccatggcccagtggctgagcaccctgcccgtgcatgacttcaatgccactgcccacatggcagtgggcgcaggcaccaaggtgcccagccctccagaagacagtgactgaggtggaggctgccttaagagtgccttggggtagcccacaggtgcaaggagccgccacggcgggccgtccttgccaccataggagagccacactgcggcactgccacctcagggtcgtgagacctgcatcatgttgggtttcatcacaggaggacctgttgcgagtgtgttcttagctgtcattaactgtatacacctcagagt

SEQ ID NO: 6125 - DNA, 332 bp, Canis familiaris
  misc_feature (1)..(332): n = a or c or g or t
ctctttatttgcagtaggcaccagannnncgcaaggacggtgggatnnngtacctcnnngggaattaaccctnnngcttttctgctaaccttttcnnnctacaaccctcccaccagtttttggcttactcctgaggtagggcttacaggcgaggagatggaaggtgaggtaggataagatgctgctgcttttcntagcacccttccctcccccagactctgctgtagtcttccaatagaggcttctaaacccgtgtttctaagtggatgtgaactccttagcactccccgtgcagtggtaggtacttcannnatactgctcgcctatgtcct

SEQ ID NO: 6126 - DNA, 558 bp, Canis familiaris
  misc_feature (1)..(558): n = a or c or g or t
aggnnatagaaagtagnttcgaaacctaccggtgtagcctaccagtacaantgtgaatcctaggtgaggtacaaatgcacttccactgaaatgaagcatttctgaccgctttttcnnngttgtgaatcttaattttgaatataagattataggtaagcgcagctttcntnnataatctgaattcccaagtgccaggagtaggatttcattataaaattaatagctaatcttattctgtctcctgaagatttaattgctattcttgttacccatttgaaatcagctgtactgtgtgaacgaaataaagacaataactcgaacccctctctggctgcacggtcgcttatggcagttccacacagtagttggcgcccaatggggggtccctgagacttgcatgtaaaactagtctagatgtcttcttttttgtaagttttatttttgtaattgtgcatgtaaagcatcattgaatcaatggatctgttgaagaactcagctgctggaaaccatgcaaaatgttttgaattgcccttaaaatatngaaaatgttttctgaat

SEQ ID NO: 6127 - DNA, 511 bp, Canis familiaris
  misc_feature (1)..(511): n = a or c or g or t
tcaaattatnctnnacagagactcnnnaacgtgaaaaagatatgaaaattcaagccattcttctatactcttcacctccgcccccccaaagagactgtgaactcttcaaatagatggcaacagcttgcagctgtcgttcaccacaactcacataaaggaggcctgtgagtgtgtgagcatgtgctacttagttcccgtattaagaggagctgcacagatgagcccaggcccccaaaaaagacatgctgtaatactctaaccaacttaataccataatcaaaaatattcaattaacaataacagataaccctctgttctgacaaaggtccctttgttttccccatatttgccatgataataannaggtctttcagcaggggcatcatcagtaatgttcatgtcagaagcctggagctttctacatccgctccccagtggaacactctgcctttctggagctccgccatggaatgcacaaactgtgccgttaccaggcagccagctagtgacc

SEQ ID NO: 6128 - DNA, 557 bp, Canis familiaris
  misc_feature (1)..(557): n = a or c or g or t
taccaactgttttgagatcacgctnnnactgagnngcaacannnnnnctcgccaagannaattacagcgtgagtggctgggtaatcgagaagccctaatccaattcttagaacaggtccaccagggcatcaagggaatggtgcttgatgagaatcataataaccttgcagaggctgtcatttctgttagtgggattaaccatgacatcacatcaggtgaccatggagattacttccggctcctgcttccaggcacctacactgtcactgccacagcacctgggtttgaaccggagacagtgactgtgaccgtgggccctggggaaccaaaactggttaacttccatctcaagagaagcatgcctcaagcaacccctaccaggagagttcccaactcaggacatgaaggcagagtcttaccaaagaaagtgcagccccgggtcagctagaaaagaagagatggagatgaagcagccccagagagtccctacctgaaatccccagtgctggggccacaannnngaaaggcttgttcctgctttcccatcagatgaagct

SEQ ID NO: 6129 - DNA, 184 bp, Canis familiaris
  misc_feature (1)..(184): n = a or c or g or t
cancnggagcaccatcccctcgggaggggaggtggaatgctcccttgccattgggccaaagcgccggaaatgcaaataaagctcctggaagctgggtggcagttggctgagcagagctgggggcggggctcggccccgggccactnnncgaggcgggaggggtggggggtggagtgttacgggg

SEQ ID NO: 6130 - DNA, 535 bp, Canis familiaris
  misc_feature (1)..(535): n = a or c or g or t
attgaattgatcaacatcatcaattttatgagatatctaantngagatgtnnnnnnnnnnnaggtactaccggtatccannggtctacacaaataagcacatnnnacggtgagagggtatttggagcaaaaaggaaatcacagaaaaatgcggatctcacagaaaaatgactggattcatgggctgaggctgcggtgagtagtgtgagcagcagaattacctgacaggcaagacagctagacatggcttcagattaagaagcagctgaggggagtggacagggaggtgtctatgaacagacactttaacaggcaagtcaatccggagtagagaccagccagacttggggggtgaagtctgtagaactgaagcagaaaggaagtttccgtcttataatgaagcgaaaagtgagaagcaatgtggaacttggaaatgtaacaggaaaaccaccgtgagagtctgatttttgtgtgatatcaagtcaaactgaagtgnagaaagattgtgtatannnnnngtgacttacctctgtatg

SEQ ID NO: 6131 - DNA, 230 bp, Canis familiaris
  misc_feature (1)..(230): n = a or c or g or t
ctnntaatcagagctctgacagaatccagtcatcatttactccaataaactgttaagaaaggaaacaaagcaacgtcaagacctctctgcactacctcgtgagcagcgattttcaaattccagttctcaccggattttgtcaagtgtaacgcagccaactaccattccgagacatacatgtacatttcctgtttttttttttgtgacaaatgaaaccacactcaaagcac

SEQ ID NO: 6132 - DNA, 708 bp, Canis familiaris
  misc_feature (1)..(708): n = a or c or g or t
ctagacatnaaagaaaatggtgnagtcannnngtattccgttgaaatgagtaaagangagcngcagaatctaataagctccttnnnngcagctaataaggtggtcctgcagttgaaataactggaaatggcaaataccaacactgtctgagtccactgctaccccagatgcagccgagtgaatactgtgtgtccagaacccctgtgctactgactgttttgctgtgctgagnaagcaacagtgttgggattgcagagataaaaatgtatcgcttcccagaagaacaggaaatgacatggttgacaggaaatgcataaaaaatgatagatgaaaaatctataatagcagtttatattttcctaatggctgtttcgcctcatttattaaatatttgagaaatctttatagacagttttattgaaagctaaaaataggctctaaagtaatgtaaacgtaaaaagcacaaatatacttgaatgttgcttaaagaaatatatgaatagcaaggatgtgtattatggatatatatgattaatttgtattattttaaaaaataacttttaaagaatgtatgagctgcatatataactcaggagattccataactttcttctatttcaaaggaaagattataaaatgtaaaatttcttagagaaagaagctcctcttcaganannaacaagaaaaaaataaatttgtctcaacagt

SEQ ID NO: 6133 - DNA, 265 bp, Canis familiaris
  misc_feature (1)..(265): n = a or c or g or t
agtgacgtggtggcccagttcaatgcagccaacgacattgacatgatctgnngcgcccatcaactggtgatnnaaggttacannnnnnnnnnnaatgagactgtgctcactgtgtggtctgcacccanctattnnnnncncngtgggaatgtggcagccatcttnnagctggatgagcatctccagaaagattnnnnnnnnnnnnnnnnnnnnnnncaagagacccggggcatccnnncnnnnnnnnnnnnnnnnnnttatttcc

SEQ ID NO: 6134 - DNA, 560 bp, Canis familiaris
  misc_feature (1)..(560): n = a or c or g or t
ttggggcctgtgctgagcaaannannntnngtggagtgcatcagccccgtcactcccagagctccagatgccaaaatgctggaagagctggaaggggagccttggtaccaaggggagatgagccggaaggaggccgaggggctgctgaagaacgatggggacttcctggtcaggaagagcgccaccaacccaggctccttcgtcctcacgggcatgcacaacggccaggccaagcacctgctgctggtggacccggaaggcacgatccggacgaaagacagggtctttgacagcatcagccacctcatcaaccaccacctggagaacagcctgcccattgtctctgccggaagcgagctctgcctccagcagccggtggagaagaccctgtgaccggccagccaccctgtcctgaccttgcgccggtggtcaggagacctggttcttcccgggaaatgggtatggggggttccggagactcgggccactgcccacaggctcagagcctcatccaaatgctccaggaggaaggtgtctggaaagtgcaagtttcataaact

SEQ ID NO: 6135 - DNA, 572 bp, Canis familiaris
  misc_feature (1)..(572): n = a or c or g or t
aggagnnagctcttcaggcnnnacttcaggnngctgtgntatcagnacgctcccggaccccgcgaagccctctcccagctctgggagctctgccgccagtggctgaggccggaataccacaccaaggagcagattttagacctgctggtgttggagcagttcctgagcattcttcctcgggacctgcaagcgtgggtgcaggcgcaccacccgaggacaggagaggaggcggtcaccgtgctggaggacctggagagggagctggagganncgcgcaagcagctcccagccacatcagaaagacaggacacgcttttggacaagttgacccccttgggaaggccccatgagtcactgantacccagctccgtcccaagaagactcagcagnngcaggaatccagggagccccaaaggaatggtaaggagaagtttatgtgtgagggaagatgtggttccttgtgttaggagctttctcccttaatgttctcctttgccaagttttcttnntaatcctccatctnnntgtggannnttttatcccccccttcttaccactgcctcatcatgga

SEQ ID NO: 6136 - DNA, 501 bp, Canis familiaris
  misc_feature (1)..(501): n = a or c or g or t
tgaggcccagtgtggctccatgacnnacccacngaacatgctagaaggagacnnaagcatggatttnnacctgcgtgtccaggtgctgagctgccctcacccggaccctgcagccgctcaggtccttgatagacactcagggggcctctggtccagtcacaccagctgcttaggaaggttttcgtgtccctgattgtaagatccctcatcgtttaagccaggttgggctgagtttcctcccctgaagctgaaaacatccagccgaggactatcaggaggcaggggctggtggctttattttggattctctgggngctgggctcactgtgatcatagctggacacagaggtttgaagggctgagctcagcactgtcctaggtggatggaaagtacgcggggagccaggaacaggggagccctgactcttcagggcccacagtaaaggattccatctgttccggtttttaaatttctaccctatgttttgaatttttttactg

SEQ ID NO: 6137 - DNA, 153 bp, Canis familiaris
  misc_feature (1)..(153): n = a or c or g or t
tttttttttttttnngaaaatgtacaaaatatctatcactactgatannaggttaatatntctgtgtagaaatgaaaattggtntgtttttagtatttagtgtnnatgtacacattccagcaaatgtatttgcaactattatgtggtcaatgc

SEQ ID NO: 6138 - DNA, 530 bp, Canis familiaris
  misc_feature (1)..(530): n = a or c or g or t
gagaaaatacagaccaggacaggtgagatgacagtgaaatttctgagaagctgtcacctgnaggtggggatgaagaacaacatcaaatgggaactaaatcccgaaatagttgcccgccatttcttcaaaaatcttggtgttgtggtcgccccacatgcattaaagttaccagaagagcccatcacacggtggggcgagtactggtgtgaggtgacggctccggaagccctccatgtgcagcttgctctggtgcacaaagatatccactggggagtcaagcgcgatcctggcgtgggtgatcatggacaggaacctgaaccccttgtgcaagttgaaccacttacagatgccagcaccatgcagcagccgcggctcctctgcttccccgggcagcgtcctccagcgccttggcacagccacctgcaaactgctggcttgacacagagcccatggtagttagctgagcctgcagcccctggccactggtcaggtggctgctggccccagaaaagtccggaggcctgaagaag

SEQ ID NO: 6139 - DNA, 447 bp, Canis familiaris
  misc_feature (1)..(447): n = a or c or g or t
ccagaagtctagaacagtgcttctcaaactttattgtgcntgcgaatcactggggatcttgttacagtacagcttctgattcagtcgatctggggtgggggctgagagttcgcattcctaaccagctcctgggctgctggnctgaggcccacactgtaagcagccacacatggtaaatagtggaaacatgatccctgaagccacctctgccccctaactaactgccatgaatctctgccctgggggtgccctgcctctgcagccccaggggctctccataatccacccccttccagggccccagaccttggaagagagttgccgagcaaattatatatcggttgcataattgtcattgacactggagaggtatatcattgccaatctgcattttcttaccacactgttctgatgtaactctagccaaaaggaatttttgttttgttt

SEQ ID NO: 6140 - DNA, 634 bp, Canis familiaris
  misc_feature (1)..(634): n = a or c or g or t
ataagagctgtcagttttnngtggatgaagagtttcagaaactctnnaggagtgtcactgtggattcaatggatgannagaaaattgaagaatatctgaagcgacagggtatttcttccatgcaggaatccggaccaaagaaagtggcccctattcagagaaggaaaaagcctgcttcacagaaaaagcgccggtttaagacccacaacgaacacctggctggagtgctgaaggactactctgacattgctcctggcaaatagggaacagttttgttcatgagccaggagttaataagtacaaagtcaagatctttcttgttgatgctgggctctgaggacgtctccccatgctacttaggactgaggggagaagctgttcagtttacagaacaagagcaaattaccaaactcaaagctttctttaattgaatgggctaatgagatatgtgatattccctgttaaccttctgttacttctgggggaaaggcgcttagcatggcatgcaggtgtctttgctacttctatttctaagtggttcctggttccatttttcttcctttattactttagaacaagttggcagataaatagtcttgaatgcaatatttgtttattccaaaagnnnnnnnat

SEQ ID NO: 6141 - DNA, 244 bp, Canis familiaris
  misc_feature (1)..(244): n = a or c or g or t
gcagcnnnnnngcagagcnnnacttnnncgccagnnnnntgcaccagacctgtggcctgttcatggnnnnnnnatgcctcagnnnnngcctctttgcatagggttttcctccattagtannnacagntgaaacagntgtcctccacattgtgcacactggtnnngcctttgtnnncnnnannnnatatttggcannngcannnaacttgtgnnnnnnnnnggnnnnnnnnngaattcnaacaca

SEQ ID NO: 6142 - DNA, 559 bp, Canis familiaris
  misc_feature (1)..(559): n = a or c or g or t
tagagctgggtgccctggggcanctatcttttcagccctcaccctaggcccccagaagagcaaggcttcttaaagcccttgggtcccagcaggaaatggagttagtagagacttttcccttgggttagactgttccccgccctgctgcctcgcccttggctttgagccctgaaaatggaggactaggcactgggatatagtgggaagtctgaaagtgtgtttatgtgtgtgtgtgtgcgcgcgcgcgtgcctgggtgtgtctgggtgtccatgcatgtctacatttgcagaagtcttgccaccagttggagtgttgaaagcatctccactgtggggagacctaccatttgttttccccttttaagagaatgacatgccccctgtcnctaagggaggagcttttgagttagacattttccctatgggaatcctcttggtttggtttgtgggggggcggggggtggataagtgatttttatctctaattgtcaacacagctgttcttacactgaatttgtgctattgcatacatgtagccatctttcttttcactgcagca

SEQ ID NO: 6143 - DNA, 343 bp, Canis familiaris
  misc_feature (1)..(343): n = a or c or g or t
tcttaaatgcagcatattgctgtgcacatnnacagaatgttggctgagtatctatgtcccgannnnnntcatgctggtcatgacccgaaggagtggatnngcgcgtgctgtatgtcaggtgtttttaacttgatcatgatcggctctgaggtgcagctttacntcccacgtgtacatacctgtgaccactcttgggagtgctgcagtctaatcatgctgtctaaacttgtggcacaagttctcttgtccgaataaaatttattaataagattatatagagagatatatacacttctgattgttttctagatgtctgcaaataaatgcaatttgtgacctgtat

SEQ ID NO: 6144 - DNA, 206 bp, Canis familiaris
  misc_feature (1)..(206): n = a or c or g or t
tctaatccccacagcaaccaatacaggaggcattcatatgtnctgaaccgagtgttttttctgttcaggntgnnnatccnnnnnnnacagctttcttaggtataaatttattagcttcagccctccctcatcttattatagtttctgtaattaacttttgtttgttgttcaaactacctctttgccaaaggagaatgcttcctacc

SEQ ID NO: 6145 - DNA, 654 bp, Canis familiaris
  misc_feature (1)..(654): n = a or c or g or t
gagtattgttctttaatngatttctcgttgnnngtcttcagtactgannnnnnagaaaagcatatgttctcactgccaggtaccaaatgcagaggctcagtaaaggataaatctgnnaagagcatgccttttctttattagcaggcatagctggantaaaacaaaattgtgggtnnnnaaagaggtgaaagcnttaaatgaacaaatctagctaatggtgaatgaactaggtagttaacttgcatacttttaattcctttggctaaaggtaacccatacttcgttatccagagacatgagaagtatgattgcagtgctagttttcttgttttcgtttttttcccatttgtccctaatcactttgtagcaagctagaaaactgtggattctacacagctcagctctttgtgaaagtggttgaccactggagaaagaggggattgaaaagtcagttggcatccgtctatttcttgctccacagaaaacactgttcctataataagatcgcaaaagaagccgctgtgaggagcttgactcttaacagtaaggatcagagctttgtacaggaattcccataaattgagacttttcattctgttttatcagagtgcatatatgtcctatttcaggaaaagttaaaatggtcatttgcaa

SEQ ID NO: 6146 - DNA, 422 bp, Canis familiaris
  misc_feature (1)..(422): n = a or c or g or t
gccagcgtcaagctgtctacccttcaccccatngtgaatcacccacattacgaggatgcagacttgagggcccggacaaaaatagtttattccacatatagtcgaaaatctgcaaaagaagtgagagataaattgttggagttacatgtgaattactatgttttagaagaggcgtggtgtgttgtgagaactaagcctggttgcagtatgctggaaatttgggatgtagaagacccttccaatacagcgaaccctcccttatgtagcatcttgctcaaagatgcgaggccttacttcaccacagtatttcagaatagtatgtacagagtattaaaggttaactgagaacgagacaacccatcacactctgatgcaaacaagtgtgtagaaaacactttnnannatttatgtcaataaaatca

SEQ ID NO: 6147 - DNA, 534 bp, Canis familiaris
  misc_feature (1)..(534): n = a or c or g or t
ctgattttccgcacatcgatgagtttttnannttgaactcgacgnnatctcngnntgcctacgatgagccccacttgctggtgaacattgagaagcagaagctggagctggagaagcggcggctggatatcgaggccgagcggctgcaggtggagaaggagcggctgcaggtggagaaggagcggctgcgccacctggacctggagcacgagcggctacagctggagaaggagcggctgcagatcgagcgagagaagctgaggctccggatcgtcagctctgagaagccgtctttggagagtgaacttggccaaggcgagaagtccctcctgcagccacaggacatagaagcagagaagttaaaactggagagagaacgcttgcaactggagaaagacaggctgcagtttctgaaatttgagtcagagaagctgcagattgagaaggaacgcttgcaagtggagaaggagagactcctcattcagaaggaggggcacctgcagtgacttggttcctgctcatccagcaaatgta

SEQ ID NO: 6148 - DNA, 460 bp, Canis familiaris
  misc_feature (1)..(460): n = a or c or g or t
gctaagactttttcaggtgaacataaaagagacttggctaagctagcatcntagctgaagcagatactccagtgttcttcagtagggttgtaaaggtttttcttttcctgagaaaacaaatttttgttttctcaggttttgctttttagccttttcctagcttaaaaaaaaagcaaaagatgctggtggttggcactcctggatttccaggacagggttcaaatccttgcagtgtctttgcttgaactacgatctcttgtcttcaggcctccttccatttcctctttttagatgttaggctttgggatttgggggagatggaaaaacacttcgtggaattcagccagaaacctaaatctgtttttatttatgtgggaacctaatgataactgccttgtctctttaattttcaggtggtccccatgcatctagtgtttggagaagacttgctttggaagtc

SEQ ID NO: 6149 - DNA, 368 bp, Canis familiaris
  misc_feature (1)..(368): n = a or c or g or t
ctcaggtcaatagaaacagccatgttttatttctctgggaccatgaagcgggggtccagagtcacaccatcgccccttcctgtccagctccctgcctcattcacatactcctactcatgcccttcatcccccttcccacctacacccacaccatccccaccagcagcaacgttcacagcaggaggaannnnnnntccaacatctccccactggaagccctnnnnnnnnngtgtgtggnctgatgcagggtcccagggaacagaaactcaagaatcccaaagagacaggcgaaactctgaaccctatcagcagagaagacttcccatatttcgcaggcctggggattgggactgtccttggtgtaaagc

SEQ ID NO: 6150 - DNA, 634 bp, Canis familiaris
  misc_feature (1)..(634): n = a or c or g or t
gagttcttctataaacattnnggcatgcatttccttcattccaccgtcacctcagtgccactttgcttcctttttctcttgctgccccccatggcatttgagctgtggaattgagtgtggggcttaagacttagcgtgataagaaggaaatggttattagcgcctggttcatgctttagattgaaagaactcttttttttttgaaatcagacttattgaggtgtaattaactatagtaaactatagtgaagtttaccttgttaaatgtacagtgtgaattttggcaaattcatacagtcctagaacagctgccaccgttacataagagaacacttccatcaccccagaacagctcttacctctttgttgcggtcagaccctctctcccccaaccccagcctctcacaaccacttagcaaatttctatccctctagttttgtcttttccacgatgttgtataaatggatataagagttatatccttctgtgtctcttttgaaatttagcaaaatgccttagagattcatctatgtttcatgttataagtagttgattcctgtttctcactaagtagtaaaagtctgtttaatggatgtaccagttttctttactcattcaccaatggaatggata

SEQ ID NO: 6151 - DNA, 415 bp, Canis familiaris
  misc_feature (1)..(415): n = a or c or g or t
catggagtcaggtcaggcancaggatggggacccggctccgattcctgctacccagaggacagacagcttacctttctcttnnngtccacctgggagaaaagctcatccatgnctgctaagtacttgtcctgcggagaaccaagcagctacgcgtgggccaaatgccccttccccctcccccgggcaccctccagtcacaggcacgcaaacacgcacacatccacacgtgggctggggcannnnnncgtgcttggcctcgatgcaggcctgctgggcccggacgtggccatcatcctcatcaccctcgtggttccgctggcattcttctagctccctgggggtcgaccaggagntagtcaggaatgggtctggccagaagagatcacactccaccccaacnnnnngcttgttcag

SEQ ID NO: 6152 - DNA, 535 bp, Canis familiaris
  misc_feature (1)..(535): n = a or c or g or t
gcnnnntttgnnnnagcaagttgncagctgataagtcgcatagaacagtttctggatactaatgagacaccatattttatgaagagcatggactgcatcacagtcttccggcaggaagccattcagttttcagaagagcaacgctttaatgatttcctgaaagctcttcgagagaaagtggaaatgaaacagttaaatcatttctgggaaattgtcattcaggatggaattactctgatcaccaaagatgaagctcctggaagttccgtcacagctgaggaagccaaacagtttctggcccctaaagaacctccaaatgaagacacagcagccatatttgcagaaggtggtgatgtggatgatttactggacttgatataggtcgtggctgtgtggggaatctacgagagttgccatcgctgttgtgctgggagttctatccagaggaagccatttgcggggaactggaagctctggagatggtccctgtcggttatgtggaagtgaagctcctaattctctggaatgaatatat

SEQ ID NO: 6153 - DNA, 527 bp, Canis familiaris
  misc_feature (1)..(527): n = a or c or g or t
agctcgctgtacaccacctccctnnncatgaaggtgtgcannnaggactccttagccatcnagctcagcaacaggccctccnngcnggagctcgaagaaaagaacatccttcctaggcagacagatgaggagcgattagagttgaggcagcagatcggcaccaaactcaccaggcggctgagccagaggccgacagcagaggaactggagcagaggaacattctaaaacctcggaatgaacaggaagaacaagaggagaaaagagagatcaagaggaggctaacccgcaagctcagccaaagacccacagtggaagaacttagagaaagaaagatcctcatccgtttcagcgactatgtggaggtggctgatgctcaggactatgaccgcagggccgataagccgtggacccgcctcaccgctgccgacaaagctgccattcgaaaggagctcaatgaatttaaaagcactgaaatggaagttcatgnnnngngtagacatttaacaaggtttcaccgaccttaaca

SEQ ID NO: 6154 - DNA, 297 bp, Canis familiaris
  misc_feature (1)..(297): n = a or c or g or t
aatgtagaataaattgnctattttgggggggggatgaattaggcttttggaacatccnacgtcaggatgattttttcattttccgattggcaacaaaagctctatatagggccgcaaacatttatcgttcacaaatcaanntaaaagtttctgtattttgaggaaaaattgaaatttttcctcctaattttgccattttattgatttgctacatttttttgatttatgcaaaagcatatgactttgtttttctctgatgcnncataaatgttaaagtnttgaatactaacantgctt

SEQ ID NO: 6155 - DNA, 499 bp, Canis familiaris
cacggtgactccatctctccttggctgaacctgctcctgggcccaggctgagcacctctcctggagtccttcctggcgagcacaggagtctcccttgcccccactggctgtgggttttcacaccacctccaccgggcccctggtccctcccacatctcccacaggccaagatcacagccctccctgtgctttgccgtggttgttgggttgttgttttgattctcaacctaaccccattataccgagagctccttgaggtcgggcgtcagacttacaatgggatcccctactccaaccaccacacctgttccctgggtcctgtctccgcccccacgtttccactgagaggtttggcctgcctggcccctctcggagccatctctggtggcgtggtgccaggagtcggggccgcttttccagggtgtctgcctggcccactctcattgatggtgcttgtttgctttacccacctcaactgctaaatggcaattaaaagctg

SEQ ID NO: 6156 - DNA, 563 bp, Canis familiaris
  misc_feature (1)..(563): n = a or c or g or t
ttcaccatcccctacctganagcacttctcccgtcnnagcnnnnnatgcaacagatggaagannnnnattcctcnnagcaggatgagcagacagacacagagaacctccctcttcatatcagcacggctcatactgagacatgtttttaattctctgcatgtgaggcagcccagtgtccaggtgcaagtgggggcagccggcccgagggtaaagatttcccatggacatgtcgcttctggaacacattcaaggtacttctcttggagcgagcggctgatcctcatctccattttattaccagcttttccttctttactaaaaagttatcttatttaattttgaatagataatatttgtccacagtataagtaatttcaaaaatggagaaagatgaaagtggtgactaagcagctccttctttccgtgtttcccagactcctgggtctcgtctaccgggtatgataccggtatgatagtagcaatattatcttacatgctcttccagaaatagtctgtgtttcgaaggcaagtgcttatatatactctctcctnnnnntacata

SEQ ID NO: 6157 - DNA, 534 bp, Canis familiaris
  misc_feature (1)..(534): n = a or c or g or t
gtcgtggccgacacccaggagtacatcatcgaggccaccgcagacgacgcggagaccagtgaagctgcagagatcattgaggggacccagacagaggtggacagccacatcatgaaggtggtgcagcagattgtgcaccaggccagcgcgggccaccagatcatcgtgcagaacgtgactatggaccaggaggcagggctgggccctgaggctgcagcggcggacaccatcaccatcgcgacacctgagagcctgacggagcaggtggccatgacgctggcctcggccatcagcgagggcaccgtgctcacagcccgcgcgggcactaatggcagcgagcaggccactgtgaccatggtttcctcggaggacattgaaatcctggagcatgccggcgagctggtcatcgcctcaccagagggccagcttgaggtgcagacggtcatcgtctagcgtggccgcctgtaggctctcaggcagggctgcccaggacccggannnnaggggacacgagttcaggtgttcagaggggat

SEQ ID NO: 6158 - DNA, 510 bp, Canis familiaris
  misc_feature (1)..(510): n = a or c or g or t
gtgtanngaaaatatgcagaaaaaatatggcttgtccttacacccagatgagactaacaacttgctggaaatggtttttgtcccaagaaattcagaaaagtgcctcaaacactaaagaaggttgatcagtatctactctgagcatttcatcagtagttcacatggaaactgcctgtctttaccaagtagcgtcatcctcgcagtgaacatttggtggcctatgccattttatagccatacctcatatggactgtcagcaagtcaggagacattggtcatctgtttttgtccaaaccagagaacttgtctttcagagaaaatagaggccaagagattgcagggaaaatgctcaattccacaaaacatgctttggaaaagttaggccatcagcaaactttctgtcctccttcccacaaaatttccactgccctgccccaagagcattttgaggtctcgggcagaagcactcaagtccattagaaaagctggctgatgtctgggtacttaggg

SEQ ID NO: 6159 - DNA, 537 bp, Canis familiaris
  misc_feature (1)..(537): n = a or c or g or t
ctactcccctctcctggctgctnnnaacaggtcccttcaaccctgtnntctgctgggcccccagcaaactcgagcaatagcagctgctgctgtgacattatgcaaagcccctgcccagtctgctgcagtatttacacctgccctaatcagaggggccacctccaactcctcctctcttctcctctggtttgcttcctttctgggttgggctggagtctggactggctgagataagagcctagtagccagcgagagctgggctgtgtttgagatcatacctgattccatgttattgggcaggagtctagaagcatcaggggctgagacctgggttgttcccaaactctgggagttgtaggagggcaggagggacttcttgatctctatctcttcctcctcctcccccaccccaacaacaccttttcacatattcctctttcttttccctctcgggtcaccttccggaattctgtgtctgctctcaggctgaaatcaggcatcatctcaggttccctgttccccagcactgtccccgtg

SEQ ID NO: 6160 - DNA, 299 bp, Canis familiaris
  misc_feature (1)..(299): n = a or c or g or t
cntgtctctctggtcctcaaacttcaatcctccttaactcttgcctgnncttgctggtcgacatttcgtgcccgccagggtgtttttttttaccacctccctcttattatcatctcacgtctgctctccaataaaatgttaagtacactggctcttacctcccatctcttctgccctctgcactgcactgaaaatcctcgggcagcttcgtgctggtgcaccgccgcccacccttcccccaactccagtgtctaagttgattccagtaacacacaaggnnnnnnnggaagtaaaggctc

SEQ ID NO: 6161 - DNA, 542 bp, Canis familiaris
  misc_feature (1)..(542): n = a or c or g or t
aggacagnatcgntctcatcacgccgcccccactcgggnaggctgcgtgnnagcaggagtgcctcctgcaaggcgnctgnntccaggtggcccaagactgtgggatcgatgtccttgacctgtggaccctgatgcaggaggacacacaggccaggagcagcagaggacagcatccagggtcctggcttcgtctgggttggcgtccatctgagaagtttgagaactgaacgctactgtatgaggggctcttacaaagaacgcttgaaggacttctcgtcctatctgtcagatggactgcacttgtcaccaaagggaaatgagttcttgttctcccacctgtggcctctgatagagaagaaagtctcctccttgcctttgctgctcccttactggcgagacgtagcagaagccaaaccagaactaagtcttctgggagacggggaccattaaccacagaaaaccaagtctggccattaacttgccagaagtgacaaagataagtgatcagacctttgctcatgaccttggaataaaaaacgctg

SEQ ID NO: 6162 - DNA, 648 bp, Canis familiaris
  misc_feature (1)..(648): n = a or c or g or t
tggtaggagannaaaatgttgtagtaagtgtgcngtnnnnagttcatgaagacannanggttttnnnanatacaaatnctgggttgtttggaggnatggtnnnnattataagagactatatttattatagaaatattttgaaaataatagaaaggtannnactactcatggataaccactagtaacnnntagatgcaaatcattcccatcttctctcatagttttgggctcattctttgttgttttgggttttttcttaagatttttttaagtaannnnnnngcctaacatggggctcaaactcacaagccagagatcaagagttccatgctccaccttnnngagtcaggcacccctgggcttgtcttttattgttgtaaaactgtcatcagattgtatacaagtgtgtaccttttttttttttttttgctaactattgacataagtcttctttcatgtatccaaatcctcattgtatctgtttgaaaatccattgagtggatgtaattatttaaccattcccctactagggaacactcgaattatttctaattctggtgctctttaataccagaaattaaactgacaagaaagtctgcattgcataaagctaaatcttggcatacacgtacagaagtgctatcatca

SEQ ID NO: 6163 - DNA, 541 bp, Canis familiaris
  misc_feature (1)..(541): n = a or c or g or t
cagactttgccataagctcccttaagaaacgagctccacnnaagcagaggtatattaagaaggcnntaagnntnaaccaaagatcacattcataaagggcaagaacctgcagttaggatgtcccaaccctggtgtgaggccacagttctggcttctggcagaggcctgtgcaaatggctctggaatctgaccagaggtatcaaaggtactgaacccattcagaacatttaagtaccgaggtttaaacatgggatcaggtgtgtgaaagatcttcatatggcctcttagaagcaagaggagtgcactttagatatgtaaaaattggctccaaaaagccagtgaacatattcagtgcctaaacccctaagattcagagctatgagtctgcactgctggaggacacccataggcttgtaccttggcacctgtgccccagtgaccgttccagctcagcctggggaattcagtgcacctcccagctgggcttactcacaggcagtaagctgtatagtgtttcacataaagactccacaagaaaggg

SEQ ID NO: 6164 - DNA, 587 bp, Canis familiaris
  misc_feature (1)..(587): n = a or c or g or t
tctatccgtttggaaaaaataaagttgtatccttacctcatccatgcacaaaaataaatttcaagtagattaaagaactaagtataaaaacaactacataagtattagaagaagctatggaatatatgtcacaaagctgctttctagctcagcacccttgagaaagatcacttggcccatctgtccctgcttcctcatctgtgagtgagggcctgcctcagaggccttgttaaatgagtgaatataccgagagcaccagagtgtgccaggcacgttgcaaactgtgttagagcatccactttttcaaattttattcattttaataatctgatagattaacaagtgctattgttttattttgtgttgctaattaccagtgatgttgaccatcagtgatgttgactgtcttctgtaaacttcctattcatacctgttgcctaaagatttttttttccttttattgatttgtaggagttctgtattatggatattaatcttgtttatatatatatatattttctttcttaacatcactttgttagtatctgttcatggaaattgataatccatcatagacaggagtttna

SEQ ID NO: 6165 - DNA, 574 bp, Canis familiaris
  misc_feature (1)..(574): n = a or c or g or t
tgacacagagctcatgcctccaccacctcccaaaagacctcgccctttgacctaagacctgcctctgacttaaggattgagaggaaaaatgagtgagaaaaaatgctgttgccccatttttgcagccagagaaattcgaaaaagagtgtggcttgatgttgatacacatttgatttttttttttttttaaaaagagaagtattgtagccagcctgtaaatatttgatgcatttgtttcctcagtgctacaatacatcgtggaccttaaacattttatttatatctgataaactcagccttaccttgtgaatctgaagattaaaatatccaaaggtttaattgagattgaaatcaatgaaaaagaggccttgtttgtatatggataacttttatctttaatttataaagttagtaatctggaactgtgagcgcataaaacattgtattttttagaagttgaatttcaacaatggtaaattttcctttaaaaaaaaataggcaatggcnntnancattcttgctatcacatcatggatttcctacatttctgagattcttgtattcaaaaacaaat

SEQ ID NO: 6166 - DNA, 593 bp, Canis familiaris
  misc_feature (1)..(593): n = a or c or g or t
tgcgtgctgatnntcatcttcactgtgctgctccagtcnnnctgcnnnnnnntcacctacatgtacttcancannnnnctgangcaggtcagtgncgnnnnnnncnnctacgctgcccccaggcccnnnctgtgacacccccggtannanncngcggnnngnntctgcctggggaccctgactgctcccgcccgggcttccccannagnntgcggacggcggggtgggaaggacgggagaaccgaggtgggttacagaccccccggcaccaacgggagaaccgaggtgggnnacagaccccccggcaccagctgcccgcagaggcaggagcccgaccccgagggcttggctctccctggttttcccttccacaagagctgcattttttcacgttagcccttgaaccaagtcctggaatgtcgtcaggtttctctctctcctccaagacctgggggagggggcaggtcagagctttgaagcaggttctggtctcggccgtgtcgcatgtgcgtgtcgacagcagcgaggccgcagaggaccggtatcgtctcttccttggccgaagacacgtcatgcctaaagtctgtcatgca

SEQ ID NO: 6167 - DNA, 591 bp, Canis familiaris
  misc_feature (1)..(591): n = a or c or g or t
gtcaggtgataaagacaagaacgtgataagccctacaaataagacctggtgaatgctgtctccacctgctctgaccacagattgnntaagaaccagtaagacccattaggaagacatagtctaggattgttctttttgcaagtctttggctttagggtattgaagcaatcagcagagataataaaatactcctttaaacatataattacagactctatgctaattcacataaccaagaagggaaaaatgtgcctcctaatcctgtatcacctcaaagttcaggatattcaaagattttaattttttttaaaacatagggccacaaagtccatagatgcttataaaccaatgcaccaaaaacagtcatcttaaaaaaaaaattaagtcatttgagaaggggatcctatgtgcagctaatttaaaaaatgcaaataagcaatacaaaagaatgcaaaaaactatgccaagtgactactacacaaaaaacaagcaaaaaccccaaacaaaaaacgaacttggaagcaagaaatgaggccttcaaagaaattacgaccaatgttacagttcctgaagtggataaagcataggctt

SEQ ID NO: 6168 - DNA, 290 bp, Canis familiaris
  misc_feature (1)..(290): n = a or c or g or t
ttccagnntggcttaaaaaaaaaaaaaaaatgctacctccngtcncttcagggagcggtgagactgggggaagaaaaacctggaaggcagggcagaggaaggagaactttgcatccnnccatcacannctcagtttgcaggatgggcagggactcctttgggagcgatgctgcccagaagaactttctgtagtgatgagaatgctccatatttgtgatctgagagccactagccacatgcaacttattggatacttggtatttgcctactgnnnnnnacggagggctgaa

SEQ ID NO: 6169 - DNA, 526 bp, Canis familiaris
  misc_feature (1)..(526): n = a or c or g or t
ctgccggncgaggccgannagcactcgctgggcgngcagatgnaggacattaagctggaggactcgtccccccgggacaacggggcctgctcctccatgctgatctccgacgacgacaccaaggacgacagctccatgtcctcgtactcggtgctgagcgccggctcccacgaggaggacaagctgcactgcgaggacatcggcgaggacacggtgctggtgcgcagcggccagggctcggcggcgctgccccggagcgccagcctggaccgggactgggccatcaccttcgagcagttcctggcctccctgctcacggagccggccctggtgaggtactttgacaagcccgtgtgcatgatggcccggatcaccagcgccaagaacatccggctgatgggcaagccgctcgcctcggccagcgactacgagatctcggccatgtcgggctgacccgcgccttcgggccggggcaggagggctggggctggcggcttggttggttggggtttttttaacgttccgt

SEQ ID NO: 6170 - DNA, 584 bp, Canis familiaris
  misc_feature (1)..(584): n = a or c or g or t
cccgaccccaccccgctgaggggtgccaccaagtgccagttaggntnntgcgcggtgctcagnnggtnngagaggcgggagagcgtcgtctctttcagtactttgaatgaagagcgggctggggtctcagcattgtctctgccgggtgctgagggtgtccaggttgggggagtgggagggggctggacggtgtggacgccctggtgagtgggagaccctgcggaagcccagaagtagctacggtcgagaccttcgtccatctctcccgggctggctctcgcggaagcgccccaattacccacggtacagagccgggctccgagggtgggcgtcagcactcgctagagcgggccgtcgcggcatccttagagcccaggacactttaccgagacctaggtgggcaggtggcctgtcgcaggccggaaatgaggaagcctcgtggtaaaagggtagcagaatgccagttcgactggtggctgtcccattccctttgactcaaaggtgccagcggaagggtgaacaggtttcctgaaacctacttgcaccaccgatgaaggacattaaactattattattctgtaccc

SEQ ID NO: 6171 - DNA, 392 bp, Canis familiaris
  misc_feature (1)..(392): n = a or c or g or t
ccatcacaggaatatgtcgcangtgaaggtgaagaagatccagaagtcgannnnntaaagtcactaacaaccaaacaaaaacagaaacttctcagggcccggagacacctttctggccgttcttccttgagacgacggcggcggcggcggctgctgctggatcggatcaggccacgctgccggcggcccgcctttcccagcctcagtcaccgaacatttcctgttcctcacaccggagctcgaagactgcagaatccccccgagccgtctccctctcctgcctgcgcggtgcccacgggcccgggtcgcggggggcgccgctcgggaaggccgcgtcctcgggcctcggggccgcgctccgggtcagggaggaggctgcagggccgcttcag

SEQ ID NO: 6172 - DNA, 503 bp, Canis familiaris
  misc_feature (1)..(503): n = a or c or g or t
atgtttcccctccttctgtgcaccccaaattaatgtgcagcagatgccaagaatgatagcttcagtctgtcagaccgaattggggttttgataaaggatagagttgccaggatacccccactcctgcaaacaaaacctctgaggaaggggacgatggcatgtccttggttgtgggtggaggttggggatcctgctctgggtttggggcactcagctgctcccatgttcatccttgcctcatttgcctccagcagcccagaccttccagtagcttgctttctccccaagaggaggtttgaggcaggcagcctcctgccctcggccacgcagacagatgggagcttcaggtnnnnnntccgcagccttcactccacctccgtcggcccatcttccttctctgactttttaaactggacctaagactaaagggacttgggatcctctgatggcttggggtggggatagcatttctttgaaagttgccaaatgtnttatgttgtagt

SEQ ID NO: 6173 - DNA, 521 bp, Canis familiaris
  misc_feature (1)..(521): n = a or c or g or t
ggtcacctcnnnnnnngtataaaaccccaggctttttcttctcatagtccatttcccaggcttgtgacttnngtttttcattctttaattcatgacgaattccaaactttatttcttttaggcacaactttctccctcttgcgtctcccttccctgtctcccttctgcctctcctctgttccccattcccactttcttcctccttttgtcacatctcccaacccaggatctttgataacctgcttaatgtcccaaagtgcagaaatctgatggtgctcaggaatctaatccctactgcaaaaaaatccatcccctttaactgcttctaaagtaattctgtcgacctttctcagagttgtttttttgttgttgttgtttttttctcttgatatttggtgctccaagcacttttttgtttgtctctaagttgagcgcttggaggttgacagntagtcaaatgtatgtagtttgacactgttaatttgtttaatgaatatagtcaagagtttgttgacaaataa

SEQ ID NO: 6174 - DNA, 657 bp, Canis familiaris
  misc_feature (1)..(657): n = a or c or g or t
cagacgcttccctgatgnggcgncctgaccaagctgnnnnntcgccgccatcagtctctggcacccctgctgctgccctgggcctgggcctgggcctgtggggctgtgggagccctccctctgctctgtcctgtgtctcatgcaccctggcgcccccgtcggtcagctgtctggtctgagaaggctgccctcccccagcctaggccagagtggcaggaaataggcaattgtgaggtctgagagctgaatgccttctccgctgccttacccaggctccaaggcctctctccccagggctctgcacgggctctggggctcctagtgcctgccactccgcttccctttcactgccaggccttcatgccccgagcccaggagacctcagaggcagtcagtgcccaggtgagggctgccccctgttctccctcctatgccggctccccacccaccaccacctctcgccaactgtgatgggggctcagcctgcaggcctggaaggggtcacggacagaacctgccatcctggtgggggttcatccgcagcaggctggcctccctggaggcctggcaccacctagacacttgagtgagcatgtgcacgtccccagatgatgatgctcaatctgtggttggttnnnnnccacgggtctgtgacct

SEQ ID NO: 6175 - DNA, 266 bp, Canis familiaris
  misc_feature (1)..(266): n = a or c or g or t
agacagagagattggnggtaatccactcactcagtgtggnnnnaaactgtgggtnctcagtagctgaagaagccatgtactgtatagtgtttttctcagagtttcaactcatgttcttcagatgcttttctttttttaatggtgagggaaaaggtgtaatttgggattccacagtgccttgcatatagtaggcgcccaataaatatttgttgaagcaaaccaagttttccaagtccttgcctcttgnnnnnnnnnngaacatcttt

SEQ ID NO: 6176 - DNA, 500 bp, Canis familiaris
  misc_feature (1)..(500): n = a or c or g or t
atggtgctcaaacccgctcccctccccgacgtcctgcactttctcggaccaggcccccactcccgacccgaccccaaccccacctgagggtgagcgactcctgtactgtaggggaagaagtgggaactgaaatggtataaaaaaaaaaataataataataataaataaataaaaaaatttaaagttttaaagaaagaactatgaggaaaaggaaccccgtccttcccagccccggccaattttaaacacacggaccttccccttccctacccactcccgcccccttttcttttcaaagcgtgaaccagcccagggccagggcctcactggggcagggacaccccgggatgagtttctctggggcttgatttttgtttcgtcggtggttttttctcccacgctggggctgcggtcgggtggggggtttacagtcccgcccctcgcactgcactgtctctctnnnnnaggggcagaggggnnnnnccaaccctatccctatt

SEQ ID NO: 6177 - DNA, 557 bp, Canis familiaris
  misc_feature (1)..(557): n = a or c or g or t
cccatctngnanccatcgttctgagtggcagttcagacctcctgcactagannaaatcccatggggggtaaggannagggctggcccaagtccccgccccttgtggggttcccgtacccttgtactcaagcctcaagtccacggcggccgtgtctggctctgagggagactgatgcttgtctcccatccaagggtgaacacacaagcccatgcctgctcctgaggtccctttcaaatgcctgttgtctaggatccaaggaacccaagaacaaataaagtcagggttcggcagagcaacgtttcccaaaggaggatcctgcagatgttccagggctgaggggagggcctgtacatgcccaagggggccaatgatcctggaacgtgctttgggaaaatactggaggtgggattaagataagagtttgggttgaaattccgtatctgacatatggtgagggggtgaccttggacagctgcctcagctaatctgtaacaaacctacaggactatgagtggacataccagaccccccccgcctcccttctaacccccagttg

SEQ ID NO: 6178 - DNA, 641 bp, Canis familiaris
  misc_feature (1)..(641): n = a or c or g or t
atttccattactcgaatgtnngtgctgttgnntctgccggactgtgaattctagcagcangaccttcgttcatcatttgtaccccacaaaatactgaaatactggctgactagncctggttnnaaggaatctggaccctggtctgagatgttctgtggttctgaagccaacctccgagatggggaatccatggtagacaccgggcagggtggaggcctcacttccaatgtcagcagggagcccagggaaagaaaccaggcctggtgcaaagtgagagcatgacatggaacccagggcagtggcctctcattacggtgccctcccatggcagcaggactgagtttttaaattgaaaggcaagtcagtgctccccaccaccacacacacactgatttgaagtacggagagtgctcattaccccgtttacgtcaggatgtgtaacacaggtgaagctccctgtgtgtgtgactgtgtgtgcatgggtgactgtgtgtctgtgtcgctgctatggctggatgcaaacgacttgatcgtttatgtgatataatctaactccccacagcacgctccaaaatccttagcatatgttgtcatcagccctgaatacagctctgaagcaaggtgattgtgcttctccagga

SEQ ID NO: 6179 - DNA, 604 bp, Canis familiaris
  misc_feature (1)..(604): n = a or c or g or t
gcacatacagctgatactttgtttataaatatcntaggttgccnnnctcntaaatatatattnnggtgaagctggggtgcactgttacttttctgtttganatgcattctaaagatgcaataaatatgattaccttgatattttttaacgagatcttcagttcttgcagctaactgtgttttgggaagtgattaagcaatatttttcaaacctgatgattcttgggtatttagctattgtcctccaaagagtcatcgtttcatgttttcaaagatgtactttgtgctgaagattcatgtcagttatcctgtgcttccaactctcaccaatgttttttacctgattgatccgccaaggattgtagtttgcttaaacttcagagtatttttatcttcaattttatttaattttgtttcattttgttttcatgagacagtgtttcagctatgtaattggggcaaaccactataggcttatgttggatagaaaagtgaaatgttactaatgagttgaaaaataaccgacttttggttgcctatcagtactgttgatacatatattagaatgtatgtctcagaagatggtttctgtttaaatttatggt

SEQ ID NO: 6180 - DNA, 546 bp, Canis familiaris
  misc_feature (1)..(546): n = a or c or g or t
gcagtgctgnnnngagagcaaatgggggtnnnnnnnnnnagatcnnnnngggcatcnnntggtgaccagatgcnngccaagaaagccagtgggtgtgatgagctccacgcaggaaagcacctctggnnannngntcntgctgnngcactcaggggccatcatagcaacaacacaaacacagccccacagactgctgtaccctgtctttttcctaagttcagagtagcaggagctgccagtggccccgcgatcagaattctttgagcactgatcatatatgggtcagaaaacagggatgagttgatctatcttcctaaaatccatctgtttgcaagatggaccctaaactaacccgttcttttggtaccagtcgattgatgccccaaaggtggatacacagcttaaacttaactccattcattcagtttcctggattcaaatttctgttttccacaaagaccaactgacttcttttttaaaattcattgagttctctattggtgggagcgatgtgcatctcagannnnnnagcgttctggataatac

SEQ ID NO: 6181 - DNA, 562 bp, Canis familiaris
  misc_feature (1)..(562): n = a or c or g or t
gagaatttcctaccatngtaaanctctgaacataaaagtaacaattccagcttttgcttccatcttcnntctgctgatcctgctatggctcatcaatggcacctaacatgagtatgnaggtcttcttcttccaccccttattcttgtttttaaaaatggctacaatagttacagaaaggatgtatcaggaaagtcatatattgaacagaaaaaggaaaacaaaaattctacagtcattgtaattcattcagtaggtttcagttaaatggctacttggggtgggttagtcttggggacccccacaaccatgtcacattctacctgaaatcagagggcttgctgttaatgatggtgtaattctaggcagcaaaggcaaaataaggagctgatgcaaaccgccccccaccaaatgaaaaagctcttttactatattaacacttttgcatgactgcgtaggaccttgtttctgactcttcctgaagaaaatgttggtagctggtatgacattgaacttgccaaggtttgccttttcatactatctgcaaaatatttgagctacttt

SEQ ID NO: 6182 - DNA, 514 bp, Canis familiaris
  misc_feature (1)..(514): n = a or c or g or t
gannnagatgatctatcccttcnnactcgattactaaatggnnnagcccagcaaatgatcagccttgcaaataaccacagattagctgtacttttaacaaatcagatgacaacaaagattgatagaaatcaggccttgctggttcctgcattgggggaaagttggggacatgctgctacaatacggctaatttttcactgggaccaaaagcaaaggttggcaacattgtacaaatcaccaagccagaaggaatctacagtactgtttcaaatcacacctcaaggatttagagatgctgttgttgttactgcatgttctttgcaaacagaaggttcattgaattcccggaaacggtcgcgagaatcagaggaagaacaggaatccaaagactagtcttaaagtatacatatgtgttgattctgtgagatgtaatatatacaagtagtagattctttactttgaaataaaaacacacagtatggcttatatgaatcaagagcatatgaagtgagtg

SEQ ID NO: 6183 - DNA, 126 bp, Canis familiaris
  misc_feature (1)..(126): n = a or c or g or t
ctggcacgtgggcttagggnnggtgttcgtcctccggggtttcggccccttggatcnnccgtgtgaggcttcggcggaccactggggtgaggtccttggccttcggtctnctcaaagttgccccca

SEQ ID NO: 6184 - DNA, 515 bp, Canis familiaris
  misc_feature (1)..(515): n = a or c or g or t
gtagagggtgtcttatactgagaacattgtcaggggctaggtttgatnnggnaccacatgcagtgctaaagtttgtgctttgatgaccaacagtgtaatgaggacatttggcattggacaattctctatgtgtggaaccatcctccacagtgcaggacaattaacattctgagcagcagaccacccaatgcctgtagcacccagaggagttaggatattcccaactctcatttccattccaaatgccctcagagctggaaggactactgccccctgttgagaactactggttaacaggatcgttatttttcttcttaaacacttgaagtctcattagattttgacagaactcaagaaatacaagaaataagtcaccacaataaacagcaattgccacaaaatttaaactctccaacaatagcagttagttcctgcagtacaaagacatcagactatggattacatggaattggtatcatatgcctctaaacacccnnnaggaaaatgttnnntct

SEQ ID NO: 6185 - DNA, 526 bp, Canis familiaris
  misc_feature (1)..(526): n = a or c or g or t
agtgagctcaanntgcttttatggcacatccagaccctacagctcagagnngngttnnggcnnnnnnnatgtcacgtggttacatttagacaggggctaaatcaccactctaacatctcaatgaacacttnntgaggaaagaatgcttgatttggaaatggtggtgatatttcttccaatttgtgttaggcgggataaggagctacaaattagttaaaagaatatgtcccgatcttccaggaaggcagccaagagttaaaggtgtaatgtcagtttagcagggccagtactgccagtgcttctgaaaaagaaagtatcttgtgtttttctgccttgagtttataaccgaaatgctgtttctaaaggagcagtgtgggaaggaaagggatggtctgtggccccacagagaggaaaacgcaaggtatgcctttctctgaggcccaacaccacatcttcctcaaaagggaaggactgatctttagagaagggttttaccatgaatgtctcttttcagttcttcacctac

SEQ ID NO: 6186 - DNA, 597 bp, Canis familiaris
  misc_feature (1)..(597): n = a or c or g or t
atggcgaccccgacgaggcnntcagcggcgcnntctcggaccgggacgaagctgtgaacaaggcgctggaactgtcnctggagctcggnnncgtctctctggagcgggactcgctctcccgggagctgcttcgcactatccgccagaaggtggcgctgacgcaagagctggaggcctggcaggacgacatgcaggtggtgatcggccagcagctgcgctcccaacgacagaaggagctaagtgcggcgggagccgtcccgcgccgcgccgccccgcgcttctcgctgcgcctgggtcctgggcccgccggcggcttcctaagcaacctcttccgaaggacctgaaggccgggccatgggggccgccggtgccttctggcttcctttcctctaatggtcctgagcgtcttccagaggggcctggtgccctccccaccccgggaagctgggcaaaggctcgttgggagcagggaccagctttgggggccaagggccccaggtaggtggcggggcaggtgaggcagagctgagttttgaatctctataggtctatattttctaagggcctggcgcgctgcagggcagggatgagggtggg

SEQ ID NO: 6187 - DNA, 544 bp, Canis familiaris
  misc_feature (1)..(544): n = a or c or g or t
tgaaagcgacagtgannagcaaacccttcagctgcgagctggnaccgagaggggctgctagctnnagttcccactacatccatctacgggagtgctcgcagcttgggacttgacctgtgtcctgcccgaggccccttgggactgagggctctggttcgaccgccagggctgaccacaaggatgctcacgacacccagatgccagcctctccagttgagcctaagatgtgtctctgatggcagctacccttggctcgtggatggaggactctgtgaaatgcattccagccctgttgaaaggcttattgcaggcttggggtacccgcctgcacacacctactcccacctgtacctacagcctcctcccactgggagcacctgcacccagactcgccagaggctggatggtgtggaggaaaagagcccctgccactcatctgacctgggttccaatcccagcctcctgaatctcacctctgtagcctcagaccagcaaggtcccctctgaccctcagcttctctttctgtcaagtaggggtgatgtg

SEQ ID NO: 6188 - DNA, 553 bp, Canis familiaris
  misc_feature (1)..(553): n = a or c or g or t
atatattttnnngttttatctatannnnnntatagatatttatatttagcatctttacatttgtcacatgttaaactgtatatttgaaaagtcatattaattagattaaataatcttattgtaacttttgacacctagaataatatatgaaaaatcaaaactgattgggactctgcatttgttagaacttgtagtgcctttttcttctcctttgttatcatatgtgtctggttgtatttagagtcccctgcacatggattataatttccaggggcatggcactctcaaacccagtttgatagtgtagttaacatgtaggatttctaggcttttactgttaagttttagggattgtgtgttcctttctcacaatttactctttaatttggaatatacacacattttgcatagagtttaagatgttttggcagggtttttcaatatagatgtaacactttctgtaaccaaaattccttaggtgataaatgtttgggtttctttttctgtttttttttttttttttaatgtnnnnatttagagggatatcttgtgc

SEQ ID NO: 6189 - DNA, 502 bp, Canis familiaris
  misc_feature (1)..(502): n = a or c or g or t
cgagtgtgacganngncgctgtgaaggcctngannncactgtctgtgggnnnnatggcacatgttcctgtggtcactgcgtgtgtgagacaggatggttcgggaagctctgccagcacccacnnnngtgtaacatgacggaagaacaaagcaagagtttgtgtgaatcagcagatggcatattgtgctccgggaaggnnncttgccactgtggaaagtgcatttgctctgccgaagagtggtatatttcgggagaactctgtgactgtgatgacagggactgtgacaagcacgacggcctcatttgcacagggaatggaatatgcagctgtgggaactgtgaatgctgggatggatggaatnnaaatgcatgtgaaatctggcttggcacagagtatccttaacaattccatgggagaggactggagtcttactttnctaggccattagaacatataaatgcaaaggaaaccatgtataatcaccactaggacaggtcaaac

SEQ ID NO: 6190 - DNA, 498 bp, Canis familiaris
  misc_feature (1)..(498): n = a or c or g or t
acctnntaacaccatcacacagaggacaatccttcacccttcagcaggtggctcttcagagaccngagtgcccaatgcacgcggtccgctgtccgaccnnattcggcaagactagaagtaactgcgctggactttgtggatcctcatttcttgctggatgttgtggatcctcatttcttgccactgacttgcttctcaggatgcctgaggggccctcacactgcccggtcacgggatcccagggcactttccacgctgtcctagtacgcttgttcccctgctcgctgcctccctctgtgaccctcgcacgcatgcatccatcacacgcccatgcacgagttctcgtccatcactgtgcagatcacggccttccttccatgctaccctttcctcatgtcccagtgactgggactcccacaaaacccccttctcctctactccgttttctgtaagaacaatataggaactgtgacctaaagatttgttcatagttagagc

SEQ ID NO: 6191 - DNA, 588 bp, Canis familiaris
  misc_feature (1)..(588): n = a or c or g or t
ccacgcttccttcccggggcttctacnntaggagttttannagagcaggtaccataccccctgtactccgtttggctaaatccccgctctgggcctgtcgttgagaccccaaccctctcacccgatctccagctctgcctctggtccttccggctgcaaatttgcaaactggaaagagcatttccaggctgtccgacgcgcaagtcccagccaccatagttgttagtgaggactcacggactgcacgaaggatccttagactcgttagtctagccaccatcttcttattttacaggtggggaaatggggccacaggacgatagaagccaagatctgcctttcattccagagacctctttctgagccaatttccatgactttgattctctggaagcaccattttggtcttggaaagaataaacttgacactgatggttgtaatctttcagtttctgggtttgttggatctcagatttgaaatccaagttcttctaaaagcgtctcaaacatagactagatttctttccagccttgtaagtatgacagacctgagctctgtacttaactgcatagaatttgttatcttgg

SEQ ID NO: 6192 - DNA, 697 bp, Canis familiaris
  misc_feature (1)..(697): n = a or c or g or t
tcgctgctggtttaaannngaccctccccactcatgccnntaaccccagattcccctggggcagagggacaagccccctactggggccatttcaatgggggtggagtttttttttttcattcacgtattttttactgataatggagatgatcgggccctgcccccacccccagtcttgtccttgccccaactttctgtcctccagacacccccaccccccacctgttccttcatcctattgtaggtgaatccccccccattatgtgtttaaagttaatggtttcggatgtgaacatcatgtgttaactgtagctctgtaaacttttttgtggggtggggtggggagggagggatcagagggtaggggtcaaggatttgtttcttgtttgttttcattttccaaaaaaaaaaagaaaaaggagaaaaaaggagtgggtttgtttttgaagaactgtcttggatacctatttaaatgtgttctgttttgttttttttttaacgatttttaaataacacctgtgcctccgcgggtctgagggtggaggccccaggcaggaaccagcccgcccccctctgccctcaccagggctcccccaagaaagcattacccaccctcggggttcgggctgtggggtgtcccggcaccttgcgtgagtttcctgtatgaaaacaaaattgggaaagataaacctatacc

SEQ ID NO: 6193 - DNA, 491 bp, Canis familiaris
caggcccaggcccaggcccaggcccaggccgcggcccccgaggcgggcaaggggcgtgcagcggccgacgccctcaacaggcaaatccgcgaggaggtggcgagtgcggcgggcagctcctacaggaatgaattcagagcatggacggacatcaagcctgtgaaaccgataaaagccaggccccagtacaagcccccagatgataagatggctcatgagaccagctacagtgcccagttcaaaggggaagccaataagccgacaccagccgacaataaggtcatcgatcgcagaagaatacgcagcctctacagcgaacctttcaaggaacccccaaaggtggaaaaacctagcgttcagagttccaaaccaaaaaagacctcagcgacccataagcccccgaggaaggccaaagacaagcaggtggtgtcgggccgggcctccaagaaaaagagcgcagagggccccagcgccacccaacccgacgacaa

SEQ ID NO: 6194 - DNA, 437 bp, Canis familiaris
  misc_feature (1)..(437): n = a or c or g or t
ttccaaagctgctactgttgcacnnngctacaggacccagaccccttgtnnagtgtccagtgctnnncgccttcaggaagctggggtgttgttggacntagtaaactagtcagtgttgtaaatggccttgaaacatttaaaatatatttgtaatcagtaaggcaaatacagaatttaatgttgacagtaaaatggagaacaatacatgtaccatggatattgtaggtttccttaatgctgtttttactgtgcactttttaaaattaggttttaatttcagtatgtaagaacaacaaatattttgtatattttcaaactcaattatatggtaatcgatttggtatctatggaatagatctatgtttctggataaaatgcttaaattgtccaactgtcatgacttcttgctataattgaaagcagtctccagattcttt

SEQ ID NO: 6195 - DNA, 389 bp, Canis familiaris
  misc_feature (1)..(389): n = a or c or g or t
aaatnactttgatgcaaaacggcagcctcagtgtccaacccaaggggaagaaaaggaggaaacttagcatgaggggctgcagacaggtgacctgttgaaaagaaaaagaaacaaatgaaacgtaataatgtgttttatttaaactacatatccaaaacatcattttgacctgtcatcaattctttaaattatgaatgagattatttggtgggttttttgttattgcaaataagtctacaaaatcagatgtgtattttacacttacaacatgtctgttggaatactgaatttccaccagaaagacttgatccttctttagatttcataaaatttaaatttgaaaacctagattaatattcacagattagggatccctgggtggtttagca

SEQ ID NO: 6196 - DNA, 519 bp, Canis familiaris
  misc_feature (1)..(519): n = a or c or g or t
ttgagnaggttgtgctacccgnntctatcacaggnntcggggcttctgttctcacttcnnnnnnnngnnagaactctgnctcaaactcagggccctccctcccaaagtcgatcccacactattgtgacttattctcggattaatccttttcgcaaaatctgcattccaacacagaattacatgctcatctggtaacatactcttcttttccacttcatgtctttatgatcttcctgtgcctggaagattcttttccccatttaggacacatcacaattctagccgctctgtgcattcattaaatatcccctaaccctgctccaacaagctctgtggaatctctcccttggccagacgcatgctgcactttctcatacttctcatctggcattctgggcagagctgcttgtttctgaatttgcttcttatcttcctctgcattggattataagcccttttgtggcacaaaccattatccttatatccactgctgtgnnnnnntcacttgaggggtnnnnn

SEQ ID NO: 6197 - DNA, 116 bp, Canis familiaris
  misc_feature (1)..(116): n = a or c or g or t
gtgctgtcaagaccagannnnnnnggggggtgggggcggggggtggggggaactcttggaagggaagaagtatcacttctttctcaagtggagtgtttacaccttgctgtaacatt

SEQ ID NO: 6198 - DNA, 636 bp, Canis familiaris
  misc_feature (1)..(636): n = a or c or g or t
aatgattttgagagagagttccagtgagagagtacnngcaggannangaccggagggagaagcaggcttcccactgagcagnnngcccaatgtggggcttgatctcaggtgggatcatgacctgagccaaaggcagccaattaaccaaataagccacctgagtgctccacattttaggttttttatcaagataaaaactaaaaataaactggaacatcataaatgacattttcctgagggacctctccactaccctgtcatattgtgccctcatgattatcaggcaagctacatgtctaaatggtgaggctattctctttcactgtgtctgacgagtaactcctacccctactttaaactcggttcagaaatcaccactttgtggaccatcgctgcctacctgactccaatcacaccacacagctaagttagatttttttctttctatagcttctgttataaagttcagaatatatcttttaccaatttgttttataatgatttcaccggccatgtttccagcatattacaagctctagaaaaaaataggtttttattcatttttgttttctcagtatttatatatataagggacnnnggtaatgtttgaatgacaatgaattatactatcaccac

SEQ ID NO: 6199 - DNA, 600 bp, Canis familiaris
  misc_feature (1)..(600): n = a or c or g or t
tgctgacntagagttccctccattcccannaaagggactgacacagaatctaggttaatacatngaaacacaaagcatgagtgaagacaataattacttctatgacatccgggagaacaatcacaaataaagacgactcttccaaaccttgaatttgttgttcttaaaaagacaaatgcgtttaagaaatattttctgtgtgagaattttttagatgtctgtttacttcatgtttacaaataactgtttgctttttaatgccatactttgaaatatatcagccaaaaccattaagttacagtaattttttaggtattctgaataaaaattccattttcttttttggatatgctttaccattcttagatttctgtggaacaaaaatgtttgtagcattttgtgtaaatacaagcttttcatttttatttttttccaattgctgttgcccaagatctgctttccctgcacatattgtacaaattctgcattgtgccataggccatgattgtggatgagtttactttcgacttcaaagggactatttgtattgtatgttgcaactgtaaatggaattatttggcatttttctcatgattgtaa

SEQ ID NO: 6200 - DNA, 572 bp, Canis familiaris
  misc_feature (1)..(572): n = a or c or g or t
aaaggcttggaactgagatnnggatcaggtcnnaaagcaacattagatgcagaagaaatggctgacttttacaaggaatttttaagtaaaaattttcnnnagcacatgtattataacagagtggggcagctaccactgcatgcctctgagatgcaggctgaagtacgtgataccacctgtgaaatgttcttattaaaaaaatggagaggaatctaggcagacctccggacttattaccagttcacaggaaaaagagactggtacaagcgtaattttgccattaccttcttcatgggaaaagtggccctggagagagtttggaacaagcttagaccgaagcataagaagagcagcacctagcagctcaccctgacccacccacctccagcatgggagtttccaggagaagcagcttctctgggagtctgttttacaaggctctaaacacctgtaagtgaactgagccccacacctgctttatgggagtcccttggcttatgtcagcccagggtggcctgggagaatggcagtcctgttgagctacaggccatatgnnnntgtcctgactgtgg

SEQ ID NO: 6201 - DNA, 494 bp, Canis familiaris
  misc_feature (1)..(494): n = a or c or g or t
ccgatgtnnactctctggctctgctcctatgnnagatcctgagccgctgcccagatttgaggcctgacagcagaccaccacctttccaactggcctatgaggcagaactgggtagcacccccaccacctgtgagctgtggaccttggccgtagaggagagaaggcgcccctgtatcccatccacctggcactccttcaccacagaccctggcagcctgagagagctgctagaggactgttgggatgcagaccccgaagcacggctgacagctgagtgtgtacagcagcgcctggccgccctggcccatcctcaagaggcccagcccttcccagagagcttcgcccatggctgcccacccctctgcccagaagactgtctctcagctcctccccactgccattcccccttgtaggcctcagctggatgtctgctacttccttgttccaggaatcctcctgtaccatctctcacnnnnnnacgcgcagttatgnnt

SEQ ID NO: 6202 - DNA, 498 bp, Canis familiaris
gctctcagcagtccagagaagcttaccaaatcccattccatgtaagaggaagctggctcagaagccactcaccagagagcagtcacaaagtacacagctgggatttcaccctgagtggacgacttctgggccctgcctgacacctacgctccatgccaatccccctgctttgaggcctggattaggggaacataccaaactgttcccttccctaattagaactccagacaggcaaaaaaacaaaacaagaaaaacacctccagataggcttttagggaccacaaaatatagggccagacccagtgtgtccccagcagggctgtggtatctgttatggagtatgtagtgggtggccaaatgctggtacggtgccctcccccccctcccccccgcacctgctgccaagtcagcagcccaggaagagtgccttgggtgtgctgctaggctaagtaggtgcaggatggacggtaaagcacggcttactcactgtgaacagca

SEQ ID NO: 6203 - DNA, 674 bp, Canis familiaris
  misc_feature (1)..(674): n = a or c or g or t
gtgcttcacccacannatgctgcagtaatttaaatatcagtgaagcttcttctgtataaagaatgctatgaataaaacattaagaagctataattttaagttatagttgcctctaattttaccatttcattggtaaaagcccttttttggcgtaaaataagaaaataaaaataaatttgtcaatatgacataagttttattagggaagtatattgttgagcttttactataccatgagaggaaatccaaaatttattttggatgtatacatactggtggaaattcaatttttaactctttaggaaaagatggattgctcagatttctgactctgctgttactggacctgaattttgagctgtggatagatactcttttgagcccctgaaaatattttgatgtattctagtttattagcaggactgctaacattgaatagtatacttttgttttctctttatggttcattaagcccaactttatggttgtatgttctcagattgtatgggtctggtaaagtatgtttgactttaatctttgtgtttatctttaattcagtcattttaattacttgcctaattcttgggccgaacaatttatttgtttcagtactttataggtcttgtttaattttcttttgtatttaaactcttggaattctcagcagccttttc

SEQ ID NO: 6204 - DNA, 651 bp, Canis familiaris
  misc_feature (1)..(651): n = a or c or g or t
tagagatgtgtaatgcnntcaacagcttgtccgaannnnagtccctgctgaggatgcccccctgggagaacatctggctggtgggctctatctgcctgtccatgtccctccacttcctcatcctttacgtggaacctnnnnnacttattttccagatcacaccgttgaatttgacccagtggctaatggtgctgaaaatctccttgcctgtgattctaatggatgagacactcaagtttgtggcccgcaactacctggaacctggtaaagagtgtgtgcagcctgccaccaaatcctgctcgttctcggcatgcaccgatgggatttcctggccatttgtgctgctcataatgccgctggtgatctgggtctatagcacagacactaactttagtgatatgttctggtcttgactgacagttttacataaagaagatgtttaacttaatcaattaatttttttattgtttaaagcaactgtctatttctgctgaattttcacatgaacatattggctggtgaaggagatttcatactctagattttttgttttgcttttctgactccagtggggcaagattttccttttttatacacataattaaagtgtccattgacatgtacagagaactaacactttaattnnnnnnn

SEQ ID NO: 6205 - DNA, 521 bp, Canis familiaris
  misc_feature (1)..(521): n = a or c or g or t
aaagtctangcataaaatgagatngaaaagtaatttgtttttcaagtttaaatttctccaaatttctctggtatcttattatatcttctccaccannagccatgaaatgtatcttattaaaaaaaaagtgtcatctgtatcttaaccatcttactctcaatcactattgcaacatgggccaacattttgaattaccttgtaggaaggaactattcgaagaattctgaatcaaatattcccataatagagtatgggataaaagtatcatagcaaagtaaaataaaaatattttaccatattcctctgggaaatttgataatgtgatatttgtatcctgttcatatctatttatgctaattttatattcaatgaagaatagagttcgaatcggttattcagtgaagagaaatattaacaaaaaaatgaaaaaaatgttgattttgtctaaagtgacatattcttaataaaataaaattatcttccttaagaggcattttggggggatccctgggtggcttggc

SEQ ID NO: 6206 - DNA, 466 bp, Canis familiaris
  misc_feature (1)..(466): n = a or c or g or t
cagccccgtttcntttgacaggatccctcncagagccagagtgcctggatgcctgtgtagctagnnnngaggcgtggggtnnaggggtggccagcagctccccactggtgcagcactgcttcctgtgccatacctaggcatcccttaccttgtcacattcagtcttcctgtcttcctgggtagatgccttggtgtaggctgaggactgggcagtcttccatccccagcaaagggtctgccccaggatcagggcagaggatcatggattattgtagtttcccttcaaagcacttcattgacaccactcctcatttaccttagtatcntgggtaggaaagggttaatggtcttcattggttgccactcccagaagccactggatctggagtcagacctagagggagtatggggggcacgtttccttttcccacctgtcccacgaaggaggttttcattgactatggcc

SEQ ID NO: 6207 - DNA, 489 bp, Canis familiaris
  misc_feature (1)..(489): n = a or c or g or t
ctnngcctgctttcatagatactttttccactacccaccttctctttttgctacttaatacaacataatcttggatattgccaaannaagcccttcagcagatggtgacacccccccaccccaccccccgactctgatccccagccccgagtctgtaattaattgctcttacctgttgcactaacgaatatgattctaggtttcaaagggggaacttgaaacaataggcaaatggggcttggatgaattggtcctacagataccctgccttaacccactgaggtgatgagtccactactcatgtgaccctccacctttgtggattcctcttggtttgtgaccagtgtgtttcctaaggttgtacaaacttattgacaaaggtcaatacttccgtttgtattcgctgcactgttgcactctcaaaatggctccttgaatatttttattaacttgttacacacatttttgtctgtctacatttttcttttg

SEQ ID NO: 6208 - DNA, 591 bp, Canis familiaris
  misc_feature (1)..(591): n = a or c or g or t
ggtgcatgctgctctaaactcnatcttacagannangagaaagaagctcagcnnngagctgcagctctggctaggaaccnngnnnnnnnngcccgacccactactccctatnactgtgttacctcattgttttagctctctgcacccagtagcccacttgccaggcgggataaatggtaatcataacgcacgttactcagcaccatatggtgtgccaggcactttctcagtgttccacacagattaactggttgatcatatttccattttacagatgagcaaactgagaccagaatggtagtcatttgcccaaggccagacagcttaggaagtgacagagcagggacctgaacccaagcagtctggagcccacactaagttggatactatacaggtgtctcagaatggtctgtgagactgggccccaggaggccatactacctagcagatgaagccatgatggcctgtcttttgtgatcatgcacctaaggctaaatgctctttgggcaagtatcctgaatatgtgtatttacttataaattatatacaggtactgctatcattctatagattagtaatgaggcctaaatt

SEQ ID NO: 6209 - DNA, 476 bp, Canis familiaris
  misc_feature (1)..(476): n = a or c or g or t
agnngttcaagattgatgaccagaggnnnacccacaactatgatgagttcatctgtancttcatctccatgnnggcccaggaaggcatgctggccaacctggtggaacagaacatctccgtgcggcggcgccaaggggtcagcatcggccggctccacaggcagcggaagcccgacaggcggaaacgctcgcgcccttacaaggccaagcgccagtgaggactgccggcctgtactctgcagcccgctcttgccgcatggccctcaccagggccccttccctgccccactccccctcttcccagtattactgaatagttccagccagagagcccagctccgggaatgggacccaggctggattccctgcattgtgccccagggcctggcagggccgctcagccccatagtgctctggaagcagcagctggagctggggcgcagtgaggtgctgcagcnnnnnccacagccggctgt

SEQ ID NO: 6210 - DNA, 570 bp, Canis familiaris
  misc_feature (1)..(570): n = a or c or g or t
ggcccccactatnngctgatgatgnnagctannnnnttgccntnnncagctnnatnnagcattcaacagccagctgtaggccagcctggtaggcangaatcctggaacactggtgttggacagaccactgaggccatccattctttggaagcaggtaatatggcttagtagaagacaatggactgacagctgatctgtgctgggctgccccagtgggtagaaaatgttctcaaatggaactgaaatctgtctccctgaggttagaaatcagtgactcttgttgtggcatctgagaaatcccagaacaagtccatcctttcttccatcattactattatcatttatagcttacattggtatggagtcgatggttatgaaggatacctctgtacatatgtgctaagggcctaagtaagtcttccctgggtgaaacatcacagcttcctccacacattccttaaatggcaaacgtttcctttctatacgaaccgcagagtcagttttcatctcaaaatgttcnnnntataaannngatgtatgctcataacggaaattaggaaaacnnnnnnn

SEQ ID NO: 6211 - DNA, 416 bp, Canis familiaris
  misc_feature (1)..(416): n = a or c or g or t
ctggnggtnnaaactcgtgtttcagcgagtcacgccagagtnaatgaacagagacatgatgccccaannaaccacaannagatgaaggctaaaaggtntcttgactgatccattgctaacggnntgagactcttcaatgcctttcagaaaactggtnnctagtaaagccttgaatgcgcgcatgcacacacacacacacgcacgcacacactcgcgcacacacacaccgtcctacactataagctgctcctctggtatgaatctatacttatggaaatgtagaaacaaacatttaaaaatagctgctgtacttttcacatttttgatttattaggtactagcactgaggaaaaatattcagcacttggactatcataggatgagtaaaacttttcttgtacaaagtgaattaactg

SEQ ID NO: 6212 - DNA, 578 bp, Canis familiaris
  misc_feature (1)..(578): n = a or c or g or t
atccgtgtgaccaaagagacagagaatctgcctggcgtttgttgtgtcgaaacactgaactgctannagcagtctatgattatcttggggtgggtattnnnntggtatttnnacaatctttgctcttcaaggttctaaacatctgaaattaatgataactatcagcttgtttgatggttnnnnnaatttttaaaaaagattttattaatttattagaatgagagagagagagtgaatatgcgagagcaggagcagggnnaggagcagacagagggagaagcagactccccgcagagcagggagcctnnnnnnngactcaatcccaggacaccaggatcatgacctgagctgaaagcagacgcttcactgactgagccccccaaacgccccattttcctaatttctgactgttacaacatgcgcgaagatgaatgtgttcagaaatctggtcacatgcggcagcgggtgcacctgcatgtcagtagcgccggggtcccgtgagcatcttttttccagccgtaatcctatgcatgtttnnnnnnccttgtgccatgtttaacaaatttcattcttttgag

SEQ ID NO: 6213 - DNA, 576 bp, Canis familiaris
  misc_feature (1)..(576): n = a or c or g or t
gtaggcgcctgtcagcgcagnngtctcttaccttcctactccaggaggcactaagcggccaggtgttggagagaacacctgcgagtaagaaataatgctgaatgcttgtgaaatgggcactactgctagaaaccaagtgggcaagagcaagcttcaagacctaattggctgatgaaaaacctttcattcctcaaccgtaaagtaccgcggaagtgttcaagacaaaatagatcgtaagcatttatttgatggtctgttttccacgtctgtagtgtggagaaacattttgtttcttccagaatctttaggaattttccatctgttcatacactgcttttgtgacaggccaaggctacattttttaaatcagttttttgacaatagattactagcgatgaaggaagggagggggtgcttgtatttggccacttcttagttgatctctgaatatttaggatttccttcttaattgtctgattctccttactggcctaacccctaaaccaatagtttttaaattaacgtaggcttgtcttgggaggttgtttaaaaatgcagattcctgagttccttcct

SEQ ID NO: 6214 - DNA, 459 bp, Canis familiaris
  misc_feature (1)..(459): n = a or c or g or t
aggtggctgggggnnnggctcnnngnnctggcctgggaccctgtgtgtcagtgtctgtgacccanacaggtgtnnngaggagcccaaacactggcaganctttccagcctccnnnnngtctccttgggtaggggccccaaacaagagggccctgtgccctgacagtgtgcagcctcacaccctgggggagtagaggggagatgctcagcctgtgcccccatgcagcctcgggaagtgaccctgcagctccgggtgctctcctggccctcctagctagaaaaactgccagatgacaaatggcaagcagcagccccaaaacagctccagaaaggggatgtcttcctggcccagcactcaggcctccctaaggtcctggttctgctacagcatgtcccaaggtcagagggagggagcagggtcacccannnaccaagggatacagancngagactgactgac

SEQ ID NO: 6215 - DNA, 272 bp, Canis familiaris
  misc_feature (1)..(272): n = a or c or g or t
ccgaccacattactgtaaaacatgatgactacttatgtaatttagggaggactggtctgtaattnctgaatgatatatagaataatatttatgtttanaatgtaacttttttaaacttacaaatcaggattacatacataagaattccactaagaaactccaaggttctaaaaattgccagcgttcagattaaaaaacaaaacaaaacatttcaaaagagcanaatatgcacaaaacatttttcaaaattaaagtatttnnnnnngcattaa

SEQ ID NO: 6216 - DNA, 669 bp, Canis familiaris
  misc_feature (1)..(669): n = a or c or g or t
cctgcagagggnannnnaggnatcttgggaacgnngttnngtaaataagtttcgtcatgtagtctgcgtgaagtggttgggggcagactgggggtgccagggatgaccgcaggttcctgccatccttgctgggcagatggtgtcctggtgacaaagctggagctgatgggacattattctgttcctgtgtggggctgggtgggtgccttagcccacagccctgtgggagcccataaacggggatctggatccaagtgccagattgtgtctttgcctggttgtgaacatatttgtccaacttagctttggggtagggtttccatatacggatctcagggctggggcatctatgtggtgggcttccgcacatcggggagaccatgccatcactcccctgaggtaggcttaaggccgagcacttccctggtctcaccttcctgattcccacaggtattggcaagttggccagtgtgcctgctggtggggctgtggccgtgtctgccgccccagggtctgcagctcctgctgctggtgctgccccagccgcagcggaggaaaagaaagatgagaagaaagaggagtccgaggagtcagacgacgacatgggatttggcttatttgattagggtcctgcccacccccacccnnnnnnaaataaaaccctttnnn

SEQ ID NO: 6217 - DNA, 576 bp, Canis familiaris
  misc_feature (1)..(576): n = a or c or g or t
tggncttatctcttttgncttaatgttgggtggcccgagatcccagnnngctctccagtttcacacccannaataccacgtgtggcggctgtgggatttggacatcctcaggaagggtctggctaaaattatggttagaatagacgcatcaaggaaagcaatgaagaagtgacgctttggatgactggtggggctgtcatgaagagcagcctccacagagggtggtcacagcatctgagtccccggggccagccacaagttagaggtcaccctctagaagattaacaagaaagctacctgtgcctgcaatagtgccgtctgcctgggagggtcatgggaatgggatgcaaatgcaaacctattcttgcacatgtcatgaaaacaaggctggagaaaacccaggcttcaggaacttctgcacatggcacatggcacccatgacccctgcctgcatggggggagcccagcaaagccacactggacagttggttttgttcactccagccacacagggacaaaagggatcttttgcattgcagagattttctacatatatattttttgtttgtaatgagc

SEQ ID NO: 6218 - DNA, 107 bp, Canis familiaris
cattgccagtctgtggcgatgccactagagccaggggatattggctatgccggtgccaggaaggcctacgttatagccagaggggtccagcctttggtcatctgtga

SEQ ID NO: 6219 - DNA, 472 bp, Canis familiaris
  misc_feature (1)..(472): n = a or c or g or t
ttgggttttctcagaaatacnaagctgtgctgaggagaaaggccctgttgagttttctgnnagttcagactgtgttgtccaataagcagtgatggnnagcagattccaggaccagttctctctgttaagagtgaggtaggagctgcttgttttctctctatatgtaaagcgggccactttgggtctgatctgtctagtggttagttttcctctagtgggaggcttaacggtcattgaaaaactctccagacattttggagctcggcccagactatcagtgttaaaatgtgacttagccctactttaagaagggcgagggtggcttgctgggatcttaaaaaatgtgtggaggtaatgactcagctgggtctagatgaagcactcatcttttctagaaaaaggagagtcacgtgtgctccccctcccacctcccctccactcagcccttctggaggtcgccccgctgactgcc

SEQ ID NO: 6220 - DNA, 560 bp, Canis familiaris
  misc_feature (1)..(560): n = a or c or g or t
aaaagatttatcaangacagatcagtaagcaagatctttctggggcagttgttgacctcaccaggacanntgaacatatcnagttttcagtagaaganctaaaaaatttgttcacattacatgaaagttcacattgtgttactcatgacctgcttgactgtgaatgtacaggagaccaagatggtacaggtgattcattggaaaaattccctgtctctagaaattgtcaacttggtgcacatcaacagaagtctaactctctgaaacctctctccatgtcacagctgaagcaatggaaacatttttctggagatcatttaaatcttacagatccttttctcgaaagaataagagaaaatgtctcattcttttttcagaatataaccaaccaaagtactgctattatataaggaaagattacatcatgacattccctcgccccccttttataaaagnnnnntagtaattaaatnnntttttgaaaactaatagaattatgtaaattatattttcttccaaaatgaatcctaattttgatacacagtcaaaacttgtttact

SEQ ID NO: 6221 - DNA, 535 bp, Canis familiaris
  misc_feature (1)..(535): n = a or c or g or t
atctgcaggcgtgatttccaattttgtcagtnacgtgtgtaaagttgccacaggaagatatggaccatcactcggtgcatcaggtgcaatcatgacggtnnttgctgctgtctgcacaaagatcccagaagggaggcttgccattatcttccttccaatgttcacattcacggcagggaatgccctaaaagccattattgccatggatacagcaggaatgatcctgggctggaaattttttgatcatgcagcacatctcgggggagctctctttggaatatggtatattacttatggtcatgaactcatttggaagaacagggagcctctagtgaaaatttggcatgaaatgaggactaacagccccaaaaaaggaggcggctctaagtagaactgggatcagatgatactggtgcatgtgccccgtgctgcctggagagtcccaggaactcatcagccctggagtgaccacatctttgctcctgcttggaagacacccagcatctagctttcccagtattttaaactctgtctc

SEQ ID NO: 6222 - DNA, 478 bp, Canis familiaris
  misc_feature (1)..(478): n = a or c or g or t
tttttgctttttnnnagggngtaggnannngtagaattatnnnnncaacataagtattnnngtcgcaacnngaggaccatccttacntagttccatagacatgctttaaatatgatcttttgaagccagctccctggaaagcctacggaacctcaggccgatagctttggaaactgtgaaactgcctggcaggaagcaaagtggctacaagattaggacggttgtataagtagaagtgacttggcaaatacaggggtagatttaggctgagcatgagccttgggctaaaaatgacctttctttggggtaaatccaaagggtatgactttcctatgcccttgcgaagtcatggaggggagcgtcattccaggtcagatattatggagttgtctagcatccgcaaaggtaggctttcttctgggacattttcattttcattttatccccaaacagaataaaaagcaaaacaaactttcta

SEQ ID NO: 6223 - DNA, 471 bp, Canis familiaris
  misc_feature (1)..(471): n = a or c or g or t
tgcaaagtgttcccattgcaaggcgtgacatacccganntggtatcaccaagtgtcttgtctgagaancagccagaaaaatgacttcagaaagtatctgtttctgaagggcatttcctgcagaccttgannnnnnnggctcgttgcgttcaattctgaagtccaaagggactgggagagtaagcagtcccagggaagctgggaatgttcccaaaccagacctttaaaaagagattttatttattcattcactcatacattcaaaacaaaacaaaaacacattgccgaggtcattgatagtgagtctgggaatgattgctcactaatgcattctttggagaatggttctgcctttctaaagatgtgctgggggcagagattgcagttagtnnncattttctgagaggatatttcctgaacaaaatgggataagtcagattttttaaaaggcatccatccgggatccctgggt

SEQ ID NO: 6224 - DNA, 435 bp, Canis familiaris
  misc_feature (1)..(435): n = a or c or g or t
ggaaatccatnctccannctaacactnannacactggaaagaatggtagtannctctggnctccagactttctgtactgaagaacctcatctctctccccatctcacaagcacccannnagacgnnnngctccnngtcggtncggnnntcggtnntcggcnncctgnnatgggnnnngcctgngnnnagngacctcnnngnannnagtgcgtgagcggggcanggactgggcannnnngcccccgctnnaancctgggccnccannnnncctgggcgtctctggctcctacctttcctcctcagnnatcatccttttgagcccgccgctctctagatttttttcccccccagaatcatcctgaatctctcccagggccatnnatctatccatgcttattggctgtaaaatttgagggtgtgagaataatnnnnnt

SEQ ID NO: 6225 - DNA, 350 bp, Canis familiaris
  misc_feature (1)..(350): n = a or c or g or t
aggaggtaggnnncattttgatgtcagacttttggtagctgnnnatgtccttgttacaggtggctgttnnnaactnttgagccagagtgaaattattagagggaggactnnnggctgctgcnnnaaatggagccaaaggaagctgccctctccctagggatggtgctcattagagccctgtggatcagtctcaaggggcccctggcagggacgaggaagagcagtnacttcagnngagtccctgccagtggctgagcaaacaatgatttcaaaaattcaaggtccccaggtggcagcgttttacgttctgacctgtttgtgttatagnnnntnttnntttttctctttgg

SEQ ID NO: 6226 - DNA, 143 bp, Canis familiaris
  misc_feature (1)..(143): n = a or c or g or t
tcggggcgggnnagggcttgttttcttgacacanagcacagcatgctaacggggtacaccattgacttcatttgtanttagttacgttggtcagtataagagggtgcatnnngggttcatctttcnnnaatattggttttcag

SEQ ID NO: 6227 - DNA, 460 bp, Canis familiaris
  misc_feature (1)..(460): n = a or c or g or t
gtggnnngcactgtccacagaggncagtngttagctctagctgggtgtggctctnnnnnagcagcttttctcttttttcagtcannaaacccagatagagttgagccctgaacagcattgagggggttgggcgcaccgacccccctgcatagtcacaagtccatgtataacttttgactctcccagaacttaactaccaagagcctactgtcgacggaaagccttgcccatgacatgaacagttgattagcatgtattttgtatgttatatatattatgtgctgtattctcacagtaaagtcagctagagaaaagaaaatgttattaaaatcataaggggccccctgggtggctcagttgtttggcacannnnnntgatccggggtcctggattcaagtcctgcatcgggctctctgctcagcagggagtctgcttctccctctccttgtaccccttcac

SEQ ID NO: 6228 - DNA, 410 bp, Canis familiaris
  misc_feature (1)..(410): n = a or c or g or t
gatgcccaggcaaacccnnaaatccaaaagcatggttggtgatttaatacannnnncacnnnggggcnnntggggggctcagtggnnnacnnnnngnnttcgnnncaggtcacgannncggggnnntgggnnngnnncccnnnnnnggctnnnnnnnnnnnngggnnnnntgnnnnnnnnnnnnnnnntgccctnnnnnnncacnnncacacacacannnnnncnnnnnnnnnnnannnnnnnttttaaaannnnnnnnnnnncnnngnnnnncaggannnnngngnnnnncagcagttnnntnnnnnnnnnnannnnaggnngtgatcctnnagacnngnnatcgagtcccacatcgggctccctgcatnnagnntgcttctccctctgcnnnnnnnctgcctctctct

SEQ ID NO: 6229 - DNA, 408 bp, Canis familiaris
  misc_feature (1)..(408): n = a or c or g or t
tctcaatgttgcctggaaacccaggagaggtcactctaccgagcagcaaggnngaagcctngagctgcactgttagcagtctttggtggtaccctgtgtgggctgtgcagccacatacatctgaagaaataacagccctgtgctggactacttatgcaataccaaagaataatttgcttgtttatatgaagacatgttttgttattttttaaaatatagtaagcaaagttcatatactgttgatgagaccaggagtgatacctgcattacatgaagtatttttgatacaaattgtaatattaaaatgaaggggaattgtaaagtattggtctcttgtttgttttatcttgaagagtctccagtcaaagtcgtggccctgtgtgctggttctgggagtacggtgctaca

SEQ ID NO: 6230 - DNA, 135 bp, Canis familiaris
  misc_feature (1)..(135): n = a or c or g or t
tgctccttaagggacggaaatgtctgctacaaactgacattcgttgaatacctactgtgtgtcccctttggaaatacgacagtctcaaaacagcagcactatgagtcnnnancagaaagcaagccaagatgatcc

SEQ ID NO: 6231 - DNA, 542 bp, Canis familiaris
  misc_feature (1)..(542): n = a or c or g or t
ctcntctgctggttccccgttttcnanacccagttttaacatttacanncagccaaattcactgttggtgtgaagctctgtgacttttgaaaaaagtgcagcgagagttgtatnaccaataccacaagagtaataggttgacaggggaggctgagatgaggtgagggtggggggtgctagccacaaatgtgtgagtaatttgttacagcagcaataggaaggcattataataatcaagataaataacttcatcagcctttgcccccaaaatatcaaattctatagtccctttggaattaaacccttccctgattaataaccactgacgaagactgacctgtttgccatctgcctagtcttgtcttttccagaatgtcatataaatagaatcatagagtgcgtggcccttaggtccgtctgctttcacttagtgtaatgcatctgggatccatgtatgttatgattatcagtagttcgtccctttttcttgccgagtggtgttcccagggcataccacagtttatccgttgcatttgggttgc

SEQ ID NO: 6232 - DNA, 173 bp, Canis familiaris
  misc_feature (1)..(173): n = a or c or g or t
gaactganannnaaaacaatgttaannntttaaaagtaaatattgtgtatacnnnagtctttgccatgtagttttcaagctaacgcttcaaagaagtttgttcaggatagggannnannntttaggttatttgtaaaatagaatttaaaaatgtgtttatatttaatgaagan

SEQ ID NO: 6233 - DNA, 591 bp, Canis familiaris
  misc_feature (1)..(591): n = a or c or g or t
gggtggggagtgacaggtcgtgtgggtcaggttcatttgctcctcttactttctttgttctttaaacacaggggttgcctcaaagtcctcttgttctctccctcttgtttcaggttctttgtgttaacaaaagggacgatcagacacttgtcacttgagggactactcggggcctggtaattatggttctgccctacctactttagaggatgttttttagaatcaaaatcagtagtagacaatggctacgaaaaggcctttgtaaaaccatacagcgttatatacatactctataaaatgtggaataccagcagatgtattctccgccgacctcagagaagtaagggcctgggtaaaaatctctacatcacttgtccacaagcacctttaaaaaaagtgtctacaacttaaatgcatttttaagaaaaaagtgtctaaaaaccagggcacctgggtggctaagccagttgagcatctgcctctggctcaggtagtgatcccggggttctggaatcgagccctgcaatgggctccctgctcagcggggagcctgcttctccttctccctttgctcttccccnnncttgtgtg

SEQ ID NO: 6234 - DNA, 320 bp, Canis familiaris
  misc_feature (1)..(320): n = a or c or g or t
ggggtgggggtgtccctgcccaggatgggggggggctcgnnnnntgggggaggcctctcgtgtccgtggcctctggccaccccgtgggggggacccgggagcaggagggggggcctgaggcgtttcacaggaagaaaacggaggcagcaccgctgggcggcgagttccttccctgcccaccgccgggaaggtagggggccctggtccccatggcccgtgtgtcgcgtggtgtgactgggcccagcctggcgctgggagccccgaggaggggccccccgcccccgcacccctggactgtgacgcgcttgtgtttcagtgtg

SEQ ID NO: 6235 - DNA, 455 bp, Canis familiaris
  misc_feature (1)..(455): n = a or c or g or t
ctgcgagagctgtngactggccagaagggcnncctggcancatgacnncaggctcnnnnnnnnnngtggctttggatgagttctgtgattcannaacagggaggagattttatttatttattcatgagcgnnngaactgtgttttccagatgagaaacagactcactggcatttgaggggctacagtgggacgagaactcagcttggcctgtctccatacccctcctctctcaccagcattgctaacctgacccttgcctcagttggcattgttcctaggggtaccatgggancttccaggagcttgctgcctccctcccaagggcctggcaggtgggtgctgtgggtagggactcctgtagcataaatatctccctctttgggtggcaaaccccacccatagctgatctatgtccacattccatgaaatgctatatacagaaagggaaannngc

SEQ ID NO: 6236 - DNA, 126 bp, Canis familiaris
  misc_feature (1)..(126): n = a or c or g or t
cctgccgggggccattgccatggaaacctgagttggcccagggttcctggcctcccttgtgnnngatcnncaggttaatttgnnncccaccctcctccttnntctcacctgacctccaggtgcgat

SEQ ID NO: 6237 - DNA, 507 bp, Canis familiaris
  misc_feature (1)..(507): n = a or c or g or t
ctctggttgnngcgtgctgtcntaatctggcacgctgtgactctgggaaatgtcctttaannagcatctcagaaatgcatgggtaaggtaaagtgtgctagtcgaagtggaaagcaagagaatgaccagtgaccttgcttcccttctcccttgcctcctcttcttccttccctcgccctccctccctctcccctctccttttctagcctgttctttgtgccaggctcctttcttgttgaacaacggggcagaatcaggagtcacctgagcaggacccagtcttcggagcctcaggataaaatgacagtgaagttgaaaagtaaaagccctagaattgaataggtgcttgttcctgtcggtagaatgagaattctcatttggatccaagcccccgataggcttgattggcctttgggatctgctgaataaagaaatgttttccaagaatgttggaagcaatagaaacaacattccctttgcctccttagagagttcagggaaatagct

SEQ ID NO: 6238 - DNA, 522 bp, Canis familiaris
  misc_feature (1)..(522): n = a or c or g or t
tgctgcnnngtcagtaannnannnntactcacgannaggttacagtgccctgctgaaggactccgaatttgcctggtcccatttnnnaatcttatcacaattatttgaataagatatgtatggtatgtttgtcaaattgcagaggacacaattattatcttagataacagtgcaaaaattctttcccaaaaatcacatcgagctggaatgatgagtcacaatagacaagatgaaaattatcaaggaaaaagatataaaatcttttatttaggtcactaacaccttttaggactaccttagagagaagcagccaaacagccttcctgtgacaaatgctagagatgtatagttagctacatattcaatctgatgatacgattgttaaatgtaaaataagtccaggacagtgttaatagtgtcaggttaaacaggcactattccttctacccttggcattggacaagcaatttgggttctagaaatattttttgaatgggttgtttcagttatctgttggcataa

SEQ ID NO: 6239 - DNA, 549 bp, Canis familiaris
  misc_feature (1)..(549): n = a or c or g or t
ctcacatcgattctgtcaatatgcagcagagccgggaacnaggcatcagtattgagagctgtccagatgattctgtgtttaggttgaaaacctaaaagttgagaactgttgcctgaatgggtgtgtcggccacaatagaggttgcctccttgttcaacctcagtatttatagtcctagatcctgatctgtgtcctaagccctgctccagcttcatggggcccccaccccagtaaacagggttacctacctcaagaggaaccaacagggtgtttgtagtaaaagcaaatgcgctgttttcagagagtgacttatttttgtaactggaaaaacttgggccattgactgctccttctgtcccccattaaatctctattctagtcctcaatttctctagaatttgcacaactgaagattttagtgtttactacatttttatgttgatgcagttgtattttttaaattgttctcccaacattttctcaaaaattcaaacactgaaaatctagcattggtaaaattcaaagcacaatatcttgtatgtattttgg

SEQ ID NO: 6240 - DNA, 515 bp, Canis familiaris
  misc_feature (1)..(515): n = a or c or g or t
agaatcacatcagctctttcttcagtagctactcgtggnntacaatagtggctttcaaaccctgggtgtgactctgaatcaacagcaaagcaaatcacaatttctgagcatggagcttgggactctaaatttgctaaaaaatattttagacccttggatccctgtatcctaaggatattcaaatcccttcacaatctgactgcagattcccattctcaccccatatccttcagagtcccctctgggagctatgttcttgcttaacagtcctgctttttcttcaaagcgacctgttttcagaccacacccaccatgtgcttggttgagccctgccacccttcttcatccaagcccccaatatagaccagcttacacaggacttccccacctcccagagggagagtaggaaactgcatcctgcatccctggagcactttgtattcatatttttattataagtagtatttcagcaaatattcatttctatgcctatttcccatgaatttttccatcta

SEQ ID NO: 6241 - DNA, 623 bp, Canis familiaris
  misc_feature (1)..(623): n = a or c or g or t
attgagcacttcctatgatccacaaactgtcnngccccaagaatacagacgaacagaatgctgctataatgtggactcagtaagctagatccaaaattcactgtcctcttgattattcatcatgagtgtttttcctactgcttattttgtgttacaataacctctggtaaggcacaaagtccagttcaaccaaagaatttggacaagggcaaaatagttatcaaacaatgcagatggatgaaaaaccctgaaataaagtgtcaactgacacttgagcaaaaccactggaaaataaagaatgtctgggattatggcaaagtaggggtgtatatggcctgtctaaagggaaagctgctacccatcttcacctcactactgccatgtagaaattctatgttatcagatactcctgttcctcaaatcagagatttttacatttaaaacttcccaagttttaaatgctagaaactgatttttttgttttaagtttacaagtaaaagccaaacaaaacacatctgtgagtgcaccaacttgtgacctctgattcagtctgttaaggagtttgattgtatttatatttaaagttgataaacaatcactttaatagacgtcactgaaaatg

SEQ ID NO: 6242 - DNA, 578 bp, Canis familiaris
  misc_feature (1)..(578): n = a or c or g or t
aagtcgcagcagtagcagtagtagttctagtagcagctcaaccagtagcagcagtnnaagcagttccagcagtggcagcagtagtagtcgaagtagttccagtagcagctccagcacaagtggcagcagcagcagagatagtagcagcagcactactagtagcagcgagagtagaagtcggagtaggggccggggacataacagagatagaaagcacagaaggagcgtggatcggaaacgaagggatacatcaggattagaaagaagtcacaaatcttcaaaaggtggtagtagtagagatacaaaaggatcaaaggataagaattcccggtccgacagaaagaggtctatatcagagagtagtcgatcaggcaaaagatcttcaagaagtgaaagagaccgaaaannnnncaggaaagacaaaaggcgttaatggaagaagccaggctttcttagcctattctttgcagcagaagatttcttgatgagtaaaaggattacctttccttgtaaggaggatgctgccttaagaattgcatgttgtaaaaaatcttttttggaaaatacagactgtttgt

SEQ ID NO: 6243 - DNA, 589 bp, Canis familiaris
  misc_feature (1)..(589): n = a or c or g or t
antatgactataatttatatccttnngcttgcttacttgaaactttttgtactttgtatataataaaatatgtatatgtatgtttttccttagtgaaatcttaacccttagaaaggnnntaacagttttnatctagcagccaaatttctngaagctggatttttcagcatgaagaacaagcacacttagaaggaatataggcaaagaaaaaattttgtgcctacatcaagttaagtgtataaattttagagagatttgactgtgatagctaagtaaagccaaacccaattggagaattagaaaatggctacttcaaggaactaaatttaccttgcaaaagtattaattaccttaatgaaaataatgctgcaatttccctgcaaaatcagatgtcaacataagctatggataatatctaataaactgccctcaggaaatccattaataaatttggtttctttttttctttttaaagattttatttatgtattcatgagaggcagaaacataggcagagggagaaggcagggagcttgctgcaggactcgatcccaggacttggatcatgatctgagctaaagggagaagc

SEQ ID NO: 6244 - DNA, 493 bp, Canis familiaris
  misc_feature (1)..(493): n = a or c or g or t
ttcagnaaaccaggagatcacaggggataacttctaaagcnttgactcnnnaaggtgtgactgcttctttacacatttacatcacatgctttgtgctgaagtatgttaaggggcaaaaggactataaatttaccatctgctctaagactttttggccataaagaccgcagttaaaactatgttaatagctcagttcagacaagaatgattccttaattttcatgtcttatagggtacccaggataatggagaagtcactatctgagtgttgctgttagtcaaggcagaggaaaacaagtactctggagagcctcacactggtaaccaagtcctctttctacacatgaaacacatccttttcacccacagctcattggccagaggtagccccatggccccatctgggcacaaaatagtgatgaaatagaatcttactctaaacctaaagggagaagtggaatattcaagattccagtaatatcaataaccacgt

SEQ ID NO: 6245 - DNA, 598 bp, Canis familiaris
  misc_feature (1)..(598): n = a or c or g or t
gtctcatgagtaaataaataatatcntaaaaagaagaagaagaagaagaagaaaaggtnnnnaggccctgagcattcctctgactctgagtacactctctcagagccagactccgaagaggaagaagatgaggaggaggaggaggaggaggctactgatgatcctgaatatgaccctggctacaaggttggtaggcaacccttctccacacagtgatttgaggacgcaggccatcccttagcctactgtcatccacatggtcctggctgagtggccatggcctgggtcctgccatggtggaagaggacggtgagcgtggagagaagcttggcaactaagaatcttcaagaatagaacctgaattaccgtaatggccatcattaaatcagcgctcacggtggaccaggccctgggctaaagtgctttatatggacaatcgcatcggatccttatgagaatcttataccaaagcatctgtcaaaacccacacttttcatcctagaagctcagaatctgagaacctgacatttatccactcttcaagttgagactttcataaccactatagcttaacatcaatgaatctcagaatcgtcaa

SEQ ID NO: 6246 - DNA, 526 bp, Canis familiaris
  misc_feature (1)..(526): n = a or c or g or t
agtngatgtatctcgtctggatcttcgagnnggntgtatcatcactgccagaaaacaccctgatgctgattctttatatgtagaagaagtggatgttggagaaacagctccaagaacagttgtcagtggcctggtgaatcatgttccccttgaacagatgcaaaatcggatggtgattttactttgtaatctgaaacctgcaaagatgaggggagtgctatctcaagcaatggtgatgtgtgctagttcacctgagaaggttgaaatcttggcgcctcctacagggtctgtacctggagacaaaattgttttcgatgcttttcctggagagcctgacaaggagctgaatcctaagaagaagatttgggagcagatccaacctgatctctacactaatgatgagtgtgtggctacatacaaaggagctccctttgaggtgaaagggaagggagtgtgtagggctcaaactatgaccaacagtggaataaagtaaaataaagtaaaatgcttcatttattgaaataca

SEQ ID NO: 6247 - DNA, 521 bp, Canis familiaris
  misc_feature (1)..(521): n = a or c or g or t
gtttcttacacctgctgtgctgctttacacttgagactttgattaaatctattttctacatatttgccttgaggcatcggagcagtagtactacttatactgtgcattttccgtgtgtgggtaagctggaggttcatggttttggtannnatatgcctaagatgcatggtgattaggtaaaactaatttgcagttttttgtttttttttgttgttgtttgtttgttttttgttttttaaatgtttgatgcctttaaaagttctgatctcttttctcaagcagagaacactacttttctggtattaggtttctatattaattgaccaactaacacacttttgtataagttttaagtaagagagaccatgtgagtgaatattatgttactgaccaaaatggcaaacattttcataggaccagcttcccccaagaagagcttctgtcattgtttcactacagggctggtggctgctctgaatcttctgtagaattctttgaanngggtagcacaatatgtaggc

SEQ ID NO: 6248 - DNA, 403 bp, Canis familiaris
tttctcccttccctccccactggaaggtaagctccatgagagttagtctgaaaatttattgctatttcttgaatgactgcagctaacaagcattgaattaccataatattttaaataattacttgctacgtaaatgaatccatttctttttaaaaaacatgcaagtttcctctgcaactatgattttctaaacatttatttagataatatttcggattattaagctgtgttctctgaatgaacacataaccaaatgtggaatccaaaggacttcagtctcagttaaggaagtttatcattgggcacctgggtgactcagtggttgagcatctgcctttggctcaggtcgtgttcccggggtcctgggatgggtcctgcatcgggctccccatagggagcctga

SEQ ID NO: 6249 - DNA, 469 bp, Canis familiaris
  misc_feature (1)..(469): n = a or c or g or t
tcngagtnctgatnnagtctcagaatattcgccctgccntcgcctttactagtagccaaaggtagagctgggcatgagggaagacaagatagtgaggagggagagggaaataagaggatagtaatgacccagactatggcttcccaatgcagcccttcctaggagggatctgcaaacattttttttttttttaagattttatttatttgagagagaaagagacaatatagcagaggaaaaggcagagagagagggagaagcagacgccccatggagcagggagcctgatgtggggcttgatcccaggaccccaagattgtgatctgagccgagatcatgacctgagtcaaaggcagatgcttacccagctgagccacccaggtgccccaacagaagtctttatatattaatcagtcactaagctgaattgaaaatgtgagcgggcccaaactgtcattagggtgacata

SEQ ID NO: 6250 - DNA, 414 bp, Canis familiaris
  misc_feature (1)..(414): n = a or c or g or t
gtgagccctgtgggatgcctcctaccacccagcccacatacnnnnggcaannagnctgccttgctgacctccctatcctccnggnncagatccgtgtgaacacggtgaaccccacagtggtgatgacccccatgggccaggccaattggagcaaccctcagaaggccaagaccatgnnggatcgaatcccacttggcaagtttgcgggtgagtcaggcaggagcccagctggaagttgcaccagtagccccagtgcctgcctagatgaggggtgggaagggaggatggaggagcaccccctcacctgtgccctgactcccaccctgcctnnnnnngtggagaacgtggtggacaccatcctcttcctgctgagtgaccggagcagcatgaccacgggttccgctgtgccgnnng

SEQ ID NO: 6251 - DNA, 573 bp, Canis familiaris
  misc_feature (1)..(573): n = a or c or g or t
gaccaacannaacatcannaacgaacatgacactctacagaactctccagaagcagagaaatcgaatttagattaaaagcacttttttaaagatcttgtttaaaaactgtcaaaaaatgtgtgtatgacttttaatatattttctcaaataactcatattggaaaatgtaggctatcccataaaagtgattgaagcttggactaggaggtttttttctttaaagaaagattggtgtctatcgaaatcatgccagcctaaattttaattttactaaaatgatgctgtgtcaaaattaataactacttttacattctttaatggacaagtataacaggcacaaggctaatgaaaacgtgttgcaatgacataacaatccctaaaaatacagatgttcttgcctcttttttctattataattgagttttagcaacatgttatgctaggtagaatttggaagcacttccctttgacttttggtcatgataagaaaaattagatcaagcaaatgataaaagcagtgttttaccaaggattagggatactgaacaatttcactatggtaactgaatggg

SEQ ID NO: 6252 - DNA, 612 bp, Canis familiaris
  misc_feature (1)..(612): n = a or c or g or t
cagcccgtcgggtccccnnaggatccgacattcttctatctggccaaatnnagaaaacatcaccctgatatcattctcattacatttcttcgaaaccattcctatgaataattttcggtcttccacagcgtttgacttttcactatctgcaggtttcatctgaatgggatgatgcatcccaggtaaagttttaatattgtgcagggcgttctgggcctcaagtgcagcttttcttgtataaaatgttacgaaacaacaacctttactctggggagggttctgactccggtcccggaggacgttgatctgatagacggctccgtaaggctcaaaaagttctttcagctccttttccgaccaggaccgggggatctgtccgacaaacatcttaatggcatctgggtctggttggtctgagtgatccaaagcgccgttcatcttgttggctgtgccgttacttggtagacttcccgctaactcggtggttgtctctctgcttggctggatcacttctttctttagttctgtagaccagcacgttgcagcatcaactcgctcacaggaatgttgcctttacaggnnnctcttttaattatnnnngaagcagggaga

SEQ ID NO: 6253 - DNA, 621 bp, Canis familiaris
  misc_feature (1)..(621): n = a or c or g or t
gagttcctgatnnactttgcagttgctggncaggatgggtgacaagttcctctgcctcctccatcctttctgggtacaaagctgtagnaggtnntgaggactcctgggctagtgtgagcagctattctgcatgggtgcagatggctggtatgtgaaagagacatgctctaactgcagagacagatggcagatttgaagtgccatggaatgctgccaacaggtgctgagatggttgctttgagcaaggctctaggaaggttgccccaggctgggaccattgagataagaagtcagatacgtggccttccattgtggcttctgaaccagattctgggaaatttgtccacaacctgcccttggcttgtccagggagtattgggagatagcaaggaaggggcaaatggctgccttctccttttgaggacagagatgctatcctaagggcataggagtgctcatggttgtggcatctctagctcaactgctgttagtagagtgaggctgtctgtttagtaattttgaatgttgaatttaataggtgacttgacaagatggtctaatcttttgagattttggagaccatttcctgtgccagaattactgctcgactatgttccatgt

SEQ ID NO: 6254 - DNA, 481 bp, Canis familiaris
  misc_feature (1)..(481): n = a or c or g or t
tccagcacccctgtccnncctgggccnnnacactgtggctgggtacctgtagcactgtcagtgaggagcccacacattcaggcccccagggtagggggggatnctggggnngccccagcttgtgccccacgcttgcccccatgaggctggcactaataggacaccccttttttgttgtcatttaacgtctttatttcctgcctttaaaaaggggaggaaggttccataagctacgtgtttcctagttaagctctttccttttgtgtttatacagttttgtttgttatactctgcaccttaaacccccatgactacccccacaccaccaccttcccaagcatggctggagtgggaacaggcctaagcccaagggaggggacagcagcagggggcagggggggacggtgggggactgggccccctcagctcaagggctgagggggttggaanccctctgacctccttgtgaggccnnnnnngc

SEQ ID NO: 6255 - DNA, 453 bp, Canis familiaris
  misc_feature (1)..(453): n = a or c or g or t
agcgggtanacgctatgtnnnccgctttgtgtgtgacctgcngagcctcctgggctacacgcctgaggaactcnnngccatgctggacgtcaagcccgatgccgacgagtgatggannnnnnagggctcggggaaactctgctgaganattttgaagaacaaccatgtcggtcggactcttaatttttaannnntattctatttttaattttccagaactcatttttttacattcaggggtgggagctaaatgagctgcagctataatcaattgtgcgcagttggaaaaaaagagagccaggacttgtggggtgggtggganangaaattcntgagnnaattttcaggagagagagagaagggtcttcttagaagcttgaaggatctggcttaagggaggaggagacgaatgtnnnnnnnnntctaaaaatcatnnnnnaaaaatgtgtnnng

SEQ ID NO: 6256 - DNA, 437 bp, Canis familiaris
  misc_feature (1)..(437): n = a or c or g or t
cgctgcaaggncgacttccggggnnagtgggtgctcctgtactttgggttcactcactgccccgacatctgccccgatgagctggagaagctggtgcaggtggtnngagacctggaggccgagcctggcctgcccccagtgcagccggncttcatcactgtggaccccgagcgggacaccgtcgcagccatggcccgctacgtccaggacttcacccgcggctgctgggcctgaccgggtctgctgagcaagtagcccaggtgagccgcagctaccgcgtgtactaccgtgccggccccaaggacgaggaccaggactatatcgtggaccactccattgccatctacctgctcagccctgatggcctcttcaccgactactacggccgcgccgcgtctgcacagcagatcgccgacagcgtgcggcgccacatggct

SEQ ID NO: 6257 - DNA, 430 bp, Canis familiaris
  misc_feature (1)..(430): n = a or c or g or t
tntcatccagtnnaaaatgctatcagtngtgagatacatcatttttaaatgtannactaataaaaagaaaagttgccaaataaagacatttcatcagttataagctgattttttaaaaaataatctgtacacccaacatggggcttgaactcatgacctaggaatcaagagtctcatgctctaccaactgacccagcccggcgcctcaagctgatttttttttttttgatacaagactattggaacaaatgaaacacaataggaatgatgtgaagcggtagagcaagcattgagatagagtcctcgtcttgcactggtaaactaagtgtgcaactttgggcaagacaactaactatgctctctggacttcagtttccacatctatatgaaagaataggactaaaaaactgttttcttggggtccctgggt

SEQ ID NO: 6258 - DNA, 479 bp, Canis familiaris
  misc_feature (1)..(479): n = a or c or g or t
ttctctatcacactacatcttcctccttgtcagcctagnnntgctttccctagaactttccgctggcnnnacatcctgctggacacagagatgcctaaaggcagctctagggtagtgcttttgtatggtttagtcaagctctgaaatcttgggcaaaaaggtgaggagagggcaaggagaggaaaggattcctctctccagaaggtcactccaatgttacttttgattcctagagggtaaatatgactcctttttctatcccaagccaaccaagagtgctcttggaggaaaagccagctcttccttgcctgttgtcaagtcncagctgatttgcagaatatgtcttttaaaaatgtttaagcctatttatttgagagtccttgtttttgctactaattatatagttcatcatatattaccattcacaccaaccatcgtggtcataacatctttgaaaagaaaaatatatatgtgcagta

SEQ ID NO: 6259 - DNA, 551 bp, Canis familiaris
  misc_feature (1)..(551): n = a or c or g or t
gncttttaagtgcaaagggaatggactcaacacttcctatccatatttctgtcttgtacccacgtcactggcctggaaagcaggccttgattcagtcaaccctccgtggatcagctgtgtgttgtctgtgcctcctgtttgcccacggggaatcgggcttgttctcctgcctggtggaattggaggactcagcatttcagagtgctttattgtcacccagatgaactgcagtctgtccattcacttcaccacgagccccataagtcattacagcccatgctggcaacggactggccctgtgccggagggttcagggtgaggactgaatgggtgttcccaatcctgtgcggcctcccggccaatggtaaagcacaaggtgctacatactttcacctctaggatttaagatggccatttctgcgtgtcacacagtgaaacacgacctgtgtgggcacaaaagccggtgggcattgtttttgatttgatttttggctggctgatgtgatcgtgtgtgctgtgctgccggaatgcctctgtatctgcccccaccc

SEQ ID NO: 6260 - DNA, 492 bp, Canis familiaris
  misc_feature (1)..(492): n = a or c or g or t
agagatcccagcnnnnaagcaatatatagnaatnnacattcctaatcccccacagtcatatagcagatcaaaataattacatgattcttcattaagaataagcatcattttgagatatgagtggctttccctacaacacgtttggtggcagcntgtgctttctcatattagttcatattttatatatatttcttgaaagggctaatatgatgatgcatatactgaggagcagagactttgagccacctgcattttcaaccgagagtggtcggatggttcagtgcaaccccatgaactgggctgaagtatatgaaattgctgcacttgtagtagagaaactgcccaatatcagcaatttcatatgcttcaacataatgttttttaattattttcttagatctcagtagactcaattgttttcagctgtttcagcttttgaaagtgtttcaaaagatttcctttgtctgaaaggaccacctgtgtgacctgctc

SEQ ID NO: 6261 - DNA, 562 bp, Canis familiaris
  misc_feature (1)..(562): n = a or c or g or t
tgtataaactcatnatnngcantannnnnncaaatgtcccttnnngtcctgcttatcttgttgctatttacttggcttaattttcttaattttccatttttctagtaagtatatagtgtagaattattttaatgcctgaactttgaacaaattacagatgtttgaaattatataatcaacaagctagtgttccctccttggactaaccacatacaaatatgaatctcagctacaaaaacaggaaatgctggtagctggaaaatgggcattgatcaaaacatccgtttgaaaagcctaggatttctactttttggcagaggattcctactgggacagctttaccagaaaagaataaagatggatatgtccattcaaaccaagaatattcatgcatcttgtattgttacatagcttgtggaatgaatttatttttctccctagtttgagagtcactcccctgaaagaactcaacctatttacagctgtgccaaaatgaaggacacttgcctctctgaaactttcactgctgcttcttttgttcacttgtcagatataaaatttt

SEQ ID NO: 6262 - DNA, 546 bp, Canis familiaris
  misc_feature (1)..(546): n = a or c or g or t
acccgttcnntcngctgtcgacagtgtgttgagtgtgcanccggccctgaggatggnagnnnagtnnagtnntctaggntcatctgtaccgatggactcggccctgtgccaagagggtactctnnagncggaccctccagggctcattggccagcacacacagatgccttgacacctccgtggtcactcacaactacatccaccctgtggacacctggagctccttgaggaagcacgggcacatccattgacattggagctggggacacgttcgtgaaggggttctgtccccagggcagctctggctcattgcatagccgtcgttcatgagggagtctttgtttctatgcacctctttctatgagatgacatcctgaatttatacagatggtatattccttattttatcttcttaatgtaacatttttatatgttaaatttcaacattgtatgtgattataatgctttggttaacttaaggcttctttttacaaaatgaatttactttgataacttcccatgtnnnntagctcaccatttttcaga

SEQ ID NO: 6263 - DNA, 477 bp, Canis familiaris
  misc_feature (1)..(477): n = a or c or g or t
ctctttnngtatacacccgacttctatttgaaaaaccaaatgattatcttttacnnnacntgtaaaatattaaagaaatgtgatatatctcagggctgaagaggtaaatcgcctttcagcttcatctatgattaccaacaatacatttaaaaaaaagtctatatccttcccactttctacttcaaaaatgctgatcttaaaatgctcatattagcacaaacttcaaaagtgggttcatatcattaattctgttactttgtaaaaaaattggtcaaaatttagactttaaaacttttatacctttaagacttttatacctttagatacataagtgtagtttgattcctagtactttacatgtgctttgtagttttgaaaataataatgatgatcttgggctgtgcatttatatgcaggatattgaacaagagttctatcaaataaactagatttaaagtcaaatccatgttatttaaa

SEQ ID NO: 6264 - DNA, 450 bp, Canis familiaris
  misc_feature (1)..(450): n = a or c or g or t
ctcgnagcacaaggtgtctatggacntgcgggccaacctgaagtccgtgaagaannaggacacagagaaggaacgccccgtgnnggtgggggactnnaggaagaacgnnnaggccatgtccgggatnnagggccggaagaagatgttcgacgccgccaagtctccgacctcgcagtagaggccgccctgccgccccgtgctctgggcttccgcgtctcgctcctccctgcagcccggctcacctgcctctctgcaccccaccctgcccctccggagcaccccctcctgccctcgcctctcccctccagcctgagcgccnnnnnnngggactgggactgaacagacacccgagaggaccaacccccgtgtctgaagacctcgccctagcggggtnnnacgcctgccggctgcggtggagccaggctgagggggaaggggtgtgagagcgtc

SEQ ID NO: 6265 - DNA, 552 bp, Canis familiaris
  misc_feature (1)..(552): n = a or c or g or t
ctttactctgtgnngtaaaaactaatgcnannctgacatgtcntggagtatggctagacagagtgacagacacacaaganngcctcccttcagctgcagagnnnnctgctgtaagtaaagagcagtccaaaatcaacaaaagggaagctggcgatgtagtacaggaagaagaaaggcagtccaaatctaatgcaaagaaatgtggtttaactggtgacagtaataagccaacaaaaggaaataccgtggtgtcaacaaagaagaggaaaatggtagaaatgttggaaaaaaagaagagaaaaaagaagaaaacataaatgatagtgtgaatctcacatttctcctatgagaaaaacttcttagatggaatcattcgtttcaaatgtgtccgtccccccacccctcccgtgtaaaagctagaaatttcttcttttgaagaaaatgtacagcttaaaaaaaaaaaaaacttttaagtgtttattattttttttaacaatggtaaaactatttttgctagacagcattttatgaattatagnnnnnngtgatata

SEQ ID NO: 6266 - DNA, 649 bp, Canis familiaris
  misc_feature (1)..(649): n = a or c or g or t
agagtgaccccatctccnntcgcncctngggagaaaagctgccagccnntcagacctccctcntgccgcccccttgggagcttataaagctcctccccagcccaggcctctccagtgtggnnctgagggtgacacaggacaaagcacatgagagcccttggcatgatgaacatgagagctgaggatgtgaggcaccatttttcttcgttccaactctggcaagtcctgggcaagcaacagatcctctggaaaagctgggtgctgctccagacaaaggggacctttgttcccacctgggcgcggggctggcctgggcgcagggtacacctattaaggcatttttttggagccagtttttgtgatggctgctgatgccacctcttccacctgatggggagaccctacaggctacaggataggggctgtttcttactcctctctgacaagtgttgacgaacgtcattttctcacctaaaagaagaagagcaatgatatctcctccaccttgttttgtggatccaatgagaggctagatttagaggtcccaactaggggcaccttctccccactgggctgtactcggcccctctccagaaggcctgnnnccctctcaggttcacaggtgaataaaggaccacccagaaggcca

SEQ ID NO: 6267 - DNA, 299 bp, Canis familiaris
  misc_feature (1)..(299): n = a or c or g or t
aaaagaagttnnntgtnnnnnnttnnccaaagataccagtccatcatnnggccagnnnnnnnnnctttttggnnnnnnnnnnnctctgagttctcttgaactcttccttnnngatctcnnncctccaannnnctattttcaccttgaacttcctcaagtctgtgggactttcctctgatcctccaatctgattctgttactatttctgggcaggcattagatttctcagagttaannngatggctatttcctggtgaaaattcagtggtgattgctaacctcnnnnnntggaggtggca

SEQ ID NO: 6268 - DNA, 559 bp, Canis familiaris
  misc_feature (1)..(559): n = a or c or g or t
agttgtttttcatttttgcatgtaatttttgggctntgaccacatgtgtacatgttgagttgcatgtagctacaattgtagtggttacataacttgatggctaacaccgagtcacattaccattgccactcagtagatggcaccagatcccatttttccaaaaatgctgttttccagcacatttttcaattgtcaccaaattgatttcccaaggctggtagtgtgaatgcctatttctgctgtgaaaaacaaagcaaagtgattcagctttccactttgatagaacattacgtgccaaaaagttttctctgtaaattcagaattgctaacagtgctgtttatttttaaatttcgaaaaaaatgttattagagttgtaagtagatgttacttttatgagtaaattattttgtgtgctaaaagaaacaaaaaaggtatgttttgaggtattaaggatttaaaaccaaactagcactagttaattgtatatgatctnnnnnntgttcatagcactgatcttatgaatctgcttgagtagtcnnntattacgattctcataac

SEQ ID NO: 6269 - DNA, 504 bp, Canis familiaris
  misc_feature (1)..(504): n = a or c or g or t
gctatgggtgctggcatacagatgactgtattaaatgtgtttctcannaggcagcgtggtggattttgaaggtaaaactttgggtttatcatgtttgaatttgagggacagggaggcctactggtctctgcttatccccaccaataggcaccagcctcttcaccatctttgctccattggggtgtagccagctttgtcttaaacacaagagccagtctccccgcttactttgcttcctcctttggggggtagggagggaagcagtggtattggagatggcttgttgctgttatgggtttgagttgcatttggctataaaacaatcttgttagaaaaagtaagtggggaggaggggaacgggaagaaagaaaggcctctccccctcctctcaccacacattgggacacatctcagttggtctctaatcttgtttgtagggattctgttggttgaatgcctgggaagggaggtgggatggcctncnnnttggaccagcttacccag

SEQ ID NO: 6270 - DNA, 581 bp, Canis familiaris
  misc_feature (1)..(581): n = a or c or g or t
gaaatgtgaaaatgatcaggtnctaccctgcttgagagctgtcagtcnngtnccannctctgagggtctnnntncccacagaangnnnagtctggnnnnnnncatacatggtnnnnaatcatgtnccgtgtgannnnnnnnctgctgttctcacnagtcnnagcagtgnctcacgcccttgtcntatcttccaaccacacagccnnnacctacctgcacttggtcccacctnnngccactgcacatgttctcttcccctctccacaganncaatcctgcctaccctttcatagtgtgaatcccaagacaacctccccaaatccacccccacagtgcaatctaagagtaaagatgggcttcctacgcaacatggctccaaaacaaaccttcatccctgccagcttgccaaacctaaacttcttctattcagaaattctggaatcttccccacgttccagggctcaactcaaacgtcacctttacaagagagtattcccaggacactgttcctcccttttctggagcacgtcatagcgntctctcggtgaaacctcattttagcacctgtgcttctttactac

SEQ ID NO: 6271 - DNA, 507 bp, Canis familiaris
  misc_feature (1)..(507): n = a or c or g or t
tgtgagactnngcgatcctcgcttctaccannactctttnnnnntgcgcaaggagttcacacaagtccaaaggtgactgcttctggtcacactgatgggtgcctttccttcctgacagaggccacatttatggctctgtggggtggggtttaccctatgcacaggaagcaatgtgactttcataggacaggctcagaccatttgtgtttaatagtcaagaangaagatcttccctcttgcaaattaaagtgtttcccaatacaggctttagtacataaccctccctggcctcctacctcagttctgccccttttcctttcctgctctctacttctcttcctcatagaaggctgtgaggcttgatccttaggaagctatcacttagcctggtacaggaggggctcctggcacctggtttctttgcagcaaacataattaatggatgcaaagagtgatatttttgagctcctaactcatcacactgtagacatttagattctataccca

SEQ ID NO: 6272 - DNA, 394 bp, Canis familiaris
  misc_feature (1)..(394): n = a or c or g or t
catataaagcattgctgctatggttatannagcttttaaacatttattgctttatcattattataaaagtaaaacatattcgtttttcctttttttttnnaagtnnnctctacccacaaggtgaggctcgacttcatgaccnntagatcaagagtcacatgctctacctactgagccagccaggcgcccccatattcattttttaaactttggaaagtacagaaagtatttcagaaatgtctcataatcccatcatccaagaaactatagtcaatattgtgcatatgttcttttatttgaattttttccagaagtagtcttgagctccacgtttnnagnntctattcccttagacactgtagcacattcttttnnntttgcctagtgnnncnga

SEQ ID NO: 6273 - DNA, 484 bp, Canis familiaris
  misc_feature (1)..(484): n = a or c or g or t
tnnagggtcaggaggatggcactgtgtccaaagggngaaggggccnnagtgcccaacatgccaaagaagcagaagatnnaatgcctgtggtcacctcaaaagtgagtgtcatcaagggcagtagaagccaggagtctcttcacttggtaaaggnnnaggtagatactgcagcacagggtaataaagacttaaaggggtatgtgcttccaagttccttattccacgtagggaaagaccccaaagcagctcccccgtgataagtatgtgcggaagagtgtttatactcatgttagctctacctgcctagcaggggcccttctctgcacttgcttcttgtttggctcttcttttcctaaggaattcattctcatgtacagacagctgatgcaccctgttttcctacacagtatctggctcctgcctctgacctttccagctcagtaaccttggctttagagtcattgacaaatctgttgccactgtc

SEQ ID NO: 6274 - DNA, 534 bp, Canis familiaris
  misc_feature (1)..(534): n = a or c or g or t
tttatatcactgctatggtgtgggggaaatgtcttaacattgtnnnctcagatgatctattttaatattgctttacttaccaatttttaattttaatgccaatttataggtaaacatttattttgcaagttaattcaagaaaagtatagagagcctgcttagagcagaagaaaacaaataccacggtgcctttctttaaatttatctggaatagcagtgtaaggaccaaattccatccataacacaatcaacaacaatacagttttttttttttttacaaaaaaactgggaaagtcacaaagaactaaaaatctagttcatatttgttgcattaagaattaagtaagccctcaattttccatgtgttttattttagtagctaattaattctgggttgaaactgtggcagaaaactgaacatcgctctattgatcaataggaactgttagctttttaaatttgagtttcattttattacataaagatttacatctctagggctgtagaatgcataatgatgccttggcttcattt

SEQ ID NO: 6275 - DNA, 20 bp, Canis familiaris
gaagacgaggatgaagattt

SEQ ID NO: 6276 - DNA, 624 bp, Canis familiaris
  misc_feature (1)..(624): n = a or c or g or t
catccacgcgntgctggctgccacactgcagttagataatgaaaagatattatcggactatgggacaanntttgttacagcctnnaagaacactcacaactacagggtgtnnaacagcaacaagcatccggcacttgcggaaataaatccgaatcatccttttcaaggccagtactcagtgtcagacatgaagttaagattctcacattctgttcaaaacagtgaacgtggcaaaaaaattggaaacgtcatggtcacaaccagccgaaatgttgtccaaacaggaaaagctgttggccagtcagttggaggagctttttccagtgcaaagacagctatgtcttcatggctttctactttcaccagtcccggcccccagagtctcactgagccacctgacgggaagccttgagtgtccagagactgctgttgcttccttaggtttaagtgtttcctgtctgtctgctgctcccagactgttcctcttcatcgaccacaggtccacaacaggggaccagcacgtcaaactgtttacatggacagttgccctttgtctaaatgaatgtcgcacgatgctggaaagatgaaattgcagccgtagcnnnnatggctctccaggttggg

SEQ ID NO: 6277 - DNA, 172 bp, Canis familiaris
  misc_feature (1)..(172): n = a or c or g or t
ggtccttgaaaataactagaaatatttttgttaattgtttgttatagaaataaattttaattttgctgttaatgtatttcaggtttttatagttatgcttcttttgtgtttttgatattcactgtatagttgtttgaataannngtgttcacagttttnnaatgttgaaatc

SEQ ID NO: 6278 - DNA, 447 bp, Canis familiaris
  misc_feature (1)..(447): n = a or c or g or t
aagtctaccatttctaccataatacaggangagtgcttttctttatgtattcattcttaagattttaaacccacacttcaagattagggactggactagcttcctttataccttcagttcttcgctctcttttccacacctagtgttattaaattttgccttctatcctaaatcatgcaatgacttcttttttttcccccctcccccattattccaaaagatcccataaatccaaggccatagactaacctacagtcattttcttggtcaaaacctactcatatgggatcagtacacttgggatcctgatgcctgacaacaatttcctttctagttatcaacaagactcaaaatagtgggatcttggcatttatcttctttttaggaacctggtgctttgtagagggaaaatttctcaatctaaataaccttttgggatccctgggt

SEQ ID NO: 6279 - DNA, 430 bp, Canis familiaris
  misc_feature (1)..(430): n = a or c or g or t
aactagagatgctgttatagattaacatnnacccatggagagtaatngagaattacctaacagtgcaaaaaatagaatcttttccatacttaattatttctcagggaatcaaatgtcatataggcatcttataattaatcttcacatctcttgactttccctgtaattctgatttattggaattgactgtgcatgttaattatataggcaaatgaagtaggttgtataccaatggttaggaatcattatgagttcctagtctggcttcaccactaccactgtgtgtggtaaattcgtaacttttctgtgcttcatttctctccatctgtagaatggatctggaaaataataaaacacatttcctgggacacctgggtagttcagtggttgagtgtctgcctttggctcaggaggtgatcccggagttccg

SEQ ID NO: 6280 - DNA, 514 bp, Canis familiaris
  misc_feature (1)..(514): n = a or c or g or t
aagactatgggaaaaaaggaagagaagttccgggaatatctgcattgtngaacactcctgccannagctgaaaaagtcacaggttgactgctcattacatccaaggagaagatgcactttatatttcatagaacttagaaataataaaataactaggcttaaaggtattatttattgttgaatgactaccaaaactgagtgtgtatttgcactatttgaagatgttaaatggtgatattaaaaaccgaatgtaaacattaaaaagtttaactggtagcatggacatttagtgcttctttatgtagcattttacggagatacagacaaaagcaaaagatgtaaggaatatttgtgaaacagataaaaatatttgaaaatgtgcaatatgtgatgttgtaaattcctgtcaggaaaacttctgttcaaacttggagtaataatagtcttatctgactatcaatgtgtacctttttcaatcaattctatcatgtgcaatgcttcttatgaagtattt

SEQ ID NO: 6281 - DNA, 196 bp, Canis familiaris
  misc_feature (1)..(196): n = a or c or g or t
cagtatagttnncaaagtgtgttatgttagtttcaggtgnnngntagnnnnnttcannannnnnnnnnnnnnnnnnncannnnnaatgnannnntaatcctcatcannnnnttcacccatcccctcatcnnnttccacnnngaaaaatcagcagtttgttctctataattgagtctatttttttgtttnnnctttt

SEQ ID NO: 6282 - DNA, 473 bp, Canis familiaris
atctgtgctggctataaagaaggagggaaagatgcctgcaagggagattcaggtggtcccttagtttgtaaacacaacggaaactggcatttggtgggcatcaccagttggggtgaaggctgtggccgcagagaacaaccaggtgtctacaccaaagtggctgagtatgtggactggattttagagaaaacacaggttggtgatgggcacgccggtcttggatgaagtcaccagtgcgaagaagctttctagagatgggaaagagcccgggttgtagcatgaattttacaacctgggtccagctcaaatgctaagccttggagtcttcgtctgcaaaattgtggagaatagtatctgcttcatgtccttgtcataagggtaaaaggagacagtgcacacaaagctgctgaggaaaatgttgtgcagaggcaggctgtcagcctccagtaaaaatgctaataatggaagataac

SEQ ID NO: 6283 - DNA, 231 bp, Canis familiaris
  misc_feature (1)..(231): n = a or c or g or t
ctgcgagggctctgtgtactnnngagcgccctggaggacaggcggaaggacatggcagggtggccctcttgccnnnnncttgcctctcttactaccttctggctctagctccttctgttaccccttcctggggtagctttggcaaatgcctcagcctttgagacccagctcggatggcacctcctccaggaagccttcccagaacctccacagggnnnnntggccctgagc

SEQ ID NO: 6284 - DNA, 603 bp, Canis familiaris
  misc_feature (1)..(603): n = a or c or g or t
annagctgctccgggtgctgcgggcccagcntgtgcaggtggcnnaaggcagcgagccagacggctnctgggaggccctgggcgnnaaggccgcctaccgcacgtccccgaggctgaaggacaagaagatggacgcccaccctccgcgcctcttcgcctgctccaacaagatcggacgcttcgtgatcgaggaggttccaggcgagctcatgcaggaggacctggccaccgatgacgtcatgctcctcgacacctgggaccaggtcttcgtctgggtgggaaaggactcccaggaggaggagaagaccgaggcgctgagctctgccaagcgttacatcgagacggaccccgcaaaccgcgaccggcgcacccccatcaccgtcgtgaagcagggcttcgagccgccctccttcgtgggctggttccttggctgggacgacagctactggtctgtggaccccttggagagggccgtggccgaactggcggcctgaggggccccgtcggggacctgcgcgcgaaacgtcgggctcctcaccacattgtcccaagtacctgtgcttttggaaaattgaagtcaataaaagcttttgatgcnnnnnn

SEQ ID NO: 6285 - DNA, 590 bp, Canis familiaris
  misc_feature (1)..(590): n = a or c or g or t
atgcnctggnnagcagcatgtgnnactctggnntctgtnnagccaactgcactgnagtccacgagggccnctaggtcagtgtttctccaaggaaggcctgtggcccactggtaggttatgaactgatagaacaaatggaagttctttctttgctgtttcaccactgaacaagttatatttccacagactttcatttttacgtatgcctaggaagttcttatcaagaaggtcactaaatcttgctggaatttggtatttatagagctcttgggaacactgtgaatttcaccattcatacaaacaagccgatagtgggaattaatgcaacctttggaaaagatactttgccatcaatctggtcttattggttgtggttttctagcattagtcgtattttgagctcattgttcccctgaaaccagactttaaagtgtgtaggttctataattcagatacaaagcatatatacctttatagtaaatgcatttgtaattctttttgcttttataatggacacttctctagtaatgcactgtctgtgggtttgttccatttaactaacctatatatatatttggaacacagacata

SEQ ID NO: 6286 - DNA, 630 bp, Canis familiaris
  misc_feature (1)..(630): n = a or c or g or t
tacatggggttcccaagcaggcgaggcgcacggggccccgaagaccgtcgnnnnagtcgngncgcnnnnnnntgnnnnncccggnnnnnnnnngcccagcgacnnnnnngagaacnaggcgccgcgtcgnnttcagcccgagaccaaagggccggggtgcgaatcccccgctctcgggccatttgctccctgcaagccccgcagtgagtggctgctccgctctgcacctcggtgcctcgtgtagagggaaggtgaccgcgctcagcgccgctggaacgagatgaaagcccgcggcgcacctggggcgcttccggacgcccggcaagtggtgacgtcatcgtttttgcctccgccgcaccccccgcnactgaatccgagaaatatttcatagattctgagcaagcgtggaaccatccatcggctgttcttccaggcagtatcttacagcacatgaagtaaagaagaaatanntaagtcggaggaaacatcaacagccccagatcaggacagatgagaagcagacggcagcatgtctgacatgaaggaataaaactcggagattcctgaattctagcctctcaatttccctaaactccaagcttgatcctcctgggaaaatcctctcgattt

SEQ ID NO: 6287 - DNA, 293 bp, Canis familiaris
  misc_feature (1)..(293): n = a or c or g or t
ggttgggagtccaagggcaaagatgncacacaagatcttcaaaggtgnntttcatggnnnaggnnnnnaggctctcttagacactgttgcngaaagtgtaaatcagtgcaaatatccnacagtacagcttggaaatatgtagtcanngtctcaaaagggtaggctgtacctagcaattccactctaagggctttatgccaagaaaacaatggacgagtatgcaaaatgtacatacgaagacactcatnnnaatctttcgatagcaaaaagctgcgagtaacctaaatgtccac

SEQ ID NO: 6288 - DNA, 538 bp, Canis familiaris
  misc_feature (1)..(538): n = a or c or g or t
cctcctagaagagtgctggtactcnnnctttcccccgggctccaccatcccacctcaccttccagcaccgcccctgagccacacagtcatgatcactcactcgtaggggctcagttccctggcacagtggaccccatgccatgaatgctaagcatcactacactgcaggtaggctggggaaggtagctcctccccagaagtgatctctgccctcctgcccacatccctacccctggcagtcggagcacaagtgagaccctatgccatcagcagaagaaatttgtctgggagcaaagaggctccaaccactgagaggaggaacattttgaagataactttggagacaatcagaggacaagtgctatgatcaacacaggttatgataaaggccctatggaaaaatgtttgaggagctggaattccttagtttaatgatgagtaaggagagactcagccaattactacacacgtattaagcacctactatatgcccagcactcattaaactcaatgggtgatacaagagatacagannnna

SEQ ID NO: 6289 - DNA, 533 bp, Canis familiaris
  misc_feature (1)..(533): n = a or c or g or t
tgctttttcaactnntaattctgacatatacttgtatgtaacatcacagtttacnngttcctcagtttagtttctttctatgaataganctaaattcataccgaattcagaagaacattgccagaattaaatgacagcatccaaaattccttgcccgagaacttggtgtgtaagtatcattaaatatgttagctcttattcatattaaaaatttcttatataccagtagtagtcagaaaatatgagaggaatctcattcagtaagaagaaattatagcaagataaatattaacaaaattttgttggaagacctacaggttgaattaaaagcactatacattccnnnnnnnaaataagttcttttaaatgtgtcatgtcctcaataaactgctatgatatttaaccggatcaccatcaaaattccaagaggaacttctaaaaaacttcaaagacaatgacagagggtgaaaagaaaaggcaaaaatcaaccctatcttttttcctttaaagatgagtaatgatagtagaattat

SEQ ID NO: 6290 - DNA, 640 bp, Canis familiaris
  misc_feature (1)..(640): n = a or c or g or t
ggtatgagcgnngcattgagaagatctccatgctnnnaaagatctacatccaccccaggtacaactnnagngaaaactnngaccgtgacatagncttgctgaagctcaagaagcctgtcaacttcagcaactacatccaccccgtgtgcctgcctgacagggatacagcaaccagactgctccaggctgggtacaaagggcgggtgaccggctggggcaacctgagggagacgtggacatccagcattggtgaagtacagcccagagtcctgcaggtggtgaacctgcccattgtggatcggcaggtctgcaaggcctccacccggatccgcatcactgacaacatgttctgtgctggttataaacccaatgaagggaaacgaggggatgcttgtgaaggcgacagtgggggaccatttgtcatgaagagcccctttaacaaccgctggtatcaaatgggcatcgtctcctggggtgaaggctgtgacagggatggaaaatatggcttctacacacatgtgttccgcctgaagaaatggatacagaaggtcattgagaagtctggaggttaggaggctgctcacattctaggctcctcactgcaaaaatcacagaaaccaatccagtggaagatttattt

SEQ ID NO: 6291 - DNA, 380 bp, Canis familiaris
  misc_feature (1)..(380): n = a or c or g or t
agcagcctgcccaaagcaaaactctccttttnnnaatgttttctacgtaccctagaagtccgtgtggctttnnnnttccatttnnnacgtccgagttggccttgctgtacacataaatgttatactccggaaagcccttgccgtgtttctccctcagtcacatgccccgggatacacgggcccaggtggccaatannaaccccaccccacaagctggaaccttctattatctgtgagaccttacacaggtcacttcaccnnncngagccaaggcttcttaagaagagggcccctccctacttcaagggcctttgggaacacacacggagagaacctgagaaatgcccacacggagcttggtaaangnntgctgtcgctga

SEQ ID NO: 6292 - DNA, 588 bp, Canis familiaris
  misc_feature (1)..(588): n = a or c or g or t
cgacatattaccgtggtggagcttgtaggtgtgttcccaaccctcattggtaggatagnnncaaagattatgcctccagccctagctctgcagctcaggttgttgctgcgcatcccactctactccttcagtacggtgctagtggataagcatggtatggacaaggagcgctatgtctccctggtgatgcctgtggctctcttcaacctgattgatactttccccttgagaaaagaggagatggtcctgcaagctgaaatgggccagacctgtaacacctgatgtgatggttcctctcttggcagctcctcttctcattctacagagtgctatgcacacggaaaggccttaaaaatatccttgatgtacagatttttatttgtaatttttaaagtctattttaatatgagctttctttgcacttaaaaattaccatgatgctttttgtactttgaagtgtaccccaaaaatgatgaatataatatgtactctttttctttattccatcatggctggttaattttaaagaaactagaaacaacaaccatacacatgctttcactgtgttattcagtgtaacacataact

SEQ ID NO: 6293 - DNA, 160 bp, Canis familiaris
  misc_feature (1)..(160): n = a or c or g or t
gtggtgacctgagagccatgnnnnnnnnnaccaccctcatccatgccacctccagcctgacaggaaggatcacgggaggtagaactgtcaccctgtgaaggctctggttggagcccagggcctctcccctcatggtgttcattgagttgcttcagttcct

SEQ ID NO: 6294 - DNA, 387 bp, Canis familiaris
  misc_feature (1)..(387): n = a or c or g or t
tagataatgtctaagagagaggaacgtngnatctcatcaaactgaccaccaaaaagctaacagcaannaaggatgaaaaacaagaaagagactggaagtgacaaacttaaagagaaagaaaacaaaaattttgtatcctatcatcattcttaacaaacagctgtgcatttgttagtgttaatgaggatacacatggaacgtttctgagaaaatcagaggttgtttgaaagtacacacagattctggatgatactggaaaccaattatagtacactagcaagcattaaacagttttttccagatttaatcatgaggaatacgcagattaaagagatgtgagaagaagttatgtgctcacccaatggctaaagaccgtaacagagatgg

SEQ ID NO: 6295 - DNA, 596 bp, Canis familiaris
  misc_feature (1)..(596): n = a or c or g or t
cgnntctcctaccaaccttaatgacctcaaggagtgcagtggcagcaggaaggccagggtcctgtatgattatgatgctgcaaacagtagtgaattatcacttctggcagatgaggtaatcactgtgttcagtgtcgttggaatggattcagactggttaatgggggaaaggggaaatcagaagggcagggtgccaattacctacttagaactgctcaattaaataggtggactatggaaagattacccatcgtgacaccagtatttatatacaattaactctaaataaaacaggtttaagtatcttccatgttaatattcttaggagactgaaaagaaaataccagccatcagaaaccagcctttctgccaataaaattgcatggtaaatatttcattacagaatttatgttagtgctttcatgccaagaatgttttcttacaaaattctctttctactgaggtttcactaataagcagcttctacttttgagctccaacttaaagcagaagaactgttttctactgaatttttcattaatggcaagctttttnnnnnnatgtaaaataaatttattgtgaattgatatcagtga

SEQ ID NO: 6296 - DNA, 265 bp, Canis familiaris
  misc_feature (1)..(265): n = a or c or g or t
taagaagnnttatttaaaggtgcaatatgtganntagnnattcatgatncncnaggtttttagtaatgttttactcaggttggcattttatgtgnatctgtgcatccgtgtatatgtgtgtgtgtgtttannnnnnnnngcaatctgtgaacacnnnngtgtgaaaacagnnnnnnntgaatccctnnncnctcaaagtcnnntggctttagtctatnnnnagtgacacacatccgtatnnnnnntatnnntntntacnaaactc

SEQ ID NO: 6297 - DNA, 488 bp, Canis familiaris
aaacttgcatactcgactggagaaagtgtaaattggtgcaatcactttggacagcaatttggcaaggtgaagatgtgcatactctgcagcccacttctaggctcctattctccaaactcaaatgtgtacccaagaagatacatacaagccttcatgatagcactgtttgtaagagtaaagaaatggaaacaacttaaatgtccatcagtgggggaatggataaataaatgatggtatattcatacaatggaattttatacagcagttaaaatgatgacaatgttgagtaaaaatgcaagttgcagaataatttgtatggtatgatgcaatttatataatgtcaaaatatgcaaaatgacatacatatccatagttaatacatagtatgtattaaaatgtttttgaaatgcatgggcatgttaaacaccaggggagtggctgtctctggggagggaaggatgggagatgagaaagtggaacacagtggt

SEQ ID NO: 6298 - DNA, 601 bp, Canis familiaris
  misc_feature (1)..(601): n = a or c or g or t
tgggcgtgtgtctgtgtagannaacgtggtagctatatnnanngtactcccgtnnnntgtgtgtgcgtgtgtgtgtgtgtgtgtgaccattgtgagagtgagtccaatacaccacagagatggtcttcccatggggtagagctgtcctcacacccttcctgtcctgcttcccacagaaggcacagagctctctgctctgatgcctacgttcaggcacttaggtcatgccaacccagattttggtctgtgatgaaacaaagagaaatgtttacaacatctagagcaatatcaaagcatacctcatccccaatcttccatgtctcccggtcctaccctttctcctattccctcttccatgggccctcgtccgcctcaccaggtgggcatctgcaggtgccacttcttccannnctggtcttcctttggtcctcatgccgggctcctgctgtggacagccttccgggctcgaggcttgctttgaagacccagggcaagccagggcggtaggccaggcagagctgtgatttttaggactgctctccaccccgcaagcggcctttcggccccacttgagtgtccaacctgtttctggctggcgtga

SEQ ID NO: 6299 - DNA, 441 bp, Canis familiaris
  misc_feature (1)..(441): n = a or c or g or t
tcaggaatgtagaacatttggaacaggagatcaggacacagatgcttgaagaannaagaccatatgaaaatgagacaaagatggcatctacaatccaaggagagaggnntcaggaaaaaccaaccctgataacgccttaatcttggatttacagcctccagaactgagagaaaataaatttctgttgtttaagctccccagaaaaggaggcacagtgaaggtgttaaagtttcttctgacgtgaacacatgagcacaaactctgacactgaatactttggagaatctaggtggggtgttcccgaccttgatggatcagacacagatggtatcagccttggcagtcctaggagcctgtgataaaaaacaccatatcactgcccttcgtgtttggagtcacagtattttttctgtgtctggaagtcctaaggnnagcccgaaa

SEQ ID NO: 6300 - DNA, 607 bp, Canis familiaris
  misc_feature (1)..(607): n = a or c or g or t
ccaggggacaggactatgctggattccctgtnnnnagcagggcannagctccaagcctggaagaacccaggggncaatcttttccaagttttgaccaaagcagtccagagtgcagaagctgcagcccaggccaccaagaacatggaagctggagccggaagagctagttacatcagctctgcaaagctggatcagccagaccctggggcagtggcagccgcagccatcctccgcaccatcctggaggtcctgcagagccagggtgtgtgagggcctccgggagtgcctcctgggccgcagggcctctctcactgctgtgcacaggtggccagtcacttcctcctgttttcccactgttaccctccctcaccccttgtccctgtagcctgtcctgagttcagcagaaaaccctctgccagcctccagaattcctacaggaatgcaggctgagtgggtcacttactgctttagccctgccttttctcacttctggggtcatgccgctctgcccccagccaccttggggcctcagtgatacgcattttcctagggtggcaacatggcctttaattggccatgctaatgtggttttaaggctccctgagaa

SEQ ID NO: 6301 - DNA, 472 bp, Canis familiaris
  misc_feature (1)..(472): n = a or c or g or t
ctgcacatcatnggctctgtctgtgagagaaaaatcccggtgcttggtgtccttgcatgacatggagttttgcanntagatcaatttaaaatgtacctcttgtttacataatttgcataattttaaaagannnnnnngccaaactttggaaatgttaatgttnnaactgaaaatctcnacttncatgnnnntttcttccnnnggatcagtacgtggctnnnaatcccagccagtggtttgatctgttcnagtgtcnnnggccatgtgcnnngcttcaagggggaactagtcttttgtgaattttttgtacataagtatttgttacagatattttagcaaatgctttctatttctcttgcttgtgcatatcttggctggcgttacagaaaaatagtgcaaacattatttccttactggggaatgagggtttttttccttccctttttttttttttttttttnnngtgnnggtg

SEQ ID NO: 6302 - DNA, 109 bp, Canis familiaris
  misc_feature (1)..(109): n = a or c or g or t
gcgtgtgcgtgtgtggggcaggcannncatggtgcaggcaggttccatcgctcctgaatccccctccaaagcagtagggccgcatcactgctcactctnngcatagcat

SEQ ID NO: 6303 - DNA, 575 bp, Canis familiaris
  misc_feature (1)..(575): n = a or c or g or t
tggacagtggtgatagnancggtgtggtggccaagctctcgccagctaaccagcagaagtgtgagcgtgtcttgctggcnntattctgtcatgagccctgccgacctttgcaccagctggctactgactctactttctccctggatcagcctggtggcaccctggacctgaccctgatccgtgcccgtctccaggagaagttgtcacccccatatagttccccccaggagttgcccaggatgtgggccgcatgtttaagcagttcaacaagctgacagaggacaaggcagacgtgcagtccatcatcggcctgcagcgcttcttcgagactcgcatgaacgaggcctttggtgacaccaagttctcagctgtgctggtggagcccccccccctgagcctgcctggtgctggcctgagtgcccaggagctatccagtggtcctggtgatggcccctgagtctgtggcctctcaggccaacccggcctggcaatgttctctgtcctgtcaaattcccctccccctacctccccctctggtggcctggctcctactnnnnnntggccccatcccccaa

SEQ ID NO: 6304 - DNA, 654 bp, Canis familiaris
  misc_feature (1)..(654): n = a or c or g or t
taaaannnaatcaaaagatcnnngcattgcttccttccccactcgactgtttaaagactttnnntaatgaagagtgaccgtcctatttccgtgctgtcagcgtnnaangataaaggatgtcttgccttgaatttcctgtgtcttcttgttcgtccagcacttctcacaagtgtcacgtattttggtgtccaaaatgtaaggctcgaaataacaaacgcttatggttttacttaaagcaaagtgaaagcaaggcagtttgtttgagttgaatggtaactggagatgtctttagctataaaacgaacaaacaaaaacaccctttttttcaagatttgttcttttttctttcaaagtgcaccttattccccacctgctcttcggctgacctttatttatcaacgggctcaatgtcactttgtttaaaatcaaacgctacagccaaagtcaggctctgttcaaccacataaggacttcctcttcaccggtgatgcaaagtcagaattgcggggagtaccgatgtatgtgtgctttcctgacatgggttggaaaaactaatcttgttaataataattaacttatttgtccatatgtagtgaaattgtacagattcgtttcattttaatcaatcataggaaagaaaacacccgtttgttt

SEQ ID NO: 6305 - DNA, 522 bp, Canis familiaris
  misc_feature (1)..(522): n = a or c or g or t
ttcagagatctatctcagcatgannaagtcaancttttgaaggctgggacttttgaggttttgatggtacggtttgcatcattgnnngatgcaaannagcgtacggtcacctttttaagtggaaaaaaatatagtgtcgatgatttacactcaatgggagcaggggatctgctaaactctatgtttgaatttagtgagaagctaaatgccctccaacttagtgatgaagagatgagtttgtttacagctgttgtcctggtatctgcagatcgatctgggatagaaaacgtcaactctgtggaggctttgcaggaaaccctcatccgtnnnnnnnnnnccttaataatgaaaaaccatccaaatgaggcctctatttttacaaaacttcttctaaagttgccagatcttcgatctttaaacaacatgcactctgaggagctcttggcctttaaagttcacccctaaggcctttgtttatgtaaacatgaactgattcatnnnnnnngtacattttgtgctaaa

SEQ ID NO: 6306 - DNA, 637 bp, Canis familiaris
  misc_feature (1)..(637): n = a or c or g or t
tgggctcacggnnagcatgtacctggntctcatatgtcccaccttgccggnnnctgatacatgtnnctgctgcagatgtgggagggggccctggcttcctccgtgggggtcagtatgcccgagccacttgtacctttacctcgcacctgtagccacttccagggactgggcactatactgggacccacctgcttcctagaacccaccactaggacattccctgactagagtcttcatccttagcactgcgaggctcctggggacctatagcattcacttgctggcagggtgccatagctaggaaagggctgacacttcatatgagggtacgtggtgagtggcaaacaagggcagagttttatgagaactggagttgcctgctggctctactagggttgtcatgcccagagttctttcgtataggcaagttttctggttaccaccacctacagaatgtttccctcactgccactgccctagctcggtttgcccaggacacactccagatcatgaacctggcgcatgccaggagggagaacacccccttccccacggctgtttcttcagcacagccacagggtccctcatccacagggagaggccccgtgtctgtggannnnnaagctgacaacatgtg

SEQ ID NO: 6307 - DNA, 614 bp, Canis familiaris
  misc_feature (1)..(614): n = a or c or g or t
caacactttcattgcagaactaaagggtttnnatcctgcgcgagtcaatgttcctgtcattggcggtcatgctgggaagaccatcatccccctgatctctcagtgcactcccaaggtggaccttccccaggaccagctgacagccgtcactgggcggattcaggaggccggcacggaggtggtgaaagccaaagctggagcaggctctgccaccctgtccatggcatacgctggagctcggtttgtcttctcccttgtggatgcaatgaatgggaaggaaggagttgtcgaatgttcctttgttaaatcccaggaagcagactgtgcctatttctccacaccattactgctggggaaaaagggcatcgagaagaatctaggcattggcaagatctccccttttgaagagaagatgatagcagaagccatccccgagctgaaggcctccatcaaaaagggagaggagtttgtgaagaacatgaaatgaaagggcagccagctagcagtccgtttccctaacttatgaaggcatcatgtccctgcaaagccatctcctgccctcatgtttccgttgcgtnnnncaccagagtcatgttaacgtcaccgccccttcc

SEQ ID NO: 6308 - DNA, 466 bp, Canis familiaris
  misc_feature (1)..(466): n = a or c or g or t
tgnctgacatccatnnnntnngagtagnaattgatctgaacttttggnnaaaacaggcattttctagtgaagctgaagataggacccatcctgtgacctggcaattctactcctnnagctgtttcaaaggacattctgcatacntgcnnctaaattcgtgttcacagcgactttgtttataacagcccccaactggaccgactctaatggctgtccataccagtgacaacgaacaaatgacaggtgaatttcaatgctgagccaacaaaaaaacgtcaaattgtgtgattccattcacataaagttaagtggattcttgctcagtaatctctatatagatggtaaaactagaaaaagcaagaaaatcctnnnnnnaaaatcaatagtagaaagaagtggtattagttaccttcgcgggaaggaggcaggtgtgaggaatggggngnnntggggtgagggtggcagt

SEQ ID NO: 6309 - DNA, 529 bp, Canis familiaris
  misc_feature (1)..(529): n = a or c or g or t
ggctacaaatgtgcagaggtatacgttgtgtgatgtcgatgtgtctgttttcattttgtcgtttttnnctnnannantaattggcannnnnngtatttcaatacaatgattncttagtgtgtgtttgtacagtaatgagtgaaagtcggaagttnctttttgaaagggagagaattgaccattttgtgttgtaagacttaagttataacttattgagcacttttagtaataactgtttttaaacncgtnnaatacctttctgggggtattgtttgtaatgtgacctatttaaagccttttttgtttgtttaagttgctgcttttaggttaacagtatgttttagatgatttgaatttttttccagtctgtacaattagccattcagagcaagagggcctgattgtatagaaactcattgaaaagaggtccagacgagagcagagggagagtgggaaggtacacaatctgtgtgcagcacccagtattgtggaaagatgactttcagtatgtaactacggagctgtagtg

SEQ ID NO: 6310 - DNA, 315 bp, Canis familiaris
  misc_feature (1)..(315): n = a or c or g or t
tcagtgacagatttatnctcacagttctgaaggncgaaagtccaagatcaaggtcccaaccaactcactgtccggtgcaagctcccntnntggcccgtagatggccacnnnnntgctgtgtgctcatgtggtagggaggggagacagagagaccatggctgtccccgggacacccattgataggatgtaggctccacccatatgcctcatttaaccntcgttacctccagaaaggcccatctccaaatacagtcacagtgcgggttggggcttcatgacctaaattgggtgggtgggggaagtacacacagtccg

SEQ ID NO: 6311 - DNA, 621 bp, Canis familiaris
  misc_feature (1)..(621): n = a or c or g or t
gtgaatacagtgctacatggcttngcaggctactttgagactgtgctttatcaggacatcaccctaagtatccgtccagaaactcactctnntgggatgttctcatggtttcccatcctcttccccatcaagcagcccattacagtacgtgaaggccagaccatctgtgtgcgtttctggcgatgcagcaattccaagaaggtgtggtatgagtgggctgtgacagcaccagtctgttctgctattcataaccccacaggccgctcatacaccattggcctctagccctgcctacaatgttcagagccttggaagcagcttaaagttccgctcctgaagcacagagagtgcagtacatctgtgggctgtgattcccctttgcccatcagagcggagcatttcagtctgctttcctgccttacagcaaggtgggcaaaggatgagaattaattgcagggctcaggccaccaacctgtaaagactccaggccagggagggaggaatttgtgctggatctgaagctactccaacaggcactcagcctcaagtactccctggaatagccctgagaacatgtggattnnnnacattttcatcccnnnnnctgcccatctctgtttc

SEQ ID NO: 6312 - DNA, 454 bp, Canis familiaris
  misc_feature (1)..(454): n = a or c or g or t
cgcagtgtggatctcatnnncgccaggggcccatgggcnnncnnnnnagctgcctgtgaagatcgatgactgatggccacccgatgagctgtcccacctgcagatgctcgtcctgcttctttgacttttcttccttttatttttgtggggggaacctacacctggtaatgaggatgtaagcctctaaaagaaggtgacacccaggaaacgtgtaagcagatgactccccaccagtctcatctgtcacacgtcagagacagtgatcaaccaggactaccccgtgaccacaagtcagctgtccaggggactccatgtgactcgaggactggccttttctcacattgctgggccttactgggaatggacaggaatgattcagaagggggtcctttcccgttgtatctttccagtgaggggtngaaatggtactatnnnnnnnttgtactctggcttt

SEQ ID NO: 6313 - DNA, 600 bp, Canis familiaris
  misc_feature (1)..(600): n = a or c or g or t
gaatgttccatgtgtgcntgnntagaatgtgtattctgattctgttgagtngaatgttgtgatgtatctgttaggttccttcagtctgcagtgttgttcaaatctgttgttttgttattgatacgtctngatgttctgttattgaaaatgggatattaaaatcccctgctattatttgttgctgtgatatgctctgatttcattctctttttcttttgtgtatcttcaagaagtatcatttttttgattactgtggggcttacataaaacatcttatggttatagcaatctattttacgctgataataatttaactccaatcacacacaaaaactctacacttttgcttttcccacactttatgttattgatgtcatactttatccatttttaaatgtaactttttactgttgagaaaatactatgtttttatcattgagttgtaagaaaccttatattttctggatacaagtctctaattacctatatggctcgtaaagactttgccattatgtggattgctttttccccttatggtatttttcaaagcataaaacttttagttctggtgaagtccaatttatctgttttttgctttgt

SEQ ID NO: 6314 - DNA, 607 bp, Canis familiaris
  misc_feature (1)..(607): n = a or c or g or t
tacaannccatccagcaaggcatagatgctgtgaatcaggaagccatttccaatgcacagaggatccagaagtgggtcatcctggagaaggacttttctgtccacaatggagagctgggtccaacgaccaagattaggagacattttgtaacccagaaatacagaaagcaaattgaaagcttttaccgctgacttctctggtggagctgctcttggcggtcccaatgtaactgtgggatctcagagagtgaacacacatatttcaaggctctccaggtgataacctttctccgctctccagcctccaaaagaatgacctcactgtgacacatgatttgcctgtatagggactttcactcctgtttttaagaagctagattccctacagatcaatctcttgattatttacctgttaaagagattcccccactgggacctggcaagccttttgaaacaacaggatcatcacagatctctgaattcctatgaaccttcaaggcatgatcccaaaaaagcttacagaggactggctgagacatgagaaagaaaagccttcacaaatttgaagaagtgagtcctcaaaccaacgcatcttcctagaagcaat

SEQ ID NO: 6315 - DNA, 395 bp, Canis familiaris
  misc_feature (1)..(395): n = a or c or g or t
ctataaagaaaagcacattttaaaagagcagaaagtgcaagttgtagaaatattagagaatgtgataagaaaaattccaagttgactgtgtctttctgaaggaagacagacattcactacttgccagggattcccctggaaatggtatgnnagatgcagaggatttcagcatatgttggaatgaagcatttgcaatgctgagaagggaaaaatagactgcgatgggaatttttaaacttgttttcagctnnagttcctttaggtgaataaactgtaccttgtttatggttcaaaacagtagtccttttaagaaaacaagaactatatagaattgcattttaaaacatgataaannnnnncatcaaaactgttttcctttatcaagtaaaggtcaa

SEQ ID NO: 6316 - DNA, 592 bp, Canis familiaris
  misc_feature (1)..(592): n = a or c or g or t
agctctcatnnncagacactgagaatttaaaataagggcctggagnngaatngtagtcaatctgcagcgaccataggcttggcccccagacnntgctgcatggccttagcagtgcccaaatgggcaggaggtctcccacaaagctggagaatgccaggtggggccgggctttcctacagaggcccggctgcagggctcggccatgcctctgtgtctcaactctgcagcgactgtaccctgtttttcccttccttccccaggaggggcttgacacactgcctgaatggaagccagacaggcttatggttcaccccctcacacccccacttccctgaggggcactagcctccccagggttcacctgtgtacaagatttagatgaagctcaaggctgacatttcagggcagttctcaggattgccatttccttctatgcctatgggtttaactttatattttttaaatcacaactttgatacaaaagcatttttacctatttggagatgccaatcttacttttgaatttagcttactaacttgtatctgggaacaacatgtgttactttggttcctatggaaatggggcagtgtg

SEQ ID NO: 6317 - DNA, 578 bp, Canis familiaris
cccccccccccgctgtctctgtgcattcgcctgtgctccaagaacagagtgaccttaaccacgtttgagtgtgttgacccgctaactctcctatgaaatatttgccattaggaaaatatttaaataaactaacagtatatccatatgatggaatgtttctctgccattaaaattatatttacaaacaatatttttattgataggaaaaaaataatgtgctactggaaaagctggaaacaagactttgtgtatagtaatatctgagggtgtttgaacatacatagaagatggatagaatgaaatatgcccaatgtcaataattttccctgggatgggattataggcaatttaaaattaacatttctagggatgcctgggtggctcagcggttgagcacctgccttcagctcagggtgtaatcctggggtcctgggattgagttccacattggctccctgcaaggagcttgcttctccctctgcgtgtgtttctgcttctattatctctcatgaataatttttaaaaatttttaaaaaattaacatttctaaaccttttgtgttcccccttttattatgt

SEQ ID NO: 6318 - DNA, 546 bp, Canis familiaris
  misc_feature (1)..(546): n = a or c or g or t
tttgaaatttatttgcaaatacactttttccatttggcactatggtttgttgcctacttaagctgaatatataatgtcagctcatcctaaggctgtccacgtacttaatttacttaagtattcattttaagtaaagcgctcactgtgtataggaatttgtattttggaggtgcttgatctatctacaaagaaacattaggaattactttattataaaatgctcctagaagnnntaactgtgtttatttttaaaaaaaaaaactgtaatgttagacttgtgtgcatggaagtaattaaggtacatcattattgtagtttaaaagttgtacatgataagacatattttgtttttactgtatgtttttactgaatgatctcttccccatcccaaggcaagcatgaataaaattaggttaaatgtagcatgtggcattgcagtctcttagaattcgtttcatctattttattttattgaatactgtctgtatctttggttatcctgttcaaagaaaaggacaaataaaacatggccagcgaatatggctc

SEQ ID NO: 6319 - DNA, 240 bp, Canis familiaris
  misc_feature (1)..(240): n = a or c or g or t
tctcctttgggggcaaacaggataaaggtcnntactttttagggcctttttaatttatcttttcttaacattatggatttctggttccctactgtctgcctttctctgtcattgccaatctaccttaagtttcccctggatttatatatttattttttgggttggtttcaggtgcttctagtttatcaaacaatcagccctgtgaggtacactgggtgtttccagaaattacatcacaaa

SEQ ID NO: 6320 - DNA, 479 bp, Canis familiaris
  misc_feature (1)..(479): n = a or c or g or t
tcccgnnnnnggcctctatagcaacctgcagcagtatgacctcccataccccgaggctgtttttgagctggctttcttctctcacaaccccaagccctttttcactttggccaaggagctgtaccttaagaactacaggcccaacatcatacactacttcctccgactgctccacgacaaggggctgcttctgcggctctacacgcagaatattgatgggctcgagagaggtgagctctccgcctgtcgccacctcctctctgcacagaaggcttgggtgcctgtcctctggttgatttcaagccaactagtgatgccattgtccctgacaaaaagtgcaccatgtgtctaagagtcactgttgggatctcattggtggacctgatgttctggcatagttgctgggctgtgagttttggacagaactaaaattgacatcaggagcttctagttttgctagaagctggtagggtgatttt

SEQ ID NO: 6321 - DNA, 614 bp, Canis familiaris
cgcaagaattgtgtgtccaatccgttatgaatgggtgagagacttgttacccaagttgcatgaatttaatgcacatgatttgagcagtgtggcccgacgtgaagtgagagaagatgcaaggaggagatggacaaataaggaaaatgtaaagcatctaaaggatggaatctcaaaagaagtcctaaagaaaatgcaaagaagaaatgatgataaatccatatcagatgcacgtgctcgtttccttgagcgaaaacagcagaggtcccaggatcacagtgacacacggaaggaaacaggctaagtggtgaacctccaattcaggaagtaggaaaagcagccaggaaatgtgcttctactttgccatttatatcagacagcactaccaagaggaagtggtcagcagctgttattagcatataagctaaaagcaaatcaaagttcatcagtaccaataaatggaattttcaaagaaaagattgagttgccattgtcctaggcaatgatatatgaaaccaatgaaagacaatacatgtaatattttcctcacgtcaattttgctggccttaactggtatcaaatgctgtcattgaaatattttcaaagaacactgaatt

SEQ ID NO: 6322 - DNA, 536 bp, Canis familiaris
  misc_feature (1)..(536): n = a or c or g or t
caggtcnnngcaggaattctgtcactttgtttggactcnnngnnaggcatgcatctccacctgccccctcaactgccttaccancgnnnnnnnngccatgccacccacaggcagagatgtcacagctaagcaccgatgaggaggattctttggactggaatatantggccccataaggtgttctccaggcattcagaaggttgtctttcccagtgcttacgaaccatttgccacaatgggcaaacttgagcgacagtacatagctctcatggagatgcagctgatatttatctggcttggtgacatgtagcatttccacgttactgtcctcccttcccactgccagccactctccggttgggcagaagcccagagagaagatctgtgtgtgaggtgtccttgctgttgaattgtgaatactcggtaagaacctgtgataccaaatcttcagctctctacttggaagaacatggaataaccatacttaacagtgacgaattctttaattaagtattatatctgtaatatatttattt

SEQ ID NO: 6323 - DNA, 97 bp, Canis familiaris
  misc_feature (1)..(97): n = a or c or g or t
atgatgtgcttcgtgcagtttgtcacnnngaacagctctccccgagcacgtnnnnnnnaaaaatgtcacctcttctcatattgctcctgaattcnaa

SEQ ID NO: 6324 - DNA, 327 bp, Canis familiaris
  misc_feature (1)..(327): n = a or c or g or t
gaatccnnaaatgatgtaggnaaannnagtgctaagnnaactctgaaaccaaaaannnatgcatctggnnnnntggaagaaccagcatcatcgttagcagnnnatcagaaagctttagaagaaaccagcaagttnntaatagaagagcctaaaccctgtgtgcctgtcagtannnaaaagntgagtaggactcctcntgcagatggcaaaccaaggcttaaccttcatgaagaagaagggtccagtggnnnnnnngnnaangcagggannaggttataaggtnaannnnnngaagaaggaaatccggcacgtggaaaagaannnnca

SEQ ID NO: 6325 - DNA, 666 bp, Canis familiaris
  misc_feature (1)..(666): n = a or c or g or t
ctgcannagacaaacgagagccatatgaaggattaannnnncaggatcnncgtaaattgaaagatatgcttattgtggagactgcagacatgcttcaggctccactgtttactgctgaagctttacttcgagctcacgactgggaccgggagaaattacttgaagcttggatgtccaacccagagaattgctgccaacgatcaggtgttcagatgccaactccaccaccaagtgggtataatgcctgggacacactcccttctccaagaactccaaggactacacgttcttctgtcacctctccagatgaaataagtttatctcctggggatttggacaccagtttgtgtgacatttgtatgtgcagtatttctgtatttgaagacccagtggatatgccctgtggacatgacttttgtagaggatgctgggagtcgtgagtatatgtgcagcttagtatttcttactgcatgagaacacactgatttggtaataaaattgcctgcttttgatattcaatgatatggattattcatactggtttcagagttgcactgaaatatactttactgctaaggaagaatattatatctaatgtaaatttcaagcctacacctaaatgtcaagaataagcattttttatatnnnaataacttataagcattt

SEQ ID NO: 6326 - DNA, 540 bp, Canis familiaris
  misc_feature (1)..(540): n = a or c or g or t
ccccactggcnnngccccagnntgaactgagcccagcgggccagtgggnntccttcctctgccccagcctgcgccccctctggccccgcagagaccccgcctaggcctggcacctcttctcatggacccacccgcggggtgtcgggagccccaccgaagggccaaggagggaggaggctgaggagcgtgaggcagatgccccccgccgcagtcaggcttctcctggcctcccatctctcgccttcttagagttttattcctttcctttttttgagatttttttcccgtgtgtttattttttattatttttcaagataaggagaaagaaagtacccagcaaatgggcattttacaagaagtacgaatcttatttttcctgtcctgcccgtaagggttggggagagcaggcccctctctagggacccgtcagcccagcctcgttccccgttccgtgttccgtgtcccgtgtcgcctcggtcgcccgtgtttgcgcttgcccatgttgcactgtttgcatgcgcccgaggcagacgtctgtca

SEQ ID NO: 6327 - DNA, 559 bp, Canis familiaris
  misc_feature (1)..(559): n = a or c or g or t
aacttcgaaagaacataatttttagaaatgcanaggtttaaggtatgtaatatggaattttacaaatcagtaaaagaagatagaaaagctaagccatggtttcacagttcacaaaagaaaaaataaaaatgtcattgcataatgtagcagattgtctgctacattttccagagatgaccacagcaatatctctcagctgatatgttcacctgcaatatgatgttgacatcatggtaacctgtctccacttcattaattttaggtaggccctttgactgcttagatcaagagaacatgatagagtggatgatatgcctgttccaggtgttgctcttagcgagcctggcaatttctttctgcctttttagaagccagatactatataagagatgcagctaccctgcaatcactgttgtaagaaggccaaagtcatctaacgaggtcgtcaaggataaaacatctattggacaggccaagggacattaagggaccagacatgtaagtgaagaagccattttgaaaatggatcctccagccccacctgccatggctgttgctg

SEQ ID NO: 6328 - DNA, 499 bp, Canis familiaris
  misc_feature (1)..(499): n = a or c or g or t
caanngtgggcactgtggtcccaagcgggtggctttgtagcaggtgccagagtgctcgccactgtgtgtcacgagatggcagatgtgtcgtcggcgggccccgtgacccctctagtgctgcgggcggtggaaatagcggcccctcctttaagaaatatgtttactttgccgtttcacatgtattccgtacctatgacatatggcagcttccagcttccagttggattggtcttacattgtagaagtcgccggtcacacgggactggttgctctttcactgtggaatttgggaggggccccgagttcggctcttctgcgaatccatcctgagttactttagagactgaacttaacctcaccacggtgttgtatcctcgttgctaagtttcctaatttccctgcttaagataattttggatgtgagaatttaagaatactgctgctgtacgagtatttttgtggaaatgtaacttgtcagtgtgactattggaaatattat

SEQ ID NO: 6329 - DNA, 379 bp, Canis familiaris
  misc_feature (1)..(379): n = a or c or g or t
taaccactanntttggtttctatggatgtccccctgaacactcatgtaaatggaatcatacactttgtggcaatttgtaattggcttctttcactaaatatatttttgaggatcatctgtgttgtagcctatattagtactctttttattaataatattccattgtatgaatacaatacattttatttattcatcagttgacagacgtttgggttgtttccacttttggctgatacaaataatgctgctatggaacgtttatgtacaggcattggggtggtcatgttttcattattcttgggttatatatctaagggtggaattgttgggtcgcacagtaattctgtcttaaccttttaaagaactgccagacccaggt

SEQ ID NO: 6330 - DNA, 585 bp, Canis familiaris
taacatgctcagcagcccatccctacaccacactacagagaaaggaatattagggaagagtctaagataggtttccatggttaagagctttgaggacacctatggtaagtgttcaaagccaatttctatctggattgaactataaaatggtacagcttttttgtttctgtatctatcatatttagggatttacccaagagaaatgaaagcagacatccatacaaagacctgtatataaatatagcccaaacaccacaaacaagccaagtgtccatgcataggcacaagcaaattgtggttgagtcatggaagggaatactgctccccaataaaaaggagtgacctattaaatatgcaacaacataggtaaatttcacaaaaaccatgctaaatgaaagaagctaaaccaaaaaaagaatacattctgtataactgcatttatataaaatgttagaaaatgcaaactaattagtggtgacagagcaaatccgtggctgccagggactgtgggagagtaagggaacacatagtggcaagaagaaactgcgtgcaatagctgtgttcacagtcttgactgtggtgatg

SEQ ID NO: 6331 - DNA, 639 bp, Canis familiaris
  misc_feature (1)..(639): n = a or c or g or t
ctatgcacaagagtnactttgaaatgacggtgnnaantttgctaactgggttaagtattttgctaatggttaaatgttaattttaccaaagtagaactttaaggtgngagggtaagaatgcttatctaaaagggcactggctccactatcatttggcttttaagccaaatttaagattctggtgtttggcctcttcattcttgattgaactttgtagcctcgccgtgggaggtacctggtcttgacctgaggactgaggagagctggctaagtgttagactggtatgcataagaaattaatagagaaagatctgaaaacagaagtactccaaaagatgaaaatccggaacacttaaattaagctttagaagccaagactggcccggcctccctcccccccgggcgcacagctcagtactacagcatcagggcctgcctgtggtctttccatgctctgccactcgagagctggcactttttttaaatagacaaatgggtgttatttttatttacctttttgtaaagtgattttcagtcttctgtttgaggttcggggtgatcctgtcctgcacttgtgtaaatactgggtatcacgctctgatctacccgcttgccgctcgggtggctgtgcactgagga

SEQ ID NO: 6332 - DNA, 200 bp, Canis familiaris
  misc_feature (1)..(200): n = a or c or g or t
caacatcatctctctttnnnnnncggttgtnactccagcgttgaacccccttannnnnagnnnnngaaataaggaggtcatgggagctttgaagagagtcctggcnnnnnnnnnnnnnnnnnnnactccataatctagggagtttatgnctggccttcaaaatttctcttaaagtcataagatttcnggtaaaagcctgg

SEQ ID NO: 6333 - DNA, 71 bp, Canis familiaris
  misc_feature (1)..(71): n = a or c or g or t
gccccttgctgggacaatnctgtgggcagccccatcactgtgttcacagtgtgagaatgtagccagagccc

SEQ ID NO: 6334 - DNA, 551 bp, Canis familiaris
  misc_feature (1)..(551): n = a or c or g or t
cctcatggacaccctcctcatnnaccccctccccannnaccccctccccatgaacaccatccccatnnacaccctcctcatggaccccctccccatggaccccctccccatgaacaccatccccatggacaccatccccataagcatcatccccatgaccacgatttccttgaccatgggccttgtgacctaccaccccatagccagagtccccaagatcaccatcgccagggccagggcccaccacctcagcactcagaagaaagaggtccaggtaaaaagcactttcccttccaccggagacaaatcggatatgtttaccgactccctccactaaagaaagatgaagttcttcctcttcccgaagccaatttccccagcttctcattgccagaccacagccatcctctaaagccagagatccagcccttccctgaatcagtttctgaatcatgtccaggggtatttaagaatgacttttcaaatatctcaaaattttttgcatactcacttccaaaataaaaattgattttctcgatggggaaaaatta

SEQ ID NO: 6335 - DNA, 165 bp, Canis familiaris
  misc_feature (1)..(165): n = a or c or g or t
ggttctttgtctcgggcttcctggtgaagctgcagtncnntgatgtggccacagaggggcagcctcacctttcaaccaacttctccctgcaggtcaatgttccttccctcacaccattcatttatccagctactatttattaagcacctaccatataccaaaccc

SEQ ID NO: 6336 - DNA, 434 bp, Canis familiaris
  misc_feature (1)..(425): n = a or c or g or t
gctccttncgagagagcagtggtcnnnangnntcccatcgggtcncagcccctgccacaggcccccctccatcagccatctcagtgccctggcggagncgacaggtgctctgggagttccgtgcttcctgagccgatggtgccaaactcttcatctcccctcagcggcacagtgtgaccgccaggggcccctcggtcaccgcccccctccgtgagccctctctctttctggggtctccctcacccagctctcnntcctgccccacataggactagcctggctgaggggaaaggggtgggagagtggatgcaagacacaggggagaggaggctgccctggcaaagtcttcaaggcttctggggtcctggcctggggccaagaaggaaagtgttnnnngtgtatgtatgcatgtttttgtaaaaaagaaaaaaaaa

SEQ ID NO: 6337 - DNA, 532 bp, Canis familiaris
  misc_feature (1)..(532): n = a or c or g or t
atgaaccagcatctgccctgagnnaactagtcactgatngcggnntgtcctgccaaggtaccatgacgtggggcagcacagcagggtaggnnntggagtgtgctcactcactttgatggcttgttcagcagctgagagactgtctttggtcctgaatagggcttctgggagggtggcctggtgcctcacatcagggaacaagactggggaaccagaactcagggatcaaaggaaatggtctcagaaatgtgaaattgaattggaatatttacacagtggtggaacatagaggaaggccttaatacactattacagacttaacgaatgagcaggatatagtggaaggtagagaagaaaagttgtgtatttgtcaattatgccttatcctcaaggtctctgtatggtattctaaaattacttgtaatgtagagtgatttattgttatagcaactgaatttgtttttaaagtagcagccttttaacattggtcttctacaatagctgttgttcctgttgagcttggaagagcttc

SEQ ID NO: 6338 - DNA, 528 bp, Canis familiaris
  misc_feature (1)..(528): n = a or c or g or t
gcaatacangcttgtgattgatgcttattnnnnnnagtgggaatcaggattgttttaaagncntaaggttcagtatttttnnnnacaaacattcannnaggatgtaacacctgagtaaactagaactgttaaacaattttcagcttttctctagttctantgtaggatgtacttaataagcagcaagtgtatttaggttaaagcagttgaattatgttaaatgttgctcttctaccacgttacattgaacactgttgggatgcatgttgaannncatgcttttttgtaaaacgcaatataggatctgtgnctacgattaaaagtgaacacatttggcatgtttgttaattctagtttcatttaataacctctaaggcacgtaagtttaagctttttttttttttttaagttaatggncaactttgagacgcaacaccatacgttaggattttggtcttggtgtttgtatgaaattctgaggccttgatttaaacttttccttgtatcgtgatttccttttaggtgtat

SEQ ID NO: 6339 - DNA, 582 bp, Canis familiaris
  misc_feature (1)..(582): n = a or c or g or t
aaggagagtggcatctgcatggactctnnaggctttcgcaccacggccagcatggtgtccatcctgccccaggatcccacacagccctgcgtccacttcctcactgccacaccggacccatcccggtcagtgttcaaaccgttcatctttggggcgggggcggcccaagtcccccaggtgctgtcccccacttttggagcacaggaccctgttcggacccagccccgattccagactcaagtggatcgccggcacaccctctaccgtggacaccaggtggccttggggctgatggagagtgaccaggatcaggggcagcagctccggcagaagcagcgggatctggagcaagaaggcctggaggctgcacgggggctgctgtccggggagtgggctccacctgcagagaagctgggtgccctcttccaggcctttgtggagagggagagccatgtatatgcctgagcaccacggctcctcctgggctagggtgtgcacaggacccctggggtagggtagtaggatcagcacaagcctttcactcccctcagcctcgttctgggcagccagcnnngcctttgc

SEQ ID NO: 6340 - DNA, 630 bp, Canis familiaris
agaatcatgactcccacccacgccattcactgtgcgtgggcacagcggtccttgtttatcatggctccttgggtctcgccacaaatatcaacatttttctataagcttgaaaatggtcaccgtcaaatgcaggtaaaccagtgtgtgacaatatgtgttcttggtcctgtcccagttggtcaagtcaaccaggcaaccccaccaaaggctgatgcgtcagacctctgtgagggctcttccagggccaaccaagtcaggctgagtgcagctggcaagcagcatatctgtcttgagagaagatgcgccagccaaaaaaccaccaaatttatttgttaagtgctccactgcttctctcaccatctgggtaagaaggttcacggaagctcagtatttccaaaggtggggagtcaggtgtaacacaagcgtgttaatggggtgggggaccccggccttcagcgctctgctcttcaggatcccctggctttgttacggagatgatcaccgtgggctcgctgggctcacccgacctgtcctacatcttcacagagtgggttgcggtgggcactcacctgcctcacagaggatgggagggcttgccttaggtcctgggcacggaggtgcatgctctgt

SEQ ID NO: 6341 - DNA, 404 bp, Canis familiaris
  misc_feature (1)..(404): n = a or c or g or t
caaaactcctggtgccagccttggggttgccctaactacctcgatgtgctgtaacaaacaggtcattgtcatagacaaaatcaaatctgcaagtattgcagacagatgcggtgccctgcacgtgggggatcatatcctgtccatcgacggaaccagcatggagtactgtacactggccgagnnnnnncagttcctggccaacaccaccgaccaggtcaagcttgagatccttccccatcatcagacccgcctggccctgaagggacctgaccacgtgaaaattcagaggagcgacaggcaacttacgtgggattcctgggccagcagccactgcagcctccacacctgccatcaccctaatacgtaccaccctgaccattgcagagtgccagccctgccaggcc

SEQ ID NO: 6342 - DNA, 573 bp, Canis familiaris
  misc_feature (1)..(573): n = a or c or g or t
acgtgtattaccaacgggtttagcttttaaatcaaaataataantacaaatgtacaacttagcttaatgaatcagaaagcctctccagagaactttggtttctnngctgcaagaagaatgaggttccaannnnnnnnnnaagaacnnngaagccatcagccaagtctccgtgtttctctgtgcaaaatgtcatagtttatataaatgtacaatattcaattgtaatgcatgcctttggttgtaagtagccagatttctctatggtgtcatttaaacatgctactttttaattggccctgtacagtttgcttatttataaatttattgaaaacactacaggtgttgaaaggttagaatgtaggcctccagttcataacttcagttatttttttttgagtgtgcaaacagctattttgcactgtattaaatgtaacttatttaatgaaatcagaagcagtagacagatgttggtgcaatacgatattgtgatgcatttatcttaataaaatgctaaacgtcagtttatcacaagcatgtttgactnnnnactgtaaatagagnnnnnntgtctat

SEQ ID NO: 6343 - DNA, 505 bp, Canis familiaris
  misc_feature (1)..(505): n = a or c or g or t
gaaacatacatatatacatgtctattaactctactctgacttcttaaatttgttgatcccannnaaaaacttctttaaatgaaagtaatcaaattttagcttattcctcaagagaaagaaaaggatcctgaagagaaaaaaacatggtaacctatgtataccataaagcaatataatgatggtcttctggtttttattctaaattgtaccatctttctgaaaccattctgaattttgttgaaattatcagtatttctactttgaaccttaatttctggacttaagcctgtatataaatctttttggtgtgtgttgggggataactttgacaattagagttttaagcttgcacattctgnnnnnaataatacatcctgtaatccaaaatagctttcccagaagttttgaacttaatgctaattattattttattattactacttctgatgcatatataactctccattattatttgtggcctgaaaaaaaaaagttctcttgtctt

SEQ ID NO: 6344 - DNA, 595 bp, Canis familiaris
  misc_feature (1)..(595): n = a or c or g or t
ctgccaagagcgctgcggcctnnncagcctggctctaccccagcccannnggcagcccaggacccagatccaaatgaaggcccttcccccatggcagcccaatgagcagtgcccacaggtggcctagctgctccggcagaggaggtcccttgagcccttggccctcccctgggcattgtgacccttccccccccaagtctgccctagagcctggcctcaaggaccccagccccacccactcggtcagtgccccaggccaggcctccaataaacctccaggcctctcaactgcttcatgagcccacacagaccctcctgggcacaaggttccacccctgtagcttggagaacccagctggatggggagttctgtgcaagacttagctgtagcctttgacaggatcccgcagacagtgcctctgcaaactaaggagttactgggtggggtggggaccccccctcaggatttttttgaggcaccagtgcctcagtgctgcaactcaaagggtgaatcctgtttcttgactggctcaagaattcgggctctgaccacccacccaagccccctagccacagggaggctgcataccccact

SEQ ID NO: 6345 - DNA, 617 bp, Canis familiaris
  misc_feature (1)..(617): n = a or c or g or t
acatagtgaccccggncttgtcagttttgtggctcttaccatatagnnaaccaaccatgaaagattttgtcaaccatgacttttttggggtatgttcaatgagtcaatgcctagtgcttaggggatgaggcagtgtagctacagaagagcactgaaactactctttgacattaattcccattgccctgggctgccatcttacactaaggccacagagttaagtgatcataagtaacacgatgaggttaggtgactgattttttgtaacctaggaaaggcaagggaatggttctaatttcatgagggatatttaacatattagaccctcttataggacaagttagaacacaaattggtaaccatactggaagattcgctgcttttacgattccagggtcggggtagaagaaaggctctggtacctggtaggagggagaattgatttattgtgagaatgttgatatttcttacatgacttttaatttttcttggttttggggtgaacaggaattaataaaagctctatttctttgtcaatataaaatttacctttcatataatgctacatttgaagacatggaatatgtcagaatctatctatcatctgtctacaattt

SEQ ID NO: 6346 - DNA, 522 bp, Canis familiaris
  misc_feature (1)..(522): n = a or c or g or t
attcattcaaagggngnaagtgccctgttgttcnnnnnacccagnngccatgtgtcttactgagnnaaggcaaggacaaggtgaggtgccanaccacaagcccgccaggcagggccaatcccacactgcgtggctccccaggctcaggtggcccaccgcacctcacccctttctgggaatccagggagccaggcgcaggtggggtggtttcctgaccaggacggtggaggnnncggggggtgggggggtgggggggggtggctggtggcactgcagggtgcctgctcttctgaacccgccctaccccaggcccccactactgccctgtggtatttgtggcccaggcccgtagggattgcgggagatggccctgtggcacagactcccccagggcaaggtgccggcacaggagctccaggtggttctgtactttctaaaacatttgtgagaatatcaactgtaggcttaccacccaggagagaccactgtgaacattttggtgnatagcccccccctgcacac

SEQ ID NO: 6347 - DNA, 614 bp, Canis familiaris
  misc_feature (1)..(614): n = a or c or g or t
cagagcacgtgannacagcacttgagaacacagagcaagcaagccagccagccggtgccnntgtgtggggctggctccaggcacgggccacctgcnntctcctggtcggcctggaagaagcctgtgtcaaggcggcttccctttgcctgctaatatcctgcaggactgggcaccatgggccaaaattttgtgtccggggaagaggcaagaagtgcaccctacatttcactttgtggtcaggctgcgtcttcgtgctgcaactgcatcgcctttatggagtgtagacattggcatttacgtacgattttatttgtgtcctattttattttaccttcaaaagaaaaacactatcaaaaaccaagggagtccatggtgttctccacaagtggttgacatttgactacttgttcgaattatgtatgaaaagtaattgacagtgtgggtggttccaggggttggcttgttttttgtttttgtttttatttttgaattccaagtctttgcatcctctaccagctnnnntccatcacattgaggggggaggaaatgttgcattgctgtttgtaagctttttttattattttttttattataattattaaaggcctgacttt

SEQ ID NO: 6348 - DNA, 556 bp, Canis familiaris
  misc_feature (1)..(556): n = a or c or g or t
cannaaactcgcanccgtttcaatcccagggcaggggcnnaaggggcaaggatggacaagtgaaaggggtatggggctctgtccaccccctcccaggatccatagaacaaagccacggattccgttatcttcctccagtttcgttccttctccagcctgcgtcccgccaggtgtcaggacggcacaggggcccagggagtggggagtggtcaggctggggtccctgagtgagccagtacctggtgtgtgagcgaggccacggaagctctgccccactgcgtcttacctcacggggcggttttcagggattcttaaaggcagcggattaaaatcttgccacagtcgagaaattgacaaaaagcttccatgctgtacatggttctttctcttttttacttttagaaagaaaaacctggaaagatgcatcagatttgtgtaaatgagagtatgccaggagggtggccagttttgctttatgatcttatgaaggaaaatttgtgacccaacatacgtgtatacacacacacatacatatatatatatcccgaaccagcaa

SEQ ID NO: 6349 - DNA, 579 bp, Canis familiaris
  misc_feature (1)..(579): n = a or c or g or t
cctgagtcacttgtagtatctccaccaagatcctgataactgagcagggtggntcctatcccagagctactcatcagctaaccctnntttgttgcaacactgcaccaagaacttttagcatcagcctcattcctataaccagcacacctttctggggctggtctcacttctcctggtgcccatgcacttgatgttgtcagcctcattctatgccaccatgactcagctcaggcaaattatgaatgcatttgaggtgtagaggtagttatctcacctttggattctgtctggactccaccacagcacaacactcctcaccatgggtcctgtgggctgaccaaagttcatacatcagtggttgcttgcctccatcctttttaccacatcttatgcaggcttatcaccatatatgttgttcttaaaatgggcatgaaacattttatagggaaaagatactacttttacagaccctttccccactcgtgcctcttcatattgcctgtttggtaacctctccacaccatttatttcccatccacccaaggtcagaactgagtaactcctcaaacttctctctcc

SEQ ID NO: 6350 - DNA, 571 bp, Canis familiaris
  misc_feature (1)..(562): n = a or c or g or t
ctgagtctgagcgcatnctgaatgagactctccatgaaaacatanngcttttgagcgcagcagatgagaatgcaaaagcattccagaaagccctgactgaatttcaaaacgagtttaaatgctgtggtttggtcaatggagctgctgactggggaaataattttcaagagaattacaagtcatgtgaatgttcaagtttgtcagattcttgtgtgatgtatgatggcaaaaatgtttacaaacatctatgtatttctttgataaaagaagtagttgcaaagcatattctgatagtaattggaatagcatttggactggcggttattgagatacttggtctggtattttctatggtcctgtactgccagattggaaacaaatgaatctgtggatgtgtcgagctctcatccatcaagcccctttaacattttgctttcgttttgtaactttaaatatacaaatactgtacatgttaggagcagctgtcttactaaaatgtctcatttagctacatcacagatatcttccagacatattgaacatatttaagnnntgagtgacactaggaaaa

SEQ ID NO: 6351 - DNA, 236 bp, Canis familiaris
ttttagatatcaagttctttgattttaatctacttctttaaaaaataagtagttttccttcatagaatactaccatttttaactactaaagaagtattttaaagtgttatcttggacatttattgtaaaaaagtttcattaaaccaaaactcccacatgttaaaatgaacagcaagaatttacatgatcatttctcattttgtgtcattctcctattcagtaacttagagtaacta

SEQ ID NO: 6352 - DNA, 44 bp, Canis familiaris
  misc_feature (1)..(44): n = a or c or g or t
ccctgtggcctcaacannttgggacgcacgtgacgactacatag

SEQ ID NO: 6353 - DNA, 610 bp, Canis familiaris
  misc_feature (1)..(610): n = a or c or g or t
gtatctttcattgatgttgaggtagtcagtgttaatatnnngcntgacctnnaacaccatttgcaaatgtgttcattgctgaccaacctgtttttcatgattgtattttaatgtatgcaaacttgcaggaaaaactatttactcacattgtttcaaggaagttttccaatcgaataattgctggcgggatatctgctggtatcagtagtggtcagaggtggttaagacttagtttgtatgatatgaagacaggatgctaaaatgcctgaatgtttttaaccctaaatataaccactatgcccagaatataagaaagtgggcgaaatcttgaacgatttaataaaagtcaaaagttgcatagaaatacagtttctatacatattctgtatgagtttctggttatagtttctcaaattttgttgctaaagatatttttaataaagttgagcattccgtatgtgcaaacgggcggtgaggttggggagctgagagcagctccaggttgtgctcttgcgatcactcaccctgcaggtttgcgagaagcactttactgtgaatcccaggcttctcctctgtaaagtggagtccttctctttctgctcctgggtgt

SEQ ID NO: 6354 - DNA, 475 bp, Canis familiaris
  misc_feature (1)..(475): n = a or c or g or t
taactccannacatctgcccggctgcaccatcagctgctgcccccccctgaggctctgctgcctccagccacctaccagcccctcaactaccacggcctgtaccctggagccccaagtcccctcagaatccctaaggcgcgaccagcaccataccccctgcccaatatccaggccggcagagatcaggacggcctgcccctcccagctaggctggggctcctgtcccccactgccatgcacttagggcctgtccaggacccttagtgatggtgagggccctgtggacagactcctcttgccctgaacattactccctccagccttgcctctgcagaggccctgtcccctcccaaggagagcagggcaggtggaagcccaaagaggaaggctacctgcccagagcacagcaaagctgagaaagttccaggattggaannnnctccccgcccctccncngaagctgtcctcttctac

SEQ ID NO: 6355 - DNA, 572 bp, Canis familiaris
  misc_feature (1)..(572): n = a or c or g or t
gaagaagagaagaaagccaaaattgaaatcagaacccatnntcntgcgagatcggtcaacctccccatgcctggcaccaaccttgctgccacctccaccactgctgtcacccaccaccaccatggcctctgcggtggccccatcaccccctgtctacactatgccgagggcctttggccccttccctccactacccagcaaatcgatggagaagttggaggttgcaaggtcagaagtgaaattaaactgggctggcctgtcatcgaacccaaagagccacatggttgatctgactcccttggtcctcaaccccggaggcttccatttctcatacctgactggaaacagtgcgcacaagctccattgccctggcttcccctggacctcggcttgtagtggctcccccaataccgaggagacgccacctgctcctgtgaaggcctccatcttcaccccacctgtcttgctcaagttccagcctgtgccaagacccaaagatgactctgagaatgatcctagcagcacagagtctgtgccccaaaagaggggcccatagcctcttccctacagac

SEQ ID NO: 6356 - DNA, 571 bp, Canis familiaris
  misc_feature (1)..(571): n = a or c or g or t
atctgtaatgagaatctgaatccaattgttagtgtttcactcttcacnnaaaatcaaccctgagagannatnnaggaaaagctgttaaaatgtgtaatctggtaagaaggactgtcacatatgacagtcatctctataactagatcataaccattgtttcagtctctgcttgtaactgaaattgaaagttgacctccaaacctgtgtttttgccatgaactgtatggagtccattgttttcaaatgatcagtcagaccaatagctctgctctggtcagaagagatcatgagaaatctttgagattctctcattttgtctttcttaaagtcttgactttgagtcttgacaagattgaaaatgtctagataaagccaaaaagaagatgatgaaatgagtttctgagcatcagtggccatctgtattgctgatagcttttctagttgtatataacaattagaagtgagaagaatctgaatttgatgtacatttttttctcaagatttttctctcctggcttttaaacttagtacctctttccctactcaatgacattggacttaagacttttta

SEQ ID NO: 6357 - DNA, 167 bp, Canis familiaris
  misc_feature (1)..(167): n = a or c or g or t
tctcttgtaatagaaagcattgccagaaataatanaanttaatatatcaaagttgagaagaggagctggaagactgttaagaaaaaacatttctgtaacctatgcaaatcataaggggacagaattattaaatgtgggtctgaaccatcagttctattatttatgta

SEQ ID NO: 6358 - DNA, 583 bp, Canis familiaris
  misc_feature (1)..(583): n = a or c or g or t
ccancagaagaattgctcangaanctcacagaatcatgagaaataatacatnnncatgtctnacgnnactaagttttggggtgttttattatgagcaataactttataatggtattacattaaacttatatacttccacaaatgatattacatcattcatattatctatatcttgctttttttccatttagtgggtcttagagatccttctgtctcagtgcactctgattagtcacattatgctaagagtttttcattggctggattaccacaatttatttatatccttgttcatgggcagttacattggcttttgttcctgtaaacagtgctgcagtggacattcttctacacgtatcttgatgtatgtttatggagtaagtccttacctgtggaattatatggacatgtgtgaaatttacaagttgatgaatattttctaactagactttaaaaagttggcaccaattcatactttactgtatgttttaacaatgtgtaatttcaaactttgaaaatttttccaggaaaaaaattgctatcttataattattattttgtttacctagttatgagtgaggtg

SEQ ID NO: 6359 - DNA, 482 bp, Canis familiaris
  misc_feature (1)..(482): n = a or c or g or t
ggtnncatcgncannntctgaaaaggcttnnnnagcgcaaatccacgcccnnaaacctgggtanntccacagtggtgctacccccagcaccatgcgcagcgatggggtcacagaagatggggacccctatgtgcggccagaggatgagaactatgaaaatgactcggtccggcagctggagaacgagctcaagatggaagagtacctgaaacagaagctgcaggatgaagcctaccaggtcagcttgcaaggttgaatacaatatccttttatcactctcctttcaactccacgtcagcactgagaccagactcaagcacccctgtcctgtaaccgagacaaaatggcgtgtattgttttggggttttgtggtttggggtgtgtttctttcattggctctccaaatttacttctggggcctgttctaagtgcaacccagtgggtttcgcctatcctgtccatgagatacaattctatcttgc

SEQ ID NO: 6360 - DNA, 604 bp, Canis familiaris
  misc_feature (1)..(604): n = a or c or g or t
ctcatcaaacccaaaaaagctgcagggatcactatcatcnncgacacatacttctgaaaagctctttnctgcttcacacattgaatgaagttactgnactgtcntctccctannannnnncaatactggcactgtccaaaaaagtgattctcaaaactataccaacagaggaaaatatctcanntcaagccctgatttattattcaagctgatcctggaagagatggaacagataacaaagcatggaagagatagttttgaaaatacagtaggtggagaggacagaccactggggctgccatttggataaacgattattatttgcaccccacactgattcacaacatcacctccagtttatcctgccatctgtgactcagtctaaccacaagacgggagggcggggagaagcttgcttcttcccaagaccactagggaggatgattaaaaatattctatagttaggagttcttaatctaggactgatgctcacattcatccccacccttccccgcctcacccaccacagcatgttctttaatccagaaacatgaggttccccaggagaccaaagctgtggcaaagtttacatttcttaaatctt

SEQ ID NO: 6361 - DNA, 506 bp, Canis familiaris
  misc_feature (1)..(506): n = a or c or g or t
tgactatgaacctaaaagttttatnnncaatattattagaattctgtatctaaannnnatcactcannnnctgcagnnncttttctagacggaagagtgaatgcataattttggtggtaaatattttctgatttcagaactgtcttcatcccttttagcatgaagtttgctaagttttgatgaacacagtcacatgatcaccaatgaatctaaatgaagatttagatcattttcatcaccccaaaaagttcccttgtgcctctctgaaatccgccccttctgtcacctccagctcctggcaactattaatctgtcttgccatttctagaatgtcatatacatggacttggaacagtttgtgccttttgagttcgacatcttatcactaagtttaatgcatgggaaatgcatgcatattgctgcttgtatcaatagttcatttctcttaattgctgagttatgttggattggatgttatgtatgacagtttgnnnntctgttgcaag

SEQ ID NO: 6362 - DNA, 600 bp, Canis familiaris
  misc_feature (1)..(600): n = a or c or g or t
ttaaaaacttgaaatgctcgccaaatgtccccatgggatttttgatcaaaagtcaggtnatagctgaagaaatcttcagttagtcatttgatcacttcagtgacagtacccagtgacgagtgttctctatgatttggggttttcattttgttttttgcatttcttaacctgttgatctatttgaggtctttttgtggttatcaaacttattcttaagtttaaaaaagttaaaagggtggctttgtaagattttaaagttctctgacatgttaaaaatcttcaaagtacttttaaaaaatatttcaagtgcttaaatcaggcagttctcgctacccagtcttatattctctctttagccaaattgtccttgaatctggattttccacattctcagagagttatttgcaatcttttgttatattttaaaatattttttggaagagctgctaattttatttaaaaaacaaaaaacaaaagttnnnanatatgcctcctttnnnaaagaacccctccctccaagacatnnntccagcatcacagtgcacagggccaggctcggaaggagtgcctctgtgcagatgtgctttctttacagtggct

SEQ ID NO: 6363 - DNA, 520 bp, Canis familiaris
  misc_feature (1)..(520): n = a or c or g or t
tgagcacaganngaaccaaaactagggttccacaaaaatcagtncgtgaagatgagtgatactttcatggataatcagtaacattatagaacttgaaaggagaaaacctggttttctctcctgaacatcctaaactttcaatatttaagttcggtataagagccacttagcaatttttgccctgttctcattcagtcatactagacgcattctttaattcttttgaaaattccatccatttaatgatgcattatccagagataatgaccattgaaggtactagtctttcatgatctagagaaaggtaacatttttaataatttcaaattggaacattcatcagatacccagtctttctaagctttgaaacaatgttgatcacctcagatctatggatgaaataatctattctggtaagaatcatggattagaaatgttagccaacctgtttggattttccctaaggccactaagggtaaataagatattccacaattacctannnnnnncagtttgtcat

SEQ ID NO: 6364 - DNA, 428 bp, Canis familiaris
  misc_feature (1)..(428): n = a or c or g or t
gtnnggctcctggnncgaccacnntangggctggattcggatgcagggcanagagaacttcctgtnnatcanntacgannagctgcaccaggatctccacggctcngtgcagcgcgtgtgcgagnnnctgngccggccgctgggtgannnngcgctgggttccgtggtggcgcactnnnnnntcggtgctatgaaggccaacgccatgtccaacttcaccctcctgccccctaccctgctggaccagcgccgcggtgccttcctccggaaaggggtgtgcggtgactggaagaaccacttcacggtggcgcagagcgaagccttcgaccgcgtctaccgggagcagatgcgggggatgcccaccttcccctgggacgtccccgaggacaccagcccggaccccgatcccagccccagccccccccagg

SEQ ID NO: 6365 - DNA, 577 bp, Canis familiaris
  misc_feature (1)..(577): n = a or c or g or t
caaagtnacaacacacccacttgctaaagacaaaatgatgaatnnnngtcattacagctactctgagnaccgtgtnnnnnangncggnntgatcctcacgagnnntgggcctnnaaccagctttgagtttgcgcttgcaatngtcgaggcgctgagcggcaaggatgtggctgaccaagtgaaggccccgcttgttcttaaagattaaagcagaaatcttcgatgatgaagtagagaaatgtgccgtttgtcatccttctcattgtgttcactttaagcaaaatgggcagttcccgcgcagtctggctgcgaagtggcagcctcaccgagcttccccacctgcgcccaggtcctcatggtcctgagccttgatggcagagtaaatggcatttagcaaactactggttgttactccatttatctctcaattcctcctttttgtgtgtgaaaccaaattcactgtcagcgtcacttgcagctgttaagtgttgatacagcgactgagataaaagagcagtgaacatgtttgacatggcaaggaggaaaagcataaaagcaaagatttaagaagcttgtg

SEQ ID NO: 6366 - DNA, 465 bp, Canis familiaris
  misc_feature (1)..(465): n = a or c or g or t
gancatgccctgccccaacttctacatnnnggatgaacccacaaaccacctggatannnnnacgattgaggccctgggccgtgctctcaacaatttcaggggtggtgtgattttggtgtcccacgatgagcgcttcatccggttggtgtgccgggagttgtgggtgtgcgaaggcggcggcgtcacccgggtcgagggggggtttgaccagtaccgcgcccttctccaggaacagttccgccgtgagggcttcctctagggccaccaggctgaggactgtgcccaggacatggactggtctttcagacccctgggccgccatgtgggcaaccatcnncaggccacggacttcccccaactttggggacagccttatttccaaatctccttttgactggagcatccnnngcacaaccctgggagcctctaagtgtctgtgaggactgatcttcaagggaaggggtg

SEQ ID NO: 6367 - DNA, 571 bp, Canis familiaris
  misc_feature (1)..(571): n = a or c or g or t
ttgacagccgatcaaagtctnnaccatcacctcatccagnncgctactttgataactcgggttnaggnntttgcccagaagaacaaattgctggagcagagaatgtggatcctcagcctggnctatggcatgcctcctcaggaaaagatgtgcccgagtgcaagacccagtagactcctctactgtcacttttctgggggcccagtattctgtgtttggaaattattactttatgtgcctatccctggcattgttgtcacaatccaacttaatttcaattcagtttttactttgccgttacaattagaagatgaaggaacaggagattaatgcattccagtaatttagaatggtgatagcaatatcttcttcttgaatgtggtaatactttagaagttgaattgttttatttatatattttgtaaagagcaaaattattgaaggaaatttccagtctttcatgtatacataaaatgtattcatttttattaatgtaatgttatccacatatgatttagatanntctaaggcataatatatccattaaagcatcatttaatttgtaaaatta

SEQ ID NO: 6368 - DNA, 580 bp, Canis familiaris
  misc_feature (1)..(580): n = a or c or g or t
tcattcnncagtctgatgatcacagaaacacagtatgaattttnnngctaaattactantacctactgattacaatcagttaccntacattnnnnngtccaaagctnnaactgtagatactttaaaatttgcacatttgaattcatttgctgactggtatggtcaaatctctccacctctagtctgaatatacccttttggttgtaattaaatttaaagaatctgatgatctctgtagactcttagaggcttgacgatgatggtgttggtgaaaataagaattacagtaaaatcctgtctagtgacccaaaggtcaccatgacttgcggcacaaatcactgtgggaaacaatttttgatgaaaagacagcctttcaatactcctattactatcagaagtatattatgaaaattaggattattgtctgattggaacatgaaacaactcatatctttataagtaacatcagaaaagagttacatttatgtgctgttagaagagagtatgttgatttttatcaggctttccttgttttgatttgtggctgttaccgatttttcatatgtggaaatatacctac

SEQ ID NO: 6369 - DNA, 663 bp, Canis familiaris
  misc_feature (1)..(663): n = a or c or g or t
agaaagaccagagggggagtgaacctgcnnagtagctcggagtgnnagcaggccccggggtgggctgcatggagaggcacagagagctcagcagaaatggcctctccccaaagccttgttttttgggaggggggagcctattttgttaactggtttggggtagggaatggggtttccttttctttaatctccctgtttctcgggtggggggtgggggtgactggctgttcaggacccatgggccacagtgggggcggtacaagtgccactctctctttggtttaggtttttggcctttttcttctttattttttaaaagtctgtgacagttgcattgtttttttcccccctgaacaaccccaaccctggatcctgttttttccgggaggtccttagagcccctaaccatcccacactcttcactttcctttccacccgctcgtcctctgtacttcccacagtgtttcacatttgatgaggtgtccttcccgctcttctctccgtcgtcccgtcaccccaactaggcctggtgagggaggctgggggagaggggaaggggggcagaggcggaggaggaatccgaaggacgtgtnnntcttctgttaatgttaagaaaaagttgtttggtggcagcgatctccttgccctgtcactgttagaggc

SEQ ID NO: 6370 - DNA, 510 bp, Canis familiaris
  misc_feature (1)..(510): n = a or c or g or t
gggcgaggccaccatcttcaganngtggagcagggggttgacggaggggcccacatgtggtcgtcaggacatcgctcacagaggtgcccatggctcagtgctgaccacaggcttccctatctaacctcccaacagagctgccccatcggcagggagcatgaggccacagagatgcctgcaggctccctgcttgactctgacaaacccggtgctggaggacaagctcatggcctgtgagcaccagggctggagggctgcctcctcctggccacaccacctccccagcaggaccactcactgaggcccacagccccaggtctgaaaggagttggcatcagcaggtctgaaatgcagggaagctggttttgccttcaaggnnngagttgtgggtggggactgggctgccagggcctctccagcgctgccctcatctctgagatcagccactggccctgggagctcagggggcaggctctatgtctttctgatcgtggacttgcaggtgcacag

SEQ ID NO: 6371 - DNA, 637 bp, Canis familiaris
  misc_feature (1)..(637): n = a or c or g or t
catgccgacnnnncaangagnnnctggattcctntgacacagtnccnnnccacctgaccgaggatctccacctgtactcactgaatgacctgactgcnnccaggaagggggagttgggaccccggctcgctgagctcaccagggcaggggctgcccacgtagagcgatgcatgctctgccaagccaagggcttcatctgcgagttctgtcagaatgaggaggacatcatctttccttttgagctccataagtgccggacctgtgaagaatgtaaagcgtgttaccataaagcttgcttcaagtctggaagctgtccccggtgcgagcggctgcaggcccggcgggaattgctggccaaacagagcctggagtcttacatgtcagactatgaggaggaacccactgaagccttggccctcgaggccactgttctggaggccacctgaagaaagcacacgaagccctccttctaggggctggggtcacacataatgcagaactgagccacccttttaaggactttccccactttttttttctttaattattatcattatttttttttatgacttacctaacgtccatatataatcaacctttgttaggttggtggggtccagtctgttgtgacaatttg

SEQ ID NO: 6372 - DNA, 570 bp, Canis familiaris
  misc_feature (1)..(570): n = a or c or g or t
cccgccntgcaccccggggcccctagggcaaaacagcagagtagggctgagcggtggacctggcttcctcccgcctcctgccgcctccttctctgggaaggggtggggggagtagaggggccccgtggggtgagcgtgctgctgctgccgtcacccctgctgcccagagccacccaagacctcgcaggcctgtgggatttgctctcccaggcttctccccacaaccccttccttttgtccctggctccccataccagtcccctaacttgttggttcctctcccctccctccctagagagttggtgagatcttttgagcaaaggagggtagggggagcaagaagagtggggcggctcagcaggccccccacgccctgcctgagctgctcctnnnnnnnncccccttcccttggatcagctggggattccctgctccttcccatgcccacattgttccctacaatacgtgcttccaagttgaggtgcctttgcctctgtttctgaggaaatgggagaaagttgcccaccacctctgacacgatcccactgaaaannnnnnggtacggaacca

SEQ ID NO: 6373 - DNA, 639 bp, Canis familiaris
  misc_feature (1)..(639): n = a or c or g or t
gcatttgtgctactgtcaataagactatgatcatgatacaagaactacaaaagcaaacagacctggagctgtcaccactgactaaagaagaaaaaactgcaacagagcaattaaaatctttcatgtcagacttatgaagaaattgacttcaaatgggaattccaatggagaagagattaattccagaaagatttaagaagatgtcttgttagcacttgattgggggatggtgaagaagatttgtctggggtgattggataatgatgcctttcgtaagagagggactatcacaagggcagataatatatgaataaagttcagccaaaaggatggaataggaataaagggatttaaaaatatatatgcacacaaacttagtcttataatttcaggcaaggaagtcacataacactgttttgcatctgtttttgtgtaattgggataacactgatgtcctggcctatcatgaaaggatatttatgtaccatcagtcagtcagatgtgaattagcatgctttggaaattaaaggatagaaaaaatatttgtattacattatgtgtatgattttatatttgaaaattctgattatagataatagtcactttattgatgagactnnnnatatgtgatctctagac

SEQ ID NO: 6374 - DNA, 199 bp, Canis familiaris
  misc_feature (1)..(199): n = a or c or g or t
tggggccaaannntaaactaatgcanngtcctgtgtttgtgtaaaccctattatgctttccatggatgaggcttgagttgtacaccttgaagaaagccaaacctgtaaaggggagttataagaacattgactcttgttcaccttggtgggacaggctaaagggggaggtggttgaagtccannnngttatgtncttcaa

SEQ ID NO: 6375 - DNA, 631 bp, Canis familiaris
  misc_feature (1)..(631): n = a or c or g or t
attcatcntcacaactccatgaaataggtactgttgttatccagtgttagagccaaagaaactaaagcacaaagaagttaaggaanctaaggtcacacaatgagtataatgactccatctcaacactactgtttggggcacatgaagtctaagggtctggtgaggttaggaagaagctgagaatgtcagtgacagcatctgaggaatctaggcctgtcagaccaagatttgttattcagaaaagttaagtcatctccttagagatcagttgtgttattcctggaaaatgttttccacttttctgcaaatctatatctgacctgctgaggaaatcatttggtgaaatggatccagaaagcagagaatgcttcattactttaaatagcagcagtaagcccattatagcctctgaattgtcccttcttggagtttgctaatgtttccaacttagtcatttggagctcaagagtacgattttataagccccgactgatagactcatctcttatagactgaataaattatctatctgttttggactatatattgtgaaatttaaaacaagatcctctccacatatgtcattattaaaccaaatttgtgctgtgttgtgtgatactttattttctgg

SEQ ID NO: 6376 - DNA, 505 bp, Canis familiaris
  misc_feature (1)..(505): n = a or c or g or t
ttcaaagaccaannactcccaccgtatgtnngtctgttgaattttgtggaaagagctggtaaacccagattaggnnnntnnactagnnnnnnntccctgttattttgggaaggcttgttgatcaggggacttggaggtggagtcctcccgtgtgatggcacgggcgagcagggctgcggggctgcgtggccgtggccgtggccgtggcnnnnngttgccccgggccctccccgggagcgtgctgtcctgcaggaaggtgctgcggatcttcttgcacacgtgcggacgacctgacgcagaagcagcgtggcagcctgcagcttgggacttgggttcctcggagctgtgactggcttgctggggtacactggaggtagggagactactgagaacttttgcacttggattttgttcttaactcctctccttttctttcataaagagtagtagattatccattccaaaatgtctttgatcacaaaggacaagcaaatgtatctcttat

SEQ ID NO: 6377 - DNA, 594 bp, Canis familiaris
  misc_feature (1)..(594): n = a or c or g or t
gactgcctttgacacanncagttcagtgaattataataatagtnnagggttgaaatgtagagtttttaaaaagtggacaattcctgttcttacatctgtttgtaaagaaaaccataatgtctttaaatcacttttctgtaaatagatgaccttttttgcagtgtttccccttgctgtagtacttggtgtacttatgttcaaatcagcgcagccactttgggggtaattttaaaaacaaactccgcacctatctttttaacccttgccttctaaacaacctcacacagcccagttacataatgttggctgtcacgggcattgtacttttatccaattttgttttctctaaattcagatttccagtgatgtttcaaatcttgtggagatgtttagatttttaacagagaccctatcataaaatctgtacattacgtattagggtcaaaggtaggagaagcaaaattctgccatactgtaaatttccagtgcaggctttaatttttttttaattagtagcactgaaaaaatattactgcatgggtatgttatagttcattttttaaaagttaaaaaaaggcttatttgaggcatccc

SEQ ID NO: 6378 - DNA, 560 bp, Canis familiaris
  misc_feature (1)..(560): n = a or c or g or t
atatgccgacnntnnctacagatgactttttaatattgtaaaatattttctgctttttgacttgcatctgagagtnnnnnntttcagtaaaaaaagaaaagaaaaaaaatcagcttttnnncagtaatttaagtgtattccttattattattattattattaattttccttcttttctttcattgggtaacagctaagagggcctagcagggtagttgatgggggagnnaatatcaatttgttctccaacccgagttggttcagttgagcccaagtgctgaaacaagaaatgtcttttttgtcatcgaagacaccaaggcgcatttttatgtaaagaaagacacctggcccgttgagaacttaggcgtttgtaaaattgctgttgatccaaatcttttcaagccatgtaatccattaattttgtgggcagtttaataaacctgaaacttttttgtgttttttattgtatctgagttgactgttgcttcttttcatggtatatttcttgtatgatattttgtaaagccctcacttgattcttttatggggatttttctttt

SEQ ID NO: 6379 - DNA, 562 bp, Canis familiaris
  misc_feature (1)..(562): n = a or c or g or t
gggcatttgccacttcttttatgacagtgctccangtggggcttatggnacaatgacctacctaacgaaggcagtggcttctcatttgcannagctgctgcccaattcaggctgccagatgcaatagggcctcagtgctctgaggctgtcacttgccccctagccctgttgggaacattctcctgttctccaagatcccctgtgttgatacaaaagcatgtcccatcagaaaccctggcagggaggagggggcagcagtagacctgaaaccagtgtctgtccaagccatagcacgagctgaggagtcctgtgcgccccagggagtgccacgggatcgctgtctgggttcgcttcgctgtaacatttgccacaacatctgctcttggagtctgaagaggaattggaaattagtctctttcgagtgcagtgtgaatggagaagccagcttaaattggctcttgctgagtgaccgcactcagtcagatgtgctagtgccacatctgaagatgggaagatccttccagcagcaggagtggaccttgacaagggggacatcctaacg

SEQ ID NO: 6380 - DNA, 636 bp, Canis familiaris
  misc_feature (1)..(627): n = a or c or g or t
gcacagactactttgcatgtgantacttcagggtttccttggttcagaactactgacaacaaagccccacccccttnnnccctttccccccaaccngtgacaagtnctcaaaagcctgcaaagtgaccgcaagaaccctaggcagccccagctcaggctgctcagtcctgtaaatatggagccagtgggcaacttacagtgtgagcagatctctggagtgggggtggggggtgcctgggggtaggcagcacacagggcagtgaatgcttcttgagaggaaaaagcctgatccttcatcccctccagcttggggactgtgttgcctggattttcctttgtacctgttctttccatttggcttgaccttcagccgtcttgcccttcccctggtcagatgtcctctggggcacaaatgttcctcataccacagtcttctggaaagcaaactcagcttcctgctccataatctctcacattgacacgagattattttttgccatagcataatcttccttagcccactaccgctgtggtcataggttttaggtggggttgtagtgccttttgattaatttaaatatttcatctttctgccatctatttggcctctccaatgacccgagatttctgttaaaa

SEQ ID NO: 6381 - DNA, 60 bp, Canis familiaris
  misc_feature (1)..(60): n = a or c or g or t
ctattagaagaatgnnnaacatccaagagtgtacacatcnnntgtaagcagttatttcaa

SEQ ID NO: 6382 - DNA, 493 bp, Canis familiaris
aaaaagtcatccccccactccctccttgtaaggactgtggatttggtgagagtctttggctgggctggacggggccaggccggaaattctgagtgagttgttttatcattggtaggtggtctgaacactgaaggactgaatatcccaggttcagtgctgtcaacagcaccaggagggtgccccacgggccacatcgcttcccttcttgcctccctccttctattcactcatcatgcatccgctcacctctgagctttcacctctgacttcctgactccatcagacctctacacaccagaagactttgccagaactgaggagctaacatttctacaccgactcaagctcgccctgtcccagctttcaagcgaggagctcccatgccaactggccttcttccctgcgatctgaatgactttgtgtaaatgctggagatggcacatccctttgtccctgactggctggaactggctcattcttcactgctgcaagt

SEQ ID NO: 6383 - DNA, 655 bp, Canis familiaris
  misc_feature (1)..(655): n = a or c or g or t
gtcatgtcagattccaagatgnnntntgtggtgnntacttcacctttgccatctcctgtgagggccatgtatatggttttggnctctccaactatcatcagcttggaaccccagggacagaatcttgctttgtaccccaaaacttgacatccttcaagaactctaccaagtcctgggtgggcttctctggtggccagcatcatacagtctgcatggattcagaaggaaaagcgtacagccttggccgggctgagtatgggcggctgggccttggggagggtgctgaggagaagagcatacccaccctcatctccaggctccctgctgtctcctcagtggcttgtggggcctccgtggggtatgctgtgaccaaggatggtcgtgtgtttgcctggggcatgggcaccaactatcagctgggcacagggcaggaagacgatgcctggagcccagtggagatgacaggcaaacagctggagaaccgtgtggtcttatctgtgtccagtgggggccagcacacagtcttactagttaaggacaaggaacagagctgatgaagcctctgcgggcctggctcccggccccccaccctctctcctggaactgagaagctatgaaaactacagattccagcaagcctcccccagccccgagt

SEQ ID NO: 6384 - DNA, 279 bp, Canis familiaris
  misc_feature (1)..(279): n = a or c or g or t
acatctggtantactgagagagaccatgaacgaaggcttctaatttaagannnnnngctttttatttgcatcatttaaccgaactatggacannnnnnnctctcagcttcagcatcagagttgacagnnnagtaaatttgcatcagaactttgcatctagctcttacgcagtataaaagaaaattttgtttgcttttcaacgcagtttttgtggaagagagaagcatacttttaaatggacagtgaactctaccataagttacttgaaatcctgtatct

SEQ ID NO: 6385 - DNA, 528 bp, Canis familiaris
gtggctctgggtggtctacgttttgaccgtagctctgcccgtgtttcttgttatcctcttctgctgctctggaaagaaacagtcaagtcctgtggagtataagaagacagacgctcctcagccagatgtgaaggaggaggaagaagaaaaggaagaggaaaaggacaagggcgatgaggaggaggagggcgaagaaaaacttgaagagaagcaaaaaagtgatgctgaagaagatggcggcactgccagtcaagaggaggacgataggaaacctaaggcagaggaggatgaaattttgaacagatcaccaagaaacagaaagccacgaagagagtgaaacaattttaagaacttgatctgtgatttcctctccctcctccccttcccctgcaagcatggtcctgggagaggacctggcacaccttaggttgaactcagaaaacctccagacatcaccatcaacaggttccagtcgaacactagcccgtgtaattttaaacatctaagcagtaaataattgctgttgtg

SEQ ID NO: 6386 - DNA, 669 bp, Canis familiaris
  misc_feature (1)..(669): n = a or c or g or t
caacttcagaatctactacttgatgactttttcaagtcagcggttgaaaactgccannactcgtggcggcgggcagtgagcaccggagtccaggcgggtgtccccatgccctgcttcaccaccgccctttccttctatgatggatacagacacgagatgctaccggccaacctcatccaggctcagcgggattactttggggctcacacttacgaactcttagccaaacccggacagtttatccacaccaattggacaggccacggtggcagcgtgtcgtcctcttcatacaatgcctgaccagactggttacccgccacaattccctagactgggacattccacttgccacttgccactgcttacacagccctctgccctactttctgctcagaccttttaaagtagtctctcataagagactcctgaaaaagttaatgtgagtttacttgtaaagtagctgggttagcagcaccgtgccctctggcctggcccccttggggccaagcaggaggtgcccgtgtgcacaccagcgtgaatcatgagtcagctcccagcagcagttttccacgtgtcccctgtgattagggaggcagggcaatttcccgatagaggcacgcatagatgggaagggttgctgtgggattttctcaaactggaatcttcgta

SEQ ID NO: 6387 - DNA, 512 bp, Canis familiaris
  misc_feature (1)..(512): n = a or c or g or t
aagaaaccacngngaggcctgctgtcagctgcaggtgccctgggatctgnntcagctttgggactgatctagcaccgcccaggcagccccagccaagactgagctcacggaggcccaggagccaactgtttcatctctcccagcaatctttgcacctgaacatcttacccaatcctccttcctgccctttacttttcccaggtgtcaggactctatcagggtctgaggcctttctctacccatccctgtttcctcttctctttctgtttcacggggcttatctccaacaaatctataggattcctaacttggaatctcggtgcctgcctcctggaggacccaaccagcctgttgtgcaccaatacctttttttttttttccctgaaaagttatccacttatttctcacttaagaggcttcccatttgcttctgggttttgtttagtttagttttgcttttttcctttggaagtttggagaaactcccaaaggctctgatttattttanctag

SEQ ID NO: 6388 - DNA, 515 bp, Canis familiaris
  misc_feature (1)..(515): n = a or c or g or t
agctatggtgagnnnnnnncaggaaaaggtnnncagttggaaatgtggaagaagaaagtaggnncaagttgatgnncaannctctanaagtctaaatctgatgtttatgggggnngagagagattgctactatnnatgaagagaatttgtcttgactctgntgggggaatcatttgccttggatctatgcaaacaaagctccgtgaaaggaccacagggatgagccaggcttgccctttttttgtatgattttgtttacaaaacttactgggacttttaaatccagctatagatttggaaaagaaaatatttccatttagatgttttatatggttgattatgtttgaaattaccattacttattttttaaaagcgcacggtcacatatgtgtatgtatacctaaactttgtatcatggtttcagtgtattgttcatgtattactgggaagtgctaacaagaaatcaatccaaagaaaaatttgannnaagcattcctatttatnnnntaaataat

SEQ ID NO: 6389 - DNA, 475 bp, Canis familiaris
  misc_feature (1)..(475): n = a or c or g or t
tcttnnngcaatagaagaaacagagggatttgnacaagaatgaatgtggctncttgtcttggaggagctcnngcatttaaataccccagccaagaaaaattgcacagatagtgtatataagctgttcattctgtacagtgaatttnctgaacctctcaaagtataaatgttttccgttcttccacagaaatatgcaaaanagtccatccttnnntactttatttattgttcccttgaagtgactgaccaggaaaaagaccatccttaaattttgaagcaagcaagagactttattaaaaataagtatatatctatataagcatatatgattgtggctctagttttatagagctccgagtatattaaacaggacagccgttcattcagaaataatctggatttgctttaccttgtttctattatccagaggacagagtacaaattgcttcatgaccttnncccttatgtaacacct

SEQ ID NO: 6390 - DNA, 603 bp, Canis familiaris
  misc_feature (1)..(603): n = a or c or g or t
acaagaatgctgtnnnnngtcttttannatgctgtagnctgacaagacatttnngtcagtgtataaaaaattaggtagtatcgtgcactgatttgaccattgtgaaatcttttctcagtgtaagtgcatttctaataaaatttatgagtgaaacaatctttgtacaatgactagtcatgcatcatccgtaattttacaagttcttgtagtaggtagcggggtatttactagggttatctgtggcatgattatgcattctgtagtattatttaatttggggttttgcttcttttttttttacatgtagattatcttactggttcaacaattttctgatatatgcagtattacagatattcagcaaaagtattaatgggcctctttaaattctatattatagtgtttcagttctgtgtcttaacagtttgtgatgatttttaaaactgtcttttaaacttatgtaatgatgttgatgctttcagcttttttttttcctggtattagagtttgtattttcacaaagagtgctttgtagcaggcattacaattaatctgttttgtacataaatgtgccaacagcttgatggtggcgtttttgaaatg

SEQ ID NO: 6391 - DNA, 521 bp, Canis familiaris
  misc_feature (1)..(521): n = a or c or g or t
gtccatccacagantnnactttgatttgnnanatctctatgtataagagacaagtttaattcaataagctatgcgttnnaggaaagatcagtgcaaagtgcagtaagagcactgaaggaaggggttttctgcttngacggatctaagggaactttacaacaggaggtattcagtctgtgacttgctctggctttgctctacaaagtcttcaggggtcccagttccttccaacttatattccatcatcccttgtccggtaggtagatttctagtcgtcacattcagattttagatagaaacatggaggaagagacaagaaaaggtgaagggttgtgggccagctcttattaaaagaagtctccaagaagccacagctcaggcagcccgccctcatctccttggccagaccnnngtcacnnngccacacctacatgtaagttccattcctatagaagaagatgcatatggacattacatggggccagggtgggggatgggaaggagggggaaaatggttgttt

SEQ ID NO: 6392 - DNA, 468 bp, Canis familiaris
  misc_feature (1)..(468): n = a or c or g or t
gatgctgctgcagattgctgatgattttattgagagtgtggtnacagcagcctgccagcttgctcggcatcgcaagtccagcaccctgnaggtgaaagatgtccagctgcatctagaacgccagtggaacatgtggatcccaggatttggctctgaagaaatccgaccctacaaaaaggcttgcaccacagaggcccacaaacagagaatggcattgatccggaaaacaaccaagaaataacacacggaaaggtcaggggatggacaacagtgtatttggagatacttgagctgagacctcagccatctcatccttggattttttttttaatgctttacagagaagcatatattttttattaacagtgcagcaatatctataatgactgagaggatctgccaaaagaataaagcctcctaccccaacttccagtcccttttccctgacgtctcaaagaagagcaatgt

SEQ ID NO: 6393 - DNA, 545 bp, Canis familiaris
  misc_feature (1)..(536): n = a or c or g or t
atatggggaaagttttcagagttttacagcaaaaaaaacactataatgtttgatgacataggaagaaattttctaatgaacccacagaatggactaaagataaggccttttatgaaagctcacctaaatcgagataaagacaaagaacttttaaaactaactcagtacctcaaggagatagcaaaattagatgactttttggacctaaatcacaaatattgggaaaggtatctgtcaaagaagcaaggacagtagttacaagttatattggcagttactgaggatacttgagatcacgaacttcttgcttttatgctagaaatcattatgatagtgctggacactgcagtgaatatcagactgcttatacttggtctcccagttttttgtaaatttaattttatattttttgaagatcatagcaatatgctaaaaaaaaatcctttttctccctatatgaatactgttactcttgaaaaatattttctccagcattgagtactgagttttttcccnnnnnnataacacacaaaagtggacaaaaa

SEQ ID NO: 6394 - DNA, 643 bp, Canis familiaris
  misc_feature (1)..(643): n = a or c or g or t
aatagatatntntactnaatagaagagtaaatgggtggtgnncaaatgtgtgatcggngtcactttnnnnnntggtgttccttgatgaaaggatattataaaagtaatgttnggcagtatttgggtagttctggttgagtgaagcaatgttttgaggtagtagagaaatgtgaagtaaaaatttgaattaattaaaaattcaattgttcagttatacaagccatatttcagttgctcaatagccttatgtggctattgtgttagtgaagatctagacatttcttgcatctcaggacaccctatcaaacagtactgttctaacgaattaggacagcaattagctttggcctacgtggaaggcactacatcccagctgagtttctgtgtgtttttaacctgtagagtagctttgtcacttttaagaaatagtctccaaggaagagtggattctggtttaaacatttataactaatagtgttttaattcttacagacagcaacacaaattggaatagaatggaacctgtcccctgttggcagagtcaccccaaaggaatggagggatcagtaatcccagctggtataataatgaattgtttcaaaaccaactcataattgatgccaggagaaagcactgtgcacct

SEQ ID NO: 6395 - DNA, 735 bp, Canis familiaris
  misc_feature (1)..(735): n = a or c or g or t
ctgacaaacatgagnntgatccagaatagaaaagatccnnnnnnngagaaactactcctggatggacataataaccatannnangnntaaactaccaaattatgaagaaaagctcaggatgttctacgagnnnnnnctgcacgtggatgaggagatccgctacatcttgnacggcagcgggtacttcgatgtgcgagacaaagacgagaagtggatccgcattttcatggaaaagggagacatgatcactctccctgcagggatttatcaccgcttcacgctggacgaaaagaactacgtgaaggccatgcggctgttcgtggggcaacccgtgtggacggcgtacaaccggcccgccgaccacctggaggcccggggccagtacgtgcggttcctggcgcagaccgcctaggcccgggcagcctcgcctcgcgggccgggcttccccgcgctgggccgccgctcccggggtcgccgtcgtcaccaggcagccgcccgcgccggacccgtcgcctgagccctgtgagcggagccgcccctcggacctgggtgtgaagcagacgtgcggctgccagcctgccctgtagacgccggaccgccagacccagacgctcttnnnnggcccggtgggccgggtggctgggccagtgcacccgcagccgtcatggggcgtcgcagcngcgggggccaccttcttgttccacataaagcagcggccgtgnnnngcgctcactc

SEQ ID NO: 6396 - DNA, 201 bp, Canis familiaris
  misc_feature (1)..(201): n = a or c or g or t
gacnggtcatccctacgcaccaaatnngcaagtgctctgaagaaactggctatcaagagacttggtcacaatgcttcagatgtgcagagtnnnagtgcnntagggtttgtnnnnaagcnnnnannagaaaagaggcaagctgctgaatactatgagagggcccaaaagatagatccagaaaatgcagaattccttactgct

SEQ ID NO: 6397 - DNA, 585 bp, Canis familiaris
  misc_feature (1)..(585): n = a or c or g or t
gatcacacnncaggtcccgtgcggcaggtcccgtgcagcccggagcgcaggaggactagttcgcacccacgaanngcagaggcgcagcggaaccgcggcccggggaaggcaggccggggccgcggggctaagagacctcgggaagctgccggcacagggtcagtggagagacaccaatgacggggcgcctggcgggctcaggcggtggcgcgggcgactctcgacctcggggctgtgactcagagctccagttgggtgtggatgtaacttaaaatcttaaaaaaaaatcgacactgtttctctacggcagctcaccgccggtgacagcggggagaggcggcagcgactctcgacgcgcctcgcgtgatggtagcgcggacgtgaggctccggcggaagacacagcagacggcgtgtggaccctttcggagaagatgtccagcttcgtggagagacataaaaaatatatatatatcctaaatggatggagagctctactaggtcgcggaaagacgtggtctcaaaaagacgtcagccgcnnnnnngttaacggctatnnnnnntgtcattcccctcaggatccccg

SEQ ID NO: 6398 - DNA, 280 bp, Canis familiaris
  misc_feature (1)..(280): n = a or c or g or t
gatgctcttaagtnnnnnnngcttttccnnnnnngcaagaggcnnnggttttcccccctttcgtcgggggnnnnngctgcttttcatatgctggtgttttaaagttgatgggattcagagtgctgttgtcgaagtcgcccagaatcagttttttgggtttttatttttattttttttggggggggggtgtccctgagatctgtcgcttttcttcgtctttatattccctgcgaatgcccagtgaatgatgcggcacgcatctcagtcccactgcagattc

SEQ ID NO: 6399 - DNA, 549 bp, Canis familiaris
  misc_feature (1)..(549): n = a or c or g or t
ggttttggtcatttgctttattttannatcttattttaangctactgtgattgatagcattgtaagaattgggacaatattgtattcaactgttttattttttatatttttaaaatttaaagtataattagtttttataattttcatcagatttttgttatattttttggaagtgaaacttttagcaagtgggtgtctagtttttactaatccctaatgttttttttttttttccagtgtattgctcatattatcagaaggaaaagttatttaagtatgtcagttaattgtactacttggctgaatttccatatagtttttactgtgtatggggaggttgtagtatttattatagcattttaaataagggtaattcattttttattaaagtcattttcacgttaagttcctatttttgtatgttctactcttaagttatataacacagttccttttttaaaagagttcatttgttgaagtgctagtggaaaattaatgttattaaatagtttgcaaatgactatttataccagtatgcatataattntt

SEQ ID NO: 6400 - DNA, 730 bp, Canis familiaris
  misc_feature (1)..(730): n = a or c or g or t
anncaggcatgagactacacacaccagtgctcctcacagcccctnnntcctgcagctcctgcctgaggtgtnntannccagcacagggccagccattgggacccacacnctgctcagtgnntgcagctagnntccttacccaccagcaaccccgctgcatctgccacacnntctccccagggtggcagtatcccatccattgcccatggtgtcaccccctcagccccaggaatgccccaagaaaactccatgtcctagtctgagtctttgttgtggggtctgcttgggggagcccagcgctggaccaaccactgtggcagatgggaagagaggcaagtgtgacatctgtcactgctcaggaatggccagaaccgggtactgagattcaagtgttatgtgcaaagttgaggtgaccactgagataatagaaatagactgtatagcttctgtatttgtggaagagaaaaagaataaagaaaatataatgaacctaacagaataaagaaaagaagacagattttctccagttatgctggagaaaaagcagcataactagaaagccgaaagcaatgtcagaaaagtaaacccagggcagccagggtggctcagtggttttgcgccgccttcagcccagggccttatcctggagaccagggatcgagtcccacgttgggctccctgcaaggagcctacttctccctctgcctgtgtctctgcctctctttcgcng

SEQ ID NO: 6401 - DNA, 569 bp, Canis familiaris
  misc_feature (1)..(569): n = a or c or g or t
atcctcccatctnnnagcagtgatgtcaganntctgttgctggggaaacgtcttggcagggaacctgtggaaaaaggcttgtcagtaatatctgggaatggccggatatggaaacatctgcccgtgtgtaccgacgacagagctgctgtccacaagcgccttttatttaggataaaatgatcaaatccattgttcttctaacctgtgcttggtacatatgagcttctttaacccttatgtgattctggggttacttcagaagtattatttaatggattattcctatgacttgaccccccagaattcggttttatttaatagacttttctactaagagtataaagactgaggctgatgtagccagggcaaaaccatttatttcacatatttattctggatgcttgctgtccatgttgtactagcttcttactgttttcatgtaataagaaagatctattttgaataaacaacgggtatgttttaacaaactctcacgcagtcctaaggcctaaacttgtgttaatgtatgtaaagaatattgtatagccnnnnatatactatgtatatat

SEQ ID NO: 6402 - DNA, 445 bp, Canis familiaris
  misc_feature (1)..(445): n = a or c or g or t
attccaagtacaacatgnncttccgaggncagcctgaagttgactgacttattgcttacnnnnnnnnaaaatccagtaacatatattgannacaatgtggaacaaaagaaaacggacaggatcatttgctcaactaatgttctgcatcaagctgatcagatgctccgaaggattgtctctcagacaatgaannnagcaaaagatgaacaagtgcttccgttcaacttgaagcttctagcagaagaactcaacaagccaaagcagaatttttggaagatctaaaacatggaaacaaaaaatacctgtgctctcaacaaaccatccacataccagatattatttctttttttcattatgagaaagataacanngtccggaaatatttttcaaagccacactaaaacttctgaacttccaatcaaatgtccaattttggttaagatta

SEQ ID NO: 6403 - DNA, 82 bp, Canis familiaris
gcctggcgggcgcggggagcgggacacacggcatcctggagacagtgaccttcggagcccattcgtaggacccagagctttc

SEQ ID NO: 6404 - DNA, 409 bp, Canis familiaris
  misc_feature (1)..(409): n = a or c or g or t
ccnnngctttnnnnattcagtctttccaggtctgaggatgggagnngnnnntgccnnnttccccacacctgnnntcagnnnagaggtattnnnnnnaatctcagggcctgtgggtttggcatgcagttgtgattagttcctcattagcattntgctgaatgtgaatggtgacccaggcacttnnngaatccggaagcaggtgcnnnagtctacttcccctcttgggatcccaggacttcaggaggagggaccaagaggaagagggtcatggggacaggcctccctgttcccagggaggagagctggctgcagggggcttctgccttgggggtccaggcctgcggctgctgtactcctgctgccacgnnnnnngttttcagttgagccgaagaaacaagggaagatgatg

SEQ ID NO: 6405 - DNA, 459 bp, Canis familiaris
  misc_feature (1)..(459): n = a or c or g or t
gcatgctcgnnntttcttttctaatgtagtgcaataaagagcaannntggctagattttgcatgaaatggttctgaaaggtaaggagaannnagactttggaggttggttgtttaattttaaatttgtgacagagataagatagattaagatctctcatacactgataactcaagcttttcatttcctcatacaactgtacaaatttgactgggaccatcagttttcaactgttgtcaaactaactaatgtatcatctgcttaagacgcaagattcttgattaaactttatatagatatagacatatctgttgtttctttgtatttcaggaaaggtgatagtagttttatttgatactgataaatattgaattgatttttttagttattttttatcatttttccaatggagtagtataggactgtgcgttgtcctttttatgaatgaaaacaaattata

SEQ ID NO: 6406 - DNA, 579 bp, Canis familiaris
  misc_feature (1)..(579): n = a or c or g or t
atnnacaaattnnnacccatatacactgctgatgggactgtaaaggngcacacccaatnnngaaancaatcnnnnnntnnnnnnnnaggnnaaacatagagttatcatagactcagtnntctactcctagatatatacaccaaaagaaataaaaacatatgttcatgcaagcattgtacatgaatgctcatagcataattattataacaaccaaaagtagaaacaacccagatgcttatcaacatacccaaaacatagatcttatatataatattatttggttacaacaaaggaataaaatactactacatgccacaacatggatgaacctcagaaactttatgttaagtgagaaaagccagtcaaaaaagattacatattatgtgatcctatttattggatatgttcagaatagacaaatatatagggacagaaggtagatttagtggatgcttagggctgaagtagggaggcagaggctggtagctaacagtgataaatgtcctcaaattgattgtggtgataattgtagaactctgtgattttaccaaaaaatattacatgcacaatacattttaa

SEQ ID NO: 6407 - DNA, 479 bp, Canis familiaris
  misc_feature (1)..(479): n = a or c or g or t
gtcactgcgagctgataatganccaagccttgnnngacgagnnngagccaataaatcaatcctagagatgttacgccttcctgtggggggctttgacgtggaactggttgtggacacttcagaagcaacggatgctttgtcagcatcagccagttcactgtcggacacttcgccaagtcgtgcnnngcgcaagagggaagtcctggtaggtcgcggccttggaagagtggttgatttactggatgatccaggtgctacaggagaagtcttagatttagttactttacttccttccagtttggaatgtgcatgctcatcagttgagctcggaacaggggtaggagcagaggaacaagcagactccctcctgagcgcagagcctactgtggagcatctgatcctaagaccctgagaccatgacctgagctgaattaagagtcagaagcttcgtcaactgagcctcccaggnnagccccagt

SEQ ID NO: 6408 - DNA, 564 bp, Canis familiaris
  misc_feature (1)..(564): n = a or c or g or t
gcagaagctgcatatcaaactggagcagatcaggcctcgatnncagccaggaatcatattcagttggtgaagtcgcaggtgcangaagtgcgccagctttcccagaaagcagaaaccaagttggcagaagcacagacagaggagctccgtcagaagacccaggaggaaggggacgagagggctgaggcggagcaggaggcctacctgcgtgaggattgagcgctggagccgttgcccacatctgccgggtcagcctgaggagagcaggggtggccaccatccggcccaagggcagcagggccttctctgcaccagaggcggtggcacatcctgccctggcccatgaaggccttagtgagctgtgagtgcctggcctctcacccctgtggacctggctctttgccctggggcactgcaccctgtttaacatttgaccccactcagcaagctctccgctcagccatctttttacctcccacccagagcatctcggcagcctagccagagagaagggtccttgtttgtcacgcccacaagttcggtagctgtttaacttctgtttcc

SEQ ID NO: 6409 - DNA, 573 bp, Canis familiaris
  misc_feature (1)..(573): n = a or c or g or t
cgcaccaccgacagcctgctccctggtgcctcccaccctcagtcagccccccgatgggcgagggcccngcagccaccacgttgcggctgagtgggcccgacctgggtgagccgaataggagtccgcacccgggaccccgaggggaggcgcaggctccctgacgccagaacctccagtgctggccactgcagaggtcagcccgccctccggagggtcgtgagggtcgtgagtgtgcggggacagggagcgagaaaagcaggggcgacgcctcctcctgttcccagactgccgtcctcgggagccgctggcttcacgactgaatgcacccaatatccgacccgggccgcgtgcggttattaactgagggcgcagacttgtgcttcccccacatgaagtctgaggctttgggcacatccctgggggcccttaagggacgaggtggctggggacctggggcaagccggggaagggactctgggccccttggggcttagtcccggggcctggccacgggaggcgccgggggccgggcctgcctccgacgagcttgnnnnngagctttcgggagcaatt

SEQ ID NO: 6410 - DNA, 528 bp, Canis familiaris
  misc_feature (1)..(528): n = a or c or g or t
ccatcaaatatttcacattacttaatttgaatctctgctgaggtagaggntggaggtcccatttttcatgcactgggacaaaggtgaggaggaaattacctcaaaaatataaaattagaacccaaaggattgtgacagccaaacatacgtcaggaatttcagttgttcattttgaaaatgttgcccttagattatacttgtttctctagtttttatttacgtatttattttaaatagttctgaaacagtcatagtttccaacacatgctgttccaacgtagttttgtgatgagatttcagctgctgcataactataactttgtttacatattctggataggttttgtttttattatacttatataatacatcagatatacttataaccagacgggttagttccctcatgttcttctaactgtaaatgtttgtttgatagtcttcgttattaaactgtgagaaccnnnnnntcattttttaacttgccttgatgacatgtttgtatgttattttaggttattaaagagg

SEQ ID NO: 6411 - DNA, 563 bp, Canis familiaris
  misc_feature (1)..(563): n = a or c or g or t
acaggaatggaagtcggcatgcagctgagattgcaaacatgtccntagatatnnngagctctgtgggtaccttcaagatgcgacacatgccagaggtgcnagtncggattagaataggnntgcattcagggncagttgttgctggagtggtgggccttaccatgcccagatactgcctatttggagacactgtgaacacagcttctcggatggaatcaacagggttaccctaccgcattcatgtcagtcatagcacggtgacaattcttcaagctctgagtgagggctatgaagtggagcttcgaggaaggacagagctcaggggcaaaggcacagaagagactttctggctggttggaaaaaagggattcacaaaaccccttcctgtgcccccaccaatgggcaaagatgggcaagtgggccatggcttacaaccagtagagattgcagccttccagaaaagaaaagcagaaaggcagctggtgagaaacaagccataaggagtgaaaagttgtgagattggaatcttctcttggtgaggcaatggaaaaactcactccagt

SEQ ID NO: 6412 - DNA, 571 bp, Canis familiaris
  misc_feature (1)..(571): n = a or c or g or t
tggcgtgggcgccactgttgaacacagaccttgtggctactgtaagatctgcttttgtcattgtctgagtaggacacgcgtgtccggnacgtgtgtgtctctaactgcacacacggaatctttctcttgctgtgattcttgaaagccttgggccaggcagttagaaggccccgctcccagtctgtgtgccgtcgggaacggccccctgtcaggctccccgttcccctggcccaggagcagaggcttaggtttccttgaaggggactgcggaaaaggaaagaagcagaattaggaagtaacgttatttccaaggtcgatacactttccgcagtgacatcagaccaccgacagctgaaccctcttggaagatctgttgcaaccattatctttgttctttatttatcatgcatttaaaatgagatgcagaagcatttaacatactatgtaaatatggaccttttaaatttaaaatgttattggagatgctttcaattcagcaacaatcttagctctttgttagttcttttgtgttgtcttatcaaagtttcatggatacagttccataactgtt

SEQ ID NO: 6413 - DNA, 598 bp, Canis familiaris
  misc_feature (1)..(598): n = a or c or g or t
ctcatgaaacaaagcttacattttttttttnnntagcagcannaaacattggactgaaaagcaaatcacaatcttcggagactaggtgcatgctgtgtaattctgagttcagcatgtgtcttggggcgggtgtttaataattttttttcttgaggcagttctattttgtctacctagagatacaaaacacattctgttcaactattaaaatgctgtattgtaataagcagaaacttgtaatcgttaaaatcaaatgaaaaattgcaaactgttttttgctttctctttacaatacattctgattgaaaacactttctttttgggcacataagtaggatctgnnnagtgtaataaaagcagaaaatgacagtactaaagaaatttgcctttattaatgttaatcatgtataatttataaaacatatttgctgtctctgatttttcaacatgtgtatgtgtgtgtatgtaaatcatttttgagtatttatttaatgtattcatgaaatctatggagaacataataaataattctttcgctttcctcatatgactgaaaattaaggaaaaaaacctgcaaatnnnnaggctcctgtggaca

SEQ ID NO: 6414 - DNA, 307 bp, Canis familiaris
tttatgacaccaccactgtatttacatgtaggtctcaggataagagatatgtatattagttggctagataagaatttataaatatgcatgacatatacatatttataaatatttatatacttggccatcaggtaacagattgtaatttgtgatttttttgtagttgtagtgtcaagaataatgtaatttgtgttatctgaatctatatttaagttagttataagttactgtatgtccttgaactggttgatttttcagattcacagaatctgcatgtgtaaaatgcatttaatcccttcatttataa

SEQ ID NO: 6415 - DNA, 238 bp, Canis familiaris
  misc_feature (1)..(238): n = a or c or g or t
cccccccccccccgccccgcatccgcgaaggctttttaatgggaggggcgtcaaagctcaaaactgtcttcctctctcctcccccctccagctgtaaatgccacttggtgaggggaggggcgagaggaagccctcccccctgcatgcttctggccggagcacctccctagggagtgggggaacagggttgtggcagcccccatggtcgcctggaggannnnntggggcctgggggtgt

SEQ ID NO: 6416 - DNA, 572 bp, Canis familiaris
  misc_feature (1)..(572): n = a or c or g or t
gtggcgcagcnngcgcccagaccagctgctgtgaggcnnggcagagggaaggccaggnnggcgcggggtgggggtcccggggnnnngccctctctggccaccgtgggcagggctcccctcctccccaccccgccccgggacgcagcccactgtgctcgtgctgctcgggctcgtcctccttgggccgcggggcaaaacgcaccaaggccggagcccaaattgctgctgctgtgcccactggccaggctgggcgtccggcccggcctcctgccctgaccccacccccggcctggtcccacccgccctgcgctgccccggcgctcccggcctggggcctggcccgcccactcgcccctgagcggggcctggatggagtgtgtgcgcggtgtttgcagggcccgcggcgctgtctgaccctctggcggggagcccgtgcaccgcccgagaccccctgtctgcccacagccgtggcctggggcgcccagcgcaggcctcctccccaggcccctgggagtcaggcccctcggcgctggngtcctgtgagcccgcgtgctggctgagctccatctgtg

SEQ ID NO: 6417 - DNA, 576 bp, Canis familiaris
  misc_feature (1)..(576): n = a or c or g or t
gtaggtgcttaatattttttgatttgattgatgcccatnngaatttcatgggttctaataataaaatttaagaccccagtccattgtcctctgtaattacncttggactttaccaaggtataatatggggttttatgcaaagttccaagctacatgcaacttttttaaaccataataaagtggaggaattattcccagcctcctttacatgttgtgctttgtggtccagaaatgacaaaccgttttttacaaaatggtacaactttgagtccttggcttgactacacagctttgagcttcatggcatgtcaactttgccatagtcataggaaagttctatgtattatagctcaagagtcgcaaatatcacatgtgaatgagatggtaactttgagaaatgtctgtattgtatttgaagactgtttgccataaatttgaagtttgaacttaatgtatttcaatttggtatgctaaaaagtactgaattaatgtaacaattttttttttacaatattgtaatctnnnnnncagnnnnnnaactgaaaatataaaacccaaatgatttctatatagtaa

SEQ ID NO: 6418 - DNA, 394 bp, Canis familiaris
  misc_feature (1)..(394): n = a or c or g or t
actgagttcaaatcctgncttccctcttcttgtgttccagtgtcccccattgtgtcaaacctcaagaggttgctgtgatggtgacatgagttaattgtggcacgtgattgattctgtagatatgttgattatgattgctgttaccgggttttgcgaaaataagcacttacaatggttaagcccttactgagtgcctagcatagcctatttacattttggttaagtagatccttatggcaaccctaggataggatccagggttgcggggggttgtttgtttgtttgtttgtttgttttgctttgctttgtagataaagaaactccgcacagggcacctgggtggttcagcggttgagcatctacctttggctcaggtggtggtcccagggtcctc

SEQ ID NO: 6419 - DNA, 463 bp, Canis familiaris
  misc_feature (1)..(463): n = a or c or g or t
gagattagagagcagtctgtggaacaggtgtactgtgtcggtgtgcatggnnnnntnntgctggnnnnnnnagatggctggtaagaagcccgttaataccagccaatgcaaatcagattggatccagctcatgaaaactgcctgagatgaaagagccaacacgaagtaatttgaataaactgataaaaaaaaaccaaactatttctaaatatttttatgctgttttttaactttaaattgaaaatttctaaagagaaatgaggcagtggtttattaaatgtctataaatacacacatatagctatgatatgctctggttttgagaagttaactttgtggaatatgaaactaaaggaaaaatctccatgtgaataagtaagagtatgtaaaaatatagttgcccagaaaaactggaaacacttctgggatctgaatcactctacctgtgttgttattttttggt

SEQ ID NO: 6420 - DNA, 573 bp, Canis familiaris
  misc_feature (1)..(573): n = a or c or g or t
gnaactataatgtcnntatatattgctgagctgaaagnnnntacgtggtaaatataaattttgtttngnnnanaccagtgtagggactaaaagtataatgccactagtaccagttgcccaaattttagttttgggtaatttaaactgatgtgtgtggaagcctgaataaatgtnnnnntggacttcttccattacttgctatttccagttgtgaaaagtgtggagtttaagttcttagtatgctactccacatttgtttttccttcctcagggttagaatgaaaataaagtatatgtctttttcatatgaccattagaatgcacgaaaaaattatttttaagtaaaagtgaaagagatttatcttctatctaaaaaagtgcaccttacatttcagttgatttctgagcagaaattattctgaattcaatatttgttaatgtattttctagccttctttgaaatttgtataggaatctgttttaatttggcatcctgaatagttagagtcactggaaaactattgtaattagttttttcgtttgctacctagaattcattggaagatgctatga

SEQ ID NO: 6421 - DNA, 587 bp, Canis familiaris
  misc_feature (1)..(587): n = a or c or g or t
tccccaaagaggagnagtacaagctgatgtacgnnatgctcttctctatccgctcctttgtcagcaagatgtccccgctagacatgaaggacggcttcctggccttccaaactagccgttacaaactccattactacgagacgcccactgggatcaaggtggtcatgaatactgacttgggtgtcggacccatccgagatgtgctgcatcatatctacagcgcgctgtatgtggagctggtggtgaagaatcctctgtgcccgctgggccaaactgtgcaaagtgagctcttccgctcccggctggactcctatgtccgctctctgcctttcttctctgcccgggctggctgaaggaagcatcctacctcacccctcaggagaatccctgtctacctggggccattcctaacctgtttcatgtgagggcccccactgcatgcccctccaccccctccagctccccagcagccctcctggggcaatggcctacagcccactcaggtgccctccccatcagaggaaggaagtgtacaggagtccctacacctccacaccaggccctctccagttttatcccctacctgg

SEQ ID NO: 6422 - DNA, 596 bp, Canis familiaris
  misc_feature (1)..(596): n = a or c or g or t
agaatttcntgaggcaatgccccttctctcnntgactcgagggtagcttttcacagtaatttccctcacttttcacactgtacttgccaacacctatgctgtaaatgatgtaagtgcgaaccatgcattgagggcagaggaattgttcagatctagccgtccttagagtgagtacatgactccatggtcactcctgctcccatggccagcttttctgaactttgagcttgcagtttgcctgtcctctaatggaagaaaaatgcacgtctttctttagtagtcccctctttctcctatattcacttctaagtcctcacttctgtttgtttctccatcagtagagtctcctaaaaatttcctcggcaccatagctctacaacttttactgacaatttttaaaaagcaatttattatgtatatttaatttaatatttaaatagaattatgaaagaactatatgtgtcaatcatttccatgcaatttctttcccattatgaaagcatacaagcattctttacctgtttctctgtgttctaggattttgttttccatttttggtgtacagtctctgtcctaggataaaaatgaaattattt

SEQ ID NO: 6423 - DNA, 567 bp, Canis familiaris
  misc_feature (1)..(567): n = a or c or g or t
taaaagtnnnannagggatgtagaacnnncgtactttcataccccactcaagggagtgtaaattggtacaattgctttnnaaacctccatgagtcagacagaaacccttgaatcagggattcagaatcacagatctgggctcttcctgctgttcactagcgtggggggctctgtgccctgcaaaccagctgcaaactactctttaagaagattggggtgccagccagggccccagcaggaaacatggcgttctcgggcagggtcatgtaggagggtctgatgaagggaagtgaagattgcaggaccctgtctcccaggccgccacatgtgggcagagcccctcagcgagatgagtaaccttaggcacctcgaggtgcttccatgagggggcaacacaagggtccccctgaagttgaggccatcagcctgctggacttctcacagccctggactgccaggccaggagaggtatggctctaacaacattttgaagcagggtctttttcgacagggggactgtcatgccctgtagggggttcagcaggatccctggcctctgcaccctcc

SEQ ID NO: 6424 - DNA, 487 bp, Canis familiaris
  misc_feature (1)..(487): n = a or c or g or t
attgtcatgttgctaaagccagtggcnactnctcaggnntcatnntnnctgcttagcagcgtttggtgaagtacactgtcctgccccagacgctttcgtcctttggctcctaggacgttagtgtcttcaggtttccttcctggaccactgggcatctttctgattgaaagacgtaggacattagtcattcagcatccgaagtggagtctccatctagtccttaggaatctctcggaggtttcaaaagtagaatcagggcgactcaagtagcttgcttagattcttgaatttgtttcttcaggtatgacgtggaaggatttgggctgcacggtcctgaagctatcctgcactgccccaattctcagaaagccctaagcggcctaatggtcagcagatagagacaaagccccagggcttgtgtgcaacctcaccggggcctcaggttagtgtcttgactcttgagnnnnnntcatctcgtctgttgcat

SEQ ID NO: 6425 - DNA, 624 bp, Canis familiaris
  misc_feature (1)..(624): n = a or c or g or t
tcaactcgtaannatccacaggttaatgtcannnacttcaccaccagctggtctgatggcctggctttgaacgctctcatccacagtcataggccagacctgtttgattgnaatagtgtggtttgccagcagtcagccacacaacgcctggaacatgcattcaacattgccaaatatcaattaggcatagagaaactgcttgatcctgaagatgttgccaccacttatccagataagaagtccatcttaatgtatatcacatcactcttccaagttttgcctcaacaagtgagcattgaagccatccaggaagtggaaatgttgccaaggccatcaaaagttactagagaagaacattttcaattacatcatcaaatgcactattctcaacagatcacagtcagtctagcacagggctatgaacgagccccttcctctcctaagcctcggttcaagagctatgcctacacacaggctgcttatgtcaccacttctgaccccacacggagcccacttccttcacaggtctgtcaacatttactctctgttctacaaaccaaagaatttcctcatccaagataactgaacatggctttcatttgaattttgcagtgccttttttcc

SEQ ID NO: 6426 - DNA, 572 bp, Canis familiaris
  misc_feature (1)..(572): n = a or c or g or t
gacaatcaacgaggacatggagctggannagcatctattcttacgttctgggactctagactgtacaaaatgggagttggatttatgcttgctcatccatatggatttacacgagtaatgtcaagcttccgttggccaagatactttgaaaatggaaaagatgttaatgattggtatgggccaccaaataataatgggataattaaagaagttactattaatccagatactacttgtggtaatgattgggtctgtgaacatcgatggcgtcaaataagaaacatggttatgttccgtaatgtagttgatggacaaccttttacaaactggtgggataatggtagcaaccaagtagcttttggaagaggaaacaaagggttcattgtctttaacaatgatgactggccattatctttaactctgcaaactggtcttcctgctggcacatattgtgatgttatttctggagataaaattgacggcaattgtacaggaattaaaatctatatttctggggatgggaatgctcatttttctattagtaactcggctgaagatccatttattgcaat

SEQ ID NO: 6427 - DNA, 559 bp, Canis familiaris
  misc_feature (1)..(559): n = a or c or g or t
aacatcgnntacgacatcagaaaaacctgcctggacagctatggcatttcaaggcnnagcggctcagtgtggacaatggctggatctccctgcacaacctgcaaatgcaagaatggaagcgtctgctgttctgtggatttggagtgtcttcataataactgaagtacttaaaatagactcatcattgcgggagaaaaatggacgaaatgaccatccagcatggtgaagaacaggagttggtgtttcttttgtttttgtttttgttttttaccacaattaccaaagtcccgtctgaggaaggtgtgtgggggttacctcttggacctatcactttgttcattcttgctaacctagtctaggtgacctacagtgcactgcatttaagtctatggttgttaaaagaagtttcccgtgttgtaaatcatgtttcccttatcaaatcatttgcgaatacatttaaatgatctcatggtaaacgttgatgtattttttgttttattttgtgtactaacatgatagcgaatccgnnnttttaatttattttttttcttgagttttg

SEQ ID NO: 6428 - DNA, 432 bp, Canis familiaris
  misc_feature (1)..(432): n = a or c or g or t
agtatttcactntnnaaactgttgtntactttnnattttaagtattcaggaaaatgagtatgattcttnnnaagatgtatgttttannnnnnncataagctctccctgtccagcagcccctgggtcttctctgtgctctatattcnnnnncagtatgaattacagaatgctgtgcatgtctgttagtaccaataccatgtgtatgtggtaggagttgtaaccagtttctggatctgtatggtactatgaaacacttattttataattctgtaattgtatgnnagtgttatgccaaaaatgtataaagaacaatagtttctgttgctgactgctgtattttaaaatattgtttctgagataatatatttagagttcctttagagtaattatttttaaaaactattgccaaatatacatcctgtaaaatgaata

SEQ ID NO: 6429 - DNA, 518 bp, Canis familiaris
  misc_feature (1)..(518): n = a or c or g or t
agtatatgaattcaactcaaacacgnnagccagaaagtngaaagatctctcaacccaaatgctaagatggaaagagccccgcccccagggagctgctccaagcagagccgtcaccgtggaaggggctgggaggccaccgaggagcatcggggagcaagatgggctgagcggcaaagcaccaactgaggacgcgagcccgggttccagaaaccaggatggcaagctgggcacccccaagagcagaagcccagacctcccaagcagggcttcccccagactgctcccagatgaaccattgactttcggatacggaatcatgttcctttctcgtgttgactgctgggaagccccataggaagtgctcaggacttcctgacagggacgccgaggtctcccctcccatcgggtgtcatctgcatcccctgccctgagcgcccctcagatctcttccctgataaacacactcaaagccacacaccttcgtaagtcacctcacatctgttgtaaaagaagcagag

SEQ ID NO: 6430 - DNA, 549 bp, Canis familiaris
gcggctggcacaggaggccagagtctggctgagttacccatgctttaagaaatgggatgggtctccagtgggctcctgggacgtgctgctcgaagaagactatgaggacaattggataacgtgtgaacacaggacatattcataccatgattatggatggcgccctgtatcctctgggagccccaacacaggcatgacacagtccattccccagcaggaagaaaactggatgtgtaccatcctctgaatgcctgtgccctttaggggaaagagctctggaatcatccaggccagccccttcgtttggtgttcgggagggttcccttgatccaaggggcagaagactgctctgaccccaagggctagctgatgccagacctcaggccagaatgcaggtcccctgccccctcttcccctagtctatgctctttctcctctcagagataacgtttccctgtagccctaccctgctccagcctgttctctgacaataatcacggagacacaatcagagagccttaaccttcttctgtgttcctaatgggaggg

SEQ ID NO: 6431 - DNA, 560 bp, Canis familiaris
  misc_feature (1)..(560): n = a or c or g or t
ggtttcaaatcagnntctcccannnnnagggaccttgcatactggggttgangtcctctctggctgcagcctggtcaaaataactcccttggaagcagaaaaatccacacacaccccattcattcccacacaccagactcgtgcactcccatgagttcccacccgtgagtacacgctacacctggcccctaacaaaagcagccccatgcccacgcccatcgagtactagcagagtcaaagaccagctttggagaagggctgtgacagtgaaggggaagagagagggatcagactccccccccccccatcctctggcttgcagaaagcaacaacagtggggggggtgagccggctgacagacaccagcaagtacacgggcagccacaaggagcgtttcgacgagagtggcaagggcaaaggcatcgcaggccgggaagaggcgaccgacaactcaggctatgtgagtggctacaagggtgctggcacctatgataagaagaacagcaaataaggagtaaccccaacagctagggtcaattagccatcaacctggcctctta

SEQ ID NO: 6432 - DNA, 504 bp, Canis familiaris
  misc_feature (1)..(504): n = a or c or g or t
gaggtcaacaggcnaagtnctcttgctctgtgaacttctcgctgnnnaaggaggaaatcacgtattcctggaagttcgcaggaggaggtccggacgcaggaccagtcctacttccgagacatcctgcaggcccgaggacccctggtgcggatccggccggtgcagcccaagcaccgcgggacctactgctgcgagatctcgcaagaccagttccccgtggcgcgggtctatttctttcttaacgtgacaggtgcgcccccgcgtggggagaccaagctgcaggtctcctttcggaaagtgctggactgggcgccccgggaggcggagatnnncgaatcttggaggccaagcctgggcgagctgctggccagttccggggctctgacgcccagcaaccagtgtctgctcgccgccgccgcggccttagcatcagccagtgcgacgcttgtggttggatgttctttcgatggtacttccagggcaactaacaaaggtatctttttc

SEQ ID NO: 6433 - DNA, 633 bp, Canis familiaris
  misc_feature (1)..(633): n = a or c or g or t
gactcattgctgcccgagccctgcacctgacacctcagcttccacagcctcccagtcnggtnncttccttccgatcccctccaggggactaccttctcaagtctagttgggccctccccgggtcatctgaacttagggaagtcctctccctcccgagaagggtctcctgcctgccttcctacatggtttggcctcagctgcccaggtggtggccactctggcatcccgcatccccacagctgctggaatcctgcctgctgcccagcgtcgatgggcttatgaggcctgagtggtccctcgagagctttccttgccttttgtgggaccaccgatacctcaaggacaatgtcttccccgtgacagggtgtgaggggctgcagaatcgtcagcatagccacttagcgctgatacttggaacccagactctccgtgacccctggcttccagctgcctcagcctctgccccgatgcctggctccttgcccctgccctacacatccccagaagggtcctggagccaaccctgccccaggatcaggttccagcctctcagtctcagaagagggggggagcaccccccatttctggccttttctcacgtggctccaagttctgctctgtnnnnnagttcca

SEQ ID NO: 6434 - DNA, 501 bp, Canis familiaris
  misc_feature (1)..(501): n = a or c or g or t
gataagtatggcatctgtgtccctgnaacnngctcaaggaagtgctnncgaagctgcaagtgttgagatattagggagttaatgccacctctttgtcctattttgatggagaagataggaggtagcatggggctgtgcccatatcactctaggcacaggacctctctggcacagtattagggtgcgggtggggagcacctgaagggggatcttaatgatggaagcaggcagagcctggtgggtgattctggcaacagaaaattgcaatcatgcaggggctgggagggttaagatgaactggggccactggagactggggggcaggtctagatatgcccctggtctgggggtgggagngagnngatttgggggtgggggtgggactggagggcaacgctgaaggggttaaacaggtttttgctcctcatgaatttgtttgcctgggcccaggattggagggcttcacacctatacccttgtgtatacaagaatcagatttat

SEQ ID NO: 6435 - DNA, 530 bp, Canis familiaris
  misc_feature (1)..(530): n = a or c or g or t
aanctgcaagtaggcccgaaaaaggactaacggtgaccagacatcccagtttcttccgtaggnctgagtcgaggactgtaagtcatcctggtcataccgggtcgggcgcctacagttgccggggagaagaccgggagaacttgcaggaaaagacttagctgtatccaacaattcagatatggcggaaatgaagtccatgttccgcgaagttcttccaaaacaagggcagttgtcagtggaagatataaccacaatggtgctgtgtaaacccaaacttttacccttaaaatctctgactctggaaaaactggagaaaatgcagcaagcagcccaggatacaattcgccaacaagaaatggcagaaaaacaacagcagcaaatcactcactgaataacttagcacttttacagaaatacctaccttactattaacaatagacaattatttgcatctgtgtgctgaagatagtgaaactaacagtacttttaaataatattaaaaatacccgagactaatgaaacttgtgaat

SEQ ID NO: 6436 - DNA, 646 bp, Canis familiaris
  misc_feature (1)..(646): n = a or c or g or t
tgctgcagtttcagattgnngcacattnggacacactnannnatgagcaagcttcttacgtcttaactagagcaggcttgagttacatctataacactgtacagcaacataaaccagaacagggctctttagctaatttgcccaacctagattctgtggcactgaaggctgcaatggttcagtttgatcgttacttgtcagccccagatagcctgctaatgccacagctgaactttcttctaagtgccacagtgaaagagcaaatcataaaacagtctacagaattagtctgcagagcctatggtgaagtgtatgcagctgtgatgaatccagtgaatgaatacaaagatccagagagcatcctacaccgatcgcctcagcaagtgcagacactcctctcctgataatcttacttgaatgtgtgagcaaaacattgcatccctaagactctaaaggttttcttgttctttagtctcttaatcttcgctttgaaatgtgatggttacgatttttttgtatcataacattgtaggtccaataattcttttctttgatcacaataacatggaagtaagtaatataatttcaacctgagttagtgttgctctgtatctgctccttannnnngatgatctgttttctgtga

SEQ ID NO: 6437 - DNA, 451 bp, Canis familiaris
  misc_feature (1)..(451): n = a or c or g or t
tnngtatccnnnaatacctccacccnnnnantataagagaaagggggagcagggaagcaatataacttctgttctaaggttctgttctcatttattactagctgattacagagcatttatactggaaagtgtgttggagaaatttaaatactgagaggttttgttttgttttacggtgcctatttagagttggaagttgaacagctgttgcattacatactttgcttttttattgaaattttgaaatcaaacatgtcttgatttttctgttctattgctatgttcaggatgttttggaaaggggggtgggggcagggactctttcataagcacttgttttattttgtgtgtgtggagtataaaggttacaaccttattgtaaaaaataataaaatgaaacaatcaccaccaccgtcattaaactgtaacttgtctagtaaattgtcactag

SEQ ID NO: 6438 - DNA, 628 bp, Canis familiaris
  misc_feature (1)..(628): n = a or c or g or t
gctttgccannggcatcgtgggggacgctggtgtgcgtggcancgcccagcagcctcggctattcgtgggcatgatcctgatcctcattttcgccgaggtgctcggcctctacggtctcattgttgccctcatcctgtccacaaagtagcccttctccaagcgcaccagccacagaatatgatgtaaagaccaccccctcattccaaaatgaacagcctgacacacatgcacggggcagctgccccccacccccagtagttggtcttgtaaatgcacagtgtcctagtgcccatcgtctgttactccggccttgcccccgccccgtgccgtggacatctgggcccactcattccccatctaggcccccgaccagtgaggatgcaagcccctggccgcccccactcatctgccctagagtgctctgtgtttaaggatgaattagacttgtcatttttctcttcactggatgtttattatttataaagatttgatctgttcatacgtctgtggagcagccctccgtctcccaactatatagtaaccttaggtagtgttgcgttatggggttaccgtttgccctgaggctcggatggaaccactctcgtccagccccggctgtccggggcc

SEQ ID NO: 6439 - DNA, 576 bp, Canis familiaris
caggcttcccagaactaggagagagaggtgagggtggtaggtgtggcttgggctgaagaggggaggggctgagctaagagacctaaatcttggaagggttcccaaaggaagttgtcatgtggcttcttccacactgcattttcagggagtccaagactgtccaagaacaaaaaatgacagttgatcttgggggtgatttggctgcagaagctgtactggcgagctttgctctcaaaataatgttttttcagatacataagtgattttatgtttattcaaaaaaaaaaaactaaacatgaagattagtatccaataattccactgtctgcaaataagttcatcgatagaattttcaagtttatgctgtcctttttgctgtgctgggtgcctgttttatacacacacacgcttataattgagattgtaaagtataagcattttgatatccgcccttttcactcaatattattttgtcagctttatcctattacatgaacccctttttaaaatctcatttttaatggccttacaaatgaatcattcccctcttggtgggcatttaagttgtatctagtg

SEQ ID NO: 6440 - DNA, 584 bp, Canis familiaris
  misc_feature (1)..(584): n = a or c or g or t
acattnnggtttcaggagtttttcccagtgctcactgtgccacagggttcattccattgnntacattgtgataaatgtggtggcatgtttcttttgcataggttgggaaatggtactgtgcagttagattgtgtctgctttagttttaatggatatcacctatgctttctccacactaggtaacttcatgacagccagtgggactacacaggttctcacttggcccaaggccaagcacacaatcccaaaggaggccctcacccagactcatccaggatcctgagaacgcagccctgacaagaaactcttggatgtagtcatcttcatcctcatcttcatcatctttgttgtcttttttctgtagcctgagttagttgactgagtgggaggtttgcttggggctgggaagccaacgtttaactgacactaatccgctcaaagatcagttgtgtagggatccctgggtggcgcagcggtttggcgcctgcctttggcccagggcgcgatcctggagacccgggatcgaatcccacgtcgggcttccnnnncatggagcctgcttnnnnntctgcctgtgtctctgc

SEQ ID NO: 6441 - DNA, 587 bp, Canis familiaris
  misc_feature (1)..(587): n = a or c or g or t
aagatgcactcnntactcaaagctgggaatctaagggcagaactggcaaggggnnnntaatgcttatcaataaagaacactgagtctnnaagcctaacctccagtcccttaatgtggccctgagtgggctgccagcaaccagcaagccgaagctgacaggtgggagagaaccagaactatgctttccctttgctgcccaggcctagaccttggccagaagaaagacaccttaaaagaccatgggacaagtccacattagagctgatcagcctctggcgccccctggtggtggacagggaaacaactctagtcaccttcgaagaccagccagagaaaacggacctgaccggctacctagcctgcccagtgtggcccacctcacaaaaatgggtcctttgtcagaggagaatccatagggttcacacctcataaggtccaaacctacacattcccgccaagcacctctgcttcccacactggggccacctggatccaaagcagggttgaggaggttctcaacctgcaggtcctgctcagagatggccatcatctggtgggctttggtgggggaactgggtagagcagaa

SEQ ID NO: 6442 - DNA, 602 bp, Canis familiaris
  misc_feature (1)..(602): n = a or c or g or t
tttatatgtaagaggagaangaaattccaaagttcattttatggctcaaaaaacttttttatgtatnnatatatttcagaaaacaaacgttttaaatattatgatatgaaaacattcttcagtaagacaaccaactggagttggagactttcaagggtgctgggctgcaattcacagaacaataataacttcttaaatttgggtgtcttaaagattcttttgtgtaaatatgctgaggacagctttagaataatagaaaacatagtatatacatttttacacaagattcctgagcagaagatgtaagttggagaccctcatgactactttcaatttcctagttggtaagaactgactttatagcacagaatagtaggtgcattctgcagatgtaagaaaaaaggaaacatttctccttgtctttctgaggtttcttttcccaatagttaggtgcctgcactttcaaggtggaacacgagaattctcttagcactgaccaaacaacagacctgagatgcttaaaccttacagttagcaaagagcagaagagaattttaacaagtggaatatgaaacatgacctgttttatctctgtacctggt

SEQ ID NO: 6443 - DNA, 243 bp, Canis familiaris
  misc_feature (1)..(243): n = a or c or g or t
gacgccccccgtcctacccatccatctccacagtcttccaacangaagagcacatctttttctgntaaaaatcaaaggannnnnnngccaaatgaactaaaaataacgnnnnngaatcgaacactgacgccccctcggtctgtggatagtcttcctcggttacggaggttttcaccaagtcaagttcctattcagactaggtcatttgtatgttttggggatgatggagagcctcaattaaag

SEQ ID NO: 6444 - DNA, 508 bp, Canis familiaris
  misc_feature (1)..(508): n = a or c or g or t
tcacgtattgggctgcatgttcctttataatnnatnngtnngtaacnaaggccttgggactgacagttctcnnaaacagtgaattacctgaaagagaatgctaatttttaaaatcatgtcacacacacacacacacacacaaaggaatgagttaagtctgaatccctgaattaaataattttaaggatcaaattacatgcatgcagtatggatagataattccttgccatttaattaaatgattctccaattcttctcatcaggataaaactgaaggacaatggatgccttttgggtttttaattttttaatattgcactttatagtacttcataagagacaattgtcttaattaaagccataaaataccaataatacatatattcagggcttctgaatatagtcaatcaataagcagtcatgagtcattcctgttttgtattgtttattgtaaattggagtttatctgttctgttttttattgcatacaattattgttctagacaat

SEQ ID NO: 6445 - DNA, 568 bp, Canis familiaris
  misc_feature (1)..(568): n = a or c or g or t
gggatgttagaaaaatcgggttgagattcgctgaggactttagggtctggctgggnacacagaancgtgtaatacaaggggctagcggtctgcacaggcagacgcactgagcctgcctgttaggaagctaggacagggtagcccctctgtggacagcatcagcacgtgcaggctgggcctgaaggcccctcttggacttggaagtggtacctgtctgtgaacctctctggtctgccgctttcacacacacaggggctaaacttggggggggggtcagcgacaagcccccaagaacgtggctgtggagttgccttgggctctacctttgtactagttttgggatgttgggcaccttatttgcacttttccctctgtgaaatggaaggatggactgttggggccacagaacacagctctatttccaggtatgtgcttggagcccggaaagtagcagtgcgggagaggaggagggaggagagtagatgaaccctccttgagccgtcacgcaaactgtgagggattttctagtgaaactggagcttgagcccacactcgctctatcgcagca

SEQ ID NO: 6446 - DNA, 450 bp, Canis familiaris
  misc_feature (1)..(450): n = a or c or g or t
ggtnancagnnnnnaggcatccnnccttcaagcacattttcnnnnnnnntattaaattgtcacacatnnncatatatgaatgatcaaggaaaatgnnnncgtggagagnnngnnnnntccactcagaattcnnngcantgcatgttaannnagatctttgaaggtggaaaactccaattcatggttcagnnntntgaaaacatgtgcccatctatgaatctcttctcccatggaaccangntgnnnattatatgttgtcngnaccaatcttnnnnnaacaagannnnnnagnnnntgccnnnncttnnnacnntgactcagnnagcaaaaatcctccatcacccaatatnnnnnaatttatnnnttgtttcttcccnagnnnncaacataattacatctgcctctgagtnnnnnncagaatnnnnnaatnnntcacttttcttctcctat

SEQ ID NO: 6447 - DNA, 567 bp, Canis familiaris
  misc_feature (1)..(567): n = a or c or g or t
ccccaacnagggcnntcagcttttcctgctgccccagtctaangagagctactggttnntcggctgatgagcccttgggggagggactttggtaggaccatgataaagtggtgggcttggttctgctcagggtctctatctttcctcctcttcctctgtgacaatggatgtgtttgtttataagggggttgcatctgggaaccctgataactgtctacatgagtctgaaaagcaaaagtcttccttgtggcttctctgacccagatgtgcctaacctcagtagggaaccaggggacccttattatctcaggagcttggacctgatacggggcttctttcttggtagaaatgggaagaggcaatggaggatttattcctcccttgggttttggggagagccaagccctgttggagagggagtaagggagattatttacctctcttatttcctaagcaggctctgtaaggagcccgggtgaggaagaaggctgttttcaccaatgacttgtaatttcatgattaaaaaaaaaaaaaaattctattctgcaaattagatattttctccca

SEQ ID NO: 6448 - DNA, 500 bp, Canis familiaris
  misc_feature (1)..(500): n = a or c or g or t
cacaatgtnnncagccctacctcagggcnttggcttctcctactttccaccaaccttccttgcttgaacagttatcttctcagggctgttatgcagatttcagaggttcctttcgaagattccctgagtcaagcaggcaagttgcgtagatcttctgttttctttgagacgaaacatcctttctggaggctcagaatctctttggctgccatttcatgtgtcagcatccaatttgtggtgaacctccatagatagnnnnncnntcttttttaaaccctgttcttgctgctcacattctcctaggagagtttctgttctgaggaagcaaagaaaggattggggggatgcacagctataccaggaactgtaggatgatagcagcaaagcttcatcatgttttaccctccacatctcagagaggtaacgatccacaaggttcagctcccactgcattttcttcttgctccatctgcaagctggggcagttaagcaggatatgc

SEQ ID NO: 6449 - DNA, 488 bp, Canis familiaris
  misc_feature (1)..(488): n = a or c or g or t
catagnntgtgcnnnaaannctgactatgtgaatctgatcactgaactggcacccaagtatgcagcagcccatcccaaaacagagctctgatcctcggatgttggtacaccattaatgacagatacagtgactctccaggatatggacttgttggntaagagtaaccaggagttgtgctgtatgtggtctcacattttttgttttggttaacacaaccagccaagaattggttacttggaattacagtgaaaactgttaatattcgtggtgtcttatatttccagtgtacccaacctaacagtgcctttctcataatttttataaggattatatatctttctttgcctgtttccttaaaattgggaaagatgaactactgaaaaatggatggaataagtcaattcgaaaaaagaagacagtgctcagaggcccctctctgtgcactgatttttaattaaatatattggtttaagacaaaagaaacagt

SEQ ID NO: 6450 - DNA, 534 bp, Canis familiaris
  misc_feature (1)..(534): n = a or c or g or t
tttaaacttacattgagataactgttcccttcatcctgaacttttgccagaangcagaaacttaatctatttttatatagaaagattaaatactccagtgatatttttaaatatcaacctataagcactttagaatgtaaaataacagtgaattgtttaaacacaaagacccactattttgagcatttttaatagagacttggtctttccatgtaaatactgaaaatttttccttcaatctcaggctctgtcatctctgaagcagcacctgtaaaagtcctgtatgccctagatgtgagcacccctcacagtgtggcagtatttaatgaaacttatgggggtaactttattttcagggaggagggttgtgtatacacaaaggtatgtatgtatattttcattgtaaaaaaccaatttaaaacttttttctttgtgttaattgaaagatttttgtagagccaatgaagctctttaaagttgtttcttccaaagaacaaagccaggtaacaacatttaaatttcagtgatacattt

SEQ ID NO: 6451 - DNA, 491 bp, Canis familiaris
  misc_feature (1)..(491): n = a or c or g or t
aggtgccnctcaatatattttttaatatgcttcttanngatcccacttgcagttctggctctttgctctcttcacttaatggattgcagtcactctcctacactttgaaatctagatcaagagcccactttatatacatataggaaatagaagagaacagatgttctgccacaagatcagaatcaatcagctgaggtcctgctgtattttacttttatttatttttgggggtgggtggatgggtatctttgcgagctttgcctctcagacttgattcatccttcctatattaatgtttgtttcctcatttttggcctaagctgtatcaaggtaaaatgtagcctcctgtttttatttcttctatatcttcagtttatcaggcattgacatgtgcttggctctgccctggcccaagcttctggttctagcagccccattctaaatgaccccaggtcttggtaggataatcccactatcccttcagagatcaa

SEQ ID NO: 6452 - DNA, 489 bp, Canis familiaris
  misc_feature (1)..(489): n = a or c or g or t
agannatncgctgcannnnngcacagnngcagctggcgcagatgacccgaaacccagagcannagcagcggctgcaacggctgcagcggctgcccgagctggcccgcgtgctgcgcagcatctttgtgtccgagcgtaagcntgcgctcaccatggaggtggcntgcagcaggatggtgggnagctaccctgcagccatgaaccccggagagatggagaagcacatacggctcctttctgagctgctacccgactggcnnngcctccaccacatccgcacagacacctacatcaagctggacaaggctgctgacctggcaggtgtcatcatgaggcttgcccaccttgcccttgcagaggcagcactgtgagccttgcggacactggcctcaggctcctggcccacccgctgtgtccattnnntcccattaggaacacgatgcactttcctcccttctgcactccccaccaggctttctggccagtgtg

SEQ ID NO: 6453 - DNA, 608 bp, Canis familiaris
  misc_feature (1)..(608): n = a or c or g or t
ggtacattcntgcatcttctcaccccctcaccaggaactggggatttgnnntgagatatggcaaaacttgtagataaccccacagatgcgaagaaagtctgtggaaacactgactgaatggattgctttcctgtggctccctccaaacctggccaagctcagcttccggagcaggaaccagcactgtttccgtgccctccccacagcttttaaggtcagggaggaatggaggcaacatttttggactccacaggggcttactggcactgttctggaagaggcaagcaggtcaaacaaccaccctggccccaagaaggggccgtaggtagctctgaacatcagcagcaagaccaccaggtgatttgaggaagaacgtgacaccaagtggctcatggagaaaacaaatctgatgtaggaagggattatgtaggagtaatgtttggacttgatttccccacctcctaatcaagaatgaaaatttggatctgcccctcgagaggcccaacatcttcagaacttggcaggctgtccttccatggctgccacagccttgggctcccaccggcttcctgcgtttggtccactgatcatgttgccatcatgtgtat

SEQ ID NO: 6454 - DNA, 592 bp, Canis familiaris
  misc_feature (1)..(592): n = a or c or g or t
tgtccacttcagaagactctcgcagaggntaaatgtgtgtgagagaacttgctaaactttaaatgttgtatatattttacgaggtattcgttgctgcttcagatgttgatcagcggagataaatcttcaaggtgttactggggagaagcctggctctgaaatgaagcaggcagctggaggttgactttgtgagttctcctgttgggagttctagaggcagaggagccttggccctgctttggtggtggtggtggggatggtggcttgtgcacttgtgtagcaatctgggaagtaagaagggaaacagggcacagctcagcaagaagggaagccttcagccaggatgaagtggtgcggcgaacgtcacccgccgtgaccctcaaggacctgtcttccccttttttctggggggtcgggtgaggtgagaagaaaaatggctaattgttaaaaagtacacgtggagaaagtcgtaaaactgtaaggctatctgaagtattgttggattctgggaaattctattttccttattctctgtattttccaaattttccataacgaatatgtattntnnnatcagaaaaataaaaannnn

SEQ ID NO: 6455 - DNA, 588 bp, Canis familiaris
  misc_feature (1)..(588): n = a or c or g or t
aaactagacattccgaaacagagcatccagcgcaacatgnctgccatnnagcgcttccgtaacatggacaagagggccacaaccgaagaccgcaacacagccttggagacgctgcaccaaaacagcatcactcaagtgtctatttatgaggtggacaagcaagactgtcgcaaattttgcactactggcatcgatggagccatgacaatttgggatttcaagaccttagagtcttccatccagggccttcggataatgtgaagctgagtgagcctcccagatccagcatgacaaactgacagactgacaaactgacaaatgtgctgacacagccccaccgtgtgcatggtggtgaggagagccagccgcaaggaaacactgaagacacatttggcgccaatatcgtttgtgtgtttttttgtttgaatataagtggtgacagtgttggttttttaaaagcagcagtgatttgggggtttttttgtttgtttgtttttttgtttttgctatttcattccattcttgaccaaagcttctctttaagtagtttattatggaaaattgtcacactaacttaaaggaaagggt

SEQ ID NO: 6456 - DNA, 647 bp, Canis familiaris
  misc_feature (1)..(647): n = a or c or g or t
agtatatannatgctgttagagatnactttatttggnagtgaaagcatttctgtaattattctttgcattaatatttaantcttttgactgtttctcttgtgtagtagtgaaatagtngctgatgcttatgaaatttgttgtatttatatcaataaaatacagtaaagcagagtaattttggaagtctgnnacaattttagttcccaaaaagaattataacattgtccctccacaagtcacattatctgccctgagcattggaagatatctatttcattattttcagcagttacttcatttaaagaataaataatgttaccatcaccaggtatttcaaatattgacatgggtctctttcttcaaatcctttggttttggcatttatgtgtccatattagaatgctgcttttctaggaacatatttgactctttggactgagaatgtttagtagcaaagatgaacatttgttaagcaaagctaggaaatgtttactttttaactttacagtttctttatgaagaattctacatttctaagaagaaaggtgtttcatttttatgcaaaggtattcnnnnnntatgtatttttatgaaaatgctttataaacatgtaatcataatnnnnnntctcttttgtgctttttat

SEQ ID NO: 6457 - DNA, 515 bp, Canis familiaris
  misc_feature (1)..(515): n = a or c or g or t
tcatttnnncttcctttgattctttnnnaccatgaaatagtgcatagttngcctggagaatccactcacattnataaagagaatgttgatggctgcgtcgangccnntctgtgtccatccacgcgtgcagggccgctgccaggagctcacagggggagggagcagcctgccccccacccccaccccggccggtccggccgcctgcactgcacttgcggtccccggaacgggatcccccaccccgacaatgatgattttgcaaaaatgaaaattctgttcctttatccattgaaatctggggagcccgtgtctcgatgtttccgatcctggctacttcccttagagaaaataagtcctttttttctggccttgctgatggcaacagaagaaagggcttttttgcgtggcccccggccagtgggtgtgggtgcccagggtgggggggcccctgcggcctgggcccccttgcccatggccagcttcctgctgatgaacatgctgtttgtattgtttta

SEQ ID NO: 6458 - DNA, 491 bp, Canis familiaris
  misc_feature (1)..(491): n = a or c or g or t
ctccctcagnctagggggaatctcacagattcccagcaccagcttttgaggactgtcgnntgctggacatggggggtatccagccgtagcnnagtactgaaggcagggtccttgctgaccatcctctgggtggaaagcatgaggggacagagccagcacttcagaaaccaggtggcttgcagccccccaccctccaccggcttccatcctgcagaaacctacaggaacaccgccaatggactcccagggcaagccagagagcgcagtggatactgatcccccacaatagggaagtagtgacccatgccactgtcctcgtccccacccacacagcccccaggggagtgacaagccaggattggaacccagttgtcccacttgtcccactcagaaagggaagcggaaagagaacggagggctggattcctttctgcagtggcagctctctcgtagtggaagcctagtgtgatatgtacccatctcatccacgt

SEQ ID NO: 6459 - DNA, 462 bp, Canis familiaris
  misc_feature (1)..(462): n = a or c or g or t
tgttccgtgtgtccacgtannnncagannaagctcttaggtgtgccacccacctcccccccacccctgcccatgtatcagggtggcgtttctagaagcaaaaatttatatttattattttaaaaatacacacttttcgactgaagcctgtatttggtttgggtgcccaccccacaccctcattctgtgcacttgaattcagctcaaggatttagtgttttgctttgggtgactgttgtgcaaagtctcccccaggaagtcagaaaccagtttcagttctttgacttgggggtccctaccccgctctctgggtttgggagtgctgcccacatggggactgctggggcctgtcacccggcccttgccacacacggcccccacgtggatgtcagagccacctccctttctttgctcctccctttctttgatacaccttttcaagaaaatgaaaaattcttactga

SEQ ID NO: 6460 - DNA, 516 bp, Canis familiaris
  misc_feature (1)..(516): n = a or c or g or t
catatgannntatcattaaaggtacttgagcatatgttgctgtaggtggtgtgacattcaaatgtctaagatctttaaacgattcattcttaactactagaatgtgaagagaaaagtctatcaaaccttttaatttgataataagttttaaaaaaaaggatatacccatagctacagcatatcatctgcttatttttcacattgaggaaacaaaattagatttaaccatatggagtttatttgaattcttgaaaagagcaacacttaaaacccccttnnnaaatgagatagtcttggattactgaacaggtgttttgttttcaattcattatttcatcaatagagatggtgatcttgatttggtcgtactcttcttgcttccatgtctctgcatgttatcatggaatgtacttgtatatactcaagtaatatacagagtatgtgtaattccggcttgatttagaagctaagtccgttactgagtaacattttgcaactttattccagcaagtacta

SEQ ID NO: 6461 - DNA, 485 bp, Canis familiaris
  misc_feature (1)..(485): n = a or c or g or t
canngtctgctcatgtatttgatatctggtacaatgagtccttcttcatccccgannatatacaagtgtcactgaaaccaggtagtagcatccgaccgggcatggtgcctatcagcaggatcatgtctctgggagaagatgaccaggacaagttcagccagctgcaacagacggagctgcctgagggccctgactccttctccttctacaatgccaaagtcaagacagaacagaagcacaattacttgaaaaccatgatgggcttccagcaggcacacagaaaataaggcttcatcatcagtgccttgaaggacaagacccccagtaactcccacctgctttagtggagctgctacaccacctgcccagagttccaggccctctgctccaaggctggggcccagtccggggaactcacagtgacctgcctcccaacaggaacatccttcacaggatacccttgctcacttcacagaacactttgg

SEQ ID NO: 6462 - DNA, 140 bp, Canis familiaris
  misc_feature (1)..(140): n = a or c or g or t
tttgcannagnnnattttttaagcctcaataaaggagttgttttaatcacttcgccaaaactggtccccacttggggcgcctggctggctcagatggaggagcatgtggctgttgatctaggggttgtgagtttgaggtg

SEQ ID NO: 6463 - DNA, 550 bp, Canis familiaris
  misc_feature (1)..(550): n = a or c or g or t
taaaacttcctctgctggtccatcaacagcaaaattgagnncagcaacccaaaacaacagtgggaaacctgctacctcatcaactaaccagaagcctgtgggtttgactggtctggcgacatcatctaaaggtggaataggttccaaaataggtgctagtaacagcactgcaccagctgtaccattgaaaccacctccacctctaactttgggcaaaactggcctgagtcgctctgttagttgtgacaatgttagcaaagtaggtcttccgagtccaagtagtttagttccgggaaacaccagccaactcagtgggaatggaaatagtgggacatcaggacctagtggaagtaccactagcaaaagcacttcagaattaagcagctctctctcagcatgccctaaaggtccaacttcacaagaatcacagctcaatgccatgaaacgattacagatggtcaagaagaaagctgcccagaagaaactcaagaagtaatgtggccaagtaggtttttatatcaaattaccctaagatcttattattaagaca

SEQ ID NO: 6464 - DNA, 602 bp, Canis familiaris
  misc_feature (1)..(602): n = a or c or g or t
ccagtgtcntggaangcccccagcagctgccccgtgnnaagactatgggacccctttcagacccagcgatganntctnnagccaccctgagcagacgaggcagagagggcaaatcagactccctcgtacagtttgctctccagcacctgctgtccacatctgtgccacaggcattgtggacttttgatggctcctgggggcccccagaaaggacaagaagcctttctagggaacctgagagggatgcaagaggcaggtactttgagggggcgccctctcacccaccagctgcctggtgcccgcggggtacggcttggtcacttgctcaggcctgctcgctgcactctctctgccaactgcaccccagctcagtgggcattggaggtgccaggggagtgagggtcatggccaagactgctggcagggggagagctgggatgggcaccagccccctgtgctggtccaggagagggagggggttctcactacggtaccaaagatgtaatcacctaggtttacaagtatttttaggactcacattaactcacatttatacagccgaagtgctattttatatgccatcaaatttgcctgtgtacttt

SEQ ID NO: 6465 - DNA, 549 bp, Canis familiaris
  misc_feature (1)..(549): n = a or c or g or t
gtggtcacgtgtccccgccagccttccctgggctgcgtctataagctggtgtctgtggnaggccaaccacgaatgaagctgactgaggaccccgagaaacagacgctgcctgggagcaaggctgccttccggctcctgggccctgaagggtccctgctgttggatgtgctgcagctggcagaggagccaccaccccaggctggccaggagctgcgggtctggcctcatggggcccgggaagcctgtaccgtgaggcctgccggcgtggagcccctgctgaggctctgggtccagcagggacagctgtgcgagccgctcccatctctggccgaatctagagccttcgcccagctgtccctgagccgtctgagccctgagcacaagcggctggagtggcccgcgctctaccaggttgcgttgtctgataagctccgggccctggtggacagactgggtgcgggaggatcctcgtgagaaccatgcttggggggcagccctggggacttggtggtttagctcccatatcgggctccctgcctggaacctgct

SEQ ID NO: 6466 - DNA, 418 bp, Canis familiaris
  misc_feature (1)..(418): n = a or c or g or t
tgtggatgaaaagggatnnnattatggggagtcaggtggtcacaggggcctggnnncagcccacctcctggatcacctttccttccatggagagtgagcaaggctcccaccggggtagtggcctctggccacccacaccccaccagaggagaagcaagcactgggaccctacctccagcacccctcctcatctccatgagcagcacttgctccaggcgtcactgtgggtaactgacggcagtccccaggtgtcccctagcctctgagaagagcagggcttaagtctaaactgagcccaaagaaaaccgaacaagcagcccatgagagtctgacaggagttgtcagtgaccacgatggtgtttggagaagtgcctttttctgtgctcagtatgcattttctctgggagtttctttagga

SEQ ID NO: 6467 - DNA, 491 bp, Canis familiaris
  misc_feature (1)..(491): n = a or c or g or t
aaacagccgcccgggaccaggccaaggaagagtacagagcgaccgtggagcaggccgtgtctgtccgacagcaggctgccctagaaagtgccgccaagaagagggagcgaaccacaagtgacccgaggaccacagaacagaaacaagagaagaaacgactcaaaactgctaagaagcccaaagacccagatccgccagaaaaagatttcaccccttacgactacagcaagtcggacttcaaggcttttgctggaaacagcaaatccaaaccttcttcccagtttgatccaaataagcagaccnnnnnnggcaagaaatgcgccgcacccaaaaaacttaaacagtcgggaaacaaaagcatgtcctttccaaccggaaagtcagacaggggtttcaggcacagttggccaaagagatagtgttggaggagacccttggaattccccagtggaccggatgcaccaaatggtggtgctggttttgtacagact

SEQ ID NO: 6468 - DNA, 533 bp, Canis familiaris
  misc_feature (1)..(533): n = a or c or g or t
tcagccacatctgtgcctgcctttgtnngnngatgcccacgcctgtacntgcancagtaccctgccccaggaccccacagggtggggcgggtggggcgcaagcctccttgtaggggatggcagggccgaggggcaggaggcacacttggccccctgcagagtcctcgggactctccatcacagaccacaaaggaacttcgcgtgtcatgcaggcgaggggcgggcacagtggaattgaggtgtgctcagcaacctcagtccgtggctcctccagcctccgggccacttcagtgaggctgcaccatctccatcacgggcctttctcagctaggaagagtgggggcagggtgcagagcaggaccgtgcacctcgcctccaaccagcctggaagactcaaggccacaggcctgggcccacctgtcctgacaggctgcccctcctcctggggcctcagcccatctgtgggcacatccaacttggggccttgagggtttctcaatgaggggagatggtacccgctgccaaaattttgg

SEQ ID NO: 6469 - DNA, 611 bp, Canis familiaris
  misc_feature (1)..(611): n = a or c or g or t
ccagattnnctgagaagacagagtgagggtagaatttaggccagancnaggttnnagctgagaggcagaagagggctcagcagctccccctctacccagatttcattggtggatagggaatgaatnnaggatcttaacagtccttgagctccagcctggagttttggagttctggagagtctccaaaggtagaagattgtgctaggtagaaatggatcccccctggtgcccacacctcagttactgtctcacgtggggaacccccacctttctagctctggcctctatgtcccacacatcctgttcctagcctctctcctggtttccttgttcttgattcagttattctttcagtgtttcctgggcctctgctcagaggcaggctaccagctgagtcctgtgggttaatgcaggatgatgagagctttaaaattggaatgaccccatcaggggaagtactgaggagggaataatcagtgctgcttgccacctcacgagcttgggttggaaagtgtgaataggagtttgcagatgaagaggggcattccagccaaagggaaaagcctatacaaaggccaaagaggtnntgaagggaggaggtcattggggtt

SEQ ID NO: 6470 - DNA, 108 bp, Canis familiaris
  misc_feature (1)..(108): n = a or c or g or t
gcttacanatcatgtnnctactaaaatattgtacagaatatttttccctctgtctaattagtgtgtatatggataagggatcttgtgatgatcatttgtaaacttaga

SEQ ID NO: 6471 - DNA, 590 bp, Canis familiaris
  misc_feature (1)..(590): n = a or c or g or t
gccccgaatctgccctgcccnggtnntggttcggctactcgatgnnnnnnggtctgctggctgccacgccggtggccctgtcccaggaacctccgaagtctggctgtcctgtgggcgtcagtgtgtctgcaggggctagggatggttgaggggggctggcccctctagcctttggggtcccgcctgggcagatgttgtcttgtgtatgtggctgaggagcagacgggccggggggtctctacagctccttcggcggctctgcggtgagcacagctgggcgcagagccctggctccctcgactcgggccgtggaggtgccagacccccgccttgaccaagtcactgcctagcagccccccctgtcccttctttggtccacatgctcctctggtgtcagctccctgtgcctctgtgggaggggcggctgccctgtgttgtgtccggggccgctgcagctggggcatctgaagctgccagcagccctgagggcggtatccccactctggtcccgagttttgaccagacctgagtccacctggtcccctgtgttgtgttctggtcagaggnnnnnnctgtgaaatgcagtgttt

SEQ ID NO: 6472 - DNA, 518 bp, Canis familiaris
  misc_feature (1)..(518): n = a or c or g or t
taaatgagctcttctgcagatagcacattcagtagncttatcctttcggtggaatactgtaccatatgctcaactctgaaaaccttgaacacggccaaaatccgtaaagattataaaagcaaactaagttctgaacctatagtacatgtaggcatttatatagtatagcaattcaaactgacctgcatccattcaaaacaagttcctccttaaaccttatttttacttgaaatctgttagaagaaacagcaaactgaaatttgttttatgcacgagttaataccactggctcagcaaatacaagttagtttgctttgggcaggagactttttttgtaatggaagaaatgcactaccaagtaagaggacagatttttgcttagtgcaggaggccctttattattgctgcagaaaacaaaagcctggcagagttgatgtttgacattctccttgactgaaatctacatgaagcttcttgctgggtttttgtataagtaaacattgtcaagctgtgaaaga

SEQ ID NO: 6473 - DNA, 695 bp, Canis familiaris
  misc_feature (1)..(695): n = a or c or g or t
cacacattagagcccctcatcccacgacatgcactcaatnnnnntagtgtaatgattgatgaggacatgactgcccgaatcagcatnnnngacgtcaagttctccttccaatgccctgggcgcatgtatgcacctgcctgggtggcccctgaagctctgcagaagaagcctgaagatacaaacagacgctcagcagatatgtggagttttgcagtgcttctgtgggaactggtgacgagggaggtaccctttgctgacctctccaacatggagattggaatgaaggtggcactggaaggccttcggcctactatcccaccaggcatttccccccatgtgtgtaagctcatgaagatctgcatgaatgaagaccctgctaagcggcccaagtttgacatgattgtgcctatcctggagaagatgcaggacaagtagagctggaaagcccttgcctaaactccagaggtgtcaggacacggttaggggagtgtgtctccccaaagcagcaggcctctggttgcctcccctgcctccagtcatggtactaccccagccatggggcccatcccctgcccccatccctaccactgcagcccccaaaggggctaggctcagagctttgtcacttgccacacggtatctcccagcatgggagggaccagccctgcctgtcacaataaagtttannnnnaann

SEQ ID NO: 6474 - DNA, 625 bp, Canis familiaris
  misc_feature (1)..(625): n = a or c or g or t
gtnngtacatcnttcaaaaagaacagattttatatgtnnaccaaacgagaaccagaagatacaaaangtgcagattctgacagagatgtttttaatgagaaaccttctaaagaagaagtcatggcagctactcaagctgaaggacctaaacgagtttcagacagtgccattatccacacaagtatgggagacatccacatcaaactttttcctgttgagtgccctaagacagtggaaaacttctgtgttcatagcagaaatggttattataatggacatacatttcaccgtataattaagggcttcatgattcagacaggagacccaacaggtactggtatgggaggagaaagcatatggggaggagaatttgaagacgaatttcattcaacattacgacatgacagaccatatacgctcagcatggccaacgctggatcaaatactaatggatcccagtttttcataacagtagtaccaacgccttggcttgataataagcacacagtgtttggacgagtgactaaaggaatggaagttgtacaaaggatctccaatgtcaaagtcaatcccaaaacagataagccctatgaggatgtcnnnatcataaatattactgtcaagt

SEQ ID NO: 6475 - DNA, 517 bp, Canis familiaris
  misc_feature (1)..(517): n = a or c or g or t
gcggcccnnnggctaccacagcctcggtgtgcctctacctgccacaggctacgaggcnntggnngatgccccgtgccccacggcgctgccaccacagccatccgaagacatngcgtccagtggccccgaggactgcagcttcttccccaacggggcctttgaccactgcctgagtcacatcccgtccatctacacggacacctgaaggaaggcctgccggcacctgcccgccctgcaccacagacactaccttgcccactagccacccgcttccaccctccgtgcacccagcctgagcaaccaggccaaagctccccacaaactcagggcaccaggtctgcagcggctgccctgtgctggccgggaaggatcgcccaagcccgagctgggtgctctgaggtgcctgcaggatccgtgacctgcgacattctcttgactgtgttttcctttcctcgccccaatggttttgaaatcacagacctcgtgtatataacatgtacagaacttgttttccatt

SEQ ID NO: 6476 - DNA, 669 bp, Canis familiaris
  misc_feature (1)..(669): n = a or c or g or t
gtatccaaagaggtgacattgtgattgcaaaaagccngagtgatccaaaatcaaacatttgtaaaagagtaattggtntnnaangagacaaaatcctcaccagtagtccatcagatttctttaaaagccataattatgtgccgacaggtcatgtttggttagaaggtgataatctacagaattctacagattccaggtattatggacctattccatatggactaataagaggacgtatctttttcaagatttggcctctgagtgattttggatttctacgtgacagtcctaatggccacagattttctgatgattagcatttattcttttgactattctctcctattcaagtgaatttattattgccactgaaaccatgtacttactaataaactatttgctatttagttttagtcatttttaattgttaaatgtaaagaataagcgacacaaccacaagctctattagttccaaatagatggataaaaatgtaatccaaaataagttatctatattttgtgatataaaaagatttttaaggaaaaaacctggatgacaacctcacttttgaatttttggttttatagctatgagtcatcttttcttgaatatgccttgtacttttgctacatttacaagtcagagtagtaaccagtcttgtaagtaca

SEQ ID NO: 6477 - DNA, 226 bp, Canis familiaris
tcccttccccccgcccccccccgggtgtaaatagattgttataatttttttcttaaagaaaacgtcgattcacaccgtccaacctggcccatcccccttctacagctgtgttccccctcctgtcctctgcccctgaggtctcctccctcctctccccaccctggagggctgagggcgtgggggtgggggagctcctgatgtcttggtttccacagtaaggtttgcc

SEQ ID NO: 6478 - DNA, 184 bp, Canis familiaris
  misc_feature (1)..(184): n = a or c or g or t
ttaactgtaagacatttctaattatgactactgtcatnnnnnaccatttgaaatanccaattcagagacactaaagatttcacaatcttcattggtattgtaacaaaactactattgtatgggttttttttgtattgctgttaagtattgttttgtgtgtgtgtgtgtgtgtgtgttggaacct

SEQ ID NO: 6479 - DNA, 617 bp, Canis familiaris
gcactgttggtgggaatgtgaactggtgcagccactctggaaaactgtgtggaggttcctcaaagagttaaaaatagacctgccctacgacccagcaattgcactgctggagatttgccccaaagatacagatgcagtgaaatgccgggacacctgcaccccgatgtttatagcagctatgtccacaatagccaaactgtggaaggagcctcggtgtccatcgaaagatgaatggataaagaagatgtggtctatgtatacaatggaatatcactcagccattagaaatgacaaatacccaccatttgcttcgaggtggatggacctggagggtattatgctgagtgaaataagtcagtcagaaaaggacaaacattatatggtctcattcattcggggaatataaaaattcgtgaaagggaaaaaagggaaaggagagaaaatgagtgaaaatatcagtgagggtgacaaaacatgagagactcctaactctgggaaatgaacaaggggtagtggagggaggtgggcggggggttggggtgactgggtgatggacactgagggggggcacttggtgggatgagcactgggtgttatgctatatgttggcaaattga

SEQ ID NO: 6480 - DNA, 491 bp, Canis familiaris
  misc_feature (1)..(491): n = a or c or g or t
caaaaccccctcattacttaagaagaccaaaaacgaactggagatatgtgcagagaaactgaannagaaaagaaaggaaaagcaacagaggaaaatggaatgggtcaggtaccaggaacaagccaacatccttcagaatgactttaatggcaaagtgattgagctgagaattgaagccttgaagaactaccagaaggccaatgacctgaaattatcactatacttacagcagaatttggaaccaaagcaagcatattttcatcttcctgggtcccgaggtactatgagcaatacaactacaggcagagcagctaccagtaaaaatgaatcgaagaattcatgtgagaattctggaatcaaagacctacacagaacaacaaggagctaaaggaagtcagtttgatgatataggaaagaggctcttttttctgaggtcactgccagatgaagctgtgaaggattagaaggatttcactccatttgctttggac

SEQ ID NO: 6481 - DNA, 661 bp, Canis familiaris
  misc_feature (1)..(661): n = a or c or g or t
tgtgannncgagtataccaagtatttcactnntnngtttcacattatgtagatgccagttatttaaatgagtacaacgaattaatttacnnaagacacataganctgctttgtttttttggaaaacaacaggcaaggctccagcaaccaacttttggttctttgtgttcccctgaaactaaaaaaaaatgagcccctggtttccttgttaactcatcctttcattgatccatgtagttagccacaaaaaggatggctacagaccaatggattgaccctctcatttgccacgacaagggtgagcctatcatgagttaacaccaagcacagttcggagcaactgacttctgtcaaagtttatcctattaaacgttatattttgcttttatgtttcaataaccgtgtatgtaaaaaacctggatatttaaattacaaccctagactataaatgtgtttataataagatatggagatttccttcagtagattgtaaccataatttaaattattttgttccacactgttttttatatctgtcatgtacattgcattttgatctgtaactgcatgacccgggggtcctctgcagagctatttctttctgtgtaaagtagtgaatccatcttgcttttgccttatataaagcctacagttatgaaagt

SEQ ID NO: 6482 - DNA, 514 bp, Canis familiaris
  misc_feature (1)..(514): n = a or c or g or t
cccaatgnngagaccctcaaattctatgtagctggtctggtgtcctggggcccccagtgtnnaacctatnnaatctatacacgagtgaagaattacattgactggataagacagacaatgcaggaacatagtacccccagtatggactaatccatacaccagaccaccagtctctctccaagggctatgaccaatccgttgctttcctctcaatattcacattatttcaccatgactgagagaatacttgggagtgtgatttaaatagaacttgatcattgggatacttagctggaagtagcatttgatcatgacatcgtattggtcatttggtgtgatctgaatctgtggggtcctctctcctaaataccaactatggatcacaacatgagaagggttgtcctagggagttctctttcctgatgattgcctggtgtttcagttctgactctgaaatttattgttgggcataccnnnnnttttttgtttcccnnnnnnctgttcgaagtttcat

SEQ ID NO: 6483 - DNA, 611 bp, Canis familiaris
  misc_feature (1)..(611): n = a or c or g or t
tgtcagttccntnnctcgatgtagcatngtcaactaccnnnnnnntgtgctctatgacgaatacatccttccgccctgccacatcgtngactaccggactaggtnnagtggcatccggaagcagcacatggtgaatgctacacccttcaaggttgcacggggccagatcttgaagatactcacagggaagatagtggtgggccatgccatccacaacgacttcaaagcccttcagtacttccaccccaagtccctcacccgtgacacctcccacattccccccctcaaccggaaggctgactgcccagagaatgccactatgtctctgaagagtctcaccaagaagcttctaaaccgggacatccaggttgggaaaagtggacattcctccgtggaagatgctcaggccaccatggagctgtacaagttggttgaagtcgagtgggaacagcacctggcccagaatcccccaaaggactaatggcagtgggggcgctgtaatgtgggcatacagaggcggcaccacacccaggagaaaccgggccatggaccagtggacagctctaccagctccacctcttcgcaagctcaagctgtgagggagagagagg

SEQ ID NO: 6484 - DNA, 608 bp, Canis familiaris
  misc_feature (1)..(608): n = a or c or g or t
tgacaaatgtaaagatttactgtgcacatgataaatcntattaagagtgnctcaagccaaaaagaaagtgaactttaccatatgtgaagaatgttgaaatgtactattgtgcattcctgtactactgttgcatttcaagtgtcaccttgcttctgtaactaagctttctcatttattgattgcttggtttttcttaatatcttaagattccagatccaccttgttttgttttgtttttattgtctacaaaccttcaagtgaaaatactggttttagaatactagaggcagtcattggctttatcatttaccttttgaggatcccatgcctgatagtgtggagtgtggtctggtttcttccaactaggacaaccagtattcataaatgtataccctttattgaaacttgctcctgactatcaggagtcaggccatctgatttatagatgattctaaaacaagagtttttgaaaaagcttattttatacacatatattatatggagaaacaaatgtttttattaaatgtttcactgaccaaaataattttaaagaaataaatgttacttatatctttcaggaaaaataattgtagcaggtgatctgtaaa

SEQ ID NO: 6485 - DNA, 637 bp, Canis familiaris
  misc_feature (1)..(637): n = a or c or g or t
tgacacctnntattcgctctcctacctttactacagtgcagtnnnnngnnnangatgnnnnnctgctgnaataatcatcagcttcgtaacaggtcgccagagcggcaaggacattcaaccactgctaatnaggccagtttgcaatttattttgcttttggtctgagaaatacaaaagactgtgctggtgtggtgtccagcatgacggtgggacggagcaggaaaaccctgagggcggcagctcctggaagcgaggggctgaatctgtcttacagaatggactcaagcaagaaaccctgggccataacccaggccacgatcccaaggacaagagcttccacactacggcgttggagaaggtcacccgcttctaagtcgcgcaggcgagccaaggcgcacacagtctgcatcccgcttgcctgttggtcagaggacgtgggtggtgtcaccgctagaagacaggcttgtcggattctatttatacttatttatatttacaaacgtgaaggctgctcccctgggcattcccgggcgttctttggaagaccccaactttcaggtgagaagacgcagcccagccgtaggtgccctggccacttcctcctgggccgagttannncggggcgtcaccccagtgc

SEQ ID NO: 6486 - DNA, 510 bp, Canis familiaris
  misc_feature (1)..(510): n = a or c or g or t
cagttttttaaaaaagcattttctgaatnnncataattaatctctccaactcattaagtcagaatataatatgaagttccccaaggaaacaaacaaaatgaactgtagaatatctagcaaatagttaaagaggcaatttgttattaggacatactcgggctgcttccaaatgcaaaaactctattgcaacatcttgtttcatctttccaatacatgtacagtacccactagaggatagagctgcatcagttaaatttatgacttttgaaaattaatgcagtctatagacaattttgtgttttatttgattaagaagtgaagtttatgccaccaaatgtataaccaaattgtaagtgcttaaaaagcagtgctcagagtatgttcagttcacagtaagtagatttattggaataaacattttatggtacattctcagaaattggctgccaactaaaatatgtttgacccattttgagtgagtaaattggaannnaaatttaaaaggacaaa

SEQ ID NO: 6487 - DNA, 573 bp, Canis familiaris
  misc_feature (1)..(573): n = a or c or g or t
aaagctctatcgnnntttgtgggtctctnnaacatagnagannnaaatgataatattcaaantgtcattaagatgtttcagaatatcagtaatatcataaaaaatgggactatgtccttaattgatgaggatttcaatctngagccgcttatttctgcattccatgaatttgagaagttagctaaggaactacaagtccaaatagacaatcaaaatgatcctgaggtgggacaacaaagctaatatgaataaccacctgcctttgatcagccttatgttcccaaagagccctgagtagtgctttggttttcagagtctggtttatgttgtaactttatattttaatgctgatgttaactttgttcaattcttaatttgagctggatcattttgtggatgccaaatgaatattagagctgaaaacatatttgttatttgtcttgctgtccagattgcaatatttttcagtattaagcttccaatgaactgagtcacctgtgcaagctaccctgctatttgttgtttaaacatatggttctctattcaagtctgtgttttcaataaaggtnnnnn

SEQ ID NO: 6488 - DNA, 636 bp, Canis familiaris
  misc_feature (1)..(636): n = a or c or g or t
acaaagagtgnnngctttcagatgccatngattacacttntatgggcatnactatnnncattnnnntaaagagtnngagttgtataaaataagaaataaatacaatactcaatttcctttcatattagcatcatcaaattctaatctcacctttttacccttcagatagttatngaggagactcttttgtggtagctgtttcatcttttttgttccttcatatttttctcttataagtttatctgatattgtgatgtgttcatgaaatatattcagttattatactttgctgtagtagaactattcatcatggatatttctgctgccaataactaaattgtttgcaaaaaattaggtacttagtttattcttactgatcagctctactcttttggaccaaagcaacatgagagcaaatactttcacacctgttaggatggagttgcaactgtcatacatttggaatgttatgatcccaagcagtctttatataatttgaattacattgtatgttaggtttttgataaaatttggccaatttttacagaagaaattatttctctgatcatttggtcctatctatttaggaatatgtaaaactggatttttttttttttnnnnnnnatatgtgaccaa

SEQ ID NO: 6489 - DNA, 555 bp, Canis familiaris
  misc_feature (1)..(555): n = a or c or g or t
cngtaaatgcgtgctcccatgcactgaataangccaacccacggttcccagagcagttagaatccccacatgaagagcgggtatctaacgccttacattctgtggaggtnnagctgcagaaattaactgagattccttggctttattatatcctacacccaaatgaagatgaggagccccccatggattgcaccaagagaaacagcagaagcacggtatttcgtatcgtgccaaaatttaaaaaggagaaagttcagaagcagaagacaagttcacagcctgttcaaaaatggggcacagaggaagttgctgcttggctggatctgctcaatttgggagagtacaaagaaatcttcatccgtcatgacatcagaggggctgaacttttgcatctggaaaggcgagatctgaaggtatttcctttgtgcttcttttctgcttttgaatatttcccctgcaaaacagaatcctttctcctgcacctctttcgttctgtgcttctagcttggcttatgtcatgcaaatgtgcagtaatctaatatgcattgtcctgtg

SEQ ID NO: 6490 - DNA, 644 bp, Canis familiaris
  misc_feature (1)..(644): n = a or c or g or t
ctatcagcgnnnaaggttttccatcttcttccaagaccagaagttacagctcatctcccatgttcagatgaaactcttgttttcaaaatggtaacagtttggtttctccttcccgtgtccctcccatggttcatgaggctctgagattgagaaatactttgcagttgactaggatttacatttatataggaattacccagggttttttgtttttatttttatttttattttttaagcatttttatttttttgttttcttttttttaagcattgaaagatgcacgtaaaagatccctatctcacagcagatatcccagctcctttcatcctctttttggagtacacttaagttactcagattgttttacattatctttcataagctaatacaactctgagggttttgttttgagtgcatacgtttgccacatggtgtggattctgcttaatgtaacttcttttgagcttaatgaagcatttgcttgcatgactattagtgctttgaggtcaatttaaaaaatgcacaagttataaatacagaagaaagagcaacctaccaaacctaacctaacaagaactccccctcccccagcaaaattttccnnntaagactgtgtggnnnncagttctgcttttcctgtacg

SEQ ID NO: 6491 - DNA, 668 bp, Canis familiaris
  misc_feature (1)..(668): n = a or c or g or t
cgagatgctgaccgccgccctgcagacagaccatgatcatatggccgttggtgcggactgcgagggcctgtcggcccagattgaggaatgcatcttccgggacgtggggaacacggacatgaagtacaaaaaccgtgtgcggagccgcatctccaacctcaaggacgctaagaaccctgacctgcggcggaacgtgctgtgtggggtcataaccccccagcagatcgcggtgatgacgtcggaggagatggccagcgatgagctgaaggagatccggaaggcgatgaccaaggaagccatccgagagcaccagatggcccgcacggggggcacccagacagacctgttcacctgcgggaggtgcaggaggaagaactgtacctacacacaggtgcagacccgaagctctgatgagcccatgaccaccttcgttgtctgcaacgagtgtggaaatcgctggaagttctgctgagccctgctcgagatgtgtgcgaagcttcgggctgtggccagcacattgccgcggccttccccgcgtcctgtcgacagacacagcttctcgagacccgccctgagcccacccgagcaccccacggggctgtgcccccggcacccccgcctggcgtatacctcttttcttttcnnnnnnattattaaatgtntcttnn

SEQ ID NO: 6492 - DNA, 591 bp, Canis familiaris
  misc_feature (1)..(591): n = a or c or g or t
tgacagggnctggcatagacaggcannncttctgcctctacnnnntctccnngtacctgggggtcagctcccctttcctggctgaggtgctctcnnagccctggcgcctctccaccagccagattgctcaattccagatccgcatgttcgacccagacaagtaccccaaacacctgggcgccggtggtggctttggccctgtggcagacgatggctacggggtttcctacatgatcgcgggcgagaacaccatcttcttccacatctccagcaagttctcaagctcagagacgaacgcccagcgctttggaaaccacatccgccaagctctgctggacatcgctgatcttttccaaggtcccaaggctgacagctgagggctggagacaggccagctgccctgtcatccctgcactgtggaggagggggcccatggttggctcgaggcacaggggtggccatgcacgggtgcccaggctccaaggacacctccggcagcaggccctccccaggcagatgctgctccctgagggcccaggcagtggaagtggggtttagcacgggggcggggggtggtggtggtggtagaaa

SEQ ID NO: 6493 - DNA, 559 bp, Canis familiaris
  misc_feature (1)..(559): n = a or c or g or t
tacatactcannnnnngggctctgtggctccgcccatgctnntactgtgggcnnnnntgagggtacgtnnngccatcnntccagcccagnnnnnngtgcatctcacgctgggagcgggggaagggaccagacacccnnnnntcgccctccacctgtgtctccaggnnnnnntgcnnagcctgtggccccccagcccagccctctcnnntccactcgtgccttgcttagagccagaagggacgaagnnnnnnnatccagagactggaagaggaggggagctgttgggaacggcggctacacgggttctgtacaggctgggtttctaacagggttggagggcttctcaganactccagggagannnnnagcaggagaggaggcnncagagggagaggannnnnaggtgtggctgccctcnnntcagcatcagaagggtgacagaaatggagagcagaggaccaggccaccnnctgcctggctttggcccttcacgnnntaacactaagcccanctccctgcccannnntgggctgtggctgctgggccccaggctgggtga

SEQ ID NO: 6494 - DNA, 700 bp, Canis familiaris
  misc_feature (1)..(700): n = a or c or g or t
cgcgccccactgtcagaccacnnaatgatgtngncnacangcagctttcagcttttnnagagtatgtggctgaaatcctgcccaagtatgtccaacaagttcaggtgtcttgcttcaatgagttagagatctgtatccatcctgatggggtcatcccagtgctgactttcctcagggatcacaccaatgcacaattcaaatccttggctgacttgacagcagtggacatccccacccggcagaaccgttttgagattgtttacaacctgctttctctgcgtttcaactctcggatccgtgtgaagacttacacagatgagctgacacccattgagtccactgtttctgtgtataaggcagctaactggtatgagagagagatctgggacatgtttggagtcttctttgctaaccaccctgacctaagaaggatcctgacagactatggctttgaaggacatcctttccggaaagactttccactgtctggctacgttgagttacggtatgatgatgaagtgaagcgggtcgtggccgagccggtcgagttggcccaggagttccgcaagttcgacctgaacagcccgtgggaggccttccctgcctatcgacagccccccgagagtctcaagcttgaacccggagacaagaaacctgaaaccaagtagcttcagggaaggcatgtggatactagaaagtg

SEQ ID NO: 6495 - DNA, 367 bp, Canis familiaris
  misc_feature (1)..(367): n = a or c or g or t
tttttgcttannntntatcgaagagatcatagaaaccagannnnnntccccnnnnnngcnnnnnncgggtttgctgggggaacacaccagcctctggttttttatttttttannnagccatcacctgagcaaccaagaatncctctgcgctgggggccggctgcccnctggtggccgtttgggggaaactgcagcccggccaggcagnngggaccagaccacgcagaaccccaactccactccagcctggcatccagcgccacagccaggacctgggggccaggccccaccctgcggtgccctagaagaggcagggtgtgtgagccaacacctgacccctttgccaaccggggtatggcctccagtg

SEQ ID NO: 6496 - DNA, 164 bp, Canis familiaris
  misc_feature (1)..(164): n = a or c or g or t
ttgaagattgtctttgagtgtaaggtctaccttntcagaaagggagttagtttgttatgntaaaaagtaaagtccntattcaataaaagctgaaaccatcttnnnagagtgtgatttctcnnngatnngnnaagaaggaaaagtgaagcagggtggtgttaagt

SEQ ID NO: 6497 - DNA, 139 bp, Canis familiaris
  misc_feature (1)..(139): n = a or c or g or t
tgagtgtaggtgccctggggctccgcagggttggacatccccnnnccccatgctgggtaggnnnctcctgggctggtgggcataaagaagaagcaatacagcatcccttcaagcatnttagcatannangggctccaag

SEQ ID NO: 6498 - DNA, 649 bp, Canis familiaris
  misc_feature (1)..(649): n = a or c or g or t
tgagcacgtgcgctctcnctcttncnagtttactgtgnnnannaaactgctgcacacgttttcagtnnnnttttccaacanctctctccatgtatatnnacacccagtgacacatgctcgttcccattgctcctggatctatgtgtatgcacagtgctacatatgcatagcagcttcctctcgtcccattgtagctctttgcctctnnagtctcattgatacatgcatcgctcttgctctgtctggcattacagttccagttttgcctctgggcaaaaccagccatcccattgccaaaacagttgacagtatctgtgttttgtaaagtgcatttttcaggatgcaatgaccaatagcatgtcagggctgctgtccctttggcaaaagcagagcctcgctgtgtaggtccagctgctgtggctggaggtaagctaggtgggatgagcagctatgtagtgttaacaaacttctgcctttctacgattggctggttcatggggcacaaaaaaatccaaccccagagaacactnnnnnaaaaaaaaaagctcctatttccaactctttatgcaactcatcttcacagattgtcctaaaataagataggtgatgtatgctgtatccacaaatcatctgtaacagttatgttttc

SEQ ID NO: 6499 - DNA, 539 bp, Canis familiaris
  misc_feature (1)..(539): n = a or c or g or t
tcnnnaacccagaatcagtgtattactgggcccagaagaaccacatccccgtgttgagcccagcgctcacagatggctccttgggcgacatgatcttcttccattcctacaagaacccaggcctggtcctggacattgttgaggacctgcgactcatcaacacacaggccatctttgccaagcgcactgggatgatcatcctgggcgggggtgtggtcaagcaccacatcgccaatgccaacctcatgcggaatggggctgactatgctgtctacatcaacacggcccaggagtttgatggctcggactctggtgccaggcctgacgaagctgtctcttggggcaagatccgggtggatgcacagccggtcaaggtctatgctgatgccaccctggtcttccccctgcttgtggctgaaacctttgcccagaaaagagatgccttcatgcctgagaagaatgaagactgaatggctacagctccaggaagtctccccctcctctatttattagcttgcacacctggtccctccctcact

SEQ ID NO: 6500 - DNA, 569 bp, Canis familiaris
  misc_feature (1)..(569): n = a or c or g or t
gatgaaaaggagagaaaannnagagatgaagaagaagcgagaaatgnacgaactaannagctattcatcattgatgaaagttgagaacatgtcttcaaatcaggacggcaatgactctgatgaattcatgtgaatggaggaaaggacctttgaaagatgtgaattgcaggacagtttcagatggtctgatttcacctgtattcagagatacaaaaaaaacaaattctaccttcattctgcacaaatactaccaacgttggagttaaaaaaaaaaaaaaagtgttcccttttttgctgacagaaaaggatcagatatttataatatatttggacttgaaaacagcatataactttaggaaagtgaaaatatttttgctgaaacatgtcttggtacctcatgaaagttggctgcccctatttctgggatagactttagaacaaaccagctctgcaaagtatttgttcctgtgatctgtccctgaaaacagatgtcttgaaaaacttttcatatttcttaaaatagcttcacttctgttaagaagaatgtatcnnnnngcaatatatgcgaa

SEQ ID NO: 6501 - DNA, 537 bp, Canis familiaris
  misc_feature (1)..(537): n = a or c or g or t
canntttttgtnnggtatggctcacttatttatcagttgaacttaactggcagaaatgtgtggatttataaagatctgacagatggtccaaataagacctacttgttgtattctactaatttttggattctgtgaatattgatattaattacacattatataattatatattaccatttagtataatgtatcaatatgaatattaataacatttattgtattctaatagctgtgtatgatttaattttgccttgctgaaaatctatgcaagctctcaatatgtgggtgtgttccggagggtctatcatctcagctgtaagtgggattgttactatttcattggttacagagtacgtgtaatcaggctcagaggaaataaatatgaatttactagccaatagttagaagggctaaacttctaaccaagttctgtgagaaatccctcagaaggggagaaatagtgctacagagagcaaatgtatcatcctgtttgtcctacataacttttagattgactctacaatccatgacaagcca

SEQ ID NO: 6502 - DNA, 404 bp, Canis familiaris
  misc_feature (1)..(404): n = a or c or g or t
atctttattgagcaaaaggcaactaagtgagaagatnnannnnnattgttcaaagaagaatgtcgctcctttccntnnacaagagaaggannnnnaacgngtctctccntgaccaaacttggatcaggctcctctgtgctttttnnaatgaggctttgantttcgnnnttccgtgttcattgttacattatccagttttatnngnnnnnnnctcagtttagccagaatcncncagcctccacgagtggtcactctccatacctgattgggttncncagcnnncatcacctgcagatgatatctgattaccctgcctgctgcctccagcaagaatcctgttaggtaggctagccagaagccccctgacccctgctgcttcctcttagccatcttccagtccctng

SEQ ID NO: 6503 - DNA, 561 bp, Canis familiaris
  misc_feature (1)..(561): n = a or c or g or t
ctcattttctgttnntaattaatactttgaggttnngcctcccatttaantcgggatcctagacatctttccctcaatttagagaggagaacccttgaaagtcaagcaggcattcanctgagttgaagcctaaggattgctgagcaccatgctgaggtctgtgccctccaggggttaggagttcatatacaggaatgtggtcatatatgaaactccacgtggccgggtagctctcttctgagctcttgaaaaaaaaaattgtcatttcagttgccaaaaatagagatccaaggtttgagaatattcatctgatttaaaagtcagatagcaaataacgtcccctgggagcccctcaaagctggcagccaccaagggactcctgaatgtaagggggacccggcttcactgtgttttcctgggaggctcccaaggccctggtgagggcctccctggggatgcctggtggtgagggccccaaaaagtgccactggagagatgctgacatctgtacattggttccagggagacagcccagggaccagggttacctgaagatgatcc

SEQ ID NO: 6504 - DNA, 564 bp, Canis familiaris
  misc_feature (1)..(564): n = a or c or g or t
ttctgtgtccaacgctcnncgatggaataatagtggccactgtcaaagaagaggaataacagacagccttagnaggtaaaccttgttggccggtcctgcccagaaggannnnacccgctgatgcctnnnnngtcttcccaagggcaggaggagagctaatgaccgggtgaggagccccctcccagcctcggatccgtcgacccagacctcgctcttcaggaagtggttgaagcacctgggcttcctcccagccggggacccaccccttggttccgaaacaggccctccaggtgcccagcccggcctcagctgggtgtgtctgccaatcgaaccgccagttcctctgtcccagggacccaaggtcaccttttggttcagtcagccaattagtcttacttataactcagatgaccttacaatttatcgtccaaactgaaactgtactcagaggtaattatgaaatcggctcttaaaaagttaaccaggaacaacagatacagagcaaatggatagtcaccgttcgtgaaacagaaagtgcccttagatatttctagaatctggagg

SEQ ID NO: 6505 - DNA, 433 bp, Canis familiaris
gaatagaagggctttcttgagcatgagatgaaaccctccaatcctaaaacaaaacaacaaaacaaaaaacaacaaaaaaactgcatgtgcatttcagcttttcgaatggcaaaagtcccctcgagtcaaatgagagtctagaaaaactaattctacagcgcagataacagaacattatatgacttgctcctagaaataaggggaaaaaaagtctgtgatttcaacagcattggacgagggctgtgaataggcaatttgtatgtagagatgtccaacttcactaattgaaacgtgaattaaaaaaaaataacttttttttttcctcacccatcagattggcaaaaacttaaaaaagcgattcatggcgaggatgctgggaaactggcactcgtgtagggttggtggggaagttaattgccaaattcttctgtca

SEQ ID NO: 6506 - DNA, 337 bp, Canis familiaris
  misc_feature (1)..(337): n = a or c or g or t
ggnnnagaannnaannnnctactgacctcaccccccccacatcgcccatctcttccctgccccctcaagccnangacagcccccaccagttcccccnnnnnnnattctgggggaggggccctctctccccatggccccaccttggcccctaccccctcaacttctctccaccccaccatccccctctggctggcttctctccccaccatcccgaccctcctctccgcctctcttttctgtgtctctgttcctctccctctnntcacccctccctccctgccccctctccaccccctccctgggctcttttttactccccctcacccctggctgatgc

SEQ ID NO: 6507 - DNA, 546 bp, Canis familiaris
  misc_feature (1)..(546): n = a or c or g or t
gaaaagaaaaagaatnnnnngggnnagagagaggnnnactatggattttatcagcagctctcaaatcatgacttcatcaatcctgatctgtaacttcgttgggctctatttacccaactctgcttaagggttagtgttggcccctttgacatgggggcttggaccatgtagagcaagtgcaggctgcagagcaaacctcacaggaggtactcctcataatcctagatgacaaagaccctgccttcaatcaccccatatgcttggctgctactacccaccctcctcttgaagtcaagacaaggaagctgtccagtgagaaggtaggcttctgatgacatggaggagaaaaaaaatgaaggagctactgccttgaagagcctgagaaccactggcgacaggaagaaaagaggactcaggcccagtcttgtcttgtcctttcagctccatgtctctaggactgacaccaaatgttttgactcatggaataagttgctgctgccagccaccagtaggagcaaatacagaggttctaatgggcttcaaaca

SEQ ID NO: 6508 - DNA, 546 bp, Canis familiaris
  misc_feature (1)..(546): n = a or c or g or t
aggcccagtgatgtcatcgtgaagaccccttgnnnnntggtnnatgatgtcnnngctcaagaaatagcagacaagatctacaatctcttcaatggctataccagtnnnaannagcaacagacggcctataataccctcctggatctgggttcccccaccctacatcgagtcctctaccattataaccagcactatgagagttttggagagttcacttggcggtgtgaggatgaattaggtcncaggaaagctggcctcatcctttcccagttgggggatctcagcagttggtgcaatggcctcctccaggaacccaagataagcttgcgacgtggctcccttaagtacctgggctgccgctacagcgagatcaagccctacggactggactggtcagagctcagccgagacctcaggaagacatgcgaggagcagaccctgagcgtcccnnncaacgactatggggacagcaaagatatctagcgccatgatgccagacggtggctgccaaaaggaagcaggaagagaggagaggaacatctgggt

SEQ ID NO: 6509 - DNA, 340 bp, Canis familiaris
  misc_feature (1)..(340): n = a or c or g or t
ctttttaggtgacttggntttgttttgtttttcnnaggtnanctactatgaaccagttttcnntaataaacgtgttggttctcttatagttgtatcctgatcaaaagtcaggaggagtaaggaacaaacnnnagtgctctctctggaccagttctttaaccttacgtcagcataagtgcaagaaaaacagaatcctcaatgtgattcctttttatgattctagtgtgattgctgaattatttcaattaaaaattcaaatgcttttaaatcagatttcatagtttttttttttaacaaaatgatcatctgcagcttaagaaaaaatctttctttcaatttg

SEQ ID NO: 6510 - DNA, 433 bp, Canis familiaris
  misc_feature (1)..(433): n = a or c or g or t
tatggagtttttcctgnnnnnnnnnnaatgtgcagannnnnnnatctcnagcntgtggnnnggagcagttccctcagatgtgtgaataaagtggatgatgaagggcatgaatgtctgaccttttttgtgatgtgggactctgagacaacttctgcattagagggaaccagaagctgtgtattttagtagggaaacatgccnnnnnnntcatctaggagttgtgttatttattattacttttaaagagtttatttatttgagggcggggttaggggcagagggagagggacaagcaaaccccctgttgagtaggggagcccaccttgggttttgatcccaggaccctgtcatgacctgaggcaaaggctgacacttaactgactgagtcacccaggcatcccaagaattgtgttatttaaaaacaaaacttgaa

SEQ ID NO: 6511 - DNA, 564 bp, Canis familiaris
  misc_feature (1)..(564): n = a or c or g or t
cagagatngatgaggatctggcttgggacagcgacaatgacagcagcagctcngtnntgcagtatgccggcgnnnngaagaagctgggccggggcccagccaagcccagtccccagccagcactgactgtcaaagccaaggccacgagctcagccacaacggctgccaccccgacactgcggcgcctagccctttcttcacgccctgggctcgagaggaagccggagtccctgtccaaagtcagcatcatccagagactgggcaaagctgcccttgtgcccgaggcccaggacagccaggtcacgagcaccaagagcccgactgtccgctgcgtcctgcctgaccctcctgcacctccggcctcccagcggccccctcgtcggcggtggcgtcgagcctgtagagactgttagctgccctcacccccaggctggagggacctccccagaccctgggctgcagcagggaacctctgctttcctgccctgggcatctttctctctgaaagctcacagctggtggtgggcaggggtccctgggaagggaggccggtgctgagaaaga

SEQ ID NO: 6512 - DNA, 590 bp, Canis familiaris
  misc_feature (1)..(590): n = a or c or g or t
tctgtaaangtgagaaagactcctgaaaatggggtgagnnaggtactggacgggctgtgggtgaagcagagatgcaggtggcacagagaaggctgagccctcactgttcttccacagggcctggtngacccccaggcccatctggctctgctagctgcccgaagacgcaagttgcagaagcagctggatggcctcatggcctggaccccatcagggggagaggaagagactaagaggcagcagaggctttcttccctccagctggagttgtcaaagctggacaaggcagcctctcacctccggcagctgacggatgcatgtcccagccccaaggagctctgagcaccagttcattaaccctgggggttttcttctccctcagacctgcctttgggacaaactgatctggcagcgtcagagcatgatgggtcctctgagaccatgcggctcacctccctcattttgtaaaatgaggaaacagactggcttggtcagcatcactgggtgtctttaagatgttcacattcctgcccagccttcctcctaggcagtgccacctggaagtttaggaatgagataaacttnnnann

SEQ ID NO: 6513 - DNA, 305 bp, Canis familiaris
  misc_feature (1)..(305): n = a or c or g or t
tctcctcgttggagaatggggatcatcctacctttccaagttatggnacgatagagagggcaacgtgagctgggtgcctcccacacggtggtgcttgataaatagtaccactcttttctctttggaatgaattgatcttggaattttggtggggatgccaatttagaaagacattaggaaggtctaagatgcctctaaaggtttttcctctcaagaaagaggaagaggggcacctgggtggctcagcggttgagcgtcttgcctttggctcgggtcgtgatcccggggagctgggatcctggtgg

SEQ ID NO: 6514 - DNA, 604 bp, Canis familiaris
  misc_feature (1)..(604): n = a or c or g or t
caaaaacntgtagtgtagtnactacaggtaggtgnnnacntagagatcactattnnngcnnncngataattttaagaannncggattacagttnntgtgcttnnnnagagtaatnnnnnggttctcacttcattgtgggttacttctgaccntcgtgtcnnaagcagaaaggttaagataaattagggaanattannnactgtttatactttcacagttcagtagatagcatctccccttttagactcagccatatctggatgggaagtcctgaatccttattatagagttaatatggttcatattagtacagtgcttctttatcaggaatggtattgatcatagaagtttttcaaaatatacacagcctgattccaggcctgtgtaccttaaaaagttaacaagcactgttctttaaagttctttggaagagttctaggtgataaacatccctgattaaataagaccactggtttagtactttgttttaatttgcttttattttcagtcttgaacatgatttagttgtcagatctagttgatggtaatgtcttccagttatgtatttttgtactagactgttgccnnctgggttttttnnctt

SEQ ID NO: 6515 - DNA, 519 bp, Canis familiaris
  misc_feature (1)..(519): n = a or c or g or t
ggtgcaaggcaggatctggtatccccaagaagttaggacacctgatggtcccttcccaaccagagaaagaatgcaagatgccctcttgtagggaggtgctcccttctgaatgtggcctagaaagggaggtgctgggccctgcctcaagaggtaggggaggagcatgccctgccccctaccccttgcaggccagattcccaaaccaccctatcctgcccacactccctcaaagccaacacaagagggacagggtccagccccctagtaggctcactcaaccccttcagccttgggggtggcgactaaaagaacggagcacaagcctagcccgtataaaccatagaaaactccgctcaaaagaccctgggaagnntntgcaggccaagctatgagcaccacgtcacagcaggtttccttattccttaactcaaagacacccctcaccctcctccactagccccgttctatggangnnnnnnctcctgtgccctccctggtttcttannnnnnnnactctcc

SEQ ID NO: 6516 - DNA, 562 bp, Canis familiaris
  misc_feature (1)..(562): n = a or c or g or t
tcaagctcccagttgagnataaaatcaggatcatcgnnnagaaaatctatggggctgacgacatagaattgcttcctgangctcaacacaaagctgaagtctacacgaaacagggctttgggaacctgcctatctgcatggccaaaacacacttgtccttgtctcataacccagagcaaaagggtgtgcccacaggctttgtcttgcccattcgtgacatccgtgccagcgtcggggccggttttctgtaccccttggtagggacgatgagcacaatgcctggactccccactcggccctgtttctatgatattgatttggaccctgaaactgaacaagtgaatgggttgttctaaacagattgcctctcttcaagatgctgctccaaacatttggccaatgtgcattcaggccgactgttggttaggaagtgtggggaagtcgagagaagtcaacccctgccctgaagatcttagaaagtaaagagcaagaattcccccagaagcctctctttggtcttaatccccaccatcatgtataaattaacataaatcatgcacaa

SEQ ID NO: 6517 - DNA, 685 bp, Canis familiaris
  misc_feature (1)..(685): n = a or c or g or t
gacgccccgaccccgggnnntcacactcgnngctcccattgtgaggcggtggtagnngcgtcagcatttgcgcgccggctcggggccgcgcggcgtgctgtggccgtgctggctgggctgcacgcgnnncttcagactgccccacaataaagcacaggccttgccgcgctaccaccctctccctgtcctttgtgtctggtttgctttgggaggcgacctggcgtccggtgcaggcccataggcctgaccccgtcatggttggtgtggggggtggctgctgtccagccgccccttgtggacatcctgtggtggcctggccaccagtgtcccggagagcatctgggcggctgctctgtgccgcaccccgaggccacggccatttggaacgggtctcacaaagggatcaggagtcctttccacgtttcgtaatgcagtatttattttcttcgggtgattgattcctttgacctggagttgtaggttttcaccaattaaccagtccaggagcgagcagacctgccctttctcactgacgctataccagatgctcccagagcaatgacaagaggggaaacactttattttttcacaattaaaataagagttgtagattaatacacagtgatcatgcatgggaaggagtgagatacacacttttattgactgtaaatggaatttaaaggaa

SEQ ID NO: 6518 - DNA, 543 bp, Canis familiaris
  misc_feature (1)..(543): n = a or c or g or t
atnnactgaatgaaacaatattattatgaattattattattattattatttgctttaatctggagattannnggtttaaatggattcaactccaaaatcaaagttgtgcatgtatgtgtgtgcttttttctttctttcttttttttttttttttttagttnnttgtnnnnnaagaatcttgttcaatgatgaatggttttctctccaatatcagaatctatcttcaaatattnnnnagcttctcattagttgtgttcatttattcatccattgtacatctaatgacagcnnncnnnnnaccctaaatgtttttgcatattcaatatttttagctagactgtcagcatcatgtgtcaagagtcagggtttttttttatttctttgtttcatttagcacctgccacacatattttttccaaatatttttagtttaaattttactttaaatacatagatttttaaaagttgaatctaaaacttatnnnatcaaccttatgatatttgatgtgtactnnnaatcaaagacttgnnaaaacaaaggca

SEQ ID NO: 6519 - DNA, 573 bp, Canis familiaris
  misc_feature (1)..(573): n = a or c or g or t
gaaattaaactnnnggcggccaactttgacgaaaagaaggagatcaacnngcnnaagcagctgatcttggaggggaaggaccctgatctagnagccaaacgcaaggctgagctggccaagatcaagcagaagaaccggcgcttcaaggagaaggtggagcaggcgnnncagcggcagaaagccagcagggctggccatggggggcgtccacccggggggcgtccacccagggccccacctgaagctcactcagccccagcgcccatccacggccagccctgagcgccacatggtcatgtgcctagcctgggattcctccccagaacggacagtcggagggcccctccactcccctggacctgcacagtcgctgtcagtgggacccaagacacccatgttgtgcactgcacagctcttccaccctgcagctcccagctggccccttctcagagcctctgccaagcatcaggctacagagaaggaaagaacactgactacaagtttgggcccaactccatacacagtgacgctggtcacctcggttgggagggcnnnnngatgctacagggcccc

SEQ ID NO: 6520 - DNA, 518 bp, Canis familiaris
  misc_feature (1)..(518): n = a or c or g or t
gactatgaagctgaannnattgccaannntggtgccaagatggtnnccgctgtggnctgtgccaacgtgcccaagatnnctgtcatcannnnnnngtcntatggggctggaaactacgggatgtgtggcagagcatatagcccaagattcctctacctgtggccaaacgctcgcatctcagtgatgggaggagagcaggcggccagtgtgttggccacagtagcagagaaccaaagagcactcaaagggaaacagttgtccagtgctgatgaagcagctttaaaagagcccatcattaagaagtttgaagaagaaggaaacccttactattccagtgcaaggctatgggatgatgggattattgatccagtggacaccagactggtcctaggtctcagtcttagtgcagccctcaacgcaccgatccagaagactgactttggcatcttcaggatgtaactggaacatacggcgtcttccgctggacatgtaccaaaaattaatagacttagtagcct

SEQ ID NO: 6521 - DNA, 671 bp, Canis familiaris
  misc_feature (1)..(671): n = a or c or g or t
gctggtgaagaannagaaggaaatggtgggggcattggtgtcagacgngctggatcggaannngccccgagccggggaggtgatctgtatagacgactgactggatcccaggnntgcccatcgcccagaccccgtgcccgaggtcganctccagctcaggctctgggacctgctgccaatcctccaccttccccaccccatgggccaccnctgggctaggagccnnnctgcccctctctacaactcctcttttcgggaagggccccttgtctctctccactcccgtgcacctttcccaccacgctttgaagcctgtgctggtgagaagaggtctgggtggggggtggtgagcagggtcttccaagtatctttatcccccacaccaaacacacacagcttcccagtaagtggttgtggagggaggaaagcggtggagcctcccccggtctctactcctgcaatacgagctccatctacagctgagctccatctacagccctgggggattagcctggcctggaccttaggaacttggggcaaagagctttgaagagaggaggggggacttcagagagggaggaagggaagaagaggggtggctgcatgtttccttccccttacctcttcccaaaaggagggaggagcagttataagggagggagtcggttgct

SEQ ID NO: 6522 - DNA, 198 bp, Canis familiaris
  misc_feature (1)..(198): n = a or c or g or t
acannnnnnnnnntcccttagnnncagctcctccctannnagtatatgtgtcaggatttgcagcattaatgaaagcaggtaacttgtatgtaatggatataaggtaacttaaatttgggttcaggaagcagggaatgtaactgttacattagagctgcnnnnccacactcacagtannnnnctatcactgtaaccaac

SEQ ID NO: 6523 - DNA, 465 bp, Canis familiaris
  misc_feature (1)..(465): n = a or c or g or t
taaacacaagtttnnnagagttgggttttaaagttcaatctgnnnnngctaaaggtaatcattgttaattggtaaaagaaaaattttatttaaattgcanntattaatctttttatcnggaactttgnacacttttcgactttcaaaacttaannnnagactttaaaagtgnnntagcagtnnnaagtannnnaatggaattattagagtattaatggnnnaaagcccaatttcactcaacacggnnnntannnagggattacttcactggttttataattcaaaagttatgtttgttaaacaccctaacagaaaagacattttnnnnnnttacagattcctgtattattgtgttaagatttgcctgtgctttggaaccttcataaaacacactttcttttggaatgtatttgattgataagaaagtttaaacactgttttcacctcaatgtagaaatacagtgg

SEQ ID NO: 6524 - DNA, 601 bp, Canis familiaris
  misc_feature (1)..(601): n = a or c or g or t
tgngtanncttcacttacagnntgcaggcccaattnntgctgcaccacccacagccnntggggttgcctgnnnnnncagtcatctgnctcatcaatgctgttggttactacatcttccgannngctaattcccagaagaacaccttccgaaagaatccttctgaccccagagtggctgaccttgagaccatccccacagccaccgggcgacagctgctggtgtctgggtggtggggtatggtccgccatcccaactaccttggagacctcatcatggctctggcctggtccttgccttgtggagtgtctcacctgctaccctacttctacctcctctacttcacggcactactggtacaccgtgaggctcgggatgagcagcagtgcctgcagaagtatggcctggcctggcatgaatactgtcggcgtgtgccttaccgaatcctgccctacatctactgaagcagctccactcaccccagactggggcatgtgcactcagcaccaggagactggactcctaccctgctccaagctccaacaagcagggatgaacagcccgggagaggtgctctggagcaaggagaaatgaagccagtgc

SEQ ID NO: 6525 - DNA, 273 bp, Canis familiaris
  misc_feature (1)..(273): n = a or c or g or t
cangaatgctgccagaaatttgancagctttctgaatctgcgaaagaagaactaatcaatttcaaacgaaagagagtggcagcatttagaaagaatctaattgaaatgtctgaactggaaataaagcatgccaggaacaatgtctccctcctgcagagctgcattgacttgttcaagaacaactgatctgccttttctatgaatgaaggacacgaatgtgaaagaaagccagtatcacttgcacttaaatcattaccacagaagatttattac

SEQ ID NO: 6526 - DNA, 607 bp, Canis familiaris
  misc_feature (1)..(607): n = a or c or g or t
gcccgggacggtgaggcgncgctggacaagacnggtgcggacgaggatgatgaggacgacgannacgangacgaggacgagnncgaccaggaccaggagatggagcatgtttagagcagaggccccggggagccctgnntgcggggagccactgccaactccagctttgccacacttggaccaggctctgtggcccagcccaggaggatggcggcccctcctaggccttcccaggcgtgtcccctcccccaggtccacggaggcacggctggaggacagcccctgcctgatgggcccccacgtttgctcttctctgaacggcctgggtccggaagtgccagtcgcccccgggccccgcctgcaggaggccgtcctcggagccatcactccacactggactcgggaccggcctcgtccccacggccgcctcatacaggacagctgcccccaggcggcctgtgaggtcccccaggggctggaggagctttttctgggacagtcaagctgcgggacgatattccagggtcgacacaggagccctccaggtgcaggctggctcccctgcgtgcccccagcgggcgaagcnnnnntggctccgagcggcaca

SEQ ID NO: 6527 - DNA, 164 bp, Canis familiaris
atctaattgaaatatatagtttaattatagtcttacaatctgaaaaatcaatcagtatgacagttaacttagaaacttagttacttgtacatgttattagtgtcttaatggatcttaaaatctacatttgcttcttttaagggtatttattaatgtaaatgaaa

SEQ ID NO: 6528 - DNA, 520 bp, Canis familiaris
  misc_feature (1)..(520): n = a or c or g or t
attttcagcccaagtgcatnggtnggatcttttagtatagtagccccacctagtggtgagagagaggacttcagtcagatgggcccaatagaaatgggtttccagaagaaaggttaaaaaaggattgtaggtagaaagacaaatcacttngactctnnaacaaagtagtgagcccaggagaacaccagcaaaggcatcccaggaacctgtccataaagccaggttggtcacgtgccctttgattttgaaccttctaggtccctactcgccctctattggagctggggcaggagagccaacttgggactgctggcccagccccaacaggaaacccccttcccaccaccgtctgcaggctcaccaccttatccctctgccaatgcagttttcttttcttttgtgtgttatctatgttcttggcctccacccgctcctaccacctttgtggattaggaccaggtcccacccacagtcagaaaatgacaccatgtacagtggcacaccttgaccagtcactaat

SEQ ID NO: 6529 - DNA, 525 bp, Canis familiaris
  misc_feature (1)..(525): n = a or c or g or t
tcgnnatgcaagnnnnctgtcaactccgnntcncagcnnnnnnnnnnnnacagtggtactaagcacaannncatgcnnnnagcccnnaannnnnnnnngaccatcanngcctnnnnnnnggcaggtgtgaaaggcnaagnaccannnaatannnnaaacacaggtcnnnaannnnnnacgtttcantgtgaaatctgtgatgtgcacgtcaacnnngaaannnagcttaaacagcacattagcagtagaaggcacaaagacnnngcnnnngggaagcccccgaaacctaaannnagtccttacnnnaaactacagaaggcagcacatccactgggggtaaaattagtattttcaaaagaaccttcaaagccattggctccnnnaattctaccaaatccactggcagctgcagcnnnnnntgctgcagtggcnnngaactcccccttcagtctcnnnnntgctcnnnnnnccacnnngttccaaacctccgcgctccctccagcactnnnnaggccagnncctgga

SEQ ID NO: 6530 - DNA, 483 bp, Canis familiaris
  misc_feature (1)..(483): n = a or c or g or t
gacgtgggctttcaaatcctgtgggacaaatttactgtaccttactgttcctgacaagacttggaaaagcaggagagctattctgcgtcagtttgcagttcacnncaaatcttttacattgaggcaaagattgaaaacatgtttaaccactagcaatcaagccacaggccttatttcatatgtttcctcaannnnnnnnnnaactattctcatnnnnaatggctaaagaaattatattttgttctattgnnnnggtaaaataaatacatttgtgtccaactgannnataattgtcattaaaataattttaaagagtttgaaggaaatattgtgnnnagctcttggttgcacatatgttatgaaatgttttttcttacactttgtcatggtaagttctacccattttcacttattttccactgtacacagtgttctgctttgaccagttagtctttattcttacatttaaatttcttattgcca

SEQ ID NO: 6531 - DNA, 616 bp, Canis familiaris
aaagacagttttccagaaagaaaatggcacagtaacagctgccaacgcaagcacgctgaatgatggtgctgcagctgtggtgctgatgactgcagatgcagccaggaggctcaaggtgaaaccgctggcaagagtagcagcatttgctgatgctgctgtggaacctattgattttccagttgcacctgcgtatgctgtacctaaggttcttagagatgcaggactgaagaaagaggacattacgatgtgggaagtaaacgaagcctttagcctggttgtactagcaaacatcaaaatgctggacctggacccccaaaaagtaaacatgaatggaggagctgtttctctgggacatccgattgggatgtctggagccaggattgtcgttcacttggttcatgccttgaagcagggagaatatggtcttgcaagtatttgcaatggaggaggaggtgcttctgccctgttgatccagaagctgtagacaacttgtgtcatccaaagcacaacaatactacatggattctgtaatcattatgactgaccacctgggtcaggttattcaatctgtttcattttctatttttttctaatatttttataagcagataagatc

SEQ ID NO: 6532 - DNA, 615 bp, Canis familiaris
  misc_feature (1)..(615): n = a or c or g or t
gaatggatgagaagacatgtgtttangaggctctatcagcagnnnnngagaaaaaaaaaaagatggtgnacaagtagacagacacactaagtagtctgtcaccattaatggtgtttcactgtaagccctaggagaaagtaagaagcaggaagacaacagtgtggaggcctcgtgactaaatagcaaaggaaagagacttcatcaaagtcttgtatcgggaagaggcctcaaagaaaaaattttgaaacccatttcatttaacaaatcagggaacaaaattcagaaagattagagattgctcccaaggctctacaactagttagtagcatagggaagactaggatcgtgccacctcactgagcaaccttgacacatggacttaaaaagcccatgtcaaaccttacctactattatttgaatttaaggagccatcagccgttgcacatggtataagagaccagagagtaattagtccactccctgaaggaacaattaggaagaaggatccatgtttctcagtaggctccacagccagcatgtggcttgaattcacaaccagagtttgcatgccgtaccaactgagccagccaggtgcctccatttctcccactttaa

SEQ ID NO: 6533 - DNA, 467 bp, Canis familiaris
  misc_feature (1)..(467): n = a or c or g or t
agcacttgatacagctacagctgtngnntataatcagnctacttctnnngntccaagtgctnnnnnnagcctcctgatgcttctcttcattgcagctgggtgactgaaaaatgaggctctcttccaagcattcgagccacagaaacccagcacatctgtatcatgatctcacggatactttgatcatgtcttaaccttcctagagtnnnctctggggctcccaaatcggagtcagggtgtgaagccattacaaatggcagcccatccctggcacggcacgggcttgtgcacacaggtgttcctcacaccccctctcctctctggcgtcctgagatgctgcacctgggaaccccttaaaaagctgcctcacctgagaccagtgcctccgggcagtggtactcagcctggctagaggcgggaacccaggcccgttgtgnnnaccagtatgtgtggcagggttattagtg

SEQ ID NO: 6534 - DNA, 445 bp, Canis familiaris
  misc_feature (1)..(445): n = a or c or g or t
gcgagccccctccctgccctaaatcccagcaacacggccaggaagtactggcacgcttagaagagacgtcnnaagacccagcaatcaacacaagatgcaggctgtcttcctgcccccccctgctcacagaaggggcgccactgctgggtttccgtccanngtccgggtgactgagtgtgcgggtggggagcggagagggatagtaggagagacccagacccaagccaggaaaaggccttttcttgcaaaatgcttgagatctgctggggagggaagaggaacagcgggagaggaaacagagcgggggaagatgagagtccacatgcatgacctggaaagtgagaagtgggaagctccagggaacaagcgagcgggcgggcgtggtgggaatggaaggagagaggaagaggacttgaagatgtgcnnctgggagctgggagtcaaa

SEQ ID NO: 6535 - DNA, 533 bp, Canis familiaris
  misc_feature (1)..(533): n = a or c or g or t
gcacaggcgcaggggcaggcannaccaccggtagggggctgcctctgcaccctacctgcccaannagactccaccctggggtcccaaatgccactaatgcccagacgcatggatgcaccccccacccagcccaggtctgtgggagttcctcctctcagagtgggagcagtttctggcccagggcccgggagccgcagcagccccagggtagggggctccaccccctctagctctatgcttggatgcagggagcatccttagtgcccccacttccgagggtcactcatgcactccccatcccttagggcttcccagcctactggccccccccgtggggatcagggaggagggctggggggtggctgggggccgtgcttctctccccacctccctgcagattcctgctgcttccaccgatacccttttgactggaatggacctgctgggcttggcagagggcaacccaaagaagggaccctgctgggcagctgggggagtggcatggaggcaggggccgaattctcagcagcaga

SEQ ID NO: 6536 - DNA, 319 bp, Canis familiaris
  misc_feature (1)..(319): n = a or c or g or t
actgagcacactgatnanngcgtcatacactgnnnncnnnctgnnnnnnnncgagaaatnnnnnnnnnnnnntagtattaggaataagannnnntcgcttgggtaattggtttgtttttgttttatggacactgtaaatgatgtaactaagtttccttttctgactttctgtgagagcatagagccaaatttgtggtccgctcagagtaaatgagtaggattgtataagcatttttactcaagcttaatttctgattcttttgttagttatttcttggtgtatgttatggatccttttaagccactttaaatgcttttt

SEQ ID NO: 6537 - DNA, 788 bp, Canis familiaris
  misc_feature (1)..(788): n = a or c or g or t
agtactcgcanagatannatcagagnnnanacactaatgtcnactgcccaattgagtgcttcatgcctttagatgtacaggctgacagagaagattcccgggagtaatattttcaacccagagaaacaagcatggatctccgccaaggtccatccaaactggagtgatgttagcagaccccatcttagagtgtttctttcttaagccctttgctctggagtaacttctccagcttcagctcaactcacagcttctccaagcatcaccctgggagtgttttgagacttttctcataaatgagggcagtacattcctgttttgctccgaagtattcagtaccgctcagtattttaaatgaaatgattctcacttgtgatttggtttgggatcaatagggaagcacaggcaccaaccaacatatacaatgtattgaaatgattttctcagaatttgaagtaggaaagttacccaaacacttctgcttccacttaactggcctgcaatattgtaagaatggcatatccttgttactgtgatatttaaaatatccacagtgtccaccttttccaaaagattctagtaatgatctagaaatatctttctcttatctgttatttatcaatttttcccagtatttttatatggaaaaaattgtattgaagacatttagtatgcagttgataagaggaatttggtataattatggttggtgattattttttatactgtatgtgccaaagctttactactgtggaaagacaactgtttaataaaagatttannnnnnn

SEQ ID NO: 6538 - DNA, 618 bp, Canis familiaris
  misc_feature (1)..(618): n = a or c or g or t
cctccacaggcgtcagacgtcggagtccagacccctgngttctgaccactgtggggatgcttgtgtgtctaggacgtgtccagcaggagatagatgaggtgatagggcgggagcagctaccagagatgggagaccagacccgtatgcccttcaccgtggccgtgatccatgaggtgcagcgttttggggacatcgtcccactcggtgtgccccacatgacgtcccgagacactgaagtgcagggcttcctcatccccaaggggacgacactcatcaccaacctgtcgtcagtgctaaaggacgagaaggtctggaagaagcccttccgcttctaccccgagcacttcctggacgcccagggccacttcgtcaagcatgaggccttcatgcccttctctgcaggccgccgcgtctgcctcggggagcccctggcccgcatggagctcttcctcttcttcacctgcctcctgcagcgcttcagcttttcagtgcctgcggggcagccccggcccagcgaccacggggtcttcaccttcctgaaggttccagcccccttccagctctgtgtggagcctcgctaggggcaggaaccaccaccccccgccgcccggctcctca

SEQ ID NO: 6539 - DNA, 612 bp, Canis familiaris
  misc_feature (1)..(612): n = a or c or g or t
gcaggaatgtgtcagggaccacagtgaagatggggtnnnngaaatggttgtnnaggttggagagatggtgcaggactgggtgcagagctctgnnnggccaggnnagccaccccagacgaccacaaagcagctagctactggaggggagggacaaccaggacatgcagcattggcagagcagaggcctcaaggccctgatgctgatgcagccagagaaggtttttgggctgagacagggaagggagtgttgctgtcctcagtgagctggcgctgtgccttgtggcaccgagtgtggcaggggcggcggcgggcccggcgacgcttgcagcagcagaccaaggacaaaggtggaggcactgctggcacaacagcatggctggcgattgaggctcaggtcacccaggagctgggaggaccaaccggtgcagcacagcggccagaggctgagccgctcctgacctttgtggcatctgcctcccaggctgaccagactctcaccgtgaccccaatccaggattctcaaggcctgttccctgatctccatcatttcttacaagtttacctccctcaagcacttcgaaacctcctcaagtgaagacagggaccctaatg

SEQ ID NO: 6540 - DNA, 670 bp, Canis familiaris
  misc_feature (1)..(670): n = a or c or g or t
gaccctcatgcagttggnnntacattcttccannagctgttttactgtctacttttcaggattaaaaaaaaaaaaaaatcaaaaattaaaaaaaaannnnnnngtttaaaaagtaaaatgnnnagggaggaagcagtgacagatattttttggtaattatgctttttttttttaatttttagaatatctgtttttactgtggctgttgatatttcatcaggataaccatttctttgctgagttcaggtgactgaggaagagccacaccctcaaaacaaaacaaaatacacacaaaacaaaaccacagaatcatctttaacctaactttttatacgatgtctcagtttcccgtaaccttgcacacaagcttctgtgttgagttgaattgtaactgctttttgtatttggagagagtgtgactattgaacttgaaaccttttattccgggcgtcttggtagtttctggtgggattaagcgggtgagagggaagaaggggaggttagggggggctccttcccttcagaacatgaaatttctcccaccgcctcctctccagaggtctcccaggtgccagacctaaaggtttttcctacaatgatcctctgattatttttactccccccttgacccatatgttttaacaggattnnnacaaactgcacttattaa

SEQ ID NO: 6541 - DNA, 624 bp, Canis familiaris
  misc_feature (1)..(624): n = a or c or g or t
tacgagatgtacccgctgggcgtgaaggtcagtgtggtngaaccnnnnnncttcattgctgccaccagcctctacaaccctgagcgcatccaggccattgccaacaagatgtgggacgagctgcccgaggtggtgcgcaaggactacggcaggaagtactttgatgagaagatcgccaggatgcaggcctactgcaacagcggctccacggacatatcccccgtcgtcagtgctgtcacccacgctctgacctctcgcagcccctacacccgctaccaccccatggactactactggtggcttcgaatgcaaatcatgacccacttgcccggagccttgtcggacaggatctacatacactgaagagtgtgccccgccgggagggaagagggatcttgtgcagccacctcctgattacctgcttgtgcattatccacagtcccgggggggacctactaccacttttagcgttaagcagaggagacagcccagccccacctgtgtgcgcagtgagcggtttgggtcttctcagccaggttcggcatggtggtagggtccctcaatctcagggcaaacacggtgcagnngtctttctgaagttgnnnnnncacaaagagtcttgga

SEQ ID NO: 6542 - DNA, 540 bp, Canis familiaris
  misc_feature (1)..(540): n = a or c or g or t
attaaaaatatgagaggggtaaatttatactgctttttgttctgagggtccaactggaaaatgggggaaaatcactgtttggcctaacagaacaagctgcagaagaaaaacaagcaagcaggaatctggcatgttttagttgtcccagctttttaaatactaaccccagttctcaccctcttcaatggtacctcaagttgctggagcctctctgccatgattctgcttctgcagatttcctttgtaaaatgactcaaagctaaatggatagcttaaaagtgaatgccttcttggtggaatttattcttaagtaagtagttaagagcttttgatattaaagatatcctgaagctctgagactaaaaaaatcttggaatggggtatatacctaaagagatttaggattctgaaagagaaataaaggatggttagtttaatcagtgattttttttaaaacttcaaatatcatgaacaagatactaaattgtacctaaggatttgtatttctttaaatcttgttnnaaatcatatctgtttaat

SEQ ID NO: 6543 - DNA, 571 bp, Canis familiaris
  misc_feature (1)..(571): n = a or c or g or t
agtatgtnnaaagatcatnctgctgaagattcaatttaagttttcctnnnnagaactagggaagaaaccgaatatcaggagctggnnaataattagtgttgtgcatttaatgactttaatctatttttcattaatagtttttaaaattctgtagcgggctgtttaaaaaaaaaaaaaaaacttaaattttgcatttcatgccatcaaaatggtactttcttcccaaatcaaaataaatctgatcagagcctggggtggtggcggggagtctacagctgaatgcagcctatttttaaagtaaaaatattttttaaatgagtttccttcttgaaaaaaatcagtgtattggtcaaaaaatgctgttgttaaaaataactgaacaaataaagtttgctttgagatgcacaggtttcaaagtataatctcatatttaattctgtaaagctctcagtcccttgttctcattttcctttttcatataagtttaattaattatgcacatttaatttatctttcttcctgttttttctaatgctaatgttatttcttataactcagtaagatacggagt

SEQ ID NO: 6544 - DNA, 513 bp, Canis familiaris
  misc_feature (1)..(513): n = a or c or g or t
gtaagtttaaaacagcatacttnggcaaagaactcagacttttaattagctattataaaatagttcagcactcagtgcccaagactggtttttgtagggtctttgctaaaaaaaaaatcntagcaatcccccttttaaaataacttgtcatcatgaatcacactacttctcagatatttgatatatttatttcaggttaggcacatattgtgtgaatttgttaatctaagcagagagaatcttttctgtgcttctattccagtgaatagcacaagtatctataaaagggcccatttaaaaaaatgttaattattagaacttctaagaaaacaagaaacattatggcttaaattacttacccagaagatatacatattgtgctttaattccacactactttattatgttaaaaaaaatcttttactttaaattactttatcatatcatttgatgtatgcaagtctgttctttttgnnnnnntcaacatacaatgnnnncatggctttgcttact

SEQ ID NO: 6545 - DNA, 588 bp, Canis familiaris
  misc_feature (1)..(588): n = a or c or g or t
agagcccaaccttcggtttcttaagggccgagctggcnnaagggccccngcgngagggtcggcgccctggtctgcgccctgtgatgctacatcgcccccggagcactggccgggtcccacgccctccccccgggactggcagacctgagggcgccgcggacgccgccggagcacaggacacagctgtgctgcggctgcggagcagggaggagagccacagcgggaggggccgtcctggcaggaggccacattgtcgtcgggtcctggacggcgtgggacctgcgactgcaggcctcctccggacacggggccatctctgggcgctgcgcgggatgagactctggggccctggctggggtgcgcgggagggtgttccttctgcatctttggcggcttctggggcaatgggacccaggacgaagggcgtggggtatctgttattggcaagaattcctgctggagaactacccgacccataggagtggtcatctcagacccaagaggcctaacaccgaaaccccctcacctggcgtctccttttactcctgaatgttaaatgtcatcaatccagtgcgctaccaccttacc

SEQ ID NO: 6546 - DNA, 611 bp, Canis familiaris
  misc_feature (1)..(611): n = a or c or g or t
gagccacnnngagacgaggaatccagagaacnggtcccaatccccttccttccagtactgcgagacctgcaatgctcacttccaagactctaatcattggacatccactgctcacctgctgtcactgcctcgtgatctcaggtcccccaacctgccccttggggtgcccgcctccagcccaggctttaagctgctgctgaggggaggctgggagcctggaatggggctgggaccccggggtgagggccgcaccaaccccatccccactgtcctcaagagggaccaggaaggattaggctacagatcggtgccccaaccccgagtcacacactttctggcccgagatactcgggccatagctgggagggagagagcccctcgggtgaccacactgagctggagagaggagagaaggcaggaggagaaagacagggcctgggagtgggatctgaggacatacatgaaccttgagttctgaccttggtaaggtctgatcctgatctattgctgaagtctgaacttggacctaggcactttagcttttacttctgggggtctgtccaggttccaaacactcagattgtagtcagtgggctctgcctttcggagag

SEQ ID NO: 6547 - DNA, 588 bp, Canis familiaris
ccctggatatcgcccgccaggcccgagacatactgggggggaatgggatttctgatgagtatcatgtgatccggcacgccatgaacctggaggctgtgaacacctatgaaggcactcatgacattcatgctctgatccttggaagggcaatcacagggatccaggcgttcacggccagcaagtgagcatacttcacccaggagcccagatggtctcaagctcattcccagggaaatgctgtgctctgagcttactcagggaggtggcagatggagccaatttttatagtgggaagtgagagacactgattcttaattatcaaaattttccctttgaagtcattcaaatgtgttccttaaaaagaagatgggactctctgtaccaagttcctcaacccacttttaaccatggacgggaatggattccacttatcttggaacagaagcttctcttgatggagggggggggcaggaagagggaaggagagtgacgtggaagcaacctctggtgtctgagcaaatccccccgacaccaagagttcactgtgtgccctctgacccttccatcccgagggtaagtgccttatgc

SEQ ID NO: 6548 - DNA, 569 bp, Canis familiaris
  misc_feature (1)..(569): n = a or c or g or t
aacatantgaagggattacttgaaggagactacgaagtngtggtgngnnntngagtnctgggacgaggcctnnncttgatcagtgtccggctggttgtcaattttgatatgccttcaagcatggatgagtacgtgcatcaggttggaagagtggggagattaggccaaaatggganagcaattacgttcatcaataacaattcaaaaagacnnnnnngggatattgcaaaaagagtgaaacccacaggatccattcttcccccanagttattaaattctccctaccttcatgaccagaaaagaaaggaacaacagaaaganaaacanannnagaatgatctggttacaggagctaannntatggacatcattagaaaacatgataaaagtaattctcaaaaatgaacactttttaattgtgtgttgtcagtgaaatttctgtatattattactgtatgatttgagtaaatggaattatacangaaacanaaatttaacanaatttaaattttttaaattatatatcagatttatactgnantattnnnnntatttcccttttaattccc

SEQ ID NO: 6549 - DNA, 642 bp, Canis familiaris
  misc_feature (1)..(642): n = a or c or g or t
gtataatanngtgaatactgaaagtttggagtgcgtgctgactagaaggcnctggagtgtgaatgctggnnagagaaagctgtgcttctttctctgctgtgnncntggcctgtcagaaagatgtatggattttagagttagagccattaggatccatctcctccctcttattcttaggaaatgcataaaggaccattaatagaagtgattccccaacctaaggaaaagctaaaaccggattaatccttctggctgcattggttacatttgatgcaggagcagtccggtatggaggtgagcgcctgcaagcagtttccctgcttgaaaggaagagggttggctgctgcctcctagcggtgagagccccattgagtggaggtcacaccaggatgtagtcctgacaaggatcctcttatttctgcataacgaaagagcctctggattagaagacgtggttcttcctctctgtatttttacattcttggtcccttccaatccttcccatcccttgaatggactccgaattgtcagctacctccccaaagggggtttgggaagcttcttttggcccatcacttggtgacagctgtgagtgagatgctgctgctaacatgactgcttctcccagagagcacattgaga

SEQ ID NO: 6550 - DNA, 629 bp, Canis familiaris
  misc_feature (1)..(629): n = a or c or g or t
cttcttgagaaacttaaatgaatatgctttttgaattaacgttctcgaaagtgtacagcttcctgtgcttctcagtggcagnnntgaattcaccctctggaacactttcctttcctttctnngtgtggtnncatttaatctgtgctggttagaaacagcatctcagacnnnnacaatcaaatgacaaagaaggcaactggactttttaagtaatactgacaagtggtttctgttttctaaaggacaaaataaggaggatgtcttgtttttaattaggctcttttccctgctgagctgaaaattgtggtgacatcccggttgaccacaactgcctaatctaaaagctcaaagaaagaagtaaagtgttatgctaattttattgcagtatgatagaatttttatcttgttatgtcctttcttcgataactctgacaggaaactgtaactgctatgtctcagagctgcacataggaaagtatggaaaaatgaaaactattattctttattccttacctgatacctgaaaacttttaagtggaaaagattactatatgttgatcttgccttctttggaaaaaatattaagtagcccaaacactttataattttgtagaaaaaatatgcatcta

SEQ ID NO: 6551 - DNA, 460 bp, Canis familiaris
aaaccgctgcaccaccagggctgccccaacaggtttattatgctaggtacccgtagccactcaaaaccagaaattattaataatgcattttatgctctttcagcttgtgataaatactcatttatgaaaacacagagatatataaagaaaacaaacaggacagaacccagatataccaacgtgaaaactttgatgtaaaaagacaacactgtggggcaccggggtggctcacttggttaaatgtctaactcttggttttggttcaggtcatgatcttggggtcctgggatagagccccgagtcaggctctatgctcagcaaggagcctgcttctccttctccctctgcttgtttgcgtgctctctcattctctctctctctctctgccaaatcaaaaaaaatctttaaaagagagtctttctctctatccctccccctctgctcttccctctacttgcca

SEQ ID NO: 6552 - DNA, 655 bp, Canis familiaris
  misc_feature (1)..(655): n = a or c or g or t
tganngactactataccaatttctaantagaagaataattctgcacaataggttatctgtatgtgaaaaggctctgtggactnnngtcttctgtagtcaagacgcaaaaatgggcaaaatggcagaaacttagctttcattctggatatcttaattgttgaaccaaagagatgtttcacttttaagaagaaaaaaagtgtatatatacagatatacatataagcaatggacatcgtacctagctgaccttagtttttagaggaatctccaataaaagaagtttgttacactgacttgaggcaatctgtcagtggctcaaggtacagagagaggtctgctttcaaaactaagctacgagtgagtgaaggcaggcattaacagcattggtgccacactcgctgggggctgaaccagattacagtggcttcatgaagcagcagatggtctttaccttgtccaactttcatgaggatcttcatggctcttgtctggcacacccctccctcctggttatccaggccctccaaagacccatttgatgtagctgattaaaaataaaatggacaaaacaaaaaaataaagaaaaatcaggaaatcaataagccaagtttacatgaacatgaaatgtctgaaaacaatttgaaaaataagaatt

SEQ ID NO: 6553 - DNA, 643 bp, Canis familiaris
  misc_feature (1)..(643): n = a or c or g or t
tgatatacatagtaatctttctaaaattgtatgctgaccatactgctgtcagaataatgttaggcatatgctctttgctaantatatatgtacagaatatttggaagttaagaattgattagactagtgggtttaggagtatttgaggggggtgggggagagggaaatgacaactgcaaatgtagaatatacggtaaagagtcagtttggtgctttcaagaaacaaactgatgtctgaattttgctgtgtttcagttttttagagattttatcctacttttttttttcctgtgtcttctcttccttcttctccaaaaagcagttatgcagctggttaattcatataactgtgagagcaaatgagtaattcctgctactctgaaatcgactgcctacatgtttcagtaccaattgtatggagtgcttgaatgtaataagcagtttttatggagtttacagatacaggctttaattttcaagtgaattgtttgccaaacctagtaactgttaaatatttggaggatttaaagaacatccctgtttaaatccatttcaaactttttaaatttttttgtactatgtttggttttatttttcttctgctaaccttttatattcacttatgctctcgtacattgagtac

SEQ ID NO: 6554 - DNA, 514 bp, Canis familiaris
taattgtgtaaaaaaagctgtctatatcccccacatttggcaattttagattgtaaatttttttttgctgtttggtttcatgtctgtttacatctgtatggaagttaattcagagaacacccaagcacagagacagcttctgtaactgacacacagatgcaactaggcctgcttcctcagggtaagctcattacagctcaggatccttcaggctcccttcaggtacaatttgcgtccctgttgtgtatgaacatccctgtgtttaaacagtagtagattcagaacaaacattgatagcatagttattataagaatgaagaagcaaattttgaatttcttcaattctatcatgctttgtgactccttggagtttttgtttgtattcaaaatttaaaacggtgaaattttaaaaaatgggaactgcaaggtataaaatttttgtttaataagtgcagagttttgttgttactggaaatagtttgctaattttgaatatctgtaaatggaaatttac

SEQ ID NO: 6555 - DNA, 670 bp, Canis familiaris
  misc_feature (1)..(670): n = a or c or g or t
aatgacttataaatgtttccatcatcacagaaacagcagctgccatattttcatttgtttcagnnacataangccatanaaacagaagaatgaaatcagaatgtctcacttttaatcagtacataaattttgggagcatttctccaccataaaggcagctactgtttcagttaatgcttattgtgttagaatacgtaacagtgaagtagatgcacgacttgtgtatgtatagttaagccagcgtttttctgtgtattatggggaatagcaaaatctacatcacaaattttgacacattacagctgaaggaagaggaacaccttccaagacaaaacagtcttcatgggggaaaaatgacgcttgtccagcagtttgcttcttgtgattgaactgaacctgtaaggattcatggataaaatgaacaggaatagatctgaataaagcaaatctgcataaatggtaaccagtagctctactttattttttatgttgcttaactgttttatttgaaggaaacctgtgtgatttaaaaagttatagcttttgcaactttattactggttatatacatttggccattataatgtgcaagcaattggaaaaaaaccgtcaagtaaatgcttttttttatagtagtttgttcttgttaaaaatgttcatatgataatgt

SEQ ID NO: 6556 - DNA, 560 bp, Canis familiaris
  misc_feature (1)..(560): n = a or c or g or t
atctataatannnnttttgagaagaaactncntcagattttaagcaaattggntcttgacctttcatgtgaagtttctttactgaagtcggagtgccatcgtgttaaaatgcaaagagctggnntgcaaaatgaattgttctttacgttttcagtttcatctctagacactgaaaaaggacctaagccatgtgtggaccataattgtgaatcttccaaaagactgtctaaggctaaaaatcttatagagagattttttaatcaacaagtagaagttctaggcagacgttcagagccattgcctgaaatatactatattgaaggtactctccaaatggtttggattaatcgctgctttccagggtatggaatgaataccctgaaacatccaagatgtcctgaatgctgtgtgatctgcagccctggatcttataacccccgtgatggaactcactgccttcagtgcaacagcagcctggcgtttggagcaaaagcatgcttataggccattattttgagatctttggtggtttgttaaacacaaaagtatatttttgaaat

SEQ ID NO: 6557 - DNA, 609 bp, Canis familiaris
  misc_feature (1)..(609): n = a or c or g or t
atctgtcacggtcccatcccattccatatcatgtgttttgtngtctcccccatcccactccaagggcgtgctcattacnctgagggctcccccatgggaatgggggtagtgaggccccaagcttctcccccccaactgctaaattctgttgtctggaagatgggttttggggagtcacctgctgcactacacaagaaaggggctcccatttgcccttcctttcctcctaagtcccttttgtcttatctgtctggctgtctgtgtgtgggtcactggaattcagagtccctgagccagtcctctacttcccagcctccctgggggcctccctaactccacctaggctgccagggactggggcctactggttcaaggccatcgggagctctgcctcccaatctatccctccttttcctgggctccctcacactcctcctctcctccctccttggttcttccactctccttctttttgcctgtctcccttctcctcatatttgtccctacttctcaccatttttccgccttcctcccttcttcctctcttacctggctcctatgctgtgatatatatttttgtattatnnnnnttcttgtggtgataatctt

SEQ ID NO: 6558 - DNA, 470 bp, Canis familiaris
  misc_feature (1)..(470): n = a or c or g or t
ttgacaaaagaactggnnanaagcatgatcttgaaacctcaggactagttcccaaatacatcaataaaaaggattatggtgtcacacctgaatatatatgtaagcgaaatgaggaagtaaagaaagcccaagaagaatatgataattatatccaggaaaaccttcggaaagcagctatgaaaaagctctctgatgaagaaagggaggcggttcttcaggggctgaagaagaactgggaagaggtgcataaggagttccagtccctctcggtattcatcgattccatcccaaagaagatccgcaagcagaagctggaagaagagatgaagcagctggagcatgacatcagcattattgaaaagcacaaaattatttatattgccaataagtaataatagattttttaaaatatagttgttttaacatagggagagaaaaaaaaaaaaacctggaaaggatcaaaatgaaac

SEQ ID NO: 6559 - DNA, 555 bp, Canis familiaris
  misc_feature (1)..(555): n = a or c or g or t
tcacagngntggggggaagcactgaggaccaatggaccagtgagtagcagtgggtaaggagcaagggaaaagcatctggagttcccgataacaagaactataaaatcccagtgcaggttggatttggccaactcctgagtctactatgcagatgatgagactgaggtccagttggcccccttcctctaaatatgattactctttaccatttatttttagactgatatatctgatcaaaatcgtatatatttttgttgggggagtctggggatgaagtttgggttttctttgttggctttctttggggaaacagtaatgtattttcccatgcttttttttttttttcctcacaaactggaccatatgagcataatggaaaattctgcagttatgtagtacgtgtttggggccgggggcctacttcagactccagctgcccagctcaagtatttgtaaaactttcacagggaaagtcnnnnnnngaaatcatcttgcagggaaatatagaagcattttaatgtgaaaactggcacaaaaatggaccaagttgtttgt

SEQ ID NO: 6560 - DNA, 581 bp, Canis familiaris
  misc_feature (1)..(581): n = a or c or g or t
ctagagtaatcggacacacagtttagcgattttagacctagctnnagtccaggttcactgctgggagcccatctaagtggcacacattgtaggaaagcatgcattttgttccggaactgtgtcccctaagacgcagtcatctatctcaaaccaagccagcgttctcttttgatttattcactggctagccctgacaggttccgacagttatatatgcaggctggtaagtcattccaagctgtgtgagcaatagatggaccaggatctgggaacctggaaatgaactacagaacagcttccatttgcctaaatgtggctgttgtcagagtacaatgaaacttgcgtaaccaaaagataaactctgaagtccatgaattgttatcctaacttgaaacaagattttttgaggaaaaaaacgttagaaaagctagtttgcttttgaaatgtgatgtggaaatgagcactaaaggtctgacatgaacctgaatgtatttctattcttagagggagtcagctgtcactcacaggcctatgttatgtgctcacannnnnnatgtgatttatgtgaatgtgtgtgtaaa

SEQ ID NO: 6561 - DNA, 730 bp, Canis familiaris
  misc_feature (1)..(730): n = a or c or g or t
gangagtcggnncgagaaacttggactngaacaggatttgagaannagngagagcccactccaaggtnnctccctcacctgctggtaagaaaaatgagagtccaagagaataagcaatcttttaaggttgcccacacctgagttgccgagccagattccaacccagctctgtcttaactctgaaactatcgctcataaccatgacactggcactgcttgttaccaaaaaaaaagtgcagaattgtgcagagtgacccttcacatgaccggattggagacctggtgacttcgaaccaccaggttcccccacctgcctgagaaggcctacatgtgactctgcctttagccctcagacgctcatctggcccggtgttccagtcaaagtccttaaaactcaaagaaggaagtaattactcctgggtgcggtaaccttgaaggcttccagaagaatttgatatttgattcaagatgtgaaggataaggaaatattgccaggcaggggcaaggtaggaagtatgttccggtagagaaaatagcctgagtaaaaccccagatgtaaaaatccaggcatgtgtgaggccccagtgagaggcacagcagctgaagggttgagagcaggagtgctttgtgcccagcctcgggcctgcctggcccgcacgaaataataggtacgtttacctgaccggccttggaaggcccgctctccaatcgacaccctgattgtaaatgc

SEQ ID NO: 6562 - DNA, 558 bp, Canis familiaris
  misc_feature (1)..(558): n = a or c or g or t
gaaaacattgccagtaactacttcnggtncaagagagccagccagatcctcagcacggatcccatgaagagcctcacgcgtcacagctccccgcccggcctcagctccccccttggcagcacctcggccatctcacccacccaggccccagaaatgccccagccccggcccttccgcctcgagtccctcgacgtccccttcaccaaggccaagcggaagaaaagcagaagcagcttcggcagcagcgagcctctgtgagcacggcctcctcccacctgccccttcccacctgcctccagggggggcccccctggaagaggcttttccttcctgatccccaggccgtcaggaggctgggcctcccttgcagaggtgcgcccctcctccgtgccccccagtgttgctctggcctcgatgggctcagagaccccacagctttcaccagcagccaacaccgggggcagtgacagcatcttggcgacagacagttgtgcctctgtccaccaggccccgacccgggggggaggccgggcggtgcgggcccaggagtcccggagc

SEQ ID NO: 6563 - DNA, 495 bp, Canis familiaris
  misc_feature (1)..(495): n = a or c or g or t
gaaaggtcgcgtctccctcactgnnaacaggtcctgggggaagcaaggggcgctctgatattttcccgaaacacatgctcagataagatgtgggaacaatagaaaaagtcctttaaaatagtgtttttttaattgaacacatgagatctcagggattttatttagagacttttcaaacatgtggtgggtaacaggccaccacctgtttttgtggatgaggttttgggagcgcacgacccgcccaggcacttggtgttgcagggctgcttggctgtgatgtggagctggatgagtgagacggtggcggccgtcgcgggcaggagggtgtccctttgggtggccgctcgcggggaaaggctgctgatcctgcagcagggtgggaagggccaggtagtgcgctcggggcaccgcctgccggaggggatggtggcagctggggatggtggcagccggcgctaatgcgtcgtaacagacaccttgttaacctcatctctg

SEQ ID NO: 6564 - DNA, 572 bp, Canis familiaris
  misc_feature (1)..(572): n = a or c or g or t
gcnntccaattttnanntgaagaaccctttttgtatnanntcaaannnagatactgttatactgtctccaaactgagctggattgagaaaaaaatggctgctactctgtttggaaaaataccatcctcaacagtggaagaagctttgcaaaatttccttaaggttgaagaactacaccctggtttttctaagtccaattacttgtacttggccaagtgttacattgatcttgaacaagcagataacgctgtgaagttttgtaatttggcagtgttgcttccttgtgttaccaaagaggataaagatgcacagaaagaagtgaaaaaaataagcacttccttgaagaggtaaataaaagaacttactcttcaacaaatcagatgtggtctactaaaattcaaactaatccaagttgtgtttttttattatccttttttcttttttgatgtaaggatgatgtgctcagatttgaaggtaaaatcacatttcttcagaatgcattccacaagtagacaaaactaatcatgttatttgaagannncnacttcccgtaatgtcagtnnnnnaattat

SEQ ID NO: 6565 - DNA, 480 bp, Canis familiaris
  misc_feature (1)..(480): n = a or c or g or t
ccagaacagatgggtactgcagatgtaatctggtggataaagttccgtggacttggcctcctagcctcaggatagcaagtaatcaaggctttcagaagtccaactgagattccttatngaaacatctagcagagcaaaatgtaacaaggtcttttggtaaacattcttactgcacctatgtaaataattaggccaagagtaatgaggcaaactcactttgtaatcaagaatctttgagatattttttgatcagaagtgggcaaactgtagggaaaaatttgtgctcagatggaaaattatgtgtggtcattctaaattacacctgggttgtctgattctgattctgtaaactattgagaactaataataatgctaatgaatttttgtccatagacatgcaaacaaattatgttcaggaattaaagaactgtaaaatcaattttggctctatttgcacatcccttacaatatccctaacct

SEQ ID NO: 6566 - DNA, 589 bp, Canis familiaris
  misc_feature (1)..(589): n = a or c or g or t
agcccagtaccccctggccaacaacntggtcaagttcaacacagtcatcaccaacccgcagggggattatgacaccagcactggcaagttcacctgcaaagtcccgggtctctactactttgtgtaccacacgtcgctgacatccaacctgtgcgtgcatctgtaccgaagtggtaccagggtgaccaccttctgtgaccacatgtccaacagcaagcaggtcagctcgggcggtgtgctgctgcggctgcagatgggtgagcaggtgtggctggcggtcaatgactacaacggcatggtgggcaccgaaggctccgacagcgtcttctctggcttcctgctctttcctgactagggcagtcaggcccactctccagccccggggccgccctgcccctcctcagcttccctgcaagacccgctgtgctcaggcggttctctccacctgatccactctcctccaggaagcccgccctgacaccctgcaccaagttctctccctcctctgagctccttcaggagtcactgctttgagaccttaaccaacaccaatactgtcaatgtttttttttnnnnnnnagtcttggga

SEQ ID NO: 6567 - DNA, 579 bp, Canis familiaris
  misc_feature (1)..(579): n = a or c or g or t
gtagacagactagacgnntcagagagnntgcgcaagcgagaggagcatgtggtnnagnntgccnctctcctatttggnnagcagctgatgctgacagcaggccctgctgcaggccctgctcctgctggcttcccctatggatatactgctgcacctgccttcgcccagcctcctgtgtacggcttcagcgtgtagtgggcgctcagtggctacacaactctatggggttattgacctcaaggagtatgtcacctcagaagcacagaggatcctgatgggaggcggggacacctggacattatttatttttgctgaggcccagtgatggcagcctgtgaaccatcctcacacctggggcggccagggtagccactgactgcacaagacgaccagctctggtggactcctgcctccaggccctctggctggagccagcattcctggggagttctcatcagggattccccgcctttggtgggaggggcacccagttttcgctctgcactggcgaatctgccggctccaggcccctttgcagacaacagactttctaacctggccctgagnctcctaccgatc

SEQ ID NO: 6568 - DNA, 586 bp, Canis familiaris
  misc_feature (1)..(586): n = a or c or g or t
cagatcaagagatcctctcctgggattgcagctggggtcccaggaggcacgtggaattccccagactcctgccccaattcccaggcacgtgtgtgactctggtgttgnnnnnnnaagccccaggaatcgtgattcttcctcccaggggagtcaggatccaacagatacccttatttcaaaagcctccgcctctgcctctccctccttggccctcccggggcaggtccaggacctgtcaggtgtccccgtgggctggcttcacacaagcactttgcctcccctccgtggccgcctgaggaaaggcagggcctggttctgcaggcaggaagcagaagggctgtatggcctgatgtttcaggcaggattccgctttcattctggactcttcccagatctccccagacctcccgcatcagcagcctccgatggttccctttagttcatccgttgccacagctcggggaaacactgttcacctgtctgctgggaaccacctgccctgcccagcccctgagctttcccccaagtgacagggcagagacagacctaccgccagacgcagcctctggcctcagctcctccaagt

SEQ ID NO: 6569 - DNA, 592 bp, Canis familiaris
  misc_feature (1)..(592): n = a or c or g or t
cagttcaaatgaaaattgtaaaagtcaangacgnnannntcaggggtatgcatgtgctcatcaggatctgaagtctgatgtcgggccattctgaagcactgggagccaacacaccctcctcggattagccacttgccctttgttcttctcgccacagcatgggctgccctacaacattactgtctcatttcatctatccctaggggtggcccgaacagaggacctcagcagtgtccatggaacttaggtggaagaggaagatggtgataggaagtcttagagagttcgtccataagagaaaatgcatgccaataagcttattctagaagataagggtattacaatgaaatatggtaaatacattgctcaagctcaataatatgaaaagtatgatactcatgatggagaagaggaaatctagaaataagcagataaagaaattatgtcacaggagcctgagtggctcagtaggttaagtgtctgccttgggctcaggtcatgatctcagggtcctgggattgagccccgagtcgggctccctgctcagcggggcgtcggcctctccctctgcctctgcctctcccccaacttc

SEQ ID NO: 6570 - DNA, 563 bp, Canis familiaris
  misc_feature (1)..(563): n = a or c or g or t
aacttncnnatcttcaacttatntagtttccagagccanantgttcaaatnntgaatttaccacttattagccctgtgaccttgagaaagatccttgataataactatgccatgtttcttcatttggtaaatgagaaaaagtattngactgttttggacacatcttatgtactgaatcagattctctctggcactcatcagtcacattcctagagattgtctctcctgtatcttccagacttggatggaatgccaagtctgtcgggcatggaatcgggcatctcaagttgctattagcaacccagaagtgtgggggagttaatgctcctgaggtaaggtttgactaataggagattggagaaagtcagggagataaagtccttcttccctccttttcctcaattactgcaaggcactgtttctccaaacagttccgccaatggggagatcacccaggtagccattggatacaactactgtgttcttcaaggcttgtcctgaagcaggacccaactgctatcannnngcattaccgccagtnnnnncctgcccttcttcccttt

SEQ ID NO: 6571 - DNA, 639 bp, Canis familiaris
  misc_feature (1)..(639): n = a or c or g or t
ataangaancatgtnnnnntcagccccataanctgngatgatttgtacnacaagaggctgactccacccttcaacccaaacgtggcangacctgctgacttgaaacactttgacccagagttcacccaggaagctgtttcaaagtccattggctgcactcctgacactgtggccgggagctctggcacctcaagtgcattcctgggattttcctacgcaccagaggacgaggccatcttggactactagaagagaagcactcgtgtaactgctgaagacagctgctccctgccccaggagtaatgggggatgaagctggaagaccatggaagacacaccagtggcactaatactgaccaactggagatccaagctgggtcaggaagagttactgttacgctttggcatgtgctgagaactttcaaaaaaacaaaacaaaacactcttctttggtttccatcacaacagcatctgttaactgacaaatatggaacatgatggaggagaggcccaaatccccccaaattcccaaagcaaaaagcgagagtgtaattgtcagaaacatgatagtactgtcaaaagtacacaacccactatgttgttgaaatacccaatgattctattgttctaagactaaag

SEQ ID NO: 6572 - DNA, 530 bp, Canis familiaris
  misc_feature (1)..(530): n = a or c or g or t
gcaagaaattcaagggnnntgagtttgtacgcaaacatancttcaacaagcatgcagagaagattgaggangtgaagaaggaagtggcattttttaacaactttctcactgatgccaagcgcccagctctgcctgagatcaagccagcccagccacctggccctgcccagagcctgaccccgggactcccctacccgcaccagactccccagggcctgatgccctatggtcagccccggccccccatcttggggtatggagctggtgctgtacgccctgcagtccccacgggagggcctccataccctcatgccccctatggtgctggccgagggaactatgatgccttccgaggtcaaggttatcctgggaagcctcggaataggatggtccgaggagacccacgggccatcgtggaataccgtgacctggatgctccagatgatgtggacttcttttgagccatttacttttcctcactcctgttatcgtctagaattgtgactgcctcatcccatccagctgagaat

SEQ ID NO: 6573 - DNA, 565 bp, Canis familiaris
gtgcttcgtaccatgtacacagataatatggatccaatgctgaatgcagtacaggagcagtttggtggcaatccctttgctactgccactactgttaatgccaccagcagcagcaaccaaccttcgaggacagagaattgtgaccctctccccaacccctgggcttccacatatggaagctcagggggcaggcgaggcaggcatcctggagaccaggatgcacccgaaactagaaacagggttcccaacattctgggtaatatagggctctatgactatcttcagcaattacatgagaccccccagtccctgggaacctatctgcaagggattgcatccaccctcaatcccagccaagaaccaccaccaccaggaaatcgtatccccccaacttcctcctcctcccaagaacctgcactatgaaccaaatccactatgatgccctttactgtggagacaatgttgttccagagtcattgaggaagaatgagagccagaaacagggtgggggtgctgggagtgacccaaccacccctgccactgtaccatcttgggaccccagtct

SEQ ID NO: 6574 - DNA, 575 bp, Canis familiaris
  misc_feature (1)..(575): n = a or c or g or t
aggggatnnnnnncccaccagacttctactccnnnnctccctcccccacctggagcntgcagatctgactgatatggnnnggcatcccccagcagggcctgcaggcctgagccagtgccttccatcggtcagcctcagcactgctggggcccgagtcctgggctgagttcagaggctgagtaaggcatcaggtccaggcacccagcgcgtcacctgtgagccctcctacagggaaaggaaccagaggagcccctcccttgccagggcaacagactgggaagtccttttctggctagctcagtccactgcctcctgtgctgctgggctggtgtctgtaccccgatacccaggctcccgaggaactagacacaggactacctagagccaggggctccaggccgccccccaaggccagggtgtgaggtgtaccggtaagggaaactcaagaccttgatccagcccacctcacatggcggaaccatctttcctgggggctgctacgtttttgtggatgatgtggcccaaaggccccaacttgctcgcttctactcagcttgattcctgaaccatgttca

SEQ ID NO: 6575 - DNA, 610 bp, Canis familiaris
  misc_feature (1)..(610): n = a or c or g or t
aaaagtagaaaaganagacagtgatctgacacagacagagcnngacaaaacagaggnnntagtgacagctgaaaaattatcttcaaatttacagcaccatttcagcttgtcatctgtttattcacattattttcctgacactggaattccagaagtgaccacttgtcattcccgaagtgccataactgtggattatattttctattctgctgaaaaggaagatgttgctgagcagccaggatctgaagttgctctggttggtggcttgaaacttctggccagactatcactccttacggaacaagacttatggactgttaatggacttccaaatgaaaataactcttcagatcatctgcctttattggctaagttcagacttgaactctgactctttgattacatatatacttttctttccaatttatattcttttcaaagaatgtaaaatatttcttgagagtctgcatgtttatttttgcgccatggagtttctgaagaggttatgtgaaatgcttgaaacagatgtcagaagaaacaagtttacaacaattttctttgtaatacgaaaaaatattttcctgacaagtgaggtctaaacactccttat

SEQ ID NO: 6576 - DNA, 435 bp, Canis familiaris
  misc_feature (1)..(435): n = a or c or g or t
aatttgaatttgaagcttttagtaaaggtcctctattcccagtggcttccttttgcccanaatagaatttaaatgcnnncatagacttcttaggctttttantagattttgaaatttnnaagaatttttaagatgtgttcagggaattcttggacatcttcttcctgtaacttacatagaaggttgtatttggtcttagcaagacagtactgcttttttgatgggaaaagttttaagatgaagcagntngtaaagtaacataattcttcactgaatttttaagatatgttcctttgaacatttaatttttttgtactagtgaaattgtacttaattcttacaaaacaatgatttagtgtactgaagtaaggaaattaaaactatttttgagacagaagacnnnngtcctggttccatnnnnnntaatatcttgaa

SEQ ID NO: 6577 - DNA, 648 bp, Canis familiaris
  misc_feature (1)..(648): n = a or c or g or t
gcagctgggaangnagttatgctcgttggaattggtgataaaatcaggggtatacttcataggactcactctgacnannnnnnggtgtccnncaaagaagtannaagaaaacctcctacttttggagatgcatctgtcattgccctggaactgctgaattctggatacgaatttgacgaagggtctatcatctttaatcggttcaggtctgtcatctcctacaagacagaagaaaagcccatcttttcccttgaaaccgttgcaagtgctgagagcatgagtatctatgatgatattgatgctgacgtgctgcagaattaccaagaatacaatttggccaacatcatctactattctctaaaggaatccaccacgagtgagcagagtgccaggatgacagccatggacaatgctagcaagaacgcttctgagatgattgacaaactgactttgacgttcaatcgcacccgccaggctgtcatcaccaaagagttgattgaaatcatctctggtgcagcagctctggattaatgaaaaccaagtttcatcctcagataagaggtaaagaagggaaattcagcccgctgattttatttttagcttactgctgtcctcatcagaagaaannnnnnnccattgtttaaacta

SEQ ID NO: 6578 - DNA, 576 bp, Canis familiaris
  misc_feature (1)..(576): n = a or c or g or t
gannnnnacgcatacccagcgaactgacgcagcaggtgcggctcccaacgagccctgagccccagcctgatgttggtgaggatgggccatgcctatgtgagcagcagcagttccctaggccttcagaaagctagttcacagggaccacacactggagaatatcaaagctgcagcaatagaaacttgagcgctggcaatgccaacatcataaactgggtaccatactggccatctaaactccagaggggctgggaagagggagtcgagtgctgaccacttacctgagacatttgactcagaagatgccagagcacagaaaaaggtgagctgagtaggatggcagagctgctggggaagagagccttgagcctagtgaccaggttgtgccctctatgtgccatgtagcagactggtggtagtcatttgtcttgtcggcagacctgttcatcctggtggcaannnnnntagccctggagggtgactccttagaagcaggccactcaggtcacctactatccactcctaccctcatctctctggcagcttgagagactaaggatctgcaggctatggcat

SEQ ID NO: 6579 - DNA, 553 bp, Canis familiaris
  misc_feature (1)..(553): n = a or c or g or t
cgnntnaagaagagtgcagatacactttgggggatccaaaannagctgcagttttaaaattttctaatgtaccatgtcactgtctagactacaacaagattttaattggaggttgtgtatgttgttcttattatctgacctgttactcaagtcgtaatattaaaatggcctaagaaaaaaacatcagtttcctaaagttacacataggaatggttcacaaaaccctgcagctatgtcctgatgctggatgagacctgtcttgtgtagtcctaaattggttaacgtaatatcggaggcaccactgccaatgtcatatatgctgcagctactccttaaaccagatgtgtatttactgtgttttgtaacttctgattccttcatcccaacatccaacatgcctaggccatcttttcttcttcagtcacatcctgggatccaatgtataaattcaatattgcatgtattgtgcataactcttctaaaggatcttattttgtgtactatatatgtcagaatatagtgtacannnnnntataatgtaaaaagacaatgc

SEQ ID NO: 6580 - DNA, 399 bp, Canis familiaris
  misc_feature (1)..(399): n = a or c or g or t
ctgaatgctnnnaaacggcccgtgtaaaggaagcnntgcagttgtgggaaaataannnnnncggcttgttccactccagctccccgtgagctctgtgctggttgttaggaagggtcagctgccatgaacactgaagttcacaatgtgagagtggtgatgggttcctaatcttaataaatactacacatgtgaacagcacagaatggaaaccagagcttatccgattttagataatactaagaaggtctgaatttggaaaatggttttgctcagatttgtctgccattaagattatagcaataaaaccctctgacttaagcattgcaatggtttattcatttttatgagtctaaaaggtgccaacactttactgatctgagnnnnnagtgtgtacaattt

SEQ ID NO: 6581 - DNA, 607 bp, Canis familiaris
  misc_feature (1)..(607): n = a or c or g or t
agacaagctagcagttctggatgagtnnagaaaagaaatnngnntatgctnnaangaagtggcatatctnnnnaatgangtgtctgatgaggagtgcttgaagaaagtgggcctaagtggcgtgcctgctgatgcctgctccactgcccagaaggctgttggatatatctgcaaatgtaatggtggccgtggtgccctccgagagtttgcagagcacattttcctactaatggaaaaggttattaactcatgccaaaaatagaaattagtataatgttaggaaagaaagtatacagccttcttcagccacctttatttttgattaagtacagttccatgttgtaatgttacagagagtgtgatttgacctgtgatgtatcttaatatattttaaagcagtcttctcgaattgtcactcccaaaaccttctacaaaataactgtgctctacttttctctttatgcaagataattatttagagattaatacagtctttctcagatttttagtaaatgcaagtaagaacatcatctaaattgactttgtattgtaccctgttaaactgtgtgtttgtgtgcttttaatgatgctgagattttatttattt

SEQ ID NO: 6582 - DNA, 545 bp, Canis familiaris
  misc_feature (1)..(545): n = a or c or g or t
tgtcgtctgnaccctgcactggcagannnacttcactgtttacttattcgtcaaannantnnnaccatgacgcatttcaacaaagatcatcaaccctaacaccttagantgtgtgtattttcatagnnnctgtgtttggttatattctgnnncccaagttacattaccctgggtattttnnnctgatgacatgttaccttcattcttaaatctgtaattttgcaactcaaaacccagctnnaggatcaaattgctaagannggcccaaaagaagatccagctctnaggcctacagactggcctatgtcacatcaaatacagaaaaccattccataaaggcaannncctttttcttttctttaaatngagcatccaaaanacttagtgcagtcntnnnnnnnttccttcagaaatataaatncnaccaaacataaaaaaaaaaaaaaacannnccaccatttgaaagtnnnnncnnnnnnttctttgatccttagttttgtgaatnctgggtagattattaattttnnnnnnntgtcatttaaaat

SEQ ID NO: 6583 - DNA, 617 bp, Canis familiaris
  misc_feature (1)..(617): n = a or c or g or t
tctaaagcaacggggaaagaaggctgtgcctgtnnagtcccctgtgcaaaaagtttgaagggcctgaggggtgacacggaagaggaccctcaccttacgattttcctctcttactgtaaacttctgaggcggtccgctcaagggcagtttttttctcagtatcacaatcagctctgcaggttggggttgagtccaagaggcagccttctcctttgccttaagtcccccgttctctagtagggattcttctgagcccaagggtagaggaccgtcctcctcagtgtggagggatgctgagaagacagagggaccttccaaagcctccaccccctcaaattccctgaagtcttgccctatgggctccaacacctcaccagtgcttgtcccctaccctgaacagcccacccttgcagactcccagagacctacagttcttactctggtgagaaaagcacaagtgttgtaggctccaagtgctgctttcccaggagtccgtgaaagcgggtgctgtgctggaggagggggatgggagaaccctgcccagtgataccaccctctgctcctggatccctaggttctgctcaaagagccagttgcaggttttggtaccttggaaa

SEQ ID NO: 6584 - DNA, 541 bp, Canis familiaris
  misc_feature (1)..(541): n = a or c or g or t
aggttctcgctttcctggggagggagggagggagnaggcaaggtccccctttggcttatcactcagagctgcccagcttggccacctgatggagagagtaaaaccaggtgccaaggcaggatggaggagaggatggggggcagcatccgttgttacttgggggcactggaagatgttgacccctggcaaggcacaagaccaggccctgggaagggcaaggctggcctcagggctgtcgtatggtagggcattgggcctgtggagaacacctaccccaatccttttgctgacccagacctctccgtcccccttccttcccccctcttagcccccaccattctcccttggcacagtgccttacataagaggtggtcacgatggggtttgaactgagtcccactacctcgggggacgcctctcctcccccacctgttcaggctcctaaaccaggaggcctccattacctcttcccgctccatccctgcaggaggcccaagcagaccacctgggggctttgttcactccctccttttcacttact

SEQ ID NO: 6585 - DNA, 472 bp, Canis familiaris
  misc_feature (1)..(472): n = a or c or g or t
cccaggccaggaannanaccatcaccctggaaaagcttcaagttgccagcctcctgtcgaatgtctttaagnnnctgatgactcacaaggtaaagctagagagcaactttgcctccattgtgtttgccatcatggtgttggaggggcttggccgctcactggaccccaaactggacatcctggaggcagcaaagcccttccttctgaaaggaccaggtctctcccgctgactgcagcagtgggcatgcagcgggtgttcatctcagaactgaaggccaatcccgacagcctctgctgtggcagcttgaacattgttaaaattgggaggcatggaagacataccaatatttttcactctgacttggtttcaggcatctgtttgaaaagctttgggttatttggggaagtaaagggagggaaaagtcctctatccattcacttgtggaagctagacctggtgtcggggagacta

SEQ ID NO: 6586 - DNA, 587 bp, Canis familiaris
  misc_feature (1)..(587): n = a or c or g or t
acacnnggnnncngngtcgtnnnaatcaangaagtgattcatnntcttgaagatgctgacactagagagaggggctgctgtccccaggggcaaggcacactttgttcctattttaaagcctccctccttgctgcataattcccccacccagatctctgagccactgtagctgctgcctcccaaccccagtaacactgctgggtgaagccactgtcctacatcagataattcccaccctccagtgacctgctgttttttcctaacccaagggctcttgtggttcccctcctactccaatgcaaaatgtaccctcatactgtaggtagcactatattttatcgtttggggaatggaggcacaaacagaatgaagactggtttgtgctctgctttccatgggaagactggggatgaggggcaggcacaggactatctgtgcccacaaatagggctgagagggtccgctccagggtcctcctcacccctccaaggccagaaaagtgagagtccttccctctttccaagacctggtgcccttcccctcactccctcctgccacctgctgctgctaaccctcggggtaccact

SEQ ID NO: 6587 - DNA, 626 bp, Canis familiaris
  misc_feature (1)..(626): n = a or c or g or t
caaggaagacccctgcctgggctgtcntcctagaacatgagcggtggtgtaggtaacagaacaatcacgggtaattcgagttgatttttgcagggagccccttttagaacctggactgtgtgtgagtatataatgatgaattgtcttgatgtcatgagtagaaaatgctcctggaagggggttggaggttggagcgtcttgggaaagaaagcgcagaacaaaccctgtgtccataggatgaagagcagcattgctttcccagattaagctcgtgaacagagatatctctgggtctgaactgaaaaagaatgacaccaaagagtcaacaataactactcgggaggccatgggcaggaggtgaggacattagttggccagcatagtaaaaattagagagagagcaggtgcggagactatcagaccagctttctgctttagtatctaattcaggcaaagctttgctcacatcattcaccaaacaaggttggataagcgatactaaatgcactcaaccctgctgagttaaactatggagacttaaaatcccttggcctttcagtggcagtggagtgagggtggggtcatgcgagttgcttgtggaagaaannnnngctgtctctttctgt

SEQ ID NO: 6588 - DNA, 534 bp, Canis familiaris
  misc_feature (1)..(534): n = a or c or g or t
cgtcnnnaagctgcgtcactcaccatttctaaatgtttgcttacctgaggaaatgcctgtagcaagaccccaggattcaattccttaccacactgagaccttctctattcctactgtatcctgctgctctgaatggcagcatacatccccaaagtcatgtgctccttcctgtgcctcggacccagccgtgggccgcagccgcctcggccagcaggcacattccaccttgaaatcctgagcgcagcgtctccgtagactgtcacctcctgcctgagtccacagcaaggggaagcagcagtgtggatggactccactgtccagggagcacctctgagtccccacgactcttcttggacatcataagtggaaggaacgccttcaaataactggaattttgggatccctgggtggcgcagcggtttagcgcctgcctttggcccggggcgcgatcctggagacccaggatcaaatcccacgtcgggctcccggtgcatggagnntgctcctccctctnnnnnngtctctgcctctctc

SEQ ID NO: 6589 - DNA, 514 bp, Canis familiaris
  misc_feature (1)..(514): n = a or c or g or t
tacaggnnncacagccaactggagtcnnaggtannnagatcattgttttgaaatgtnnntatgttaaataccannntaatatttcaaaagtatgtnnntatgatttctatatncntgtttttcagatagcctacttataatttaatataaaattaactgtttcatgcataagatttcagtaatgaaaatagttccctttttaaaaaataaaaaaccactttgtctttgtagattacaaataaatcagattcnnnnatttaaaattacacactaggaaatagaactgtgttaatatataagaaattgaggaataataagaatgaaggacttttctatcattttcattttataaattgccacccgtgaaaatgatttttgcacattatttgtattttttctttgtatatgaaataattttttgtnntttgtaaaatatggagcccattgtaccttcagctatttgagactgtnnnnagtgcttcttttataactgganncttttaactttcataaa

SEQ ID NO: 6590 - DNA, 507 bp, Canis familiaris
  misc_feature (1)..(507): n = a or c or g or t
agnctgaagactctgtgtaaactnnnngtgattcagtataanntggancagtcctgtttgccccatgacatcaggtgnnagctgaatgccatgaccaccaacagcaatatcagtcgccccatcgtctcctcccatgggtaggagaaagttgctgccgcctcccttcctgaacctgctattgtgttcactgcccttgggccgagggccccttcccttggtgctctgtcccatacacctccttccaactgctcctgggtctctgctctgccccaggccagccaggctctactgggaagctaaggaacaggggataagggagaagcaagcagtgtctgagcctcaggagcttcccccccacccttgtttccgccccctcccccgcttgagccatgagcatccattgggagctgagaggagttgcaactgttgccatgaaacctccttctccctgatctggggaggcgaggaccagcagataatcccacccttccctgagctgttgctgtt

SEQ ID NO: 6591 - DNA, 573 bp, Canis familiaris
  misc_feature (1)..(573): n = a or c or g or t
ttattcaattgggattgctctcngatannnnnnggctctatnnacaaaacctgcatgctgtgggatgcctcaaatggaaaatgtgtggcaacgctaacaggccatgatgatgaaatactagacagctgtttcgattacactggaaaacttattgcaactgcttcagctgatggaacagcaagagttttcagtgcagccacaagaaagtgtcttacgaaattagaaggccatgaaggtgaaatttcaaagatttctttcaacccccaagggaatcgtcttctgactggcagtgctgacgaaacagctagaatctgggatgctcagactggtcagtgcctccaggttcttgaggggcacacggatgagatcttttcatgtgctttcaactataaaggcgacataatcattacagggagcaaggataatacatgtaggatatggcgctgaccaaagaaaaaggcagttgatgagcagatttgccagcaacggaggtcaagaccttgagttttacagagagccagagagcgaaccattttgatatttcatgttttctctttttccacaaatcaacta

SEQ ID NO: 6592 - DNA, 551 bp, Canis familiaris
  misc_feature (1)..(551): n = a or c or g or t
aaacaggcnnngaaaggcctgtctgttgaatnngcactgcnngccgacaaggcngcccagcagggcaaacaggannagaatgatgtggtggagaaactaaacctcnncttggatntgctccagtcctataaagacctttgtgagcggcatgagaagggtgtgctacataagcaccagcgtgccctacacaagtacagcctgatgaagaggcagatgatgagcgctgctgtgcagagccgggagcctgactctgtggagcagctggagtcccgcattgtggagcaggagaatgccatccagaccatggagctccggagctacttctccctgtactgtctgcaccaggagatgcagctggtccacgtctacttgcctctcacgtcccacattctcggtgcctttgtcaactctcagatccaagggcacaaggagatgagcaaagtgtggaacgacctgaagcccaagctaaactgcctcttcgctggacccaacagctccctaaccctgccgaggtccccgcaggacggcgtgtctcctcactagtgccagag

SEQ ID NO: 6593 - DNA, 626 bp, Canis familiaris
  misc_feature (1)..(626): n = a or c or g or t
acacagttgcaattgntgttaccaacnnatncggtatatgaatctactgttatgctttaagattcatctgggntannncaggtaaatattnnaantaaanngttatgtggaatngatcaccattcctacatcatttttaaaagtatttgatggtggtaccaaatactgcagttttgccgaggaaagatgctttgatgtattatttgttaatgagggtgaactccatggttttctacttggctctgagcatatccgtgttaatatatttaggatgacttttcagatgcagtagaatcactataaatatcccactttcatttcagaccagcaattacgattcctttcaatgttgttcatacctccttgtgaatcaataccttgtacaaataattttcttctggatcttcaacagttacacagttaagggatatataagtggattgcatattataaaactgttccaagttttgtcattttacatctttggatttatttttccaatatttcaaatttaatcaggataaatcattcacaaatccaagttgctatgtaattgaacaaaaaattatagccatcatcagaagtttgaattccattaaatccacaaccactactcaggcttcact

SEQ ID NO: 6594 - DNA, 532 bp, Canis familiaris
  misc_feature (1)..(532): n = a or c or g or t
aatcagtttgctttcaatgcagaatttaaagataangattttgcaatggatattattaaaagcactcatgaccattggagagcattagtgacgaagaaaatcgatggaaagggaatcagttgcatgaatactacggtgtctgagagccccttcaagtgtgatcctgatgctgccaaagctattgtggatgctttaccgccaccatgcgaatctgcctgcacagtaccaacagatgtggataagtggttccatcaccagaaaaactaaggaatattctgtggaatacaagcttgatattcctgcatcctattcatgtggagtattagatgcaaaagtagtagcttttcaaaactttaaattcatagaactaatctaactaaagcaaaattctgctgtgaccaatatattcaggatgttatatatctaaaagcattcttcatatctcaactaagataactgttagtacactcttcaatatcaaagcagttgtaatttggaagtcatttgtgaataaatntgcaagatgagtgca

SEQ ID NO: 6595 - DNA, 572 bp, Canis familiaris
agagctcagcccaagtgtgtatgtgcatgagtgtgtgtgcgtgtacatgggtgcgtgcgtgtgcacgtgcgagatagagtgtgcactcatgggcatgggtgtaaactgttatctggttgtgttactcagggtgggctggggactcacggggaaaaaaatccccctcagcctgcccaagactggttttttttcctgtaccctctctagaagggtcaggggaagggtccaggtgggttgagggggtcgcaatggataaccactaaggccacactgctgccgggaagagtagggggatatgaaatggccccagggacctggcacttggctttggttttccgtcttctttcctcaggatgccccctgaggcctgggacctgctgcacctggctttgaggagcatctgtggctgggtgctccagctgctggtgtgatcatgggcttccctcctctctcatcagggcaggtgctcctgccccagagactgggcaactggctgtttctatgacgtatttatttttacttgtgtttcatgtcacttttttaaaaaagcaaacagaacaattgtaagtcag

SEQ ID NO: 6596 - DNA, 581 bp, Canis familiaris
gattttacagatgaaaaagagggaccaataactaaacacatccgactaacagctgccttaatattaaaaaatattggtaaatattcagaatgtggtcgcagattgttaaagagacatgaaaacaacttatcagtgctagccattagtaacatggaagcttcctccacccttgccaaatgcctttatgaacttaattttacagttcagagtaaagaacaagaaaaagactcagaaatgctgcagtgaaaaataattccacttctctagtggggactcaaagtcacatacatttcacatactgttactgaagaaagcaccaagtcttaatggaacagagaccatagaatgaattattttatctcctcccatgatgctgagaggaagcttcgtattctgatctctgagcgaatccctttgttctctgtttaaaaaaaatctaaaaagaaaaaaaaaaactgctgtgggattgtcaaccagcttatctgcaggatgtctctcagatctgataaatcctgatggaaactggtatgatcagaattcagtaccatccacattggaatatacatggaatattgtaaaac

SEQ ID NO: 6597 - DNA, 565 bp, Canis familiaris
  misc_feature (1)..(565): n = a or c or g or t
aangannagttcagtttgannaagatccttttggtttnnacaagtttttnnnngaggccaaacagcacggtggctctaaaagaccctcagacagcagccgccccaaggaacatgagcatgaaggcaagaagaggaggaaggagtagatgcacctctcttcaaaatgaatgaacttttatcgataaccctaatgatgcaagtcagatggggaaatactttgtaaatggccaggataaaaaccaaatctgggtgtcagaacccagcactactttttattatgggaataagggggggatggaaaattctttgaactatttagttttttttaaagagtgggttgtgtttgtgcttctcctaccttttggcatttatagaacatacagccccacacatgaaactaagaccacttccttttgtgtgacattagtactttggggttaatattttgtgtaagaatgactgctgatgaataaagttgccccagccacagtgagtacaaggatgttcatgtactggaactatcctgacatttgcccctattannnnnngttttaatttggagtgg

SEQ ID NO: 6598 - DNA, 553 bp, Canis familiaris
  misc_feature (1)..(553): n = a or c or g or t
cantaattgaaggaactaacttctctccttttcctgtacctctaccctacagtctgttgagggaaacccttaagannnctggtgtaagaggactttggagtttggggggtgagccatgaaggtactggcttgttgncgcacaggccctggaagatggtgtggacatgcacattgtgaagcctgccttaggcctcagcttggggccagaactgctactgtgggctcagcatcttgctgggaggtatgggtgtcctgccaggcattttgggtgttttcgcagcattcaggagtttagtgaaaggtggggtacctttccagtatatgttccatcctcctttgtatagttgtctttcctcccatgtccttcctatggcccagggtgggaggatggagaggaggctgctactctgctatttcccacgtgcctctaccatgggctcaaccccagctgtgaaagctgctcctgtcccctacctgggcacatgtgagccctcttcactggattttatacccttgtgtctgtgtatataagatatatatgtatatgtatgta

SEQ ID NO: 6599 - DNA, 175 bp, Canis familiaris
  misc_feature (1)..(175): n = a or c or g or t
ctaaattcactgttgaatgcctgtcccagtccaaattgtctgtctgctcttatttttntaccatattgctcttaaaaatcttggtttggtacaattcatatttcaccaaaacttcttcatataattaaaaaacactaaannnnnttaaaatgaagcannnnntatctttatgcaa

SEQ ID NO: 6600 - DNA, 647 bp, Canis familiaris
  misc_feature (1)..(647): n = a or c or g or t
tgcaggctgggacagtgtgggtgaattgctatagtgtggtatctccccagtgtccttttggtngattcaagatgtctnnaaatngaagagaactgggagaatatggtctccaagaatacacagaggtcaagatggtcacaatgaaaatttctcagaagaattcataaaaaccacaagaatgaagcaaagaatcttcaatgactaagcatctcctacagttgctaatatattgcagtgggttttgaatataaaattgtgcttttcttgatttttttaaacataagcgaatcacattagcattaaaactacagatagaaaacttgacatgtagcttattctgaaagaatcctttatcttctagtatgtgtccccaagtcatatctgtaaaaaaaggatggatctaatgtaagacttctccaaactctgtaatagttatgtgcttcttcttgtaactacttttccaggataatcatgttatagaagaggaccagttgtcatgtagcttatttctctaacatcctcttaaagtccttaacatacctttgaactggggagatgtgctctgttcctaatagttgtgaaatcagtggagtttgttgaaatgttannnngactatcatgtctnnnnnnnaaatgtagtaatgcct

SEQ ID NO: 6601 - DNA, 223 bp, Canis familiaris
ccctccagccccctcgattctcacaccagacatatcccctgagggccacaggaggctactcctcagcccaggtggctgacccacccctgcccctatccggggcctccctgctcttcagctcttctctgggactctcaggggctgctctgtccacagaggaagcgggaacagtctggctttagaagatttcatccctggctcctcctggttcctgcccttccca

SEQ ID NO: 6602 - DNA, 531 bp, Canis familiaris
  misc_feature (1)..(531): n = a or c or g or t
ggtggtgtgggcctgaagcccagtgccaagaagagacgccggtnnctcattaaagccccggagggtcctccaagaaaagacaagaatttgccaaatgtgattatcaatgagaagcgaaatgtccatgcagcagctcatcaggtgcgagtgcttccatatccgttcacccaccatcagcaatttgaaaggaccatccagacccctataggatctacatggaacacacagagggccttccaaaagctgactacacccagggttgtcaccaagccaggtcacatcattaagcctataaaagcagaggatgtgggctaccggtcttcctcaaggtcggacctctctgttgtacagaggaatccaaaacaactctccacacgtcacaaaaaacagctgaagaagaactctgtaaattgagttgctggaggagtgactgaattcttggtgcccagaactaggaaccccaactgctcctccgctggcccggatttactccgagctgcaggatcaatttgcagactggcttagcacatt

SEQ ID NO: 6603 - DNA, 698 bp, Canis familiaris
  misc_feature (1)..(698): n = a or c or g or t
atcctgcagacanntgcttgaaaatgccaagaggagccacgtnnaggtggtgggggtgagttttcatgnnnncagtggctgtcctgaccttcacgcctatactcagtccatcgcagatgcccgtcttgtgtttgaaatgggcgctgagctgggccacaggatgcacatcctggaccttggtggtggcttccctggattggagggggccaaagtgagattcgaagagattgctactgtgatcaactcagccttggacctgtacttcccagagggctgtggtgtggacatccttgccaggctggggcgctactatgtgacttcggccttcactttggcagtcagcatcattgccaagaaggaggttcttctggaccagcctggaagggagggtaggtggcagaggaaaccgggtccacccccaagaccatcgtgtaccacctcggtgagggcgtgtatggaatcttcaactcggtcctgtttgacaacacctgccccacccccatcctgcagaagcaatgtggcagtctagatactctgaacagcctccccactgacaacaaagaaaactgtatcctgacttacaagaaagcaggggattcttcagaggtcaaaattaagtgaaagcaggcatctccactttgagtaaaagccagcctattctccacccactagccagaggaattcttttaaaatgtaag

SEQ ID NO: 6604 - DNA, 461 bp, Canis familiaris
  misc_feature (1)..(461): n = a or c or g or t
gagttgtttcnnnnnaaaaagtaaactttgcagtgtggttgaaatcagaataaattcaagttcattngcctttccttaaactcaagtaattgaatcaaattcaaattctgtttaaaatagaagtaattagtttgcattgttgatcagtttgaatcgttggagcaagcagtggtgtaaacattttggctgagtttcattatagatacatgatgtcctccccaaattgcagataaaatgttcactctttggttgtatatgatcattgggtgtatataaaggaatgatcatgtcctgtgcctttaacccagcttcagcaattaatatagatctcatttttataatagttttgttaggtgagaggaccaattgaaagcattttgtgtattcctgtcactttagattttatcacgtgtaaattattggnnnnntagcatttgtttaatataagcacttttaatcat

SEQ ID NO: 6605 - DNA, 620 bp, Canis familiaris
  misc_feature (1)..(620): n = a or c or g or t
acatcgtcgctgagttctcggtnnatgagaatggccgnatgagcgccacnnncaagnnnngagtccggcttttgaataactgggacgtgtgtgcagacatggttggcaccttcacagacaccgaggaccctgctaaattcaagatgaagtattggggcgtagcgtccttcctccagaaaggaaatgatgaccactggatcatcgacacggactatgacacctatgccgtgcagtattcctgccgcctcctgaacctcgatggcacctgtgctgacagctactccttcgtgttttcccgtgaccccaatggccttcccctggaggcacaaaagatcgtgaggcagaggcaggaggagctgtgcctggccaggcagtacaggctgatcgttcacaatgggtattgtgacggcagatcagaaccaaacactttgtagcaacgtggagtttcatttgaaaagttcccattaattcatgcagccttcaattgtctcgtatcttaggggtttagtttgccctgctctgcacccctgccctccgcaaacatggaatctcagcacacctaaaaatatcggtggggatcagtgaatctgcactcagatgactgtctttcctggagttnt

SEQ ID NO: 6606 - DNA, 583 bp, Canis familiaris
  misc_feature (1)..(583): n = a or c or g or t
ttggcttccngcnngcccctcgtgctatgtggngacctcaacgtggctcacgaagaaatcgacctgcgtaaccccaagggaaacaagaagaatgccggcttcactccccaagaacgccaaggctttggggaattgctgcaggctgtgccgctggctgacagtttccggcacctctaccccaacacggcctacgcatataccttttggacctacatgatgaatgcgcgatccaaaaatgttggttggcgccttgactacttcttgttgtctcactctctcttacctgcattgtgtgacagcaagatccgttccaaggccctgggcagtgaccactgtcctatcaccttatacctagcgctgtgacatgctcccaaatgactggaagcctgggaaataagtcccccctccccaagctagctttaaaacttaacctccacaaacttctttaaaaactgctctctagacatatctgcactgtatttcccttctaaaaacacaaatccttcaaccaggctcctagtgatgctttcttttaaccccctcccccaattttttgccttttttttatgttaagcaaaagcta

SEQ ID NO: 6607 - DNA, 532 bp, Canis familiaris
  misc_feature (1)..(532): n = a or c or g or t
tggtcatggcgcgcacgatggcgaggatngactgcagcgtgttgnngtagatgatggcaatgaactcgaggcactcttccagcgagtacccgtcctggtggataatcctgcggccagggtgagccggtcagggccaggggactggtggggaaggacaggcccggagcgcgtccgtccccaccctcagggacctcagaaagggcaaaggcactcacttcatctgcttgacgatggtgctcttcccggactcccccgcacctgggagggaaggcctgcctcagagctgagctggctgcaccttcccacaacctccccctacccctcaccctgcaaccaggcccgggagatggggacaggccaccggactcaaggcaggtaccagtccaacccccagttccacctgtcccgactccccccaagcaaggtcctggcaccctggaggaaaaacgttcttcgtaaatgccaggagtgacagggggctggcgggggcaatcaacgacctcgacctcgtgtgtgcnnnnnagcttccaag

SEQ ID NO: 6608 - DNA, 593 bp, Canis familiaris
  misc_feature (1)..(593): n = a or c or g or t
ggnnagacaagccttgagaatcgagatccaacatggaaaataagatgaattgacnnnnnaggctgcatgagtattcacatttctcatttgcaatngatggcctgaccttgctccaaaatcccagaagactatattgtgatctcctattgggacttgctttaaattccacactgcctgctgcagagcccattgctgtttccgactacttagaactggcaacctttcatataccccaggatatgagccagaatggtattcctaggtgtgaaatttgtgcttttggaatccaaagaggcccaccagacattgtgcttcattagtaggaaatgcaagatacagaagtttgtcttttactctggaggggatgtcttcacatgtcactgactattgggcctcaaaattttactgaatcttcttagagtttatctctcaccctctggatacatgtatcttaccaaggcctctagcatgcacgtcatgtcttactcattctacccatcagtatattattggtataatatttcagtgtaatgttctacggaatgtccagacagtccagatctcttcagactgtannnnnnagagggcagacg

SEQ ID NO: 6609 - DNA, 607 bp, Canis familiaris
  misc_feature (1)..(607): n = a or c or g or t
cnagcgatnnagctaccagatcgcnntngacttgggtaccctgcacgcccccctgtcaatgagcaccacaggccccggacnntccagagacaccacacgatccagaacagtgatgatgcttatgtgcaactggataacttgccaggaatgagtctcgtggctggaaaagcacttagctctgcccggatgtcagatgctgttctcagccagtcctcactcatggggagccagcagtttcaagatggggagaatgaggaatgcagggagagtctggttggtcacgagcacccggacctgacagacagcagccagcatttaaactcctcttgctatccatccacgtgcattacagacattctgctcagctacaagcaccccgaggtctccttcagcatggagcaggcaggcgtgtaacagggaacagagagtttgtgtacagctcgggaatgaaaaggttgactttaaccaacagtatctatagcagcgttgcgccaaattgccattgtgtttctgtccacccagaatgtcatggctcctttcctcacattggttcatcagtgtgtggttcttttgggttcagagcgggttttgccatgtttgcttgtat

SEQ ID NO: 6610 - DNA, 488 bp, Canis familiaris
  misc_feature (1)..(488): n = a or c or g or t
agagcacnnncgctaccacagnctgngcaacatcagccggggcggcagtgggggcagcagcgggggggacaagcccagcggccccgccccccgcagccggctggacccagccaaggtgctgggcactgcgctgtgcccgcgcatccacgaggtgccactgctcgagcccctcgtgtgcaagaagatcgcccaggagcgcctcacggtcctcctcttcctggaggactgcatcatcaccgcctgccaggagggcctcatctgtacctgggcccggccgggcaaggcgggcatctcctcccaaccaggcaactccccgagtggcacagtggtgtgaagccatggatgtcggggttcctcacccatgttccctgcctcctagccataaccctcccgctgacctcacggatcaatgtattaacaagactaaccatgatggatggactgctccagtcccttgccctgcacaaatatgggggtcagagggcccc

SEQ ID NO: 6611 - DNA, 689 bp, Canis familiaris
  misc_feature (1)..(689): n = a or c or g or t
gctcgattgttattttatggaagagaggagangtagatgagtgtctctcccaggacagcactaacnngtgtggatacatgtccttttgatggccaacatgccagnnatgctgggcancaatcagctaggtcacgccgctcagaaacatttgtcccttnaagcttaacctacctattttctccttgttagaaatccactgggctgatactgttattctcaggatgcatgcagtgaaagtagagttcaaatggttttgaaaagagtaagtagcaactatctgatcttaaaaggaaaacccagaggcttacatatttgatgcaaatattcttagctaccacacatttaaggnngtnnttagtcatctcctaggcatcgacatttgtattaagaaaaaactttccnttaactaatcctgtattttaataatttgnntttttttttttgtaaatattaacaccagttgtgtttggcttacctattttgcaagcttttccttggatttaactcaacatcaggacaatgnngttaagtcacgtgacnnnnnccaaactgaattcgctgttgacagnngaagtgtgttgtatgagactgctaaaacttgatatgtatntctgttgaatgaaattttnntaaaaaaaaatattatntacaatgttatttgaataattccttgtaaatgctgtgaatct

SEQ ID NO: 6612 - DNA, 646 bp, Canis familiaris
  misc_feature (1)..(646): n = a or c or g or t
tatgtgcagcagttccagaagtctggtttcagaggtcccctcaactggtatcgcaacgtngaaacgaactnncggtggggctgcaaaggtgtggggcnnaagatnctgattcnggccctaatggtaaccgcggagaaggacaaggtgctcgttcctgagatgtccaagcatatggaggactggattccctacctgaaaaggggacacattaaggattgtggacactggacacagatggagaagcccaccgagttgaatcagatcctcattgagtggctggagactgatgccagggacccaccagtggtctcgaagctgtaggctgtggcacgtgccagcccccagcagcccttcctctgttggcactgctcttggaacccagaggaggccttcgcagcatctctcataatcagcagtgtcagtccaagggggtttactccaaagagtggttttctttcaatgacgagagtcaaatctgacataattgtagatacaggaaaaatcacctatgatgcattcattcattcgctctaaggtgctactttaagagtggctaatgtttagaggggacagaatgggatggtgagaggtgatttctctttgactaaccagttcatagttggtagcaaaatcagcagttgatttg

SEQ ID NO: 6613 - DNA, 647 bp, Canis familiaris
  misc_feature (1)..(647): n = a or c or g or t
ctattaggcttccatgtaaattttgcnnaantaaaggttttgttgctgagtaaaaaaatccaacacccctttccttaccctttatctcccatcaaccatagtatgattttttcccatatctgtataccacctacgctgttgtttacttatgtaatatttttctttgaacagattcactctcaaacttaaaagtctcgttctgttcatcctcctccagtaacgggtgagaaaatttaggcccagagagattaagcaattgacatacctcgtttctggggagactagagattaacatttgggttgccagacatcagttgagaagttttggtaaaaggcaatacattagatgcctcctcgagactgtagacagctgtcttagacaagaaaagccagttgaaactggacaaccactttggactagctaaggaagaaatagcttgaaacttggcccaaatccaaactcttcctggaagagtgaagttggcatatttacattttgtttttctttaatgatactgagccatattttgaattaaattaggtctcttcagaggactaggaagtacaactggattaaaaggtgcagagcatttcactgatgtcattgaggacttttttgaagaaaactagaacttatttcatattta

SEQ ID NO: 6614 - DNA, 569 bp, Canis familiaris
  misc_feature (1)..(569): n = a or c or g or t
cactctccttgctttgccctgacccactgtgccccaccccacannnagtcgcagcntcacccaattcttgtgctcacctggctcgctcacaggcggtttcttaatgaccgaagcattccccgcccttggaatttctgcctcctccttattccctttggttttgtggggagaggggaagggtcaaggggccaggccagcagcttgggggccacagggaaacgttggataatgtgcctgttttttaactcgatgaaaaagcctacctccgaaatcccctttttgttcttcctggacctggacattcagctcctgtccttgattgaattgggagccactggctcctgggtcatagggaagccacatagacatccctttcttcccttgcacgctcgctagcagctgctaaggtcttcacactctgattcctcagttttttgcctggtgacactgacatgaagtagtgggggagatagtccatgccaggaccccctggagtggccttctccttgggtgtgggcaggccctaattcactgtcgctttggagttgaggtgtctttctttctttagt

SEQ ID NO: 6615 - DNA, 636 bp, Canis familiaris
tagaggacagcagattttcataagcccctacacttcaaaagaacaaattgattcatgttatatcttgacatataaagagaaaaggctagctttggtttttgtaaaactttaaagttttctccatgcttttgttcatcatttcggtgtttttaagtgaaaggtgccagcttcgtttctccattgcaactcaaatataaggtttcttatcgcttactttggaaagcagaagttcctttacccttgacccaaactgcatgtttcacttctgatgtgttaacagaatagaattaaatattggaaaagggggtggaactgaaatttagacccacagtctcttatactgctgatcaaaacttaaacattatagtctactcagagtgagcttattctcattttagaatggctgtttacatctatgccttcagcagcaaataatcagtgcctaacactgacctttccctggtagagaacaatctcaagtaaaaagctgcatataactagcaataactgaattgagtggttatattgtatgttttaagacttctgtatgcattgctctttccaaactctgtataacttttaaatggctggaactactcttgtatggactaagactatttttgacatgcacatatt

SEQ ID NO: 6616 - DNA, 66 bp, Canis familiaris
  misc_feature (1)..(66): n = a or c or g or t
atctccaatccaacnngctttattccttatggggtcanngcttttagtgtctcatgtattctccat

SEQ ID NO: 6617 - DNA, 623 bp, Canis familiaris
  misc_feature (1)..(623): n = a or c or g or t
gnntagcagttttgatatcntctcagatgaagaagtncgccagggcctcaaaanntattccaactggcccacctatccccagctctacnnnnnnggagagcttataggaggacttgatataattaannagctnnaagcatccgacgaactagatacaatttgccctaaagctcccaaattagaggaaaggctcaaagtactgacaaataaagcttctgtgatgctctttatgaaaggaaacaaacaggaagcaaaatgtggattcagcaaacaaattctggaaatactcaatagtaccggtgtcgaatatgagacattcgatatattggaggatgaagaagtccggcagggattaaaaacctactccaattggcccacgtaccctcagctctatgtgaaaggggagcttgttggaggtctggatattgttaaggaactgaaagacaatggtgagctgctgccggtgctgaaaggggagaactagggactgttatgctcagtgcccaactgttacaggaaacacttcgtcatggtggggacgctcacgactctgttttcagagactgctgctcacccagttagagtcggtgtattccacaagctcntgctaaattcatgtatgt

SEQ ID NO: 6618 - DNA, 346 bp, Canis familiaris
  misc_feature (1)..(346): n = a or c or g or t
ctggccatcgtgggnnngctccttggctcctcgcctgacttcaacagtcagtttggcctcgtggacatccctgtggagttnnannnggtcatcgcccaggtnnngctcctggacttttgcctggcnnnnntgnnnnnncgtgtnnngnagttcttcctggggaccccgaagctgaaagtgccnnnnnnngntgnnagnnnnggcacttgctgcccatgttggtgcnaccgggcggnngccccannngnnnacactgccccagtggtgaggcaggtnnggncnnnccaccaggnnngnnnngngctggnaccaccccgcagccacttgagggcctggcnngnagaac

SEQ ID NO: 6619 - DNA, 564 bp, Canis familiaris
  misc_feature (1)..(564): n = a or c or g or t
gccagccagacaaggggcatngacagcaacctgccctacatgtgagctcatcacttctaaaccctgggtgggctccatgccaattgacaggacagggagtgaaaccataacaatttggccatggggtaggagggagtatggggaggattctggaacatgaccctacccaaagttgataacaacctcagcagcagggcccagtcactatccctgacttgccagcacatgcggaactcttttaagtatccaaaatgcagctaacagtgacaaggctgtcaaatcctccagcatccttggatggtcttgaacctgtgtgggctggctgaacctgtgtgagtctgctttccccattttccagaaagactttccccattttccaggaagactgagctccagatgggtgggacgtctccaaggacacacagtatttggttgggacctggtggagcaccatgtaaaatcctttagcatacctcccagcccttcccaaagtcactgagcctgctgttgggggcagggcagaggggagggagggagagttttctttggtcagccctgccgtta

SEQ ID NO: 6620 - DNA, 534 bp, Canis familiaris
  misc_feature (1)..(534): n = a or c or g or t
annnnnntggggtcnnnnngcagtggggnannnnnntgacctggccccagggcggaggggcttggagcagactgaagccccatcttccccagccaccactngcgccctagtgggggtgcaaggccccaactggcggggtcagcccttctcnantgcctgcttctggcagcctcggctccatccctctccttttcttaccctccacgtcccttctccgcttgacctcatcggtccagccagccctgcacctccgggagggcagcctcggaccctcagccggcagctgccgcccagnnncgcgccggggcccctccccactccgcccccaaccttctcccgcgatctccccgagggctaagccagctgttcgtctcctccagcctgcagcccatgataggcctccccacacgctggctcgggactgtcctcagccctgcccgccaatttgacaggcccagcccttcccgcgtcnnncgcgtgccttccccatgcggcccgtgcgcagctgcgcactgcccctccgcccggggccgg

SEQ ID NO: 6621 - DNA, 547 bp, Canis familiaris
  misc_feature (1)..(547): n = a or c or g or t
cgagtggtcctccagctgtggtgaacatngnacnnnnncctccccctggtatngccccacccccacccccaggttttgggccacacatgttccacccaatgggaccaccccctcctttcatgagggctccaggaccaatccactatccttctcaggaccctcagaggatgggagctcatgctgggaaacacagcagtccctagcacattatcaccactccggggctttacagaagaaagggcgcttcagaatcccagtacatgaatcttggaataaatatatttttccttcctttgtagtttccatggtagctgaatgtgttcagatgtgggcagtcggagaaggatagccatgctttcctacacgtattccaaggattgatggacctcaaataagctgccattaacacatctggttactactctaacatactaataaaacttatcgcctgttctccttatttctctggtgaacaagcaaccgggtgaattggaatgtctaactgagttaccatcccaattatatgttcattttgtatctttttttt

SEQ ID NO: 6622 - DNA, 543 bp, Canis familiaris
  misc_feature (1)..(543): n = a or c or g or t
cgagccaagcacgacatggtnnggcagctgcgcgagtaccaggacctcatgatcatcaagctgggcctggactttgagatcgccacctaccgcaagctgctggagagcgaggagagcaggcttggtctgggattcgggacagggagcctccccactctgggctcagccccccgcagcctggcccgcctgcccggaggagcgggccctggcggcctggagaggagcacccctggcggcggctgcggatgctgaaccttcctgcacagctccccagaagtcgaggaccccaaactcctgccccaaggctgaaccctgtgccccagacacccctcccgtggagctaaccctcaccttgtctttcccccttgcaccccccacccctgccccaccctggaacgtcaagtcttggaatcgagcttaccagggaccgtgactgccctgtcccctggggaaaggtagctgggctaccttgggggacgctgtgccactggggaggcccagtaccctgctcctgtcacctgccccccactcctctttccctgg

SEQ ID NO: 6623 - DNA, 530 bp, Canis familiaris
  misc_feature (1)..(530): n = a or c or g or t
agcagagatgtaggancttcnntgggnctgaagaagtcaagctcattagagagtctgcagacggcagttgctgaggtgactttgaacggggatattcctttccaccgcccacggccacggataatcagaggaaggggatgcaatgagagcttcagagctgccatcgacaagtcttatgataaacccacagtagatgatgatgatgaaggcatggagacattggaagaagacacagaagaaagttcaagatcagggagagagtctgtatcgacagccagtgatcagccttcacattctctggagagacacatgaatgggaaccaagagaaaggcgataagatggataggagaaaggataaagctggcaaagagaagaagaaggacagagacaaggagaaagacaaaatgaaagccaaaaaggggatgctgaagggcttgggagacatgttcagccttgccaaactgaagcctgagaagagatgaacaacaaaccagattcaaaaaggtcttgagaagcacatattgcacag

SEQ ID NO: 6624 - DNA, 575 bp, Canis familiaris
  misc_feature (1)..(575): n = a or c or g or t
gncttttccctnnnnnnnctgtcnctcaggnctgacaggnataatcaatgtcactccacttnnanngtggtagctgtggtgttnnaacactggacttgaatatggggtgctgggatcaagtcctagctttaccactaactagctgtgtggccttgagcaaatcccatttcctctctgagcctcagttatcccatctgtaaaaggggaggtgaaaatacctacctcacagaactgttgggaggctcagatgagatgctatatgtgaaaacattctgtaagcttcgtacaaatgtgaagtattattaatattattacagtattattgttattattattaacaatctggggtgggtgagcagtcggagagcaaagagtatgaatggggcagactgagaagtctgagtacttaacaaaatggactttttggaagaaatcagataaaggcgctgaatttagttcttagttttggggcagaaaactaaacttcctggttcttccaggcctccaccctcgggagctctggggaaaggaagggtctgcaggttccgtgccaaatctgtgccgtccaacagact

SEQ ID NO: 6625 - DNA, 666 bp, Canis familiaris
  misc_feature (1)..(666): n = a or c or g or t
angtgcatgttgatggcccctgacannacaaggncagctcttctttgtcacnnnnnngctttctcacgagatannnactacatcagcanntcaggagctgggagactcaaggagaaaaaaattanngcccaccctacccgctgtggtgagnnaagagcaggaaaggggagaagggaatgtgttctgaactggccttgttccaggatgggttggcaggcagggaatgtcacaggtcagcagtccgggccctagctacaaataggccctgtgggcctgccaggctccagccacgttcagcaggggctctcagcttcctatgtggcagcacctggcacactgtggctctggcagcgtcatgttaatcctcgcctactccctgccaagtccgggaggcccgctcctctcagcccaagacctggaggattcactgtttcaccagcgaagggcagagctgcctggaccgggctgcaggaggggggcacagccaccccagctttggctgggcccaggctggggcactgcctgactccagggcggcccccccaggaggtcaaggtcggggcagggaggcagctcttctcaacctcggctgcagctgtgaccttgataagataatccgacacctctgcctacgtctgttcactccgcggttaacaatctgaagcc

SEQ ID NO: 6626 - DNA, 650 bp, Canis familiaris
  misc_feature (1)..(650): n = a or c or g or t
gcaangcaatangtgcagacagcattgatgggatctgtgcacgattcnnnagnntcntaacagaagccaaacaagaggataaattcaaggatctctaccggtttacatttcagtttggnctggactctgaagaagggcagcggtcactgcatcgggaaatagccatcgccctgtggaaattagtctttacccagaacaatcctccagtattggaccagtggctaaacttcctaacggagaatccctcggggatcaagggcatctcccgggacacttggaacatgttccttaacttcactcaggttattggccctgacctcagcaactacagtgaagatgaggcctggccaagtctcttcgatacctttgtggagtgggaaatggagcgaaggaaacgagaaggggaagggagaggtgcactcagctcagggcccgagggcttgtgtcccggggagcagacttagtggctctatcccaggagcagcagcagcagcagcagggatctgcctgctgccctgcagccaacggaggaattggacctttctggaaattactgaagatccagatattttctactttacacctttctctgccttgtatctgaaagggctctaaaatgctgtatcatgttttagnnnctttcttcactt

SEQ ID NO: 6627 - DNA, 568 bp, Canis familiaris
  misc_feature (1)..(568): n = a or c or g or t
aaaataatccttttcacagtttgtgcactgtgtatggtctgtgtagattgatgcagattttttgaaatgatatgtttagacgagatcataccactaaagcaagaggaaaaagcttgcctttctggtatgttctaggtgtattgtgaattttactgttatattaattgccaatataagtaaatatagattatatatatatctatatatagtgtttctcaaagcttagacctttaccttccggctaccccacagtgcttgatatttcagagcgtcattggttatatgtgtatagttccaaagcacataagctagaaaaagaaaatctatttctaggaacactaccatctgttttcaacatgaagcgatgccatgcacatagaactcctcaacataaacttcactgcacagacttactgtagttcattttgtcataaactctgaatctccggactgaatctaatgcttccaaaaacgttgtttgcaaatatcaaaccttgttatgcaaaaaattataaaatgaagatttatacattnnnnnnttaagctgtactgaatctgtggaatgcat

SEQ ID NO: 6628 - DNA, 571 bp, Canis familiaris
  misc_feature (1)..(571): n = a or c or g or t
gaccagtaccgnnncccagagccctnncctagcccataaaatngaggggcccannnagttcaaagagcagannncatgtgagaccgctcccccacccaggtccaaaattgggatctctctcctacccagcccccattacctaggggaccactcttccccagcnnngaacttggggcttggagaccagagcatccgtggccagcctcaaactctggacccagagatactccaacccccagtctgggacctgcccatctaccatgctcatccccaaagctgggatctgggaccaaggcattctcttgaacccgggattaaggctcttgaccctaccccagctttgaaaccaggtcagggcattgccaaatcttgaaccctggccccaagtgttcccagcccccttcaggacaggattcaggcatcctgaccctgttgaacccttggttccaggtgacccaaacactcacaagtcccacttgcctccctccagcttccaaatttctacagcgatgaggaccatggggnnnggtggggtggggtgaggtgagccaagccctgacccggcatgggg

SEQ ID NO: 6629 - DNA, 396 bp, Canis familiaris
  misc_feature (1)..(396): n = a or c or g or t
gaataacttgaaggcgcacgcctcaaagatgtatgnnnnnaaacaaggtttaaatcnnnnnngatattttatttaaaatatgaaataacgttaggaacaactagtttcaatatactccaggcatcaaacaaacaaacaagcaaacaaaaacggttgtgggttttgagctccatcatactcttagcactaaggaggcgtctggcctccgcaaaccatttctccggattccacgttcccaggtggacatcgcccccaccctcatccgtgtgtcgtagccactcactgttggcgtcaagagtgttttcaagaactgcctctggactcgggacagtgagtaggatcaaaataaataatgtccatggcggggaagggaaaggctgttggaggagccgtaga

SEQ ID NO: 6630 - DNA, 660 bp, Canis familiaris
  misc_feature (1)..(660): n = a or c or g or t
gnntgctgnctgccctgccgcggctccggccctgacgnggcgnncactccngcagctcgnnnngnnnnnnnggcccctccccgaccccaacaccagacnnnngccttttcntgcgacccgtcaccctgctcgatcccggcccttccgcccctggtccccacagtcacgccggcccccggccccgccaccaccctcccttctcaggcagtgatgtgagcttcctcagggaacccgggaagggccgagggtccccgagtcagagccgaggcctggggacacaccgggaggggccatggacccccaggtctggccctcaggtggggtggaaacgtgctgacggccactatgtcccagaaggacggcatgctgctgtcgcaggcagtggtgtagctcagctgtgtggacagggtgtctgtgtgcccctgtgcaagtgcctgtgcaagtgtccggccgtgtgggagccagagcgcgggcgtcaggagacctacgtcggcagcggctgagctcccggggccccaacaacaaagctgctcttccctggcattcatgcggcccacgctcactcacaaaccccttttggaagacggggttccactgcatctgggttcggactgctggacccaggagtcagccaccccccagcnnccgcccccacccctc

SEQ ID NO: 6631 - DNA, 599 bp, Canis familiaris
  misc_feature (1)..(599): n = a or c or g or t
tggattgagccaccattgaagactggttaccccctgggcattggcagtgcaggagagnnngcatccaagagagcaatggaattcanntctgcctccctgccccagaggggattggggcaccttgatagagaaatatgtataagaatagaatacagttatatcccaaataaccttctttatgttttaaaggattctttccaaattcattatttataaataacatcctttttccccctcttctagtttttaaaactaaaattggtcattgaatttttaatttttgcaattaaatggaattttgcaattccatttaattgaggaagaataaaactgtattgtgtttcttgttgagaaatatgtgaaaatcaaatgggcaggtgtagagcaatgcatttgagtactgagtcctgctggaggctgggataacgaacctgagccgcagggcaagtctgaaggaaatgtgatggatgttccctattgcaataatgtcacaattgcctcaaacaggcaatgttagtaataattacatcaatttagtcagaatcctgagtgtatttagatctcatgacttaatcttgtggaacttttcctatatgcaa

SEQ ID NO: 6632 - DNA, 628 bp, Canis familiaris
  misc_feature (1)..(628): n = a or c or g or t
actgctatccgtatacnnntaccaacttgcaagaatatctttccagtatcaatcatgactcagcacggtcaaagttttgtaaaatacgtgtcntgtgccacacaattgctaggaacatggtgtatgtcttaacaatcactactcccttgaagaacactgactcaagaaagcgaaaggctgtgattttgactgccagggtacatccaggagaaaccaacagctcttggatcatgaaaggcttcctagattatattttaggagactcaagcgatgcgcagttgcttcgggacactttcatcttcaaggtggtacccatgctgaatccagatggtgtgattgtgggaaattatcgttgttccttagctggacgagatttaaatcgtaattatacatctctcctaaaggaatcatttccttctgtttggtatacccggaacatgatccgtaggtaaaataagcctcagattacctctctgtttatttagtaaactcagtagttagatttttgcttctacagctcactcattttactctagcttttaagatggcttaactgataattaaactctggctacttaatnnnttgctcattcgttccnnnnttctttctggcattatgccactggat

SEQ ID NO: 6633 - DNA, 646 bp, Canis familiaris
  misc_feature (1)..(646): n = a or c or g or t
gagagcnncaagaagcccatccacatgtacatcaacagcccnnnnngcatggtganntcgggcctggccatctacgacacgatgcagtacatcctgaaccccatctgcacatggtgcgtgggccaggnngccagcatgggctccctactcctggccgctggcaccccgggcatgcgccactcgcttcccaactcccgcatcatgatccaccagccctcggggggcgctcggggccaagccacagacatcgccatccaggcagaagagatcatgaaactcaagaagcagctctacggcatctacgccaagcacaccaaacagagcctgcaggtgattgagtcggccatggagagggaccgctacatgagccccatggaggcccaggagtttggcatcttagacaaggttctggtgcacccgccccaggacggggaggacgagcctgagctggtgcagaaggagcccatggccgtggtggccgcgacagagccggcccccacgagcatctgagcgcgggacctcaccctccggaggagtcgggggacaccaggcaccaggccagacactggagctgcagccccgcccgcccctcggctgagcctggaagggccccgtgaggaactctgggtttgggggtgcccctcag

SEQ ID NO: 6634 - DNA, 711 bp, Canis familiaris
  misc_feature (1)..(711): n = a or c or g or t
acagagtctgtcagcancgataccatnnatgccatgtcggtctttatgctcttnnnnnnnntcattttctttgactatggcgnnaacgctgccattgtatcnagcacactgtnnttgaacannnncatttttgcctctgtctgcctnncgtcgcgcctgccccggtcnctgcatgctttcatcatggtgacatttgccatccagatttttgccctgtggcccatgttacagaagaaactgaaggcatgtactccatgcagctacgtgggagtcacgttgcttttcgcattttcagccttgggaggtttactgtccattagtgctgtgggagccatcctctttgccattctgctggtttccatctcttgtctctgccctttctacctcattcgcctgcagctttttaaagaaaacattcatgggccttgggatgaggctgaaatcaaagaagacctgtccaggtttctcagctaagttagaaacttccattctgttattaaggcaagctgatagactagcctcccaactagtagaagactcgaagacagtcccatcctggaaacaacatactgatgtgggtaggggaacagcagtcaaaagaaagaactaaccaaaggcatgggtggtgaagatgcttgtcctttctgttattttgtggatgaaaatgctttctggggccctcctcaattcttgcctctcattggctgtaac

SEQ ID NO: 6635 - DNA, 602 bp, Canis familiaris
  misc_feature (1)..(602): n = a or c or g or t
gcactcagctanctactangaagaaaaaaaagaccaattcatctgagctttgatgttgatggattggacccatccttcacaccagctacgggcacaccagtcacgggaggtctgtcttacagagaaggtctctacattacagaagaaatttacaaaacagggctactctcaggattagatataatggaagtgaacccatctctggggaagacaccagaagaaataactcgaacagtgaacacagcagtagcaataaccctggcttgcttcggagttgctcgggagggtaatcataagcctattgactaccttaacccacctaagtaaatgtggaaacatctgtaaaaatctcacagctaatgtcataattagctaatctaataatttacttaagcttacagttatcctcccaaagatttggtctttctgaaaaatgttctgccttgtaaagtattagtataattaatatgagctaccaattccctcttggtgtgaaattcaagacttggaaatcctaacttttgtgtaattaaaaagacacatagggtgggactcttgatatcaggagataaagtaccccacctgaaaagagaccatattcc

SEQ ID NO: 6636 - DNA, 640 bp, Canis familiaris
  misc_feature (1)..(640): n = a or c or g or t
tgatgaggnnactctgaccagcatcgtgcccacaagagatggcgctgcacccccaccccagtccccggggtccccaggcggtgggcaggatgaggagtggtcagatgaggagaatcctcggaaggctgccatgggggtgcgggtacgggcgctctacgactacgccggccaggaagctgatgagctgagcttccgagcaggggaggagctgctgaagatgagcgaggaggatgagcagggctggtgccagggccagttgcagagtggccgcattggtctgtaccctgccaattacgtggagtgtgtgggggcctgacctcccctgacagcccccctgcagtgtttctccaccctgcatcagagcccagcttcttttgcacagccggacccaagggccctggaccatggtgcccctgctgcccctctgaccactgaggagggaggaagtcctgggacccagggaggggagccgcctgcatctactgagtctaggctgaggggaagatgaggaggtcagaaggtgacagaagggctcaggggaacctgggcctctccaggaatgggtgggtttccccagaagctgtggacccggttcctggtctcagtggggtggtcttggggtgagtgtagtcctgggcta

SEQ ID NO: 6637 - DNA, 694 bp, Canis familiaris
  misc_feature (1)..(694): n = a or c or g or t
tctctatatctatgacccccctgtgcnnnacttcacggtcatgaagatgcaggtncctggctccgtcgcggaatacaatgtcnnggcagtnnactccgccagcatnntcctggttgtacaggggagagtgacagccagcactcctacagcccagaccccaattcctctgcagcgtggtggggtgctcttcattggggccaacgagagggtctccctgaagctcgccgtgcccagtgacctactgctgttccgtgcctgctgcctgctgtagaggccgtagccttcctggctctcctcaggcccagctccaaccccttccctgctctggagctgggcataccctgaagagcaggggtagagtagtgagccccaaggtagggactcctgagcaagcctaggacaaaccatctctctcccgggaggaggaccctgatggggacaaagaccagacactcccctggtcttctcaccgtaccggagccagggcctgctcagggcggaggcggcagctctgttccagcctacagcattaggcaggctggtaacatccaggactagctcagtgtcagtcacagcaagagggtcattaatttaagaacaggtttccggccctgggactgcccatttcctcagctgcggaagagggcagagcaggcctgtggcctaatattgtcaccctctggctctgtcaagg

SEQ ID NO: 6638 - DNA, 617 bp, Canis familiaris
  misc_feature (1)..(617): n = a or c or g or t
aaccaacagggactgcagccagtgtgnngcgggctgggtgcaggannacgncgcctgcgtngatgtggacgagtgtgtggcagacacgnngccctgcagcgaccagcagtactgcgagaacaccaacggctcatttgtgtgcaaagaatgtgatgctacgtgtgtgggctgcacagggaagggtcccgggagctgtaaagagtgcatccccggctacagcagggaaggtggccagtgcacagacgtggacgagtgcgcgggcgtggagagtgtgtgcatgcgccacaacgagaactgctacaacactcctgggagctacgtgtgcgtgtgtcccgatggcttcgaagagacggaggacgcatgtgtgcccacgcagaccccgggcatcgagctcacagcaggccccacgcagccgctgcccccgcgggaggacttgtgacgcgtgtccagagcccgagccaggcccccccttaaattattcactgagcccggagcgctcctcacccccgccccggagctgcggacgggcagctgccgccttgggagtctctcgtgcccggttggcccttagaaaagctgcaattctcggttgttcttaaacagatttgtatattttg

SEQ ID NO: 6639 - DNA, 597 bp, Canis familiaris
  misc_feature (1)..(597): n = a or c or g or t
cnntatcccacattccagccccattgtgcaggggtgctgnnannctgccctgtgnctcagccctggctgccaaagctggggacactcaagtgcttccttccctgccctttcatcctcccagttgnnaggnntcttggccttcctctctctgtgccttgggccctaaagccccacctgtagtagagagcaaaggtggcccctggtggagagataagggaaagactgtctggattccctgttcctactagtatcagggtttttctacctgtcccccaggctgtggcccaccatgagcccctgcccatggtccagtggagagcctcaagccagcaattccctgtcctcatcagccacaggatggttctcactgcctggccctctatccctgccatctgtcccatggtcttcagctcatcctgcccccaatttacctgtcatgtctcctacaggctggttccaggtgctgctctgaggttctgggcagtgggctgggcctggccccagaagcagggcagctcctgtctgctccttgagttttgtaaagccaaccctttcaccagaatagtattaactcctggtgctttgtactactggtcc

SEQ ID NO: 6640 - DNA, 575 bp, Canis familiaris
  misc_feature (1)..(575): n = a or c or g or t
ttcctttnncttctccccgtgtctctgcccannnnngggacatggggatcctagttannaaaacatnnnngagccagannnnnggatctttccttctgtttgttcttctnnngnagccactgtgttccacccaagcacaaagacccagtgttacctgttcacccttttgtactatggtcatgcacctccgcagacctgagcctccggcccgcccggcgcgggaccggtctccccgtggcagcaccctgccgggccacggagcccgaccctggccagtgaggagggtgggcctgccttccgggaaggggccctcctccttcccagccccttgtccctgcagcgtccgaggcctccgagccaagcgccgtgccactctcaggaagaactggagacgcatcccagagccaggcatgcgtgctcaccgtgtgcgggagtcatccgctcagctccaagccgcacatgggagtccacttcaggcctccagggctgggctgtgcgatttatttttctaaagctggagacaggaagaattgtgcctttgcatattacttaagctcaaactgacaacttcgatg

SEQ ID NO: 6641 - DNA, 603 bp, Canis familiaris
aaatttgtgggactgaagaatttcccttgtactcctgaaagcctgtgtaaggtgctgtctatggacttcccttttgaggtagatggacttctcttctaccacaagcagacccactacagccccggaagcacccctctggtgggctggctgcgcccctacatggtgtcagatattctcggcatagcggtgccctccggcccgctgaccaccaagccagaatatgctgggcaccagctccagcagattattgagcacaagaggagccaggaaggcatgaagaagaaagtcacacacaaggcatctgactatgagttggaacacctgtctactcctaggctggagagccctccccatagcctggaaccccctgggagcctcatggagaactaatagggcagccccttggggagtcacaggatggtgcttcatcccagaagtacggctggagaggaggacggtgacaacaccaggttacttcattttagagtggacttagcaaagccactccagctggagacagcttatctcctatctgaaatgctggctcgggcagttgagggaggttcccagattgggtggtctttggatgtgagcagtaatttg

SEQ ID NO: 6642 - DNA, 124 bp, Canis familiaris
  misc_feature (1)..(124): n = a or c or g or t
gcctggccttcccttcccgtctctgtgtgtggtgccttggtnnnggtgtccgtgtgtttgtgtctgtttttcggnngctctcggcctgtgtaatgtcgcttccctatggnnaccctcnnnaccc

SEQ ID NO: 6643 - DNA, 603 bp, Canis familiaris
  misc_feature (1)..(603): n = a or c or g or t
agacaccaatgnnttagtagcagctgtggnntttggnaaggggctgtctaattggaggccttccggtagtagtggtcctggccagcccggccagccannagctgggccgatccttgctggagcctcaggattacagcaagtacagatggcaggagctccgagccaacagcaaccactgctcagtggggtgcagatggcccaggcaggtcaaacagccctccaggaaatggagcagttacagtaagagagaacagtctttcgcctgtgacagtaaatggggtctagctgtcttttccggaagtagctgagcacgagacttgctgggggaaaatgccaagtggaataaaaaccaacatcaagtctgcttcaatgcatccctaccagcggtgagtgtggccggcaacttttcccaaagctggactagatgggtacaataaagagaacatgggctttcagcgccagacaggttccagctgcaccacagacgagctgagtgaccttgggcaagtgacctgatttttccgagcctgttttctttgtaaatggtgatacctacctcatagggttgttgtgaggactgaaatgagaaaatgaatgtaaaac

SEQ ID NO: 6644 - DNA, 474 bp, Canis familiaris
  misc_feature (1)..(474): n = a or c or g or t
tgaaaagttatgtatggattgagttcacagaaactatattcagttgccaaaagattgnnnncaacccaaatgtcatcagtgcctgagtaattcaacaaaccataggacatctatacaagggaatactacttaccacaaaagggaatgacttactgacacaagctacaacgtggatgaatctcaaacgtattacattttaccatgtaataatttaaattatatttgataaaagattattagatattagattataaatatagataggtttctataattttatatgtgcatatcattacaaactatagtaatattgtatatttacaatatatagcacactataatatttattgtatattccttataataaaatgtttattttatatatgtattgtgcaattattgaattatgtaatttttatatcaaactttcacattaacacttcaattatttgtgtttttacatgtttacattta

SEQ ID NO: 6645 - DNA, 606 bp, Canis familiaris
  misc_feature (1)..(606): n = a or c or g or t
aatgagagcaagatatgtgaattatatcaaaacatcagaagtggtcagactgccttatcctcttcaaatgnngtcttcaggtccaccttcttactttattaaaagggaatcatggggctggacagactttctaatgaatccgatggttatgatgatggttctaccattattaatatttgtgcttctgcccaaagtggtcaacacaagtgatcctgacatgagacgggagatggaacagtcaatgaacatgttgaattccaaccatgaattgcctgatgtttctgagttcatgacaagactcttctcttcaaaatcgtctggcaagtctagcagcggcagcagtaaaacaggcaaaagtggggctggcaaaagaaggtagttggaccatgtggagatagcatttgcacaaacacagcaacactgggtgacatccaagtcttgaggggaaaccgtgtgaagcaactactgtaaatttgagtcatccttaaagttgatctcttataactgttgtgtgtggtaactcttcagcacgtgttttgtacttggtacacaagaaaacccagctttcatcttttatctgtatgaggtcaatattgatgtcactga

SEQ ID NO: 6646 - DNA, 587 bp, Canis familiaris
  misc_feature (1)..(587): n = a or c or g or t
ccccaggagtgaggaaatattcacccnnnnnnccatgcacggcaggtgccaccagcgcctcgggcacctcccacggtgccggtggggcaccacctgcccctccgcagagaaggtggccagcgaggaccttcgccagccctgggacagggtgaaccaaggcaaaatgcaaaggacccggtgagcatgaccttcagatacccttttacttagagaaggtgggagaggcctccaggctgtcctttgtggcccagtgaggacgctgctgcgaggcctgggtgtgcggcagtaccttcaggctcagcggggtggggggtcgcccaccctccggcagaggaagggccgggtggtgaccgccatcaggcagggctgggccggctgaggaaccccgtgacccgaggacccactgactaaccgcgtttacacgacttgagtgttgaaccctgattataatgtctgtatggcgcctttcctagtccaaccctgagccccggggaagcgggagagtgtggctggcctcttgcactgctttgtctccaaaataaactactgaaatcaaaccgcatttcacacgtgtttacaaatgttgc

SEQ ID NO: 6647 - DNA, 621 bp, Canis familiaris
  misc_feature (1)..(621): n = a or c or g or t
tnnagatctggaggtagtatttcaggatcgtnttgccagacttggaaagtcaannagcagactgattgtagtnnnctcgctcattgatnngncaactaanntannanggctatgccgganntgcgaggtgtttggggnctcggcgctcatcgtngacagcntgcagtgcgtcagagacaaacagttccagagcctcagtgtttcagcagaacagtggcttcctttagtagaggtgaaaccacctcagctcatcgattttctgcaacagaaaaaagcagaaggttacactgtcattggcgtggagcagactgccaaaagtgtggacctgacgcaatacagctttccggagagatctctgctcttgttaggaaatgaacgtgagggaattccagcaaatctgatccaggaattggatgtttgtgtggaaattcctcagcagggcattatccgctcacttaacgtccatgtgagtggggctctcctgatttgggaatataccagacagcagctgcttaggcatgaggacaccgagtcatgaactttgtgccttatctgagatgaattattggtgctcttgaaacatttttttaaaaactatgtgtactnnnnanttgattatnn

SEQ ID NO: 6648 - DNA, 541 bp, Canis familiaris
  misc_feature (1)..(541): n = a or c or g or t
tttgtagaaaccngatggtattttattggtcttcaaagatgtccagaagccgtgtatataatgttttttaaacagaactttattcccagatgaactttctcattctctcagacaagggcctggggctgtctccccatgagccaccaccagagatggtgccagtgtttgcctgccagcccagggcccagaggagccagcttcacaggcttttcttcccagctgggcctggtggagtctggggtaggggggagagctgngatgcgccccggtgcagtcttcagctcagtttagctggggctaagaggaggtgctgctggttctcaagtggactaggccccctggcaaagttcaaggaccaccatggtctcagagacttggtaaccccagcctcctcttccaggccttgtccacccatcgacatctacctgagagagggtgaggcccagcaccatgtagaccatcctcacctgccattcagggactaggtctccagctcctgtcctgttccctcctatcctaggcctcccagcctccaggctgc

SEQ ID NO: 6649 - DNA, 20 bp, Canis familiaris
  misc_feature (1)..(20): n = a or c or g or t
ggtggcnnnttcgtggtgct

SEQ ID NO: 6650 - DNA, 642 bp, Canis familiaris
  misc_feature (1)..(642): n = a or c or g or t
ggggtcccnacaaccacggaccatgctccnggtgcgcctgatcccgctgctgagngctgttcctcgggcaggctgcagtcggccctggccggnntcggggctgctgggcaggcgagnntgcaggccctgctacagcacacagccagcccgcccaagtggagttgcctccatccctgggaagaggttccagctggagcttgaggagatgctggtccctaggaagatgtctatcagccccctggagagctggctgagcgcccactacctcctacccagactagaggccagggccccagggaccctggctccatcccaactctatgagtgtccgcctagccaggtgggccagggggctgagaaggggatggaggaggtctgggatgctccccagatgcagtgcaaaaatgtgctgaagattcgccggcgaaagatgaaccatcacaagtaccgtaagctagtcaagaggacccggttcctgcggcggaaggtccgagaaggacgcctaagacggaagcagatcaagttcgagagagacctgaggcgtatctggctgaaggcaggcctgaaggaagcccctgcaggttggcagacccccaagnnnnacctgaaaggcaaatgnatctagtgctcctctcccctgac

SEQ ID NO: 6651 - DNA, 589 bp, Canis familiaris
  misc_feature (1)..(589): n = a or c or g or t
gtcactgggtcacatgnnaagaggtctcgggctgaaggctggnaagagcccgtggctatatgcctgccttttaatgacccaggacctagaaacagccgtctcttcctctcccgcctccccctccctnnnnncgcctggaacctaagacgtactggtatggcagttagccctccacccagcacactcgccctgaaagcagctgcctccattagcccccatcagaagccaagcccaaacacaccccgactccttccccggcgcccctcaccctccatcctgaaggatcggtacgatgctcctggcaaagctgcggatgggcatgggtccccggcgcctgcgcggcttcacgaggtggtctgtggcaggactgtgacaggggcagccactgccactccagccctgcgaccgccctgtcttcccctgcacagtgctcagggaaatggccttccccgctggaggccagccgtctgcctgacgggctgtgactcctcccggcattggcctcctcccctcttctgagctagttgattgatcaaaagtttttttaacgcttaagatttgggtttctcttttcacagccacatttgtt

SEQ ID NO: 6652 - DNA, 649 bp, Canis familiaris
  misc_feature (1)..(649): n = a or c or g or t
gcaggtaaagatgctgcagcggatagancggcacaatgccacgcagnnnnnaggtcagaagatccaagtatctgtnnnggtnnagaagccccgagannagctgttccagctgtttggctatggagatgtggtgtttgtcagcaaagatgtggccaggcacttagggtaccggtcagcagtngaggccctgaggggtttgtacggtcgtgtgaggaaaggggctacacttatctgcgcctgggctgaggaaggtgctgatgccctgggtcctgacgggcggctgctgcactcagacgctttccctccaccccgggtggtggatactctgggagccggagacaccttcaacgcctcagtcatattcagcctgtcccaggggaagactatgcaggaggctttgaggtttgggtgccaggtggccggcaagaagtgtggcctacagggctttgaaggcatcgtgtgaacgccctgtggcagggggcgctggctcacactaccccctccccggaggctggcaccaccggccatcattaccttctcccttccatccagccgggcatctggaccaccctgctctctgggcagatgcgggctgtgaggaggctccgcctgtgtcctggnnnnncatgctactgagctgcagagcann

SEQ ID NO: 6653 - DNA, 580 bp, Canis familiaris
  misc_feature (1)..(580): n = a or c or g or t
agtgaaagantagnngtgtnngacnnnaagacagactcacnnnnnnctacaaggaatagaaactcagactgaagaagnngtcaagactttnntaagatnngcagataaaatatagagcaacggactctcaaaatctttcaagtttttacagatacacacctcgcttgggccactacttcgcaaggtggtttcatgtccaaccagctgccaaaggtctagccttgtcctggatggtgtatgctgaaactgactgtagccctgtaacacttacacggggtaggaatttcgtagccatgagatactgagaaactcagtataaaaccatctcacatagccacaaaattctaggaccttacagctgaaagcagggcaaattgatgccccccggttagaaggcagcgttctgggcagagacatcgtgcccacgagtggctaaaccagcagtgatcccctcaactgtcccctgggaagtctgaatcctcaatctggatgatctctcagcagagctctagaacccggaaacaaaatgtctgacttcaaggatttgtcatttggtatttttggcagttgtaaggaaatt

SEQ ID NO: 6654 - DNA, 416 bp, Canis familiaris
  misc_feature (1)..(416): n = a or c or g or t
ccctccttgggggccaggggggcagtggaaaggaggggacccatcacccaagcnnntgaggggggggattctggaaccacaggcncttcaggattcggagcactaggggcagggttgcccagtgggcctggagtcccagcagggattccagaatcgaggggcacgccagattctgagcaccaggggcagaggtggccagacaacctcagggaggtgttggggcatccccgtctccccccaaagggccctgggcctggccctgaggggtccgcaagaagaggagcttccccgtccccggtcagtcagcccgcgccctccttcccacccagccctcagtataaatcatgtttataagttatggaagaaccgggacattttacagaaaaaaaaaaaaaccaacaaaaaatacnnnnnnn

SEQ ID NO: 6655 - DNA, 503 bp, Canis familiaris
  misc_feature (1)..(503): n = a or c or g or t
aacttgantggnnnnncccacccaaaagccccctntgcnnnnnnttgggcaattccccttccnagggcagggcctnnagcagaccagnntantgaaggcttggccattnnnannnnnctccaggactcttccagcctccnctactctgtgcccccacagagccataccccannnnntctgtgtccttcatacctntgcgnnnnngcttaagtnannnnnncagcntgnnagctttgcacaccannngnngaattcttgtgcatcccttaggaccctgctcagacaccactacttctgtgtgaagacttctgctcctctttatcttccccagatttgatcacttcccactcccctggacttccactgcanggcataacatctattggannncggatgtttcnnnatgctttcttgttcannngtgtctccctccccaactagactgtgcgctccttgtggtcagggacagagtcttgtttgtttatatatcctcagggactagc

SEQ ID NO: 6656 - DNA, 582 bp, Canis familiaris
  misc_feature (1)..(582): n = a or c or g or t
cnagccgccccagccaggtggtggctgaaacacgcnngcgtaaaggcttgaaggaaggcatccctgccctggacaacttcctggacaaattgtaggcagccctcccctgcagcccaccaccccaggtgggactcagcacagcccctgcacccggctgacgatcgaccacagcaacaagccctcgcattctccatgacacctcgagactgtccagtgacgctccacctgacaggttctggggcccacttagtgccatcactcaacgtgaacacttgatgccgtttctttcaatatttatttcaaaatttcagaggcaacaaatgccctagcagcagggacttatttggccggtgggggtgggggaggcgggatgggacactcaacattttttttttccatttcagaaactcaaatgtcaaaaaaacgcattaagaggtttatttgggtaaatggcccgtagtggatttccccccagaaagggggaaggaacgagcgggtagacctttctttttggacagaagctagaaggcaggaaactttgtgcggtgtcaccgtgagcacctccagctgtattagtgccat

SEQ ID NO: 6657 - DNA, 590 bp, Canis familiaris
  misc_feature (1)..(590): n = a or c or g or t
cggcntgtgggttaccctgaggcgctaccttcccatctgggatggtnnangacggaggactccagactgcggnnagctgcccagggcgcaccaccttctccacaagccatcctgcggactcccttctgcaaggcggggaggcagggcttccaggagccgctccacagatactcacatttccaagaactacgtctggagtgggcttggggaaaggcccagcgtgggcagagtgggctgctcggcgtaccatgtgctgtgtgacatggctcccaccgccagcccgagccccgcgttgcctgtgtcacctgccgagcagaggagactcgagtgcctcatgagacgtcactgtgacagaacaggtccttgctctcagtcccaaacatggggattaacggggtgtgtctgcacatgatggagcacactggggccagtggggccagggaagagaccaggtgcacaggacggcagcctttattaacagggctcggcatcttcctgcctcatctgtgaaactacttattttttgaactttttcctcttcagagccctccattcaccttcctgagtggccagactgttaaaaagctgtt

SEQ ID NO: 6658 - DNA, 567 bp, Canis familiaris
  misc_feature (1)..(567): n = a or c or g or t
aaaacactgctcaacacccaggaatccctggctttgaactcaaacatcacaggacatatcacaggcatggnnagtgccttcaggacggtatatcaagtaggtggggtgaccgcctacttccgaggggtacaggccagagtgatttaccagatcccctccacggccatcgcatggtctgtgtatgaattcttcaaatacctaatcaccaaacgacaagaagagtggagagcaggcaagtgaagtgaaatagcagagaatgcggccaggggctcaacactgctgcggcctgcctgctccagccacgtgctctgtctcctggcatgctccagccttgagtggagttggaaggaaggtagagggttctccccaggctgttggtgtcttggctaacaccagttcctgccaacctctgttgtcgccatctttccttcaaggccctaagcaagtgcagcaaagcacagcacagcacctttgataacctctccatcctgggcctgatgacctgctctagactgttatagaggaataagcagctcattcctgtggttcctaataaaaagcctnnnn

SEQ ID NO: 6659 - DNA, 533 bp, Canis familiaris
  misc_feature (1)..(533): n = a or c or g or t
cacgtggtagnnctggccacagagcaggnnnggcagatctgccgggagaaggtgggcgagaagctctgtgagaaggtcatcaacattnnnnaggtgatgaacaggcacgaatacctgcccaagatgcccacgcagtcggaggtggacaacgtgttcgacacgggcttgcgggatgtgcagccctacctctacaagatttccttccagattactgatgctctaggcacgtcggtcaccaccaccatgcgcaggctcatcaaagacaccctggccctctaggcctacgggggccatgggctctcctggatggcttgcagacctgggcttctggggatcgtactgttgggcccttggggctctggaacctgctccaggtccttgaggagacttggaatggccacccctggcttccttgttctgcggtggccaatctttggtcatccctctaaccttggctaatggtcaagtctgggcttcactgtccctctagggccctattggggggtctcccttcctctactgtatggaagagc

SEQ ID NO: 6660 - DNA, 470 bp, Canis familiaris
  misc_feature (1)..(470): n = a or c or g or t
tcccccaaataaattctcaggcagggagtgtctttaaaaatagtaagggaatagatatactcgggtacttattgaaatggnnagtaataaacaaatgcttttataatgctacctggtttttatgaaatgtctttgacaagccaaaattctacggtgtagcgatctggaaaactcatttcctgggattaacttctcaagggatttaaaacaaaaaaagttaatgtgggaaattagctgcatttcactttactgaaagtctttgccacgtgtgatcgaattaagttgtcatttatacatggaaagcacttggttttggggtttgtgagagtacgtgtattatacaagcacaacagggtttgcactaaagaattgtcatcgtagtaacactatttgggagcctaacttcatacgtgtattcttaattgcacaaaaagtcaataatttgtcacnnnggggttttgaatgtttgc

SEQ ID NO: 6661 - DNA, 629 bp, Canis familiaris
  misc_feature (1)..(629): n = a or c or g or t
ccgtgnnagtcccanngcggccgggggtgcgaggatctctgtgtctctggacttccaaacacacccctgggtgtcccctatgcctgcagnntgcagggcagggcccctgggccgcgttcctccaaggnntgaccggtgagcacagggccgggctgcgtgggtgtgtccagccacggagccactgcaggagacaccaccttgaccctgagcccctcagtgagccccgcggggagccagctgtgcccagtccaggggccgcccggcccccacacagcctctccacgaggaacagtggacgatgggcccccctccctcctgcctcccgcccacctccgcacctgacctgccccagcctcgctctccagcccccagccggctctcccagctgcccaccactcacctggccgtgatgagctccagcagccagtgggtccggacctgctcgatgcccccgtgagggacagcacccacataggccaggttgagctgctggtcccagctgaggtcatagcggtcagcctggctgtgcggcaggggggggctggggcagagcgagggggcgggcattagtgcccccgacggcccgggaggcccaggacgccaggctccagcagcggcccgggcagtgc

SEQ ID NO: 6662 - DNA, 515 bp, Canis familiaris
  misc_feature (1)..(515): n = a or c or g or t
tgtgctactggtgacacatcgccctggggatttcagacctgcagatttcaactgaangccacgaaatcgagctccatctgcaacaggcgatccctggtcaggagctgttggggtgtggttggaggcccgtcagaggcaagggcttagggaaggaccccgctaagatcctggccaggcctagccccactcccaaacctgggtctcctccttggcggtgctgtcagcgcacagacccatgcgcatccccacccataacccttcaccctgacgatctgtattgtattttaatgtatatgtgaatatattgaaaataatttgttttttcctggttttgtttgtttttcgttttgcttttagcctctacgtgctagatcacaggaagactttgtaaggacggttttaagttctcctgcaaggtttaatttgttatcatgtaaatattccaaagcaggctgccttgtggttttggccagccttgtgctatgttgataagattgatttactgcttaaaatca

SEQ ID NO: 6663 - DNA, 497 bp, Canis familiaris
  misc_feature (1)..(497): n = a or c or g or t
atggccatnnnnnaatcagggctcactcaagctcagcctaccttggaagcagtatgtgtcagtaagaggaaccagaagtcaacccaatccatcttccagctgaagccttttctagacctttgcttgtgatgggaaccaacttgcttattggaatacggaccaccaggctctaaaacagttccttcccaacctgggtccccagcagagtcccaagacccacagaaatcttcaaagttggaagagatggaaacaaggaagcacactggttacattactgctggcaaccattttgtaaacacatggggaagctgctttcagctgaagtttggaggcggctctgaacttcggaagtgtaacaaggaagattccagcagaaccacacggggcagcctcaggaggagacattgggtggaaagcagctctgagaatcgactccaggaaatgaccctgctggagggttacttgattaccnnnnnggtttagaacaaggatgtaac

SEQ ID NO: 6664 - DNA, 607 bp, Canis familiaris
  misc_feature (1)..(607): n = a or c or g or t
cggtcttggggtctgtgacctgatcacattctctgagcaaggtgggccctggannactgttattttgtactgggcccaggcctttcctgctgcagacagctcggctctcagtctcccctggctcgagagcccagcccagagtccttccccagcaaaagaggtacagaaacaaatacccctccctcccgcaggcagccagctcagcccgcctccagccgggagccctggtgacggttgctatggcgatctaaagatagagcaagagtcaggagacctgggtccttctccctgctttgcccactgagcagctgctgattctgctccgcccccacagccctccccaccccaccctccatcccatgtggggccagccctccccagggacctggcgctcctgggcagcgcactgcaggtaatgaactctgcttcccaccgtctggtctccactgtgctgcatcagcttgggctggctgcgggcactctggaattggaacatgaagccatgaaatctccaagtcagaggaccacagaagcagagtgagaacattacagtcatgggatcacagtcgtcctcacaccagagattaaagctcaggactccagaann

SEQ ID NO: 6665 - DNA, 588 bp, Canis familiaris
  misc_feature (1)..(588): n = a or c or g or t
tangaagatcaataatngagatgtgatcntggtatannnntgctcgtctctggtatcacgaatccttcannnggcttgggctaagggnnnnnnntnncgggtggtagtggtngacagncggccacggctggagggaaggcacacactacgtnctctggtnngtgctggggtccctgcctcctacctgctgattcctgcagcctcctatgtgctcccagaggtnnctaaggtgctattgggagctcacgcactcctggccaacgggtccgtgatgtcacgggtagggacagcacagctggccctggtggcacgagcccataatgtgccagtgctggtctgctgtgaaacatacaagttctgtgagcgtgtgcagactgatgcttttgtctctaatgagctagatgaccccgatgatctgctttgtgagcgaggagaacatgtggccctggctaactggcagaaccacctgtccctgcggttgnnnanctagtctatgacgtgacccccccggaactggtggatctggtgatcacggagctggggatgattccttgcagttctgtaccggttgtnctacgagtcaagagt

SEQ ID NO: 6666 - DNA, 369 bp, Canis familiaris
  misc_feature (1)..(369): n = a or c or g or t
ttannnntatttaggtnnnnnnatnnnnnnngtttnnnnanaaaagcaggcnnnnnnnggtccggannncccnggatnnnnantnannatnnngannncacatcacccaaaactcagagcaagaactctcannnccaacagcaaccccaaagtccaaaannnnnnccnnnnnnaggtaatttggggcagnnnnnnccaaataagtnnnggggtatanncatcacttagtggnnnnaggcnnnnnctacatntnnaaaagctgtttcnnnntgaccatcacttagnacaagcnnnagccnnnatttcccttcacaacatcccccttannnagccccccaactggaaatggagccaaagagaccggagtca

SEQ ID NO: 6667 - DNA, 643 bp, Canis familiaris
  misc_feature (1)..(643): n = a or c or g or t
cnaggccttgctgacaccatgaccccaggagcttttcatggcnntaaatgtgcctgggctcctgtgccccagagcccatcgtaaagacacccccaccccgcagagaaggaaaggtcaggagtcaggtgcacttggcccatcgtcaggctgcagacgggattttccaagcagggctgtgccagtcgctcctggtcctgctccttcaccctctgtctcccccgagagaccagcagggaccctcgcacagcagagggcaggtgagatgagacccaggtgaggtgcacgtctgtctgcaccccccgggccggctcactgcaacccgtgagaacagcagtggaggaagggggtgcagagaggcctgtgcagaggtgtgtgtgtacgcacacctacgatatgcgtgcatcacgtgttctctccccacccaagacaggaaggacccctcagtgaaaccgttgacttgccgacttgccgtgtttttgccaaaaccaagattgcgaaggacacctccacctccagcggcggggcggggggcgaggggcggcctccccggccgggtggactcgctttccttctctgtagccagaccttgaaaaaattgtgactttcactgggatctgttccgcagtggccttttgctatgtgc

SEQ ID NO: 6668 - DNA, 591 bp, Canis familiaris
  misc_feature (1)..(591): n = a or c or g or t
ggaggactggtnnnaacccgtggatatattggagggggcagggctacaggcacccgaggcacaagcnnagagcagcagcttgcttggctggctactactgagcaggtggtggggtcatgcctgcccccttccctgggctctgagccctttgcagtaatcatccaggggctggtgaagccactgggagcctcattggcacctcagaatcatagtgttactgatcagggatgtgagactgttgtctggggtggctggggggaggggagtgggtgggcaagccagtctttttttctgtcttcctttgctaacttgggattttgagcaggttgggatgtgcctgtgattccctgccaccctgggaaccactataccctccttgggcccagactgctgatccagggtagggtgtgtgtgtgtcagtggagggtggggtggagggggttgcagtgtgggaaagtagctctgaggttgacctcagcttctcagcatagttgtcctttggggagcttgaggaactggggtcaggccaagcagaggccttggtgctggttggggatggggcctgcagagtcttagttactgatttcattt

SEQ ID NO: 6669 - DNA, 350 bp, Canis familiaris
  misc_feature (1)..(350): n = a or c or g or t
atgctcctcatttcattccttagagatccaggagagatggaatgtttnnnnnnttcaaaatccgcagtgagccccagttctaaaggacaatttgtgctaagatattaggacccagccnnnnnnnctccttccccactctccaccccttacccccatgttgagagccagctcaggagagatggtccgagaacaaagccaccccaactatgnnnnnnctcagctccaaggtcttatgtgaagtagcactgagggccctcctggaagcatcccactcctcaccttactgtcacacccatcttaaggaaacccatctatgagttttggaatcaggtgggcttgggttcgaatcc

SEQ ID NO: 6670 - DNA, 584 bp, Canis familiaris
  misc_feature (1)..(584): n = a or c or g or t
tgaatgaggagtgtgnncgactcctnntgcagagaggaaccacgcaggtggccacaggtctaatgatgaacagagaccggagggttggtttgttggaatacagcatccccttcctgaccagggggctgctggtgcactccatcaagcagctgcaggcccaggtcctgcttatcaaagcaagccaaggctattttaacatggaaagaggtatcactgacaagagtgtcatgcttttggtgctagacacgctgagatctgtcctaaaagagcagttccagtacatggaagtcccgggcaaccactatgtgcacctgaaccaaccccagaatgtggctgacatcatcagtgcctttctgcagagcaaggagaggctcccacactagctgtagcctggacctggggctttggaggccttgtgcccgtcactcccatccggattccaggtgtggtggggacacggggcaagattcttttaacatgttgacgtcacgggggagacactgcttgaactttggggtgttgtctgttttgtggctgataatctgcaccaagctggtggtgggcggaggaaggagtggccaggt

SEQ ID NO: 6671 - DNA, 558 bp, Canis familiaris
  misc_feature (1)..(558): n = a or c or g or t
ccccacttgtgctttctgtctccagtctccatctgcccagctcagtgagcccagccatcaatggccatnnggcccacgtgccagccaaggttcctgtacccacagccccatggccatggtacctggaagagaagggggtgcagtgtgaggccagcagccccctccctgggggaggcctgcattgaggtgggcagcaaaaaggagagcccctgagagctgccccatcaggggtctgccgtccctgtggggctgagcatggggcaagcgtgggcaagtggcaaggggaacaagccgagatcatgaatagctcagggcagtgggcagagtggccagcgcaggcgttttggggggctctggcccggaagcctcagctccttaccctagggctggccaggagctcagccagggggccggagttcctggctctgctgcccccttcctcagcactagcctggctttccaggctgttcttggaggagagtgagcttcctgcctccttcctctaagacagtctgggacaacctggggcggggtggggtgacccccatgcccagtcca

SEQ ID NO: 6672 - DNA, 317 bp, Canis familiaris
  misc_feature (1)..(317): n = a or c or g or t
tgggtgtgttttgacctttgtttccctagaaagctgccagtgactccatccatgggtgaaactgctagaatggccaggtgtccatacacnnnatccccagcacaggtgtgagcaagcacaggtnnnnnncctttcacgttatacttaacaccactcctggtccacagccgttctcctgaaatccttggggctggatgggtctctgaaatcagaaaacttggatttgagaaagaataagagccatttattgtgcatttcctaacaccccagcattctanagcagctccccaccatcaagcacgtgactgttcttgcaa

SEQ ID NO: 6673 - DNA, 541 bp, Canis familiaris
  misc_feature (1)..(541): n = a or c or g or t
agtccagtccaccagtgnnccatttcccatcgnnaacgtgagacagggcagaaccagccacggtccatnctgcatggtcacaatagggtccctgtgatcgctcttgtctcnngtcatcctgtatcccctagcatttgtgcttgtacttgtgcttannnggccacccaggagatgggctgggggctgcatcactgctcacggaccccttggagggaccccggcctccctgggggcagtgtgggcactctggcttcctctgggctgcctggggtctcaccagcaggagtgcgggcgggcaggccagtcatcccagcacctcagccccgagccccgggagccctggtctacatgtgctttcactccctcagcctgcaagggtcagatttgccatcaaaacaacgacctctactgttttcttttgtattttgataaacactgaagaagctggagctgttcaactttatcttggggaagttctcagaactggtttatttggtgtcgtggaacctcttactgctttcaatacacgattagtaatcaa

SEQ ID NO: 6674 - DNA, 673 bp, Canis familiaris
  misc_feature (1)..(673): n = a or c or g or t
tggatctcacctcacctggcnctgnnncagcctcattccaggaacatatgataagattacaaattgcttgactgttgtcagaatcttgcagagggnctgagtgagaggacctgaagcttcagctttgccagtttcctgatacatctctcctggggcagtccagcgaatgggggcctcagtcccctactctcaggctttttagtagttattccttatttgcagtcggcttccctgagtcagatgtcaccttgtccagaaagaccctccttgaattcccgagaccaagctaggtacccatcctatgtcctttagaagcaccctgtgctccccttttttgtaatacccacaatgccttgccatgtctcccccagtcaattagaaactttagtaaggacaaggattgtaccttcttcaccaccatgtctctggtgccttccagtgtctggttctcagtgaagcttgtgagctgtactttgaatgaatgaaagaaacagcggtggctctggttgttcccagattttggccaccataccaatgatccatccttaggtttaaggcccccttggggaatatttaggtagtgactgctcattcaattcaaacttgaactccatctgtggaattcattcttccnnnntttgtttgaccctnnnnnnccagtgcctgcctcttg

SEQ ID NO: 6675 - DNA, 542 bp, Canis familiaris
  misc_feature (1)..(542): n = a or c or g or t
gaagaatcncgacaagtgtgtcctatcgcgatccttaggtcacagtttgtacctgaggccaagaatccccaggtgcctgcttttgttaatgtctaccgaaaatgcagcctgatctggactcaggtgccccaattctaagtgtgcatagaaaactgacaatattaggaaattctttttccccccttaggagcaggaagaaaatatgaccctaaagggttttggcaaagggaaggtggggagagctttgacttggattttttttaaattgaaatgtgaacttcaaggaacttttgacaaccatgggaaataattttatcttaaattgctttactgtctgtcagctgtttttcaaagaaaaaaaaaatcatccctgcaatcacttcttggaattgtcttgatttttcagcaatttaaactctaatttagtcctgtatagagaatgttaatgtagttttgagtgtatatgtgtgtgggtacggataattttgtattttctttaggtctggaaaaggaaaacaatttaagctgcgaaaattcttaaa

SEQ ID NO: 6676 - DNA, 544 bp, Canis familiaris
  misc_feature (1)..(544): n = a or c or g or t
caggaacagaaacgatgttcaggtgttcagtgtcaccaaggaaaacagaaaccancttttgccagatattgtgacgtgtgtgcaaagcagcagcaaatgaagatggtttgtgttcctgtttcgtgcacttcaggatgcgctggttcacaccaagcctcatcagtgccctgcctgtcaaggattcatgccttcaggcttatgaaaccttatgggcttttccagagaaagcctgacagctgttttccataaaatgtttaaaagatcaaattagcccaaatgctggattggcgcgacaagatgaacagtccaccgcgctttatttatgtggagaggtttctgtttatttcctcttgcagttgtgcgtatgattttggtagatcatgaaatgagaaatggttttcagagtattagatggaacttgcccccactgaagtttataagggtgttctggggaagggggaggggagcgttcgctatctaatcagttctgcacataatgaaaattaaagccctctccaggtgcagctttagcttaaaactggtt

SEQ ID NO: 6677 - DNA, 562 bp, Canis familiaris
  misc_feature (1)..(562): n = a or c or g or t
aaacaagattgaaannnnaaggcccaggcttactgtccaacacccagattttacccgggattctgctgagcatgacctcatgctcatcaagctgagtcatccccaaaagctcaacgatcaggtgaagctggtggccctgcccaacaccacagatgacagaagagggggaaagtgcactgtctctggctggggctgggaatggaaggattccagctcagagcctgacgtccagataaaccagaccgtcttttggttctctaatgatgactgcaaggagtcccctgtaagacaaattcctgttcaaatcacggagaacatgttctgtgcaggatcatctctggagaacaaacacatgtgtaaggaattggcagctgccccagtcttgtgccaaaatcagctccaaggcatcctatcttggtcagcagggtgcattctgagaggcgatgtcggctactacaccaaggtttcccgctatacagactggatccgcaaagtcatccacagcaactgagctctctccattccctctcccagtggcctcagacctgggtctaccatcctt

SEQ ID NO: 6678 - DNA, 687 bp, Canis familiaris
  misc_feature (1)..(687): n = a or c or g or t
ggaaattgaacgaattatgatgaattatnnnaaattgaaatcacgtctgggtgagattcatgatagcaaaatgcgtctagagcaggatttgaagaaacaagctttnnncnnccgggaaatagataaaaaaaaatgaacagtatcaaacctgatctgatccagctgcgcaagatccgagatcagcaccttgtagatcatttcagtttgctattgtgggcaaaaagaaagtcaagcaagtacacatagcatacagaagagctttggaaacaaggcaaggagatggctcaatcataaaggagtgagacagaagcgtctaaatgcctggctaggaatcaagaatgaggatgctgatgagacctattttatcaatgaggaagatgaaaacctgccccattatgatgagaaaacctggtttgttgaggatatcaatcgagtacaagcagaggacttgctttatgggaaacctgatggtgcatttttaattcgtgagagtagcaagaaaggatgttatgcttgctctgtggttgccgatggggaagtgaagcactgtgtgatctacagcactgctcggggctatggctttgcagagccctacaacctgtacagctccctgaaggagctggtgctccattaccagcagacgtccctcgtgcagcacaacgactccctcaacgtcaggcttgccta

SEQ ID NO: 6679 - DNA, 623 bp, Canis familiaris
  misc_feature (1)..(623): n = a or c or g or t
ctgctcttccagtgcnntagaggacccagnnncgcaagtgacagcaaggccagatgcctctgagtgtgaaaccccacctatgaccaccttcccacccccagccctgtctgggttccccatgtgcacctaggcacctcccttcagaccacagttttagggaagagagctccagaggcccctgtcctacccatgcacctgctcactgcaatgcctggacttcaccagagccttagttagctgcctgtgttggtcactaaccaacaaggttagcaccgcagccacctcctctctgcagggccagggcccagaaacacagcccttgtcctgactacacttcaagagcccatgggctgtcatctctgactgggtcccccactctttccatgtgactgggctggaagaggggtgacggaggaagcatgctctatccggagtggggtcacagcctccagggcccccagaatctcaaaggggcacttgaagaaagtcctgctgatgcacgtagaactttctgctttgcacagggaaggatcacaaaataagccaacacgatatgttcttacaaatgttgcagtaattatctatgatttgataaatacttttggattccaagcaggctttag

SEQ ID NO: 6680 - DNA, 612 bp, Canis familiaris
  misc_feature (1)..(612): n = a or c or g or t
agnttgctganntgggaatcggtgcagaaggagaatttcctgctggcgcgcgcgcgggacaagcgngagagcgactccgaacgnntgangcgcacntcgcaaaaggtggacacagccctgaagcagttgagacagatccgcgagtatgagcagcgtctgaaagggctggagcaggaggtccagcactgtagccaggtcctaggctgggtggccgacgcctgagccgctcagcgctgctgcccccagggggcccgccgcctccagccccgtctgggcctaaagattgagccctgctggcggtcttcacggagtatcccccatagggagattttgctcccaaagtccttgcaggtccttggcccttgcacctcgtggccttgtctttcacatgggcctcatgctcatggaggacacctgggccgccgtcaggaccacctcagggagtgtcgtccatgcgaaccacttgcaggcctatcccctcccttctggtaaccagtctccactctgggaggatcagcctctggagccggatttgcccttctgagggccttgccacagccggctgggtgggagaaggctgcnnnnnccccggatatagggatcacagatccc

SEQ ID NO: 6681 - DNA, 512 bp, Canis familiaris
  misc_feature (1)..(512): n = a or c or g or t
ggtcgagacgcacagcggtcgcagnnnnngncggtcacnnnnntctagcttccccgacacggtgctttcctnncagtgttgtgcagtgaccgagctaaacttcaannacctctgcagggccccagctaagcccgtgtgtgctccctgcgccccggtgagcccggtgcggcaggttcgggacctccgcccctgtccctgtgtgcgtagccgacctgcgttcttgctctcctccagattgcagaacctgaggcctgtgatcagatgtatgagagcttagcaagactccattcaaactattacaaacacaagtaccctcgccccagagacacgagcttcagtggcctgtctgtggaagagtacaagctgatcctgtccacagacactttggaagagtttaaggaaatgaataaaggaatgtggaagaaactgcaggagaagtttgcccccaggaataccgaggagaagcagaaggcctgggctcggtccnnnnctcgcccgcacacctaagtgtg

SEQ ID NO: 6682 - DNA, 577 bp, Canis familiaris
  misc_feature (1)..(577): n = a or c or g or t
cactgacaatnatgancagtcccatcatttngattagtacatctgnnngctgaatttcatgacctaaggctgagttttaaaaatttcaattgnctggggcgcctgggtggcgcaattggctgagtgtccaactcttggtttccaactaggtcatgcatgatctcagggtcgtgagactaagacccatgttgggcttggctctcagcatggagtctgcttaagtttttctctccctcttcctctgcccctccctggtgcacatgtgtgcacaagcgcactctctcaaatcttttaaaatattttaaacattaaaaaattccaatttgggggcacctgactggctcagtagagcatgcaactccatctcagggttgtaaatctgagccccacactgggtgtagaaactacttaaaatctttaaagattctaattggcaattttgtggcctgttacacttaagttataagaacttgaattctggaggatccctggatggctcaggatagcgcctgcctttgccttcagccccatgtgtgatcctggagtcctggggctgagttccataccgggctccctg

SEQ ID NO: 6683 - DNA, 546 bp, Canis familiaris
  misc_feature (1)..(546): n = a or c or g or t
cngagctcattgcatgtcactttggaaagcactttgacgtgtaagcgtacagagatgggattcagacaaagacctccctccgtggaggannacttttttttcagtatgttcctcctaatgtagctaccagccagaaagggggtagcccagagaagcctcagcccacgtagagatcagagctgattgtatgagtcaatgcttttttttttttctttttctttttagctcttctgatgtgacacattcctattcctgtcgttatcacttggacccccacgccgcacatttctaagaattaaatgcctagatggattaaatgtagtgtgtgaatattctatgtaacagcccatagagtttaacaagtgacttgaatgatttttcctaacttgtttgcaactgatagctcatattgaatgtttttatgtaaactttgtattgttgggaagaattacccaatcagagatttatattttcataaatgttacatttagttaaattttgttacagagttgttacactagaaaattattgcagtcttcaaaggat

SEQ ID NO: 6684 - DNA, 562 bp, Canis familiaris
  misc_feature (1)..(562): n = a or c or g or t
gcaaggattaagaccatgtnnctggggtactcgtgtcaagtccagaagggnnnagtgtccctctcctacctctgcgaagacgtaattgaaggtcaagttggactcgcgttagggcaggtacctctcttgctgcaaaaaaagtttagaggagtctttcagttggggaggtgacaggtaggtaagatgggatctcttcagatggggaagatacgggggagagaagagctcttggccccaggcagctgtggcgaggcagaaccaaactccccctgaatccccaagctagcctagcttccctgagtcatctctattccagcatcctgtcagatccctcaacgtactgattttccccttgtgttaactataccaatattatttttttagcaattgaaatgcactttttttatttcaactcaatcatgattttaagtataaaaaatttatagactgttaaaactactttttttgtgtatttttaaccactcaatgtagcattgtctattttattcttgtgagactctggtacaaggtgtgccacttcatgatatttccgacatgctgg

SEQ ID NO: 6685 - DNA, 607 bp, Canis familiaris
tactcttcgctcatgcattttgggatacagggtataagatgcagccctgtaacaacaccaacagaagtagtagtttctgggcccagtcaccccacaccccaaaggaggagctgaatctggttcaacatagcacaaactgttaggaaaaatgaaattaacatcaatgatatgtagtccagtaaaaatctccctctttagggtgtgtgtgcgtgtgcgtgtgtgtgtgtgtgtgtgtgtgggtgggtgtgtgtgtgcgcgcgcccatttatatgtgtgtgtctatgtgcaactcactaccaacagcctcactgtgcacttggtcttcacagtgctcgctgagaactctcaccaggttggcgcctgaatgccttactctcagcatcagaggctggcttgctctgtgcagatttttaattttctttgttggccctgggctggttaggacctctacagcttcgttctttcaccattaaatagtggcctttttcagtatttcccccctgtccctttataaaatgctgaagccacaaagcacatttttggggatcatagaaggttggggttccagaaaggcctcttgtgtgatggttcaattcaccatgggatt

SEQ ID NO: 6686 - DNA, 494 bp, Canis familiaris
  misc_feature (1)..(494): n = a or c or g or t
gnnnactgtagaccaggctctcacgcnnggtnggggaggtcatatttattatctttatctgtaatttcctgtatcagccaaaagctaactagagactatatttgagaacattcctaggatggccttgttgtaataagtttcttttttttggaaactttttgaaagataatttgaggcacagattcaaagtccagtcagagcaccccctggggggtggtggtggcttttaaggtccaaatccgccagagcaccagctggtgctggtaagagcctccagtgaccaaaggcatatgtttgggtacctgaagctggaaccagagtaggataaagactgttgagccgcaggcccgacacgatttcctctgaactggagaggcggcggtaaggcctggcggaaagagtcatcgcttcagactacgggtgggaagtgagctcagttataacggtgtgggggtggggaagtccaaatcaaagaatgctggaaaacaaatctc

SEQ ID NO: 6687 - DNA, 628 bp, Canis familiaris
  misc_feature (1)..(628): n = a or c or g or t
acagcgagannntgatttacttgcccaagattccctgtgtaaacacagnantgtctgacttctgagaanntgttttcttcacagttcttggcattaatcccgagactaggaaatcaggtctttgtaacatctgtactttcatccccactgtgctctgggcacagggtaaatgcttagtcagcatctgcctgtccaggaaggccacaaggccctggcgggcgctccagagtcagactgtgtgtngaggccggggggctggcgggtgggggggttcttggctctgctgttgacctgccgccgctctgggccttagtttagccatctgtatatgcagacaatagtttctgtctcatagggttgtgatttaatgactaagtacatggtaaactgcttaacagtgtctggcttatgctaaatatttatatttggctacaggtgatggttttggatactttgtgatgaactattaccagttttataattttaagtgaaagaaaagtaggtctgggtaatctgattgttattttcctccctagcatttgaacaaaacctacaatacagatgttcctcttgttctaatgaactcttttaacacggatgaagatacaaaaaaaatactacagaagta

SEQ ID NO: 6688 - DNA, 595 bp, Canis familiaris
  misc_feature (1)..(595): n = a or c or g or t
ctcaatggctttcttctcccacttgcagtaaaaacttggcccaagcttttcttccaagatgtttccctctactagtatttctaaatatgttgcactttcttcgcaggcatgtcgacttcccctttgcccccccaaatcttctggaaagggaatgaaagcagaggtgggacatctagggctttgccatcctgtgctctgggtgtggaatgctgctgtacctgtcccttctggctcagggaagtatcttcttgcccacaacatttctgtggggagaggttctgaatcctctgatgcttccacttttttgataggccacgtgcccaagaagcctggcccagtctttctgtaatagtgaacctgggccattgaagagtaacatggctccactggacacaagaggatggtggaatcaataggcaggggctttttatagcctttagggaagaaaatgaaattatttcatctttggacttttaaatactattggaatgatttttttccttctttctaaacagggaaaataatgttatataaaagcatcctttttgttatttgnnngcattccctccccannnnggtgttttaaaaatgcaga

SEQ ID NO: 6689 - DNA, 365 bp, Canis familiaris
  misc_feature (1)..(365): n = a or c or g or t
ctgagcacctggcgctgctcctccgagccgatgcgccgcggcagcgtctcctccagtcgccggccccgcgcnnntagctcccggcagcgctgctccagcgccagctgggggccggggtggggggtcagcgcccgggctggtcctaacccccacacccgacccctccagcccccgagcaccctccaggctgaagccccattctgagcctaaccctcaaaccttcgtcttgggccctgcaacaggggctgcccccaaatggcccctctggacacactttctggccaccctgaaacaatctgcccctggaatcagctccatggataccggccgaccccagcccctctgaccccctcagggctcatcat

SEQ ID NO: 6690 - DNA, 661 bp, Canis familiaris
  misc_feature (1)..(661): n = a or c or g or t
tntggggaaaaaatgtgtaagattagcgtaagttaaaaatggnnnnncaggttttgnnagagctgcctgcctgaaagcacaggacgctgggcaacaggtcttagaaaagttgtaatgtcagtagtgtaacctgagaaatccgtgcaactctgttgaatgcagtggactttaccatatttataaaggaaggaggaaggcaaatgctaacttgtcaacaaataatatccttattctaaatcagatcattccttttgttagtagcagagtctattctcaattacaaatgatattaataggtggggataatttttttttaacagatgatctcatttgctgaatgatttaagagtaaaattagccactgcgtggctttatgtacagtgaccggttttgttgcactcgtctgtggtggacccccttgcctacagtggaaagcagagtgtggaggaggtaaaaattggagatgtttgagaagttaaaatactattcctactgtaaggctgttgccggttctgaatgagacaagtaatttaatccatctcaatttagtgttttaataaaaaaacctgaaaattaattgaaatgggtctcagatatgtctgcaaatatgggtactatttttatgcccgtgtattttcacatttaatnaaaatatnnnnnn

SEQ ID NO: 6691 - DNA, 611 bp, Canis familiaris
  misc_feature (1)..(611): n = a or c or g or t
agaaggttttctatgtgtgctnnngcatcagagcccctccgtcccacccatcatgggctatgattngnntcagtttacagatgaggtggctgagggaggctggnngtctgcaggaatttggacccacatcttccgtcccctcttgggccaactcttgttctacagctggaacagggggcctgctggacactttcctggcttccagggaacctccaggagtggaagatggttgatccagagagcctggttggaggcctgatggtcctacatggctcagaagatactttgaacatgcatttaaatggtctctaagagccaggggtaggagagctgggatgtctttgtccctcgatattcattcccctagaaaccatcatccacaagtcctgaacttaccctgtaacaaatgtgtcctactgggggtaccagcacctccatccagcaggctctgcagccagacacatcatctccattcatcccacgagggggagctccaagatagctggagagaggcgccgctgcacccggcccaggtcccacctccggcctggaggggtctccgttcccctaccaggcaggcactactgcccctgtgccccatgccccttccc

SEQ ID NO: 6692 - DNA, 719 bp, Canis familiaris
  misc_feature (1)..(719): n = a or c or g or t
gtnactcatccctcagtaatcatcagagnnntcacancggagannccatatcggtgtgaggaatgtggaatatcttttggccaaagctcagctctcattcagcatcnnnnnnnncacacnnnnnnnnngnnnnnnnnatgtaacacatgtnnnaanacnnnnngacagagctcatcacgtattgcccatcagagaattcatactggagagaaaccctatgaatgtactacatgtgnnaaacttttcaaccacaggtcatctcttactaatcattacaaaattcatattgaagagaacccctagaaagtagatttgcatgtgtgaaagccttaaaccaaagcttatcagaatacacgagtgatacaacaaatgtaatggataggaaaaacctttctgtaatgtagggctcatcagatatcagctttcaaggataaaccttgactatataatagataatgaggaaagtagaaaagtgtacatgcctgttaggtacttttgaaaataacccaaaatgaaaatttcacaattggagacaatgactctgggcatttgtaaaataattgttctctttctacagcagtgtacacgagataccatatgtgattatcataaatatctgggtgaagggaggtgtacactggatttctcattaaaaagaaaaattggtaatactttttttttttacaactaacatgtagtagcatataaaagacgtgatc

SEQ ID NO: 6693 - DNA, 601 bp, Canis familiaris
  misc_feature (1)..(601): n = a or c or g or t
ttcatngatgggaggaaaaaatccatttttggggattgcttacatcgctattggatccatctccttccttctcggagttgtactgctagtaattaatcataaatatagaaacagtagtaatactgctgacattactatttaattttatattctgaaaacaaatttactgcatgtgcatcaaggccagtcctattcaacttagctttcgaatgctgatgtctggttagtatgtcatttttgaagttggcacataactttttttttttttttaaagcagtttttgtcctttgcttcttctttatggatgtcttatggaaatatatgacgggtatgaaacaaattaactatattgatcatatcaacactgtaacttctgaaatggcattctaatgtttgctttttgttgggtcaggccatatgatgcatagagcctctttcatgtgaaatgcatctattgcttaaatgtttatgctgtgctgataatattatattgacatatgatgctgtatacgtgtgcctattgtgtgaagaaagggattacaagatgtatgaatataatgactttctaaccttgcaggatttagagttacaaaacgatgaa

SEQ ID NO: 6694 - DNA, 611 bp, Canis familiaris
  misc_feature (1)..(611): n = a or c or g or t
gatacaaaaccngtaatcagtnnnccactaccaagccctgtcaatcccagcactaattctaatggcatgaaagatgatccacatgctggaggtagtatgatgatgccacccatcaatctaactagcagtaatttgatggcttcaaatcccaattcaaatctttcccatccaaattcaaggttgactgaaagagcaaaaaagagacgtacctcttcacaatctattggacaggttatgtctaattacaggcaagaggatgcaggtcccattcaaagccaaatggagaaaagtgtatttaatgagcgaacaggtcaaagtgaccaaatggcaaatggacacaaaagaaagctgaatttttccagatctgacaggaaggaattccatttcccagaactgcctttcacaatacagcccaaggaggtgaaaggaatggaagttaaacagatgaaagtgctgaagagggaatcaaggaaaacagattcatctaaaataccaactttacttaatgtggatcaaaatcaagaaaaacaagagctgaagaattctggattatctttcaacatgtagctcaagcgtcagcttctgtggaatacttcccaagccgtcccaac

SEQ ID NO: 6695 - DNA, 614 bp, Canis familiaris
  misc_feature (1)..(614): n = a or c or g or t
ctgattatctcctttgacttttctgcacgaccaagtgactnnagtnctccgttcaannaactcctccttgcagaaaagtgggccaaaatgaacaagctcccctttccgaagattgatcctcatgtgtttgatcgagaaggactgaaggagtgctatgtctttaaaccaaagaatcctgatatggagaaagattgcccaactatcatccactttgttctggccaacatcaacttcagaaagtacaaggctcctggtgttccaagagaaactaaggaagagaaagaaatagctgattttgatatttttgatgaccctgaatcaccattttcaaccttcaactttcaatatccaaatcaagcgttcaaaaggctgcatgatctcatgcacttcaataccctgaacaacattgatgcgagtttccagatgcttcctacacgtgccatgacctcccatcttcagcctttctacaggatggtctttctactgagaataccccatccgtccactgcacttaacagaatccacctgtccttccatgcatctcattgtctccctggttgaactttgtttaactcagccttctgtgcatncnnnnnntgtacaaatatttatgg

SEQ ID NO: 6696 - DNA, 453 bp, Canis familiaris
  misc_feature (1)..(453): n = a or c or g or t
gaaggagtattgacttcnnntatatgatagaaggtganntaaccaaaaagcaccccggnnnnnnnnttggtgccaccatcaaggctcaaaagtgactccaaggatataaaaaagattttgaatcaaactttgtaattcaannncaagagagatatgcaattatatagatatatgtatgcnnnnnccatttagcaaacagaactcttgtatgnnaatttcatgtcatttattttctgaaaaacttaccaaatcagtgagagtagatgattatgattgnnngcttnntagaatccatgacnatgatatatatttatgttaatatagaaaactttgggaggataataattttccccccatattcattagntcatacattctccagatttgctttnnngacacataggtgtttatgatcttttgtatccggctggaagtggcttgtgtttcattttg

SEQ ID NO: 6697 - DNA, 618 bp, Canis familiaris
  misc_feature (1)..(618): n = a or c or g or t
tacagtcgtccccacattgtccccacatctggagggtgncgtcagccctgcagactcacttctttcacagtgttttcactggaggtgggatgttttatttattgccttaacactttattttgaggtttggctccttttaggccaagaagcctcccagagaaactgagtcctccttggtctctgtacttcagacgactggctcctcagaccagggcccttctcccctgaatggctaaggggtcccaggagagagagagaagcagcagagaagggtggtgtgggcctggcccaccagatctgagcccacccccctgcctgcatgctcccacctactccccagactggaggaccctgtgtcctccacattctctgaccttggtgcccaggaaggagcagccttctgggtgggaaggcccggggtggccctcctcccctttagccccacattccattcatttgcacttaccctacgctgtgaatgtcatcttgggcctgggcccccagccactctgacttgctcctgaatcgctcagagtggcattttcattttgtctttgtttacacgtccatgcactgcctcaggcacttggatttgttgcagcttccacctttttatgg

SEQ ID NO: 6698 - DNA, 549 bp, Canis familiaris
tccctcttccaccagcacctaggaactgaatcttgtcttctgacaataccaaagaaatagggggtggctagagcaaagaacttagagcctggacctgggctggacagtatcttccatggttgtgtgggaactgggtatttccctggggtctgtatgcctttgtcttttgcttctagagcaggtgacactttccccccctttttaaactacaagtctatcttattttttgacccatttcaggagggagccccctcctttatgccaacatactagttaaaagacagaacaagaagcatgtagccctaattataggagattatacagagttcagagtgggaactctgaatttttcctctgacattcaccttgtgggtaatcacccaacttcatgcttgttgctgcagggatggccaaaactaataatttttaaaaagcagactcatgccctctgcccttgggtgagggggaaggataaaggggctcccagaagcccccttatgatccaagggtttgtatttttttaagtttgttcatatttgtatgtatata

SEQ ID NO: 6699 - DNA, 100 bp, Canis familiaris
  misc_feature (1)..(100): n = a or c or g or t
cacccttgtnnangatcctctcagggaatgagtctgatggcttctgtagacacacttgcatgctgcttttaaatcgttcatacagggatccctgggtggt

SEQ ID NO: 6700 - DNA, 578 bp, Canis familiaris
  misc_feature (1)..(578): n = a or c or g or t
gctgtccttgccaagggggtgggcgncgactctctcctgcccgacgggaccgaggggcctccccagcgggcacctcccaggacctggcgccaaggggcagccccgacctcccactgcttcaagtccaccctccttggccgctgacctcctgggtgtcttgactcaagtggtggctcttcccccgttggggtaaccacctgttcttttggacgaagcccaggagactgccacttctgacttcactctcagcttacaaccgcctaaaaagccaagctgctgagaaccagccctagacctctgcttgagggtccttcctctgaagacatcaccagtgtgtggagcctgccccacacctaccccctgccaaaccacggcctttacctgtgtctttcggtgtttcccctgcgatccatcctgtgggagtgcctcgtgggccactccagagttcaccccacgatcagcggcgccaatggtgaagatgacaagatccaaacatcccaaagaccttggccaccaaccagttaaaatcagtaattgagnnnnacagggaacaaagnnnnntgtagtttgggagctcc

SEQ ID NO: 6701 - DNA, 601 bp, Canis familiaris
  misc_feature (1)..(601): n = a or c or g or t
gtccttacaatttcagcctgcttattactttaatgagtgggccgttgtgcttaaaactagtagggggaaggaaagtttttaaaaattgccaaaaagttagatgaaattgtactactgtataaagcaaagctgtatatactaaacgttttttagcagagtaatatttatttgcatagcctatttattgtattcgtattacacggttattaaatactgggatgaaaccgatgccctgaagcaaggactctcgccttttaatgtactattaattaggaccgctgtgacattgtcagcttgcgttaacaattagaagatagaaaacccgcgatcagggtgtctacctaacttctcagggactacacttagtagttttccaccattatacgagctggtaaatatgaaacatttgtggaattaccagaattgccattaacagtattttcttcctcctatgtcgtgctttctgcttctgtatatatgactgtgctgtgtatttatcgaagctagtaagcaataatttatatgtaaaaaaaaaaaaaatggccaagcaatataaggtgaaaacttatatgagtcattnttaccttatcctgtattttca

SEQ ID NO: 6702 - DNA, 577 bp, Canis familiaris
  misc_feature (1)..(577): n = a or c or g or t
gatttggnntttttagatgttgtatccaaacttcgcagtcatgagaacaaaagtgttgcccaacaggnntctctcacagagcagagacttactgtngacagctgagaactgcccctccctgatacatggcatcatcccagctctgatttcccctttgtcctccatcttcttccatatcacttgtgcatgcgtgtaatgttccagtaccaattgaagaactgctgtaggtacctgcccaataagatttctaaacccatagttagtgtaaacatgaatttgtcaaaaacaagtctccacccataactgttctcttgtattcctgttgcttgagctacattaagtagaatgtgcatgttgtagtcctatgatgatgtaaacttggtactacataatgacttgctcctcacacttggtaaaactacataataatgtactggtaaattagaaacaaacaagaatgcagcaggatctgtctagcttttaaagatggaattgaatagtaaaaatagctccattttttggtgcttgggaagcacagtgaccaaaaaactgtatggctgctcattcattagtctta

SEQ ID NO: 6703 - DNA, 414 bp, Canis familiaris
  misc_feature (1)..(414): n = a or c or g or t
ctcagtggtacatagagaagatgatgaatccaaaatgatggacantgtatgatttggttaagactgctgaggccaagtactattttgttacaagaaaggaagaacttggctattttcttgacacttttatgggtgctgcactttatttttgttcggttttgatgggaggggaaaaaagagtactgaaacgttttgtaaaattttttttatgtgctgctaggttttttgatttttttttcggaagagaggagtggtaccatatgttgaagtcaaactggacttttttttggctactaaatttgcctttaatcttattgttctcagttttggaatcaaagtatgaaaatctgcacaaatgcaatgtttacaagaactggttgattctagnnnnnntctgctacagtctctttttat

SEQ ID NO: 6704 - DNA, 647 bp, Canis familiaris
  misc_feature (1)..(647): n = a or c or g or t
tcccaccctgtccctgccaccctatcattccttcccagnnacccttttatccctaaactagcaagataagaccnntgagaggggtgtgaaaagcntnntaattgggggagacaaataggtgcagacctcttgccaccttggcaagggctgtgtctttatctggactactcatcgttccagaaaaacaaagagccagaggctcaataaaaacatagtttatttagagggctccctttcttggggggcaggggctccctggtggcctcctcacccccaccaagcagtccttcagaggggctcaggcatcctctattcagaggcactttggggaacaagtgctccccctgtccagctcaatgactgggcagcactctcccaggccttaggacagttggggctaacccaggccaggcaaaggcataagctggtggggggggggcctccctccccagtgtatatactgtacctgtgtaacattttgtatattctggggatagggcagccccctgtatcatagcagaggttggaactggcaaatggggaggaagttctattaaatatttggggatgaggaaacttatttattgatagcataggacagaggaaggaggcggggacggggttccgcccaggtgactcacaacttc

SEQ ID NO: 6705 - DNA, 74 bp, Canis familiaris
  misc_feature (1)..(74): n = a or c or g or t
ctcatgaggcctcacnnaaggagttccaaacttctaacctgactgttggagaagaaatgggctgcttccataga

SEQ ID NO: 6706 - DNA, 650 bp, Canis familiaris
  misc_feature (1)..(650): n = a or c or g or t
agtgtgcccatgaannctgtnnnaaacacttcanctcacccagcaggctgaagcgacacgggaaggtccacgagggctatatgtgtcaaaaagacaaatgttcctttgtggccaaaacatggacagagcttctaaaacatgtgaaagaaacccataaagaggacataaaatgtgaagtatgccagaagacctttaagcgcaaggattaccttaagcagcacatgaaaacccacgccccagaaagggacgtgtgccggtgtccaagagaaggctgtagcagaacctacacgaccgtgttcaatctccagagccacatcctctctttccacgaggagaggcgcccattcacttgtgaacaggaaggctgtggcaaaacatttgcaatgaaacaaagtctcactaggcatgctgttgtgcatgaccctgacaagaagaaactcaaagtaaaacgatctcgtgaaaagcggagtttggcctctcgtctcagtggctatattcctcctaaaaagaagcaagaacaaggcttatctgtgcctaagaatggagagaccctgaactgtactgaagacaaggtgctctcaacagttgcaatccttaccctcagctaaacctcacattgctttgtttaaacaactacacacaagcgagct

SEQ ID NO: 6707 - DNA, 623 bp, Canis familiaris
  misc_feature (1)..(623): n = a or c or g or t
cgagacaaagaatatcagnctcagatagcgcttcaagaaaaagaatctgaaattcagcttcntaaagaacanntttgtnnnnnagaaaataaaatggccatccagagtagagacgtggcccagttcagaaatgttgtaacacaattnnnnnccgatttagacattaccaaacgacaactagggacggaacgctttgaaagagagagggctgtacaagaacttcgccgccagaattactcaagtactgcttatcatatgagttctacaataaagccaaatacaaaatgtcattcaccagaacgtactcaccatcgatctcctgaccgaggcctagatcgatcattagaagagaatctttgctatagagatttctgacacatgaaaagattcttcacatccttgggaaaggtcaaagttacaaactgttttttttttgctatatgattgcatttatcttttgaatgcttgacaatgttaaatgtatttattaactttgtgcctctgaatctctgttctcatgtgccatatcgcagtgatctgagatgacttatagaaacaaaatgcatatggctctttctatccatgcaataatagtgagtgtaaaatctgcttacttcactatt

SEQ ID NO: 6708 - DNA, 589 bp, Canis familiaris
  misc_feature (1)..(589): n = a or c or g or t
cagagagtgatggctgacttngcaatcagccaggaacaaaaggtagncctgggaaacctaacgtcactgaccagtgacagcgacagtgacagtgacatcagtgaaggcatataaaagtgggtgaatcaggagcagctatggcctagcatagctattgtaattacacttgagaattgacatctctgttcaaccatattgtgaagagaacaagagaattcagacttcaacttttaagaacaatagataccagagggactacttaaattccgaatttgatacttactaagccacccatttaaacagaagccgacctaccattttcatttctttggacacagctcctggtttcagcataagctttgtacctacagtgtttgttggccaacttcactgttgccctttgtggtttgccctcccatcatggacttggccttcattggctgatttgcaaccttagaaaaggacgtgtctaaaggaggtttgcacatgtatctccattgatactagatcagtataccaattttagggatatttagaggtgagaaatttgccattgtttaatcattnnnaggatgcggagttttaagct

SEQ ID NO: 6709 - DNA, 656 bp, Canis familiaris
  misc_feature (1)..(656): n = a or c or g or t
cnngaactccntnnagaagaagagcactgaggttccactaaangagccactngacatnnaagacctgtcatctgggctgggcatggccaagtagnacctgggccaagctatcatttgagaacagcagatgcggatgccagcacgtagcccacgctgcgtggccactgcttccttgctcccttctatcctccgacccgaccctagcccctcttctccttcccttacacactgctcccccaactcactgtctcccaccccgcagctccttccacaacaccctggcacctggctctccatcatcctgggacacaggtcatgtcagaacagcacagatttaacgatgcaggaacgttctgttgcccaagcccccatctgtcaggagtgtgtggcccaaggaggtggcccaagagctaggcggactcccatttcatcctccaacctggagccccaagacccaggcccatggacgagatggaaggtgcagggagaggggacagtgttccccgacacccaacatgttagctgttcctgcccctttctagcctcttcagctggggagccaccccttccctctctccagcaacactcacccaggaagaaccagcccctccacagcgatgcctcactttctgccaacccccagttccctctccgca

SEQ ID NO: 6710 - DNA, 570 bp, Canis familiaris
  misc_feature (1)..(570): n = a or c or g or t
gttccatgtactgtgaacttgaaaacatgcagactcaggggggtncctgatgcagtgcttcagatgaagaatgtggacttgaaaatacagactgggctagtccagtgtctatatttaaacttgttcttttcttttaataaagtttaggtaacatctcctgaaaagcttgtagcacaaaggctcagctggggatggtgtttgacttcggaggaaaaaagttgctattgcccgttaaaggcactagagttagtgttttatccctaaataatttcaatttttaaaaacatgcagctcccctccccccctcttttttatttttgaaagaatacatttggtcataaagtgaaacccgtattagcaagtacgtggcaatgttcattccagtcagatgcagctttctcctccgtctggtctcctgtttgcaatcgcttccctcatctcagcagggaaagcatcgagtgggaggactgaggtgtgtggggcttttgccgtcggacaaagaacgaggttagaagcccgcagcttggagtcnnnnnnttttcaactcttcnnnatttgaacacttgacgg

SEQ ID NO: 6711 - DNA, 549 bp, Canis familiaris
  misc_feature (1)..(549): n = a or c or g or t
gcatattttncatggtccacacccccaggcagctccacagctnnnattacttcatagtctcaaaatactccatgtattgaagtctctgagggttaaggttgacagttgactgtccactgggggagggtgttgggtgttctagagtgccgtatgaatgtagggtgtcacagccgttgtcatagtcggtgggagatggtcagctggtgaggagcgatacagcattccgcaggactggccgatcccttctcctggaactgccatgcacctgggttttcaagacgtccactgaatctcttttccttgtccccaccgtggctgatgccatcatcgcccaggcttcagctggctcatttcagcaagaagtaataatcattcatggatccgtgaacccgtagaggttggggccagtcccatggcagcagcttacgacatgtatttttgataaaatgtgaccttgaatcttaataagtgtatatcaagataggtaactgtgttgtgttgatcaatttttcactcttaatttgttctggaagaaaatttgtagtgctt

SEQ ID NO: 6712 - DNA, 602 bp, Canis familiaris
  misc_feature (1)..(602): n = a or c or g or t
gnngtgaatatccttgctcaggctctttatgaattattttctgccaaggatgattccctacatcaactaagaaaagcctgttttctttatttcaaacttggtggcgaatgtgttgctggtcctgttgggctgctttctgtcctgtctcctaaccctctcattttaatcggacacttctttgctgtggccctctatgccacatatttctgctttaaatcggaaccttggattacaaaaccccgagccattttcagtagtggtgctgtattgtacaaagcatgttctgtaatctttcctctgatttactcggaaattaagtacctggtcaattaagcttacaggggaaccatttgcaaatgaatattttgaactcgccaagtcctaagagacttttggaagaggatgtacatagcatagaactatcccacttctaaagtggaaactctcggaccaagattggggttaatttgtttttgaagttttttgtatataaacatgtaaatacatactttgcaatttaaaatgaagggtaaaatagacacttaaatgattgttatcctagattagtgctaacactgaggaattgcagtttttcttttgaa

SEQ ID NO: 6713 - DNA, 645 bp, Canis familiaris
  misc_feature (1)..(645): n = a or c or g or t
aaatgattcnntgattccatgaaagttatgtttatattatnnnnnntatactgtaagcagtctccagttaaataaaccnnnctgtgaagagcataacccttagtaataaagagcctttccaaagatattngtctaaattctgcagacctgtttcagatacatgaatcttgttctaaaagaaatctgtgatttgccccttttgaacttgtcaagaaccaacaatgacttgaaatcatagtatttcatagagatgttatttggtaaaactgctagagattgaaactggagatgaaaagaaaatatccagaatgtatgcatcagtcacacattttcttgttcaataaaccattcacactaaaaaagacaaaaacaaaaccattcacatgtaaagtgaaatggggaattctgacaattcttaaatacttaaataagaaagtgcttgattaggttttagtaaggcttgagttatatattggaataattatcatttttaagaaagatttatttgagagaggagagagcatgaacagggggaggggcaaagagagaagtaggctcccactgagcagggaacctgaagcagggcttgatcccaagacccagaaatcattactgcatcaaagtcagatgctcagccaactgagc

SEQ ID NO: 6714 - DNA, 700 bp, Canis familiaris
  misc_feature (1)..(700): n = a or c or g or t
gcttcngtttnntctgcagatacagggctctgctctgnagccnnnnnnttcnnnnnnncccgttgcccntcgcccaagttgctncgtgcccgctcagctgagaaacggcgccccatgcccannnttcagaaagtccccctgcnntnnggccctgcacccgcccactcnntgnnagacctaaagagcagctggccaggccggggcttggtcactcgtttctttcagatgtccaagaaggccccagaccccagtgggaatggggcccatgggcttaagcaggtgccccggagcccatggggccggccaggccgagagagcctccaccttcgcagctgtggtgacctgagctccggctcttccctgcggcgcctcctgtctggccgccggctagaacggggtacccgcccccacagcctcagcctcagtgggggcagccgggagactggactctgacctgggcttcttgctactctgaacatatccagatgaatgctggggccacaggcaccagatggttgggaccaacaacctctagcaccccatgcactggctgacacaaagaaacccgctgaacaccccccgaagtatacctttgcctcctacctctgggggctcctgctgcttgcctgggcccctctggactgggagagcttctgtcctgtgctgcatgggtattcaggctgttgagggggagagaccc

SEQ ID NO: 6715 - DNA, 598 bp, Canis familiaris
  misc_feature (1)..(598): n = a or c or g or t
agnaggcagctgagcaggatgcaggcccagaggtgngagttggtgnnagtgggcgggggtgccactccggcctccagcaccagggnngcacccgccagcaggcagaagctgggcagcgaggtggcgtacagcagggtcaccgcgtccagcctctcctcctgcaacagggcacctgcaaccaggacagcagccatcagcacccagagggagacaacccccgccacctggccgactcggcgtgggctccggggcccagcacccaggaagcctgcctcaacccctccgcagaattactggctcctgctccataacacgaaagccaagactcctgtcacatcacctggactgtgacctgtgcttaacctctgtatcacctgcaacgttgggtgagaacacctaatacgtagcattgttgtaaatattaaagtagatgacacttagaaagcctctataaggtgagtgctaaatgtaaaaaggtaaataaaaggcagccccggtggctcagcagtttaatgccgcctgcagcctagggcatgatcctggaaacccgggatcaagtcccacatcaggctccctgcatggagcctgcttctccctc

SEQ ID NO: 6716 - DNA, 432 bp, Canis familiaris
  misc_feature (1)..(432): n = a or c or g or t
aggagtcttttctcagttccctcagcaggatatctccaaccagaacatgtcannnattccctccagaaccagctattaataaangagatgggataactcttagaccaacaaggcnnnctcctggggctgtggtagggccagcttcccctaagaacatggaggtgtgcagggaggtcgataccggattcgaatgacatttctgtcaggaagaagggatggaagtgggccctagatagctcattaactttgctcattttttttttttttttaggtgcagctgcatctcnnnnnngaagtataatatttaataagcatcctatggtgataatannnnnnntgnnnnnactnnnnnnnncnaccatttttgnnngtgntgnnnnnnnnnnnnnnntggttaatannnnnntntaattctcnnnnnnnnnnnatcnc

SEQ ID NO: 6717 - DNA, 710 bp, Canis familiaris
  misc_feature (1)..(710): n = a or c or g or t
agatgagaactatggtgagggctcgagccgnnagcatgctgcgctnnnnncgcgccannntgggggccgggccatcatcaccaagagctttgccaggatccacgaaaccaacttgaagaagcagggcttgctgcccctcacctttgctgacccagccgactacaataagattcatcccgtggacaagttgaccatccagggcctgaaagactttgctcccggcaagcccctgaagtgcatcatcaagcaccccaatgggacccaagagaccatcctcctgaaccacaccttcaacgagacccagattgagtggttccgcgccggcagtgctctcaacaggatgaaggaactgcagcagcagtgagatccagcccagctcccctgcccgcctgcccctcggaccctgcagcggggtccccagtacagcccacgcgtcatcagaactggatctgccccgatccagccatggtttcctgctcgagacagtggggtcagacctcctggcctcccttccctcagccggccgactgacccatggttggggggggggggtattcttaaaagaatgttccggctcccctgccttcccgtttttagtctgtttcagatcttgagcaactccgttcaactgtatttatttttgatgagaagactccatttaaaatttttctcccgcctcatttcactggtggctcaaggattttaaagaa

SEQ ID NO: 6718 - DNA, 351 bp, Canis familiaris
  misc_feature (1)..(351): n = a or c or g or t
tngccaggctcgaggcccgnagcggcgtgnnnngcagatacatcgcgctcggcgnngtcgggctgctggccttgtacctggtgttcggttatggagcctctctcctctgcaacttgataggattcggctacccagcctacgtctcaattaaagccatagagagtcccaacaaagaagatgatacccagtggctgacctactgggtcgtgtatggggtgttcagcattgctgaatttttctctgacctcttcctctcatgggtccccttctactacatgctgaagtctctgcagtgcggcttcctgctgtggtgcatggccccgagcccctctaacggggccgagctgctct

SEQ ID NO: 6719 - DNA, 705 bp, Canis familiaris
  misc_feature (1)..(705): n = a or c or g or t
ctttnntcgctggcnnggaactcaagagacaannnnatccctactctnnnnnngctgtancagnntaccaggagaagatgactcttattcagcnntangattcctgacttcatgtcattgctctggggaggagaaaagtctaaagaaaacaacacaaaatctccttgacacaatcaagaatcacttttgctgctataagatttcaaagaaggaaagaccaggccgggaggaggaaagcctggaagaggagagtgttcagagcagaggccacagggtctgagaagctgatggaaatcaccgacccactaataatggagaatttgattttttttcatgaattttaggtacactggtttctcttcattttctgttccttttttccatttcagcattttttttttcagagactttcactatatacatgggctccaggaagcctggtgcacaggagggtagctgaggatggaccctgtagaatcttcacctacagtctccaatcgttatcccaccacacttgctttatcattttctcttctatggatctatatttatagtatatatatacaatgtaccccaaaatacatgtttcctaaaggcaaacaggataatttcctacaaccatccaaatcaagagattaacatgaacaacaatatgaatgtacttgatactgctgaactgtatacttagaaattaaaatgataaac

SEQ ID NO: 6720 - DNA, 626 bp, Canis familiaris
  misc_feature (1)..(626): n = a or c or g or t
acccgccgtgccccgacntggactgccaccccgtgctggccatctcctgggtgctgnnncgcgccctggccctgctcacgtccgtcctcttcgtcctccgacagctgtggaactggctctgggcctggtggacccgagggccagcggtgaagccccagccctgccagagagcccaggtccggaccttcactcggcggaacgacctgtgcgccatctgcctggacgagtacgaggagggcgaccagctcaagatcctgccctgctcccacacctaccactgcaagtgcatcgacccctggttctcccaggccgcgcggcgctcctgccccgtgtgcaagcagtccgtggccggcacggaagacggctccgactccaccgtcgatagcttcggcgacgaggacccctcgctgcccggccaccggcccccgatctgggccatccaggcccggctgcgctcgcgaaggctggagctgctggcccgggctggaggctcccagggctgctgcagctccacctccttgggggtggcggaggccgtggcatcctcggagaggtcctcggagaggcccccggaaccctggtgaggccgcgggcccctggccggccaagatcggggtggggagagt

SEQ ID NO: 6721 - DNA, 661 bp, Canis familiaris
  misc_feature (1)..(661): n = a or c or g or t
caccaaaacttctnnaacaatccaaacgtgccaagtacttcattaactctaagngnntacntcgctactgttctgtgactactcannnagatnnnagagttgtgcttgtggggggtcgctcacgtaggggtaaaaagcggggccctccaggtagcaaagactgggtgacagcactgaagggatgtgatgactacttgtttatagagtttctgaaaaggtgtcttcactgggacccctctgcccgtttgaccccagctcaagcattaagacacccttggattagtaagtctgtgcccagacctctcaccattgaaaaggtgtcaggcaaacgggtggtaaatcctgcaaatgctttccagggactgggttccaagctgcctccagttgtcggaatagccaataagctcaaagctaatttaatgtcagaaaccaacggtggtatacctctgtgcagtgtactgccaaaactcattagctaacggacagtgctgtgctcagagatgtatatgtatgtatttttaattatcctgcaaacctgaacatggggagaaaatacaagcccattggtggatatgtttttgttacactagatttcttttttttaacaaggcaaaacatttttatatgactgtaacagaactctccaagggctaattaccta

SEQ ID NO: 6722 - DNA, 489 bp, Canis familiaris
  misc_feature (1)..(489): n = a or c or g or t
ctcggaggtgtggcaagggtgacccgcccaaaggctaccccgnnagtagnnnnatccgcccctacccacccccccgggcacgcagagcctgcctgggcgccgggagctgtgtcagtgtccggtggccgccgcgatgatgaggctccccatctgcgccctgctgtgtgcggggaccctgggtgagtgcgcactgggagcccggtggggtcttgcccttcaggacctggactgggtgtcagcggagggtcggccgcagcgggaccctgcacagcctgggtctaaggggtccacaagcaacccagcacctggctggtcccaaaatgcttcggcttgtggtgtagacaagcacctgacaaacttctgtagcctacagcagggggccggatccagcttgcccacctgatgttgtgcagctggatgagcgaaagatgatttttacatctctanatggttgaaaggaaataaaaagaacgactgttttgacacatg

SEQ ID NO: 6723 - DNA, 594 bp, Canis familiaris
  misc_feature (1)..(594): n = a or c or g or t
ccttcccaacctcctccccaccctacnnnnnggtgtgtacccctagcttcnnnngnccagggactcaggcatgcagatcagaaagggagggaggcatagctacacattcaccaaaggccccctgcacacagtgtccctgcccctgggctgtgcgcgaacatgcgcactgccccctctggaatctcacctgggctcctgccctggccgccacacatgtctttggcccaagggcttctctctcaggatctctgattttactgcccccaatcctggacctcagctacactgggcactggggctcaggtgtacacggggcctgctcaccttgcccacacatctctacagccagccagggctctgcccagcttccatacacagacctggctctccacattttcctgctgcccatggttggatgcagacttgcacaaggacctgcacctggagtgtcacacatgcatcgcagcagtatcagaccaagtgtgttgtacccatggggccaggatcagcaacttccttctcagaaagggaaggcaaaggcttggggctgatgggaaaggccttttacaaatggcaccaataaaannnnnntgg

SEQ ID NO: 6724 - DNA, 661 bp, Canis familiaris
  misc_feature (1)..(661): n = a or c or g or t
aacagaatgaccagagctctcntnnactcactggggcccnagtggcgnctgaagctgccctctattcccctggtgcctgtttcagcccagaagaggtgggatttctcgnntccggaataccagaaagagatagctaaaagcaaattcaaagaaaccacaactgcaaagaccacagtgccttctgctggggatgtggagagagccagagctctgaaggaagaaggcaatgagcttgtaaagaagggaaaccataagaaagctattgagaagtacagtgaaagcctctcatttagtgacatggagtccgccacatacagcaacagagcactctgccatctggtcctgaagcagtataaggaggcagtgaaggattgcacagaggccctcaggctggatggaaagaacgtgaaggcgttctacagacgagcacaagcctacaaggcactgaaggactataaatccagctttgaagacatcagcagtctcctgcaacttgagcccaggaacgtccctgcccagaggttgcggcaggaagttaaccagagtnnnannnnntcccagaagggcagcagtnnnacctgtgcccaagctctgtcctctgtgcctgctcctggcacccggcacgcccccgagtgagcnnnnnnncaactccaagctgatg

SEQ ID NO: 6725 - DNA, 349 bp, Canis familiaris
  misc_feature (1)..(349): n = a or c or g or t
cacatcctcacccccctcctccctacaggaagtnnnggaagccagcaggacaggcatctgggctgggagctgggctggagggggttggggaagctggcatcaagcagtgactttggctgagtcttaatatacgaagggtgccttccctccccacccccnnnacccatagcctggccttggcttccttctctaaggaaagtgtccatctgtgaccttcccttcgcctctccccctctaccccgttccctcccatggctgttctcactcaacctaacctccaggccacatgcactaaattaaaacaagttgaggaacccctcccccaccnnnncaccccaccatcctagct

SEQ ID NO: 6726 - DNA, 677 bp, Canis familiaris
  misc_feature (1)..(677): n = a or c or g or t
tggtnnaacagctgagtgaagtatttgagactgaagcccccaagtcgaatcttcccccagagcctgttctgcccntagaggcaacttcatcttctgaattggacttgnntctgggcactcagttttcccttgaggaccagatgccaccctggagccagactgagctcccctccaagcaggtttttcccaaggaggaagcaggacagccctcagaaacccccatggccagccagggctcggacaagcccttgagagaccctgagactccccgatcttcaggttctaagcacaatagacggaaaacaaatggcaaggcactagggagatctcccctcaccatcctacaagatgacaactcccctggaactctaccaccacggcagggtaagtggccttctcccctgagtgaaaatcctagggaactaaaggaaggggcctctctgggatctggacgacttctgaaaactggaggccgcatgtgggagcaggaccaggaccaggacaaggagaatcagcactttccaaacttggtggagaactaggtgcgtggccccagtgctgggctcaccaggggcctagtgacgtagcatcccttcaaccccgtctttccctggaagatgggaaaggcacgaccccccctgaactcacagcttggggactgagcactttcttgggct

SEQ ID NO: 6727 - DNA, 626 bp, Canis familiaris
  misc_feature (1)..(626): n = a or c or g or t
agtgacgntngctcagcctacnggtcagtngacgaggtcaattactgggacaagcaggaccaccccatctcccggctgcgccactatctgcagagtcggggctggtgggatgacgagcaggagaaggcctnnannaagcagtcccgcaagaaggtgatggaggcctttgagcaggcggagcgaaagccgaagcccaaccccaacttgctcttctcagacgtgtaccaggagatgcccacccagctacgcaagcagcaggaggccctggccaggcacctccagacctacggggagcactaccccctggaccactttgagaagtgaggcccactcatcccccacctcaactaccccaaggggcagtcccactctgggggacccagggagtggcaagatgctaccctccttccagggccagctccctccaaaatactggggccagggcttcagtcccccatccccactcctccaggctgttacctgggggtgctccagtggcccctctttgcctgttacagtgccttctcccaggggctgggccagggtgcctccaggactggaagcccctctggggtgggcgtggtgggtcagcctgtggaagtcactcctcaaagtgagaggtggtc

SEQ ID NO: 6728 - DNA, 558 bp, Canis familiaris
  misc_feature (1)..(558): n = a or c or g or t
ancgcttcttcaatgacctggagnacagctacggncagcagtnnanntacgagcagcnnaaggtgctggagttcacctgccagacnnnnntcttcgtcagcatcgtggtcgtgcagtgggctgacctcatcatctgcaagacccgtcgcaactcggtcttccagcagggcatgaaaaacaacatcctaatattcgggatcatggaggagacattcctggctgcctttctgtcctacaccccaggcatggacgtggccctgcggatgtaccccctcaagctcccctggtggctctgcgccattccctacagcgnncttatctttgtctatgacgaaatccgaaaactcaccatccgacgtcatcctggcggctggctggagagagagacctactactgaactcagcagaggagctgcccgacacggggtcgccccagggtgggggggggttgggattctgggcttggcgcctcgagagagcatggtgggggcagagatgctaggatgaatgacctgggatgagaggggccagcagcnnnngggctggcctggggccctg

SEQ ID NO: 6729 - DNA, 511 bp, Canis familiaris
  misc_feature (1)..(511): n = a or c or g or t
accaaggaccaggagatccagacactgaagagccaaactggtgcaacccgtgaggccctggatgccacggagcgtgannaggcacagcagaaagtgcaggacctggagactcgcaatgctgagctagagcatcagctgcgggcaacggagcgcagcctggaggaggcccgggctgagcgggaacgggcacgggctgaggtgggccgagctgcacagctgctggacgtcaggctgtttgagctgagcgagctgcgagagggcctcgcccgcctggcagagggcacaccctgagcctggctgcagggtctgcgtgggagccggggcctgtggcagctggttttatacgcaggattcccgcctggggcacgagccgggctgcgggcagcacaatgggccattcaccctggcagggactgggggcccaacccagcctggggagggcctggccgtagtgccccagctggccctggccgctcacagctcaagggggtgttctggggcttttcattgt

SEQ ID NO: 6730 - DNA, 610 bp, Canis familiaris
  misc_feature (1)..(610): n = a or c or g or t
gtntggtttgtgccaactccagctccatctcnntcagctgcttcttcagggaatccttctcatcatccagttccagcccctgctcctccctgcttacggctgcgagcttcagagtgcnnnctttgctgaaaatgtcgctgcagtgtntacnngccatcattttaccctgaaagagtcaaaagagataaccaacatcaaacaatttcatagcatatatcacttcctgaaacaactgggtatgattttcatctagacactgcttgttgtcatcaaatgcaggtccacttctgaaggtaattatttttcttgagctgcaaccaaagtgctcagtcagcaccaaacccaactatgcaannnaggtgctccctttttcttaaagtatctctagggagaccctggaaatggaaaatattatagcacctctttgaaacttgttctagaagttttgtgctgccatgaggcctttctagaaccccatgccattgctctccatgcagagttttgtgaatcctagagttactatatgaccaggtactattatccacccccccccctttttattagtgaagaaactcagtttaagtaacaagagcctacagcagactgagaa

SEQ ID NO: 6731 - DNA, 666 bp, Canis familiaris
  misc_feature (1)..(666): n = a or c or g or t
tgttcctgagnncatccagagccagagangcagccctnnatggcgggtttcaaatgcattacgagaagaccccgtttgatcagttggctttcatcgaagagcttttttcacttatggttgtcaatcgcctgaccgaagaactcggctgtgatgagattattgacagagagtgattacacgctgttaaaagaggaggaagctacttgaggagagacccgacattccacggtcttttgggctcattccagatagatagtaacggtgccaagggaaaaaagtcgatcttcaaagaaaatttttgttgttgtcgtgcagagtagaatagggcagtgactgcgctcttatgaaagcattgttggagaagaagaagaaacgtatcaggactgtggaaatctgttttcaagaatgttcctgaaacacctgccgcttagactttgttactgatcccggttattttccttgcatttggggaaaatacctctcctatatttcactataaggaatggttttgcaagaataagttatgaccaagacaaaccgccagtacaagacccccactgataccaattacgtgagaaaaagtagtaacatccaatttaggacacaagatgtctgaatcgtttggactgaaagcctactgagagaactctggaggttccactttgt

SEQ ID NO: 6732 - DNA, 555 bp, Canis familiaris
  misc_feature (1)..(555): n = a or c or g or t
ctcactgcaggnnntggcacaagtgctagagcagcannnnnnngcccaagagcactacaacgnnacgcagaagggccatgtgccccattacttgttggaacgcagagatctgtggcgacgnnaggctgaggcccgccagcatagtcagccggaccctgccatgccccctggccacactcgcatgccggagaaccagcggctagagacactgagcaatctgctccagagccagagccagttgctacgtgagctagtgctgctgcctgctggagccgactcactgaaggcccagggccatcgtgctgagctggaccggaagctggcacaggtagaggaagccatcaagatcttttctcgccccaaggtttttgtgaagatggacgcctgagcccttttatggggatagttatggggggtcctcaccagggatcgccgcacggttgcaaagggcaggatcaggccccattgtagaatggagtctgaagacagcagctgtggggtgggcagtatccctggagcactcttcccaaccactggttgtagaagggtcagccc

SEQ ID NO: 6733 - DNA, 661 bp, Canis familiaris
  misc_feature (1)..(661): n = a or c or g or t
cagactgggacctcggccacaactggcagaaatgcacgaaggagagagagtgagangtctctagaaaatgannnnncgaataaggaggaagactgtcactctccgacttctaagccacccaaatctgaacagcctctgaaggtaatgccagcccctccaccaaaggagaatgcttgggtgaagcgaagttctaaccctcctgcccgatctcagagctcggacacagagcaacagtcccccacgagtggtggagggaaagcagtcccggctcagcccccggaggaaggaccagcaaggagagatgaaaacaaagtagatggggtgagtgtcccaaaaggccacagtgggaactccagccgtggtccaggagacggagggaacaaagaccactggaaggagccagacaggaaagacggcaaaaaggatcaagactcccgatctgcacctgagccaaagaaacctgaagaaaatccagcttccaagttcagttctgcaagcaagtatgctgctctctccattgatggtgaagatgagaacgagggagaagattacaccgaatagacctctgcatcctgtgctttctcctagtctctccaccctggaacattcgagagcaaatcaaacctcnnnnnagacaagacaataaaactcaccatctccg

SEQ ID NO: 6734 - DNA, 594 bp, Canis familiaris
  misc_feature (1)..(594): n = a or c or g or t
tgcaggctctcctccctcttacctcccagnnaccaaaaggccctggagagggtcctggctccagactctgcctcccctgggatgccttccaccgtggatgaggaggcccaagaaggccacctgtctgtgtctgctgatgagggacgaggggagaagctgtaaaatgggcgggtacggctacagcactaagccaacagtatttcttcatctcccttggggggggggggaaggccccaccccgaggccagggtagggacttcaagagctcccttgccccccttccattcccccccccaccctgtaccctggttctaagtttacaaagtgtattccttgttcctattaagttgtctctcctgcctctgacattccctccctcccacccacctgcagggctgagattagagggtggtgatggtaaagggacccggacaatgaccctcctgtctcaggggaaaggggagatagccaggtggcctcctcctgccccttatgtttacgtttgcagcctgaagcactttaagttgtgtggggttttctttttttttctgtttgttttttttaatctatctgttcctgtaacttattctccaa

SEQ ID NO: 6735 - DNA, 541 bp, Canis familiaris
  misc_feature (1)..(541): n = a or c or g or t
ttttatacatgttatacaagtatacattttatatattatttatataatattatataaatatatatataaaatttatacacacacacatatgtgtataaaatgtccacaatagccagaatgtccataatagccaaactgtggaaggagccaagatttccttcgatagatgagtggatgtagaagatgtgttatatacacacacgcacacaatggaatagtattcagccatcagaaaggacgaatacctagcatttgcttcaatgtagatggaacaaaaaggtatgctgagtgaaaaaagttaattggagaaagacaatcatatggtttcactcacatgtggaatataagaaatagtgaaaaggactataagggaagagagggaaactgagtgagggaaaattaggaagacaaaccatgagagactcctaactctgggaaaaagggttgcagaagaagaggatagagggatggggtgactgggtgacggggactaaaggagggcnnntaatgggatgaacactgggtgttatactatatgttg

SEQ ID NO: 6736 - DNA, 447 bp, Canis familiaris
  misc_feature (1)..(447): n = a or c or g or t
cctcgaggagttccgcccctttctggcgaagatgaggggcatnnntaagtcgattgcatctgcagacatggatttcaaccagctnnaggcattcttgactgctcaaaccaaaaagcaaggtgggatcacatctgaccaagctgctgtcatttccaaattttggaagaaccataagacaaaaattcgagagagcctcatgaaccagagccgttgggacagtgggcttcggggcctgagttggagagttgacggcaaatcacagtcaaggcattcagctcaaatacatacccctgttgccataatggagctggaaataggaaaaagtggacaggaatcagaatttctgtgtttggaatttgatgaagtcaaggtcagtcaactcctaaagaagctctcagaggtagaagaaagtatcagcacactgatgcagccagcctagctgaagat

SEQ ID NO: 6737 - DNA, 438 bp, Canis familiaris
  misc_feature (1)..(438): n = a or c or g or t
cnngccccctccctctggtcctcttcccccatggcagcagcagcagcagcagcctccgccaccccctccgcccagcagcagtatggcttccagtacccccttgccatggcagcaaaatacgacgactaccaccacgagcgctggcacagggtccatcccgccatggcaacagcagcaggcggctgccgcagcttctccaggagcccctcagatgcaaggcaaccccactatggtgcccctgccccccggggtccagccgcctctgccgcccggggcccctccccctccgccgcctccgccgcctggttccgccggcatgatgtatgccccgccccctcctcctccgcctcccatggacccttctaactttgtcaccatgatgggcatgggggtggcgggcatgccgcccttcgggatgcctccagctcccccaccgcc

SEQ ID NO: 6738 - DNA, 448 bp, Canis familiaris
  misc_feature (1)..(448): n = a or c or g or t
aataaaaaaaaaaaaaaggatcagaattagccagcttgnnnnnnnattttaaacatatannaattctatnnntggattatattatgaagcttttatgtgaaacttttttttttttnnnnnnaatgaaaacnnnattnnnnntgtttaataatcgtacnnnnntngtggtntcnagactattnnnnnggtctttttnnngaggtnntnnnggcattgtatcctgtagacaganaatccannnnnnnnnnnnnntcnnnngggtnnnnnnattnnnnnnnnnnnnncnnnnnntnctnnnnnnnnnnnnnnntctgnnnnnagtgtnngnaagcacgtgcnnnctgtnnnnnngnnnnncnttcatgcnnnnnnnnnnnnnacccnagccccccacagttggcanctatttgctttgaaaaatcccacttatttttgaatcgtgtaagac

SEQ ID NO: 6739 - DNA, 404 bp, Canis familiaris
  misc_feature (1)..(404): n = a or c or g or t
gttcatgctcccagaatgaggagagagatccaaaatggtgccctgaaccagagaacggggtgnnnnnccannnnncnanngcatcacccaaccagccttccaaacatgagacannnnnnncttnnncacnnncngcccagcacatgctgcccctcccagtcnctcccttccccccagtcttcttttcatccactctgtccccacttgggatatgaatctatggcagaagtcactggggaagcagctcagcagatttttagagaccaaggaaaaggcctcactaggaaatttatctgttttaaaacattgcttccttcctgcctctgcgaaattgaatgctcattgttttttttttttttttatttctaatgttcgatcactgcgtgctgtatgactctagaaag

SEQ ID NO: 6740 - DNA, 627 bp, Canis familiaris
caaagcagagagttttaatttttcctcctctggaagagaagatgtagatgtgagaacattaggaaatggaaggccctttgcaattgagctggtgaatcctcatagagtacatttcacttcacaagaaattaaggaacttcagcagaaaattaataattcatctaacaaaatccaagtccgtgacttgcagcttgtcacaagagaggcaataggacatatgaaagaaggtgaagaagaaaagaccaagtcctatagtgccttaatatggacaaataaagccatacagaagaaagacattgaattcctaaatgacataaaggacttaaagatcgaccagaaaacacctctgcgggtccttcaccggaggcccctggctgtgagaactcgcatcattcactccatggagacacgctatgtggatgaacatcatttccacctctatctgaagactcaagccgggacatcgagggatgatttgtttggactgcagtagacagacctttgtagctttgtttggagcacatttgcctactgtagatggactgtggatggaatttcaaagaaatcatagatttttttttaacctaattccagctttcatcttagtgtgccaaggtgaaatgtagt

SEQ ID NO: 6741 - DNA, 592 bp, Canis familiaris
  misc_feature (1)..(592): n = a or c or g or t
agaaagtaaaatatgagagaattctgcttttanngtcagttaacannnttttaatgctatgctgcatggtatttaatattcaangnagcatgggattttatttcacttgttnngggctctagaaataagggctctgaaaacaaacctcttaaatgagacatgcttagaaagagacatttcttagaactgtgatacttgaacaatgaaagtaaagattacctcatnnnttaattgtaaattttgttctccttgaacttttgcacgcatttgtattttgattgacctgtggaatggatagtaggaaacccaaaattgaacaaaatgaaacatggtatttgaagaactgatatcttttacttctatttgtgatattcataatcaactgaactatattaatacataagtgctttacatgaacagatttttagattgttctgaagtttttaaaaaatggtttagatagaaaagattcttatgcattgaatttggnntactaagttaattttttatatgcttacccattttttggtgaccattagatattaaagtatataagtttcaggccagtttgttttgaaacaaatcagcagta

SEQ ID NO: 6742 - DNA, 356 bp, Canis familiaris
  misc_feature (1)..(356): n = a or c or g or t
atatatacacactcatttnnnaattttttaaggcccactgctttattttccatagnnnnnnncttatttctaaaaggtcccnacgttgggctcaccctccagcngggttatgggggagggccgggtaaaggggtccttaagatcctgaaagtttacacttccatgtacctcgcaatcttgtgaggatgggacttgttcagtgttctgaactttgtggaggaaatgcactctcaattcacagtgtcattccctggaattgcacctggctcaggaaaggactgtctttgtacttgaatttaaatccaatggagaaccttaacatgggcatttgcatgattgagaattgctgcnnnntt

SEQ ID NO: 6743 - DNA, 604 bp, Canis familiaris
gtttcaaagaagaaacaggtgaaagaggaaagttttagaaaaatgggtattgggcaccatttttttctgtcatcttaaatttcacagaacttcagttttattctttctatattttgagttgtccatcttaaagatataatgagtaattctatatatagaagcagatgtgtataaagattgcagagcgaaggaaggaatctgaattaaatataaggcacttaaatgtctatatacacggagcaatgaaaagatgcattttaatccttaaataaaaccaagggatccattacttattacaattttagctactgtaaagattacctggttttgtttgtcaacaaaaggaaaacacattcatccaattgtttaaaaaatttgatccaatatttgaatttcttcttcataaagatggttgactttatcgtaacatttttctttacctgaaggagggccatttatttttaattttactacttttctcttttgcatgcgtattaagataaaaattgcctctgatatctttctaatttgagggtggaataataattcctagaacacgaaggcgtgaatggctgcacttgaagtaaaagcagttgtactgatc

SEQ ID NO: 6744 - DNA, 635 bp, Canis familiaris
  misc_feature (1)..(635): n = a or c or g or t
gttnnnactcctgtgtcntactgttctccctccttctgagtaacacagaatcntgcagcttttgcacagctggcattgatctgatagtagtgagatgccttgtcttaatgatccgtactgtgtttccctgcagaggaatcataattaaaataactaatagaacttgcttcgaaagagttggggtacaataaaagaagaaagaaaaacccatatgcattctacattctgacatgttaagagtggtttaagtttctaaagtgtttaccagatgctgagggcaaggtggggaggagaaagctcttctgtgaatggatattttaaactctgttagcagtctttggaagatcccctatttggtcctgttttctgacccatctctaccttttcagggtaatctttgtggcacaagtgatagcatttaaaagctttagccttttaattctcgctccttgctgtgagcnnnnagctgtcttctatgcacttcggctatgtctactgtttggtctctttgtgttccttgttacttggtgcaatagcaacttctttgtgcattccatctttcnnnnnngtgtaaagttcttcacttttttctctgagggtgtagggggtggggggagtcagcatgattatatttt

SEQ ID NO: 6745 - DNA, 546 bp, Canis familiaris
  misc_feature (1)..(546): n = a or c or g or t
tgtcnagnannnngtgcctgacggccnngnnnggttcatcttcgaggccaccgtgttgggggtggagagcttcacttcagggaggcactactggnaggtggatgtggaaaaggnnancaggtggctgttggggatatctgaagactctggcagtggacacagtgacctacccactgctgccagagataaagtcttactcataggttctaggatgggaactaattacacgttctgggtctttccccctctgaagaaggtctccttgaggggagagcagatgcacaaagttggagtcttcctagactgcaagtatgggcagttatccttctatgatgtgacagatagatctctcatttataatttctcttctcttaccttccggggagctgtcagacccatattttctctttgtatcccaactggaggcacaaattctgactcactcagtatttgctgtcctcatgttgcgtcttgtgatgttactgttagcccacaggcttcctcagcatgaaatctaagactactannnnncaggaagtgaagagc

SEQ ID NO: 6746 - DNA, 734 bp, Canis familiaris
  misc_feature (1)..(734): n = a or c or g or t
gtcgagatgtgnctggtgtggtgatnnaatgtngacttgatgtgaggtacttcangccgnnngatgnnnnnngnnnnnnagttcctcnnnnnnnncaaggcancntgtcagagttcgnngtagtcaatgggaatgaggnctctctcaagcccaaatcactcactcatactcaagctgcctctttgccatatgtggctctcacagcctggtctgccataaacaaggtaatgaaagcatgggatgctcatgtgacagcagtttgctctcaggatgccagtgaacttgtaaggaagcttggggcagatgacgtaattgattacaaatctggaaatgtggaagaacagttgaaatctttaaaaccgtttgatttcattcttgataatgttggtggagccactgaaacatgggctctaaattttctcaagaaatggtcaggagccacgtatgtgaccttggtgactccttttctcctaaacatggaccgattgggcatagcggatggcatgctgcagaccggagtcaccgtgggttctaaggcattaaagcatttctggcaaggagtccattatcgctgggcctttttcatggccagtggtctgtatctagatgacattgcaaaattggtggatgagggaaagattcggcccgttattgaaaaaacctttcctttttctcaagttccagaggccttcctgaaggtagaaagaggacatgcaagaggaaagactgtaatt

SEQ ID NO: 6747 - DNA, 508 bp, Canis familiaris
  misc_feature (1)..(508): n = a or c or g or t
gaaanngcgaagcaactgcgagcacntaggaaatatgggaagaaggtgcaaacagaggnncttcagaagaggcagcgagagaaaacacatatgatgaatgccattaagaaatatcagaaaggcttttctgataaactggattttcttgagggggatcagaaacccgttgcacggaaaacaaaggaaggagcaaaaagccagcagatgaagaaggggcccagcgctaagcgacgctataaaaaccagaagtttggttttggtggaaagaagaaaggctccaagtggaacactcgtgagagctacgatgatgtatccagcttccgggccaagacagctcatggcaagggcctcaagaggcctggaaagaaaggatcaaataagagaccaggaaaacggacacgagagaaaatgaagagcagaccacactaagcagcatctttgtatacaaagaaccaagaaaaagggttgcaaacttgggatttcagcatacagttggatctcttgtgtt

SEQ ID NO: 6748 - DNA, 549 bp, Canis familiaris
  misc_feature (1)..(549): n = a or c or g or t
tctgctcatgtcacacattcgggtngagcnactgctgggcaccgggcccnnnnnnngctctgtggtgccaggaccnggaaggcccgggaannagcagacgtgtgaaatccgtgcccttnnagacctgggagaagaggggcagccttcccagagagaaagctctagaagagagaagataagccaagctcacatcgagggctggcagcccgcgtgctcacagatgtgtcctgttggccccagggctggtctataatctgaattacttaccaatattttaaaaacaggaacaatgctcacagaagactggctgtctgaccttttggaaactcagggtatctggtggcagcccgtgggagctgagaggcgccaccccacggacgcagcctgcacggtctggctcgctgcagttctagcactttctgacctgaaccgcagtgtcagtcgctatttgagggagagattgtgtgcgaccatttgcaccattngccgagtgtgtttggttcctagagtggatggtcttttgtttcacgtccctccccccataagcaa

SEQ ID NO: 6749 - DNA, 629 bp, Canis familiaris
  misc_feature (1)..(629): n = a or c or g or t
atctcaannagcttcgancccagaaactctccacagagtatcacgtgaatcnnntnngcnnnnngatgggggtgagctnnnggcnnnnnngtctcgctccacatccnggnnnngactttaatacgttaaaatgcacccacagnnnnnnncagatagtatttttgtggncaaaaggtctcagatnnagccccaggctcaggcacccagccactgcccagctctcttcccctgcacagcccatgaggatctcaaactcaccagttggaacactgggagcatccgcacctctcccccagctgctgctgctccagactctcttgtttgagcaaagttcacacaatcaccagaaagcccatgtcttggcacgagaacctggaggaacctgcagatggttcctcaatcttatccaccatgccgctcaggggccacggaagaaatacccagacacgcaaacagaaagccaagaaattggatgggactctgagcccttggtcagcccggaacgtgatgaccgcaggctgaaccatttcagggtgcacagcgacatcacactctacaaggctaaagtgtggagcttgggagaagatgatcgccacacatagtgttnnnnnnncacctcagcctcgttc

SEQ ID NO: 6750 - DNA, 597 bp, Canis familiaris
  misc_feature (1)..(597): n = a or c or g or t
aatctcacgatgtcanncaggcacaggtatttgaaatggtaaatacngcatttcaggaaatagtaaagtcagagggaaaatactggaaggctttttaaaaggtgaaaaggaaaataagcaggtctttcagacccttggccccgatggagaaggaagccacccccacgcgtctcactgggccctggggccgtggctgcccgtttctcctctgggcagttaaggtctctctacaaaatctggattcagcactgctgagtttgcagctgtttttgcgtgaaagacctgcctcagagtgtgttggcggtggagcccctgcagcggtgacttggcgttgcccttgtggacgtgggctgcgctgctttcccagtaggtgtggggtgtacgctttaggacgtgatttcgttcagtaccagttacacggctgcttctcctgctgctgcgtgcgcaccacctgctgctggtcctagtccccgagcagactgcgacatcgtccctcacctgcctgaaatcttgccgaaggcctttgcgtttcctttgtgttctgctgtccgggcgagggtgggaggtcggctggctctgttctgtttattcaccaat

SEQ ID NO: 6751 - DNA, 604 bp, Canis familiaris
  misc_feature (1)..(604): n = a or c or g or t
tacagtanaatctccacagacctnnatgatgatctcagnntggggagagcctatgnngcnntagncaaggtnntgcagagccaaggagagatgacagaagcaattaaatacttgaaaaaagttgtgaaaattgcaagaaaaaattttcaaagcctagatgttgtgagagcaagtacaatgcttggggccatctacaatgaaaaaggatactacaacaaagcttccgaatactttcagcaagcttttgacacaacagcagagctaacaaacttgcgtcaaatggatgagacgaaagttcattatggaatagcaaaagctcatcagattatgccgagagttaacaattatatcgagtctgcagatctcactagccttgacttcctgctgtcctggaaggaaagtagaagcaaaattgcatgtgaaccaactatgggaggatctagaagatccacaagggaaagtttatgtcaaatcccagagaatttggaagaagaactcagtggatttcctgataatcaaaaaactgagacttaaaccagctttggactcagcaatgaagcaagaagaaatttatcatgtcacctttgtcttcataactataata

SEQ ID NO: 6752 - DNA, 480 bp, Canis familiaris
  misc_feature (1)..(480): n = a or c or g or t
ttagactcaatagaatgttattttcaggcatgagaaaatcatattctttggaagacctaaanncttagtagttggcattacataacaatttagtatttgctcatatgaactaaaaattatagtaccctccgagaattaatgtgcactaaaaattttcatttcaacactgatccttatcatgtgataatgaggaatgtctgatttcttgaaaggaactgctgtagatagcatctaagaatgcaaatattcaaccacatttttattctcaaaagcatattggaatctctaatttacattcagacttcaatgcaaatttttatgaacttcacttcaccaaaatnnnnntttaagacttacacctaagactgggaaaagtttatatatcaatgctattaattttctaatatgcagtggacatgtgatggctataaaacacaaaaacccatctaaaaacaataattttgttcttcatgttatttt

SEQ ID NO: 6753 - DNA, 647 bp, Canis familiaris
  misc_feature (1)..(647): n = a or c or g or t
aatcaggtgtnnggttgatnnctnnacacatctctatgctctgattttaagacccgacctcacttatgaagtgaagattgatggtcagtcaattgaatnnngcggcatcgagtatgactggaacttaacatcacttaagaagatggagaagacctctgcagagtccaaggattgggagcaagttgaagatagcaaatcccaggactgggagaaacattttctggatgccagtgcaagcaagccaagtgactggaatagtgagctggatggggactggcaggcacccatgctacagaagcctccataccaggatggcctgaaaccagagggtatagacaaagacatttggctccaccagaagatgaaaaacaccaactatttgacagaatatgacctctccgaatttgagaacattggtgccattggactggagctttggcaggtgagatcaggaaccatcttcgataacttcctgatcacagatgacgaagagtatgctgagaattttggcaaggctacttggggggaaacaaagggccccgaaagggagatggatgccatacaggccaaggaggaagtgaagaaggcccgtgaggaagatgagcaggacttgctgatgggcaggtttggtgggcaagaaaacattt

SEQ ID NO: 6754 - DNA, 576 bp, Canis familiaris
  misc_feature (1)..(576): n = a or c or g or t
ctctatgccatnggtggctnngncacgctggagactgagtnnnnngagttggtcccnnnnnagctaanngacatctnnngatataacgannacgagaagnagtgggagggtgtnntgcgggagattgcctatgcagccggtgccaccttcctccctgtgcgactcaacgtgctgcgcctgaccaagatgtgaccagcgcagggggtctgaaccgagcagccctcccatcctgtggccacacaagcccaggcttctaggggctccagagaggaggccgggagaggctagagcccacctggatcctgttgtgccaccagggcgctgcttcagcaggggaggggaatcgctgcccagtcctggcctttccagcagggaccaggagctttggggctctctggtatctccatgtccctggtctccttgttccatgagccagaaccacagggatgtgttcccangctgcgttctaggccagtcccagccagcctgtgtgaggtgaatttacccacaggactctgtctccttgcctgtcagatggggagtgtccctctnnngcgcaccccgcagcctggatga

SEQ ID NO: 6755 - DNA, 522 bp, Canis familiaris
  misc_feature (1)..(522): n = a or c or g or t
ctttgattaggtatatggctttccaagtgacatttacacggccattttgctgtttagagattaggttaaaaccaaggaaggcaaggaaggtagcgncaagggctcattgctaactgttgtagaaggccctggactctgcttctgcgccgagaccacctcctcctcctccagcaaggagatgcacatagccctctccactatactagtttggccggctcccaacagtgtcagccactatttgagagaagaggaatgtttatatttttgagtccatatatttaaaatccaagatcgagaaagaaattctatattcctgtgataaccaaattagagtcagttaaacataaaaagatgaaactgtcatattttttttcccattgttttactcatacagatgttcttaaggctgacattcctggtatcgtattatgattgaatgtatctaaatcataataatttaaaattgacaaatgtaatcttcatagatttacaaaactgttattaaaagcttcttgaagaatc

SEQ ID NO: 6756 - DNA, 612 bp, Canis familiaris
  misc_feature (1)..(612): n = a or c or g or t
gctatgaagnnagcagggacagatgatcatannntcatcagagtcgtggtgtccaggagtgagattgatttgtnnnnnannnnnaangagttcannaagaatttnnccanctctctttattccatgattaagggtgatacatctggggactataagaaagccctcttgatgctctgtggaggagaagatgactgaggcatcagccagagagagatcttatgctgtgcctgccaccgccacttcgaccttccttcacagcttgctgcactttttatatgccagtgcttgacacattgccttattcacgtagcgtgctaataaccaaagcatacatgctgcagaataaaaataacggtgcttctttcttaatgttcaattaaggtctttctctttgtctgttgtagtactaaagtgtacttacgttattaaagtctaaagtctgggtcatttagattttcttttaaaagatcagactgcttttagnctttttaaaaaaacttcatttatattaaattgaaaactgtatttcnntaatcggaatcttagnnntaaaattatgaaatcctggaagtgttattaatcaagtttgctactaaattaaancngaaaaat

SEQ ID NO: 6757 - DNA, 520 bp, Canis familiaris
atgaatttctatcaaaatgttctttgcactgtaacagatctctttttcaaaatcttacttcagaagtattattagaagttggtgtgaaggatttgataatctcccagtccttagtaagattgagaggctggagcagttttcaaagagtccacaagttaatttcaaatgtgagttggggactgcttggcagcattgtatatttcttactcagaaccactgatgaggctctatttttaaacatattagtcttctgacagaaagcactgtacattatattgtttcttcctttccaaaattagccttctctctttgtgacaaaaatgtactttgattattgctataaagatggaagaaaaggtctaatactacttagccttaagtgtacctggcgttgttcaaatgtattttctgtaacagaaacatacttgcaatgtttttcatttccccttataaattgtaattcctgaaatattgctgcttcaaaaagtctcacagtcagagtatatgacctaacaattga

SEQ ID NO: 6758 - DNA, 384 bp, Canis familiaris
  misc_feature (1)..(384): n = a or c or g or t
atccnnnnnnacgagcacaagcacagacgtggnnnggcgtccccccagggcctgctgcctcacggccacacgcacgtcacgctcgagnntgcagggcgnnaggcaggttctgtgccgaccgcagttcccactcccttcctgggctgccccgctcaggccgggggcgtggtgggtcgggtgcggggccgtgccccttcccgggtgacgcatcggggtcctgccctcgcacccagcctcacagcccagcagggaccccgaccaccaggctgtcatcagctcctggccccccgccaccccgtcaccagcagggacgacatgggtcggtgcaccacccgcacgagtgcaagcctgggtgacaacacactcggcgccttctgccccggg

SEQ ID NO: 6759 - DNA, 566 bp, Canis familiaris
  misc_feature (1)..(566): n = a or c or g or t
agaagaggggagttcatttcactcaactaaaaagnnagggtgtagattttcaggnactgctggatccagagactcaagtggcatcttgaggcatctctcccccttcatccctcagcattgctttcttcgtgtgagctgtttttccaggcaggtcctgcatatgtnnaggccccagcagctctggctttatgtcagccccatggttantactctgcatctgcagtgatgaggaagctgcctcacccaccagcacctgcagatattctgactttggggctgattgcacagacttgggtcatgtgaacaaccctgacccaatcagtgaccaggagggtagactatgctgatggagcagggatgggccataagtcaatgctttagtaaccaggggatgttttaggtcaaccccattggtttcacgnngggtggggtgcatactcccaaaggaatatgagaaggagaggaaatatttgctgagcagacaaaataaaaacctgctacttgcatcagtaggacataaaggctttaatctggaaacttctnngtcccannaaggccatgcctgt

SEQ ID NO: 6760 - DNA, 554 bp, Canis familiaris
  misc_feature (1)..(554): n = a or c or g or t
caaagacagcggccagtggcantacnncgatgacaanagtgnctcacctgtaactgagaatcagatcgagtccaagnnagcctatgtnntcttctaccaacgccaggatgtggcgcgtcgnntgcaaccccagcccagttcatctgaccccccggcatctcctgcctgcggttccccacccaactctgagttcatggatgtaaactaaggggctctgtccctgccacagggaaggaagccatctctgctctcttccttcccacatccatccacccccaccctcgccctcctacccgcgttaggtgccccgtgccaggcattgcaggcctgattgtggctactgttctcctgtgccgcttatattgctctctcccggggaagaggaggttgtgtctcctcccggcagtgtgttccccgcctgtgtttgccccttagagcattaatcttcccttctcttctctatttatggttgtccccttccctctgtcctcaacctggggtgttctgagggggtggtggtggggtgcacctgaacacagagtgtattttcttat

SEQ ID NO: 6761 - DNA, 548 bp, Canis familiaris
  misc_feature (1)..(548): n = a or c or g or t
gatctttacccaagagactcctggaattttgtctttngacaggnntctttgacagatggtgtggggatattcagctttgccaggtacggcagtgatttttatagctcacgctttgaaggcaaagtgaacaagctgcggagagtatcttcaagcgactattccgtttttgagaactattatactcctgaagtgaccagtgttttgctgcttcgttcctgtaagactttaacccatgagattggacacatatttggacttcgacactgccaatggcttgcatgcctcatgcaaggctccaaccacctagaagaagctgaccggcgccccctcaacctttgccctatctgtttacgcaagttgcagtgtgctattggcttcaacataatagaaagataccaagcgctggtgaggtggattgatgatgagtcggctgacacccccggagtcagcacggaacacagttgtgaggataatgtgaatttaccaaaacctgtggaagcctttaaggaatggaaagagtggataataaaatgccttgctgttgtcca

SEQ ID NO: 6762 - DNA, 477 bp, Canis familiaris
  misc_feature (1)..(477): n = a or c or g or t
ctgcgcgncgacttccgtcgcgagctgtgcccgccgccgccgccacacatgccgctggnnnncgggnnncngccgccccgcgcccgggagcgccgcgcggggccctcggctgacccggagcccgagcgcgaccgagacgccgacgcctcctgcgccctgtgcgcgcgctccttccaggatgaagagggccccctgtgctgcccccactctggctgccgcctaagggcccacatgatctgcctagctgaggagttcctgcaagaggagccagggcagcttctgcccctagagggccaatgccctggctgtaagaactcagtgctgtggggagacctgatctggctgtgccgaatgggcaacgaggaggaagaggaggacttggagttagaagaggaacactggacggacatgctggagacctgaccctgactcacctcagcagccccagccctctgcccactccgtctgtgccatcca

SEQ ID NO: 6763 - DNA, 605 bp, Canis familiaris
gtcaagacgctcccactccagacctggttatgtctacgagctccccttcctcagccttgcttttcccattcagtgcttccgcctctgttttgtgtgcttctccgattcctcgcttttctttcctcccccaccccccccttcctacccggcgtggtctgagtccgctcggggcatcctttcggcgtctccaggagctgttttccttgactacgaagcccgtcctgcccgaggcctgctgggaccaggactcctaaagcgacgactatgtctggaaggctttggtccaaggccatttttgccggctataaacggggtctccggaaccagagggagcacacagctctacttaagatcgaaggtgtttatgctcgagatgaaactgagttctatctcggcaagcgatgtgcttatgtctacaaagcaaagaacaacacagtaactcctggtggcaaaccaaacaaaaccagagtaatctggggaaaagtaactcgtgctcatggaaacagcggcatggttcgtgccaaattccgaagcaaccttcctgcgaaagccattggccacagaatccgcgtgatgctgtacccctcaaggatttaaacttatga

SEQ ID NO: 6764 - DNA, 564 bp, Canis familiaris
  misc_feature (1)..(564): n = a or c or g or t
gaattcagaaatccagctagaggcagtattctgtacagtagacacaagaattatgtacgccttttatcaaagacttaagagccaaaaagcttttcatctctccagggggaaaactgcctagttcccttctgtgtctaaattttccaaaaggttgatttgcataatacagtggtgtgtgcaatggataaatggctgtcgtttcagaaattaaaattcttttttttctttctctcccccttccccccagctccacacttcaaaactcccctattaggtcagcatcctactgataagagggaaaggaaaatccaaatctgtcctagtgattttacctttgttctagaaggcgctcctttcagggttgtggtatccttaggttagcaaacctttttctccttttccccactgcctcccagtactgtccactcttgattaacctgtttctttggtatggaaccctgacagtcctgccccttccctaggatctgcccctgcattgtagcttgcttaacggagcacttcccctttttccaaaggtctacnnnntagggtgtgggccaagtt

SEQ ID NO: 6765 - DNA, 547 bp, Canis familiaris
  misc_feature (1)..(547): n = a or c or g or t
cgccccnnacagcccagcaccacggnctcntggtcccctcatgcatatgcagcagattgtgatcctcgctcgctgagcgncgagggggcgtaccttaggctccgtagcttagaaacatactggatgtggcctctctctattttgctgcctgcggactgagggatcaatgcacccatgccaggtacacccaaaataacactggaagaaaagaagagtctcatagtggaggcaaggacgtgaagcaactgaaattcttgcatatagctggtgaaagaggatacagccatttctgaagacctgcagttcctacgaaatctgaacatacacctaagctgtgacctagaatttccactcctaggtattcaatctgagagaaatgagtgcctatgttcacaaaaagactcgtgcaagaattttcatagcagatttatttatagcttaaactagaaatagctcaatgtccatcaacaggagaactgataaattatggcgcattcatccaaaggaatactatgttatacatataaaaatataataaactgatata

SEQ ID NO: 6766 - DNA, 659 bp, Canis familiaris
  misc_feature (1)..(659): n = a or c or g or t
gtanctacgagaccccagcagggacgatcctntaccacgctcatttagacatcgaggncttcaccatggaccgcgaagtgcgcaaaatcaaacagggcctgggcttaaaattcgctgagctggtgtacacgggtttctggcacagccccgagtgtgaatttgtccgccactgcatcgccaagtcccaggagcgtgtggaagggaaagtgcaagtgtccgtcttcaagggccaggtgtacatcctcagccgggagtccccactgtccctctacaatgaggagctggtgagcatgaacgtgcaaggtgattatgagcctatcgatgccactggtttcatcaatatcaactccctcaggctgaaggaatatcaccgcctccagagcaaggtcactgccaaatagacccgctgacaatgaggagctgggcctcctcctttgcccatcttccgagcacaggcgctaattgtgataatttgtaattgtgacttgttctccccgggctggcagcctggtgggggtgccaggccccagctttgttccctgctccccagtagcctgcccaagtggtcatcagtagcctgcccaagtggtcatcagaggagagggtggggttggcgtcggtggggagatgcaaaatgacaattaaaaaaaaagatnnnn

SEQ ID NO: 6767 - DNA, 649 bp, Canis familiaris
  misc_feature (1)..(649): n = a or c or g or t
tccgggnatggctcaagtccaacgtcnctgatgcagtggctcagagcacccgtatcattnacnnnggttctgtgactnnagcaacctgcaaagagctggcnagccagcctgatgtggatggcttcntcgtgggtggggcttccctcaagcctgagtttgtggatatcatcaacgccaaacaataagcccatccatctcccctattcctgctaagccagggactaggtagctcagaagctcagtaactgtgctcctacccccacccccaccctgcacatgcttctgatggtgtcacctgccccctttgtggccaaactatacctcttccttaccgtttacaccttaccctgtaatggttgggaccaggccaatcccttctccacttactgtaatggttggaactaaacatgtcaccaaggtgacttctccttggctgagaggtggaaggggtgggatttgcctatgggccccctcagtccccagtgagggcaggagaaagaagccgtcctcctctcccatctcgctccatgaggccaagggctgagagaaaagccctgtcctcccctcagaggccaggggtgctgctctctcccatggtgccaacgcctgtgtgtgttgtgtatgtgagnnatcccacannnnggggaaa

SEQ ID NO: 6768 - DNA, 605 bp, Canis familiaris
  misc_feature (1)..(605): n = a or c or g or t
atgattttttcccttttttctcttttttagaatatagcagtaatgctattgctgaaannnntgattttctttttctgaaatgtaatcatggatgcttgaatgatagaattttagtactgtaaacaggctttagtaattaatgtgagacacttagaagaaatgcttagagtgggcttttaagtgtgcctaaatgaattttgcagtaactggtattcttggttttgtcctacttaatacacattaattcagaacttgtatactgttaagagttagattgtcttttggaatgaccagcaactttgatgtttgcactaagattttatttggaatgcaagagaggttgaaagaggtttcagtagtacacatgtaactaattnnnnnnnaatgtaccctaaagaaatctaccagtttcttcaaatgcctttttaaaactcatcagagatgattagtaaaaatgcggagtatcatacttttcttcttgcatgtcagctacataaacagttttgtacaatgaaaaatactaatttgtttgacattccatgttaaactactgtcatgttcagcttcattgcatgtaatgtnnncctagtccatcagatcatgtg

SEQ ID NO: 6769 - DNA, 432 bp, Canis familiaris
  misc_feature (1)..(432): n = a or c or g or t
agaggatcanagcnntaggacggggctggactccacacaagcaaacaaaggctgacttatttcagggtctggatgccttgctctacgagtctaaagggatgaaacagaccactttgtgggaacgctcaacattaccgttttctttctttctatgtttcttttggtttcacttcttccttcttgggatgtttgttggtttcggttttgtgtgtgtcgatttctgttgatctccctttgatgttattttgatttttgtctatttacttttcacctcattttattgtgcttttgtgtacctctgaagctgtgtcatctcatcccttttgacatataacatttgtgttttcactcccttaaaaaaaaacacacaccaaggatccagtacctttaaatgaaatttgtatccattgaaaaaaataaagacctatataa

SEQ ID NO: 6770 - DNA, 693 bp, Canis familiaris
  misc_feature (1)..(693): n = a or c or g or t
ttctntngaactctaaantatattttcttcatatnngttttcttcatttcataatgaagtacnnngctannnnnnnntgtacatatcactacagttatannnngttccaatccacagtccctgtaatgaccaaccngnnntacacatctcaaggaattcagctgatgaaataatttgaactaatcaaggaataaaattctaatgttctgcagactattttcacatattatttgttaaatgctggactatattatgaaaatgttttcaagaaatcatttaaatgtatagatcagtgtttcttaacagattaaatgataaaataagctacctataataggtacagattatatttttgagttttgtagagtattgcaaattaataatacagaacaagtgtttaattttatgtaggtgtgtccatgtaaatttagtgggactttaaaaagaatatttgaaaagcatctgtttcacttacactacataaattgtattatcctttcatagcattaggtgccttgtattttaaatctgtgacacactatgacaaatttttaaaggggaagtattatgtaaaatgaagaattatgtatttctaaagactgtattgctgtaaatttaattgataaagctctgcttaatttagagtttgaagaactattctctcttcaattaagacattttcataatggaatg

SEQ ID NO: 6771 - DNA, 654 bp, Canis familiaris
  misc_feature (1)..(654): n = a or c or g or t
gccattgcctgcctccagatgagatcccctgttatttantnnnnnggtttgggaatcatttnanctttcttggggtatctcaccagactgggggctctgtgaggggaggggctgtggccgccannnnctgggtgacttccatgtccagctgggctgagtccacactccacctaggccaatgtcacttccctcccttctgcctcccacagggccctcctgctctccgcaggggtggcaggggcgttgatggagaccaggtgggcaaagtgcagggcccggagactctagcccaggaactggcagcgtcacttaaccgggccctgggccttcgggaggagctgcggtctctgcgggaggaactagaacacgtggctcagaaggggcgagccagatgtgctcagagtgctgagctgaacagggacttatgcaaggctcacagtgccctggtcctggccttccgaggtgcccaccggaagcaggaagagcaacagaggaagctggagcagcaggtggcattaatggaggctcgacaggcagaggagctggaggtgctagaagccaccgcaagggcactggggaggcccagaccaccccaccggcctccccggctgggagagacctttctgtaggccccatcctggctgtttctggatg

SEQ ID NO: 6772 - DNA, 633 bp, Canis familiaris
  misc_feature (1)..(633): n = a or c or g or t
cactgagaccatccaaaccntgtggcgcaagacaggtcactttctgatattggtagagaatggaacaaaagctggccactgccttctcatggatgccagggacctggtnntcaaggggaannagaagtcacctctggaccctcgacctggctttgtctttgccccgtgtccacatgaacttccttgtccccagttggcagcctctaaacctctggcctgtagcttttctcaggcttaccactgcatccccttcagctggaacaagaagaagcaaaaagaggagaagttctcgatggtaattcttgcccgggggcgtccagaggaagctcctcgatggccgcgtctcactcagcctgtccttaaacggccacgccacgtgcactgtcacctgtgctgtccagatgggcacatgcagcacgctgtgatcacagcccgccagcatggcagggatttgtatcgctgtgctcgcgtcagctcctggggagatcttctacccgtgatcacaccgtcagagtcggagctgcccccgtcccctgctgaagaccccctgagggtcgacaaggatgcgtaacaagtgttttcttccttaggcctgccaaggctgaagctacctggcatccagggtgggagcgc

SEQ ID NO: 6773 - DNA, 405 bp, Canis familiaris
acatgcttatgtgccgttgcctggtaggagtggggcagtaggaaagaggtagaggagaaacacacgtatcttcaatggcatatttattctttatttcagttggtgctaaatcaaatgaaacaagttcttgttggacaggctgttattaactgcttttgaaaacgtggcccatttaaaatatacatccaagcaagtgtgtcttatacatttgggagaaaaattcgctttaccttctttgggttgtatttttcattcgttgtcagtttttcaaaatggaccaagtctttttaaaagggttacagaaaacatttcattcttcaagacactttctataacaacctccttggatattacgtgctttccgagagagaactactcaacttaggcattatctctagtcactag

SEQ ID NO: 6774 - DNA, 610 bp, Canis familiaris
  misc_feature (1)..(610): n = a or c or g or t
gctgcatctcccacgccctgcagtngatcagccannnnngggacnntgtctttcagccacccagtcccccacagggcctccttgcccaccctgtggcangcagtggggccagcctgctccgcgacgctgtagccatccatgtactggtcacaggcagcctgcatctagtgggcggtgtcctcaagctgctggagcctgccctgtcccagtagcctgggcagtgggattggaagtgggggtctcccatacctgccttgcatctctccatgaactcctgttaggtgccttttgttgtctgcttttctattctgtctagactggcccaggggcccgggttctgggcagcaagattgagggctggagaggggaggccaagatgggaccacctctgtctctgagcctagggtgcttttggcctctccttcctcctggctgagacagccagagggcttcctcttcctcgttctcccgctgtcggagtccacctgactatgcagcccacctcccttcccaacctgcctgcctcctggcttgggcccagctcacaatgtgagcgacctggccagcctagggttctgctgggtgctgggtggtagattacctcctagtg

SEQ ID NO: 6775 - DNA, 490 bp, Canis familiaris
  misc_feature (1)..(490): n = a or c or g or t
cacagnngtctcttatnctgaaattcttantgtnnnnnnctttaagttaccaaatttaaaagtaaagatgcattgtaaactgtacctcaaattcgagaaatttttatattgatgtaaataaatgttaaaggcagtccacactagtgctgtgtaatgctgcagaccacttctaccaaacactgtaaatatcaatttaggcaaaagagaagaaggaaaaggctgattgctggagtattaaattaaagaaatcttttaaaagtaccaaagggcagggagattctctctcagtcaccagactcccagggatttccttgaaccaagaaagttccttaaagtaatagtgaattgttttaaaatcacatggcctattgactaccatctgaaagcctctatcactaaatttttttggtatctgctattgagagattgtccacatccttccttaatgatgggccagcaagtaaataggactgtcttgggatgcctgggt

SEQ ID NO: 6776 - DNA, 504 bp, Canis familiaris
  misc_feature (1)..(504): n = a or c or g or t
aaggacntgcagcatcnnctggatgaggctgagcagatcgnnctcaagggtnncaagaagcagctgcagaagctggaggcccgggtgcgngagctggagaatgagctnnangcggagcagangcgcaatgcagagtcagtcaagggcatgaggaagagtgagcgtcgcatcaaggagcnnnnnnnccagacggaagaggacagaaagaacctgctacgnctgcaggacctggtngacaagctgcagctgaaggtcaaggcttacaagcgccaggcngaggnnnnagaagagcaggccaacaccaacctgtccaagttccgcaaggtgcagcacgaactggatgannnnnannngcgtnnnnacatcgccgagtcccaggtcaacaagctgcgagccaagagccgcgacattggcgccaagggcttgaatgaagaatagctttgccatatcttcttgatctgcccgnnnntgagggtacagatgaaacccccagnnccagagcct

SEQ ID NO: 6777 - DNA, 528 bp, Canis familiaris
  misc_feature (1)..(528): n = a or c or g or t
ccctctctagantggtttccctatctgcaaaacnncagcactgactcattttagtcatcaagctccctctgtccctcacagcctccacttctgccaagctgagactatcctggcctcctgcaagaacactcaacccccagctacagaatcactgaaccatctggaaggtctgggttcagaggcatccaggagtttttatttttatttattttatttttttcatccaggagtttttaaacaagtgctccaggtgattctaatgccccagagatcagagctgcttgcttcctgagtgagccacaagttagcgttaactgaatacaggataatggcttgaggtggctcctgccctccagggatctcttgcctcagcccccactaagcttgagcctctctgaagtcctctgctagagaaagacttacgtatgccaccccatcccacctcaccccaccctgccatgccctggggagtcaaaagagcactcaatccaaggcctcgtggacaaatgatgntatagnncagaggtt

SEQ ID NO: 6778 - DNA, 558 bp, Canis familiaris
ccattttacccacacggcttccggcgtccctccgtccctccccccacccaccccggcccatcctcctgggaggccagagaataaaccgcatccgagaagccaacacatctgagctctgagccgttccttaaagtgcagcccaagcatttcagtgcagaagagtgcagctgacccatcgggtccccgtcgcacctgctgctgcagaacccggagcgggtgtgggcctggcccagcgcgacaggccggagggtgaatggccctgagccctcgccgatgtgtgtcggtgtcggatgatctattaaaacctctaatatcctttctgtttgtgttgttctctgaccccttaatgcacgccaggcgctacgccaagcgctttacagacgttacctcactcaatcctcaaaacagccctacggacaaggtcctgttataatgaccagtgcacaatttgagggacgcccaggtggctcagcggttgggcacctgccttcgactcagggcatgaccccggggtcctgggatcgagtcccgcatcgggctccctgcattagcctgctt

SEQ ID NO: 6779 - DNA, 465 bp, Canis familiaris
  misc_feature (1)..(465): n = a or c or g or t
annnnnnanctctcnnnncggcnnnnncgcgctgnctgcccnnnnnngagctgaggcgctgaggtggattccgtgcccgggcctttctccaggtccatcatcccctgggagactccctgtctgtcccaagatgttgctgcagcatcagttcaccagaccagttgattttgttgtacttattaagcaaaggaatgtcccatacttccatccagctttttaagaaaatctgctttgccccttggggcctttcccagtttccctgaagctcagagaagagatagaatccaggcatgtgttataccccctcctctcaagctgctgggtgacctggagggactccattctcgctgctgctgaagaagacagcggtgggcccggctgcagggtcactgcagggtgactgtaagctgccctggggagggggcggcatctccctttgggnnnnnntatgttaaaacccattca

SEQ ID NO: 6780 - DNA, 516 bp, Canis familiaris
  misc_feature (1)..(516): n = a or c or g or t
gggtagacaaanttgtacatgtaaatgtcccttgtttacgatttcaactgtgtcttctgannnnnnntctcattaggactctggtgggctgccggagtaattgaagtttggggctagggctggagatgggccatcaggnnncctgggatcntagcttccttccatttcaactcagcctggctaaatggcacaggacaaagctgactctctttgggcctccattttccctcccctccacgaaatggaaacaatactcctttttcttattggtccagcatggctgggctcgaagtatagtcgttgttgtattgggtgatgtgtgcaaaactgcaggacctcactgcctataagaggacataagggagaaatgggaggagagggacaggaagagcaattatttggtatagatatactcatccttgctttcctctcttcaacccccatgtttctggtttggtgagtcccttgtaccacccataatgctttgcattggtgcannnnnncaagggggtgtgt

SEQ ID NO: 6781 - DNA, 616 bp, Canis familiaris
  misc_feature (1)..(616): n = a or c or g or t
tcactccaagnnntggctccttgtccacactcaacggtactggtgtaggtnnnngcactttctcaagccatccgtgcttcatgtggatgccngtctgctggagaagattttcggaccaagcagagccctcgtcccggggttcgaacgggagttcaaggtnntgctccagatgagagagcccaactccgagggcaaggttgagatcctcatcatggggaggcgccggtaccggaagcgtgccaaaaggctgattcgcatcttggcggcgaagccccgagggaaacgctatggaggcacaatgatgttcagcctagaaaccatgaagtcttttgaaagagaaaatgttcattctgatgatttcctctccaccgctatgatgagtagcctggatgaagccatgcagtccctggaaataggtcaggagactgtccaggaacctgttaccaaaacagtgtaatttttgtgattaggaacccagtgcaggggggacggtttgggtcaggagccttaccctcagaggcccggtctgaactctgcctttgttcctgtggctaaggagaaacaagtattgtcggtggtctatccaccttcctccttcatagatagttgtttaaag

SEQ ID NO: 6782 - DNA, 353 bp, Canis familiaris
  misc_feature (1)..(353): n = a or c or g or t
gaaggctgtgccagtcctgccactggtagtcttctcccccctgcacccctaggatacctttgggaggtctagccagtccataagcagaggactcccagcgttggccttgggctgtgctcacccaccctcaatagcacctgaaacctatccgctaactaggagttgtacattgaaacctgcaatacattagaaacttatatttaaaaacagaattaatcacactgaccaatttttaaatggaaaatatgtaaatatgaagtgtttggatttctttttttctttctttctttttttttttttttttaagaaaaggaaatnnnnnccactcctcacatgccatttgtcctcagagn

SEQ ID NO: 6783 - DNA, 599 bp, Canis familiaris
  misc_feature (1)..(599): n = a or c or g or t
ggttcaacaaaattgnnngaatttcacagnnnngaagaacnnaaaaattgcccatcatagacagtactaatctgatattgtcctcagctgttaataccttttctttttttaagaaaagaaaattatttaattattttaaaatgagtctgccagtagctctttctgtagaaacaaagtctggaactaaaagccatatatttttaaagaccactttaaactacttgaaaagaattctaggaaacatgtaagaaaagcttgttatgcattgcctgcttttctcagaaaagataaaaactgctgtaggctatcagtatatttgtttattttacatttttggcatatctccctggctaatagatcctagaggatnnnntatattttgctttagacaaagaatcaggttatgatcattgtgtctgaactatcttttgggctttgcattaggtcaagaattttcagggtatcctaaaaataggactcttatcagcatatacgtgcagagtaagtcacctttctgggtctggtttctgagtggccatctgttgtccaactctgcttgnnnccaactagactttnnnaaagatttgtcaactagtttt

SEQ ID NO: 6784 - DNA, 518 bp, Canis familiaris
  misc_feature (1)..(518): n = a or c or g or t
atcancagctnnaaatggtgtctgnnngcatccgggtnctgaaacacatgtnnggccgtgttggggannagctggatgagcagggcatcatgctggatgccttcgttcacgagatggaccacacccagtnnnngatggatggggtcctcaggaagatggccaaagtatcccacatgacgagtgaccgccgacagtggtgtgccatcgtggtgctgctgggggtgcttcttctggttctcatcctgctcttctctctctgaccgtgggccccacccccaccccacccaacccaggatgctggtccctgtagccgggagagctgacaaggccctgccccctggtaggagttccttcctggggaactgccccaaggttcttagccagagccagtgggacccacagggccctgggccagagcccacaccactgggcctgtctcaagtgcgcttaggaggtggtagaggtaggggagcctcacactcctccctgtttctnnnnnnggtgccccaaagtcattt

SEQ ID NO: 6785 - DNA, 598 bp, Canis familiaris
  misc_feature (1)..(598): n = a or c or g or t
catgccctatcnntagagtgctcttttcagctggggagnnnaagaggtgctggctcctttccagagatgcttctgtagntgtgagagatnntaggtccnnccnnctaactcctgcatcctcannnngcaaaaagggactgggaagtaaaggggggccttaggaccccaaagaatggacccttggagactcccatcctctcttccccctcaccaagtgcccaggagacccctggctcagaccagcccagggccttgcccagtggcaggggaaaggggcacctcactccacctcgaagtcatttgactatccctgtccacctcacctcccagatcttccgccacccttccagctgcccctgccctctgtcacaggtagcagagctgggcagctnnnntatgccattttctacactgtgcttcatgagtagaactttcttgcactagttcctacgactgagtctccaacctggattccgagtagtcccctgtcccttccctcctcacctggctatgattcagttgtcccccttcccctgcctctgtgtttcggtgagagtctatgtatgtgtactgctttctgttnnnntgcattgtgggg

SEQ ID NO: 6786 - DNA, 74 bp, Canis familiaris
  misc_feature (1)..(74): n = a or c or g or t
atgaagagnnnacaannnnnnaattttctttnnnannnntnnnnnnagtccagagtctgttgtaaaccagtgct

SEQ ID NO: 6787 - DNA, 613 bp, Canis familiaris
  misc_feature (1)..(613): n = a or c or g or t
gacttggggtactctgctttagcaaaggttttggggtgaggaggtgctgaannannatacttctggcccagcaaggaggtagaagcttctgacagcccctctaggactgcctcttcttcctgagagggcctctgtgatctctctgaaagccttggaaggagatacgctctgtgggtgactacttctgccaggatgaagcagagcagctccccacatgaggggaaagcccctatgttatctactctaaaatttacccatcaaagctgaggaaagtgtccacaggtgtctaggtcttgggtcatgctttctgggggttcatttggggtcacataggtgtctcttcttggggggaaggggagcactcttccactacatattcttttgggatctactcattaccagccctgaccccatcttctgctcgtctttgtgagcctccaaagtgcccggggcaaggatgtctctgaaagggctttgagttgaagcccaagattctggttggctgtctctgctcctggccacaactttgagatttgcaggtggggtgggcagagagcaggcacgattctgctttgctgtttgtcttcctggttgtaactcctgttgataaaga

SEQ ID NO: 6788 - DNA, 584 bp, Canis familiaris
  misc_feature (1)..(584): n = a or c or g or t
ccagtaagtnnagctgngtccagattcttaagtcagcacgaggtggggctctcaggtgtnnctggatttgggttgagcatgcctacacagacaggggtgcatatgtactatccagcagttccagcccccaccccccatcgtctcatcagtgtgttacgtgcaatgatttatttaagactaaacctattccacctacaccgattcagggcttatccaagcattgcctccctgccattctgtccaagtttcctgcaccacaggcccaacttgagagggaaggccttgagttgagggcttgtgatcagaaaaactgacgatgggggtttgggtcagtactggtgtgtattagacaccagtcctcacatgtgtcctgagcccaagtcattgttcttcttccagttgccctgcccccacacgctcactccagacatgacaacatgaggcccaaaagtcccagcccccaccctacaggtcatcccaccaaccaccaggcttgggggcccaagggcagtgcctggtgcctctcccatctgctgtccccccttctctcccgcaattggnnnnnnctcattgggctgtgctct

SEQ ID NO: 6789 - DNA, 660 bp, Canis familiaris
  misc_feature (1)..(660): n = a or c or g or t
tgantgtgtgatttacagttgttacactcatanncagtagtcntacntcaaaaaaaaaattgccttttnntaatttcagcagaatgtgcatatttgaattaaacatgagtttttctagtcttgcttaaataccatacaaaagccattcacaatttatttcaaataattaccaagtgcaaaggtgtggaaataggcagtgcattttctctctccatctttcttctgcctcaaacctgtctaaatctatttctacatggggtcatctgctgaaaagttaaaaacaaaactgaaaaaactaaacaacagcaacagcaaaaacaagaagagtgaaatactgtttctcatccaggagaagcaaactgcccgagtaacaaattatcacagataacataggattcatcttgcaggattgcttctctagagaccaaaattttccacctctcctcaaggagggaattcacagccagcccnnnagtaaaagtcctaggaaatcataataacttagtgcaaatattactcatttttgaaaaagaatgagccaagttcatagttgaataaaaagtgaaacattattgctaaagcacattatattttaatgtcagtattctctcattgtgcctatgtgtcaggagacacnnnnnnnaaacattttacatgtat

SEQ ID NO: 6790 - DNA, 92 bp, Canis familiaris
  misc_feature (1)..(92): n = a or c or g or t
aacanagtggttnncacagtgctttttanaagcaggtggnnnnttccataaacaagatgtaacacagtacctcaggtctcagtggagccgct

SEQ ID NO: 6791 - DNA, 580 bp, Canis familiaris
gccaccgccgtgacactcctttgcccgccactgcagccactaagcttctgcctgggaattccatgaaccaggctgctgtctcctttcccagaaagagcccctgattgggctggggcctggagaggattccctcagctctgcaccccaccctcccccagcaaggcagggctgctctccctgctcccctgccctgacccgagggctcaggaagctcagacttcccttctggaaagttcaggtgttgtctagaagaatctcccttggtccctgccccagctgccaggtcttcagagcgagctacccactccccagccccccaacagggccacggggattctcgggcaaattccctgtttctggctccatggtgtggggccgggagcctcagggcaggccctgggagtgggaacctctctcgtgggctttccccctttcatcaagcagtgtttcaggccgggaagggaacatttcacaacgggtaaactgaggcagctaggagctgcagcttccatctgagccacctcagggtcccagtgcttatgtcaccctcttgtcattttctggcctaaggtagggtcag

SEQ ID NO: 6792 - DNA, 573 bp, Canis familiaris
  misc_feature (1)..(573): n = a or c or g or t
aatgagcattcatcgacgttcanngcaccacgtctcacactnnagtctttcatccagttgccgtgtccgggggattcttcacaacgcatccctagccggtgtgcaggagccacgtgccggccggcctcgaacacggcgggatccgcgcgaggagaagcagaccaggccgtgggggcgcagccctggtttctttcagagaggaaggcagtgaaggcggtttggagggattcggggtggcggggaaagccaggggggtctctcctttcttgtcgcggtggagatgatcgcggggtggcggcggctgaagagtgaacaccaactgcgggcgccacagccatggtggcaggaatcaggccccatggctccggggacacagggccccagtgtgcgccgggcctgtgatgggcccgtctgcgctccgcggacaagggccctgtgtctgccaccgtccgacacaaaggacagaggtcccctgtttactttggattagaagcgttcagatgaaggacagcaaaaacatttgagttttcccnnnnnntcagcttcttacaaaaaaaagcaaattgtagtgaa

SEQ ID NO: 6793 - DNA, 611 bp, Canis familiaris
  misc_feature (1)..(611): n = a or c or g or t
caaatacaaagatgttcaggtncttaaaatnctggtcagggcagtggntgacgggatgactgatcgnngtngagatgttgcaactggcctcaaannaaagctgcaggagttacttggcagagtgacttcaagagtgacaaatgatggagaaatctggaggctgtatgccgaagtgtatggaaatgggcagagtgaaaagcctgatgaaaatgaaaaggcattccagtatctctctaaggcatacaagtgtgacacacagtccagttcttgggagaaagatatgacatcatttaaggaagtggttcagagagccttaggacttgcgcatgtggctataaaacacagtaaaaacaaatccagtcctcaggaggctgtacaggtgctttcttcagttcgactcaatttacagggcttgttatctaaagcaaagcaactttttacagatgtggccagtggagaaatttccagggagttagctgatgaaacagcaactatggacgccctagtcatagagctgcaaggcctaagcaaccaatttcgaaaccagtactgaccatcctgctgggaacagttttggaaaaggagctttcgccttctgaatttctcttata

SEQ ID NO: 6794 - DNA, 687 bp, Canis familiaris
  misc_feature (1)..(687): n = a or c or g or t
agaggtcacccgaggtganncagagaactgtgcttccccnnnnnngggccagctaacaaacactnnnagaccaggcctgggtgtctgctcacagcagaaggggcccaggtgatcactgccccactgggcccagtatgcacccctgaggactcaaaactcactaccgattgaacatcctgtgaaggttctccaggccacggacgtcagggagagaggggcagcttgaagcacctgagccctccctgctgacgccccttccctggctctgtggttgaaacaagtacacctgttttacctgagtctggaggaatcaaatgcccaatgacgtgaccttacactgcactgcgaagcggtagcttctagtaactgctcttctgcccccgcttactctttgaaatctgccgttaaagagagatgccgggcacaaaacatttagctgtaagcaatttgttggtcagaggccaggatctgagccaaggctgtaaatgtgaatgacacccatgcaaggtctcttaactagacttaaagctgacttcctcattttgtaaattattagacattaagtagcatcttatttctagctttaagttatttacaaagtggcttctcttggcacaaacctaagttaaactagtagtttatgctgtaataactgctgatttatgtatttgcaaannnnnncctttt

SEQ ID NO: 6795 - DNA, 514 bp, Canis familiaris
tttttgttttattgccaaaatagaaggagcagacagcagatggggaacactgggccccagccccctcattggtgtgagctggtgagaacttcatggttggtactgagctgggcccagctccgtgcacagctgaccgcctgaccagcccttctcagaggcttcctgccactccccagtctgtcctcacaccagtgacgcttgtgaacagagatgttggagacctttaccatgactttgctacatttgattcttctggacttggttgtccctgggtgtcctgtgtggtcagttgtgtttgaacagccttgacactctagactgtgatgtgagaccccagagggagggtcagagtgctgtctggcttttcttccacaatgccggcctcgccttactccctggctgtggtcgctcagggcaccacatgctgggggttcagagaagaccccgactgccctggtgcccactgggcaccaagctccatggctgtggctcatcaaagagcagtgggcatgtt

SEQ ID NO: 6796 - DNA, 133 bp, Canis familiaris
ccgtcaagctccagctaacgctttggtacgcagcctccttggcacgccggccggcgccctgcgctcccggggcctgggcggacccgctcccgcacctgccgggccagcccctggcctctggcctccgcccgcc

SEQ ID NO: 6797 - DNA, 615 bp, Canis familiaris
  misc_feature (1)..(615): n = a or c or g or t
tgccagttacaatatccagnntccgacatgctttctcatttgttaaattccaagtgggacatttttaaagctactagaaagtagtactaaggtttcttgtggatggactagccaccttcctgtcgggccagagtatttgttgatgaaggtgtgagactgcagagagagtaacctgcagaagcaccgggacatgtgtacctaggaggtgcctacccagtggacccccatgattttgttaacaggtaaataaaagttaggttcatgcannnagtcagtttgccagtgtgagtatctgctaaaccaggaggcacnnnnnnactttcattctgtaacgtcccagtaagtggccatgtgagcttggactcccaagatggatggatctggactcctgagagttattgatggactaggatagccctaaagatattctacttgccacaggaaaaccctgattaggaacttctagtcaagagagaccagcttttcccaacaatagagattaaaattattgtccaactacgctatcaaggctacacggaacattctatagctacgtgggactcattcaaagtcaagnnnnggactaaaaaaggananaaatttggtattatctct

SEQ ID NO: 6798 - DNA, 558 bp, Canis familiaris
  misc_feature (1)..(558): n = a or c or g or t
caccaggtcacctgcactcgaggcncagagcctagattctggggttcccagcctaactctgnnnctgggctccattctgccctccatgcctcagccttcctagcgctgcaatgggcatgtcacgggctgccagatacctcagcaaccccgtcagagaccgcgcggaaagagccaagaaagccctgggcccagagagcnnnnnnatggagcagcaaggccccagccgggcactcacatccaggtagttggtgaggaccacgggggaggtgctgttgccagaggagagtctcttggtgaactggttccactcagccccaagcccggccacatccacgcctcgctccttcaggctttcccggatggagggcattttcttgaggaagatcctggcccagggcggaggagggaaaacccagaagagctctgtactcccccacaataatggtggaggccccgaagcttctagtacgactctctctgccctcgcccagacacctacaaattgctccttgtgctttcgggcctctcagagagaatttgcaagtccccttgattaaa

SEQ ID NO: 6799 - DNA, 649 bp, Canis familiaris
  misc_feature (1)..(649): n = a or c or g or t
atcaggaaatcaaaattctnncaaagctctgtaacattttacggacagattccctnncagaagttctccagtggctgcttcatgcaagctcaaaagaaaaagagtggatctcagctttgattcatgctgaactggctgaaataaacttgttggctcaacgaagaagcatctcagcagaactagcagcagaggctaataagccacccaaagttaaatctcccccatattcacctgcaaaattgaaagtgctgaccaaatcgagggaaggacatcagccaaccagagtgtcaagtcaaggatctgaaggaaataaggaagtaccaaaagaggctgagaacaggcctccattgtttatcagaagaaataagatgaaaatacccgttgcagactatttcagcaaaccaaagtctcctctcaggcctaaaactcaggaaagcatatcaacaaaaccaatgtcagcaaggagtatgcaacaaggatacaatccctctccccagagagcattttatccttaaacattccaaaggtagaaattatagactgagctatttctttcacaaacatgagcttcactccataagagtatcaaattattttttaaaaaatattttggtatcagagaatcaatagctcctctttatggtggcac

SEQ ID NO: 6800 - DNA, 671 bp, Canis familiaris
  misc_feature (1)..(671): n = a or c or g or t
catgccagagatngnngtgtaccctgcctttgaagcacccccacagtatgttttgccaacctatgaaannnnngtgaagatgcctgagaaagagccaccacctccttacatacctgcctgaagaaattctgcctttgtcaataaaccctataccagctttttgtcttgtttattttacagaatgctgcagtacagggctcttcaaacttgtttgatataaaatacagtttcctttgtttaagcatttatttttaaacactaacaagctttttggacatctattcaaagtcaggaagtcaggtttggggttttttgttttttgttttgtttttttgttttttttgtttttgtttttttggtaagtctattacattttaatagtttctggagacaatctaggttaagcaagagcaaagtgccattgtttgcctttaagggggggagggggtattctctacacattttcttttttaactttgcactttctttatataatagtttgcattttggttatttgctaccctggatactttcaggaagaatgaattaaatattcagggtgagtgagttaggtataagatctgaagttttcagctgtgaaaacaggaaaaatatataacattttaacttgactgtggaaaatgacggttgcatgtttctaatttgtatgt

SEQ ID NO: 6801 - DNA, 563 bp, Canis familiaris
  misc_feature (1)..(563): n = a or c or g or t
ccttgtnnnaggtactgactcagtccangncnnaggtcnacctcagaacccaaagtcaacattgagcctgatgaagtcatttgtacctgnnnnnncccctcggaaggaggatgtggaacagcacctcccctggacttctgtccccattagtcagaactccagctctactaagcctcaggtgatgatctacaatgacctgcaaaccttctctgaggtacctgtgctgatagagctacagccgtcctcccggcgagcaggtagccaagactgggtataccgtcctgtggatatagtttcctcagcctgccacaactatcgccagatgtcagtgcctccgaaaatcagctggaagccctactgccctgggtcaggcacccgggtagggcatgtggtctttgatgcccgccagagacagttcggggtgggcagggacaagtgtgaagctctgtctcccaggcgcatgcgccaagaggcatccagcaacttaccggagaccatcaaggagtgggggtatcagtgtgtgatgcggaacttggaaaaagaggagacaaaggtgcatccnn

SEQ ID NO: 6802 - DNA, 621 bp, Canis familiaris
  misc_feature (1)..(621): n = a or c or g or t
atgacatcnnccatcccatgtctgttgtcagctcaaccaagagcaggctggnnctgcagcacggggacggccacgtggtngactacctgtcccagccggtcatcgactacatcctcaagagccagctgtacatcaacgcctcgggctagcagccacccggccctcggctccactctcccctcgtcctccgccaacacactggcccctccagtctctgtcccctggttcctctcctgcctctctgtgtctccactcctcgtcttgactgttctccccacctgccgactcaaccctccacggtgtgggggacctgcagagaaccacagcataccctactcagctgtcatcctcggacagactcccctctggtctccgggttgggggtgggtgagggaataggggtgggagttgggggaagtgcagtccccggagacgtgctggtgtctgtcccccagcatgctctagagagcggctccagtgcccgtcctcccagcatgctctggggaggcggctctggctctcgccttcccagcatgccctttaccatgaagggctatgtttctttcttttctttttctttttctttttttttccttctcnnncgttttggtttggttttgt

SEQ ID NO: 6803 - DNA, 561 bp, Canis familiaris
  misc_feature (1)..(561): n = a or c or g or t
atcaacgactggctttgcaagtatgtgtatgatcacattggtggnnagcactccgaggtgatcccagagctgggggccactgtggccacatttgccatcactactctgtggcttggaccttgtgatattgtttacctgtggtcattccttaactgctttggcctcaactttgagctctgggtgcagaagctggcagagtgggggcccctagcacaaattgaggcctctttgtcggagcagatgtctcgcagggtccgggccctgttcggagccatgaacttctgggccatcatcatgtacaaccttgtaagcctgaacagccttgaattcacagagctggttgccaggcgactgctactcacagggttcccccagaccactctggctgtcctatttgtcacctactgtggtgtccagctggtgaaggagcgagagagaaccatggcactagaggaggaccagaagcaggacaaagagaagctggagtaggtgggaggaggaaggagggacgaaggatggctctgcgcagctattcccaagcccaggcccaggccaggccag

SEQ ID NO: 6804 - DNA, 571 bp, Canis familiaris
  misc_feature (1)..(571): n = a or c or g or t
cnnaggcgctgcctgacaatcnctgttccatgcgncaaggtgncgtcacactacgtaggcagcgccggggccagcgatgaggtggcggtgtagacagaaaaacacctccaggagaagttgttcacggacgaactcgggtgttaccagcgaggagtcccaggtttgaatgaacgtgaaataattgtttacaagaactgtacatacaactgcacgtttgtatacccatctgaagtacctcctgaagccccaagagcaaagtatttcaaaactaatagttactattttgttcgttgttgtaatactattaattgcaatgaaggtggacctttaagtctggataatgatatagtccttcagaagccaattgaagagcctttatcgggaattgtgcactggggggagtacaggttttatctgactgttgcttccatcctagtcagcaacacactgacatgagaggccctcttggggggggggggtctggtctctcccccattcctcagagcaagttcactcctcttcctccctgtgagccagggacactgacccaccgggctccccgttggtggct

SEQ ID NO: 6805 - DNA, 454 bp, Canis familiaris
  misc_feature (1)..(454): n = a or c or g or t
attccagtgcagtcgtgccaaaaggccnctttcccctgttccttgcactccatgnnnnnngtctatcccctgtagccatcgagtccatatgtcnnntagtgccgtacgtcccctgtggtgtgtatgacaccactattgtgtccatgtgtctggccaaggttaggtatccgtctggcctttgaatctgtgcccacttgtccatgtgcttactcatgagncgtgtgcctgtgtttcatgttcagtgtcaagtgaccctgtgccccgcttcccggggtgcccatgtggcttgggtccacggccctgtagccatggcccggtcccagcccggtgccttccaccctgggcagcaggggcannngctccagnntaccannncngcctccgggnnncagcctggcctnnccgcattcnaggggctacatgcccnnngcttctcccgccactggnnntaatt

SEQ ID NO: 6806 - DNA, 703 bp, Canis familiaris
  misc_feature (1)..(703): n = a or c or g or t
ttcaaaaatacnnntctttccattgtttnntaatgtnnacggggtnntgatgggaaagccattcaaagacatacagaaattagaaatgctaaggaaaagagagccgctgaacttctttgagaactattttttccataaaagggattggaaaacacaggcagaaaatataaagcctatcgacccagtctcaggctatccaagtgacatcctggctattgaccaaatattcaagaagaagcagaattggacagtgatggatgcaactgctattaaacagcatgtgaagagggctacagatacctataacttgggaattgcccttgaacaccggaaaaacatgctaaacctctggcggaagatccgaggggatctgattggaatagacactaaaaatgagtccttttatgacaccttttctacctatacatggtcctggaatgtttgccaagaattactttcaccgaaggacttaaagttatatgatgcatacatgaataggaatacctaccacaactttgtattctcttcatcctcggatatcagtgaatgtgatacagagacaggaagaaaaagaaaacggaaaggtttcaaagggtctcaacatgaaatttctacattttctaaacagctcactgcaaactactttttcatagatctcaaaattatggtttcttgcttttgtctagtacattcttagcacctg

SEQ ID NO: 6807 - DNA, 603 bp, Canis familiaris
  misc_feature (1)..(603): n = a or c or g or t
ccctgccttgagcctggncggccctgtggcctgcaccaccctgcagctcaggtctcaggaccccgtgtccccctcagcacctcaggaagccacagatggcagcaaagtagcagagccttcggccccctgccagtccttggtcagcattggggacctccaggccacactcagagggacatgctccacccccagctccttggacagtgcaaccagagaccctgctacctctgttccagcctccggggcctgccagcacccccagaccacagagggggagaagagcccagagccctcagggctccctcatagccagagtgcccaggcccttgagccacctccaatgcccaatggctctgcccccggagggccagcgtccctgggttcccagtaactgcccggtcccggtggtggcggctaaatcctctgtactccacatggaccctgcccgagtgggggcagggtggggcccatagtggccctgttgccccatcaccctgtccccaccctctctgcccccacattctctcctttagactcccaggagcccggtgccagggagacaggcccctacccacctccatttgcactgagaaaagaaattat

SEQ ID NO: 6808 - DNA, 531 bp, Canis familiaris
  misc_feature (1)..(531): n = a or c or g or t
acataggannaaccccagcaggctgagcacagggccagcacctggctgccaacagnngtccatcacacagagctggccttgggaccatcggggacagttcctgctacagatgaactgcctgtgacagacactccttagggagacagacagaggaggggctgtgtctgtagcgtctgggtatttaataagatgctatgagtgcacaagattgttcagcggctttttgtactgtgctttcatcgggtgaggcaggatctctctgcccaggagggagccgagggaaggtgtcggtgacagctacactcagccaatctggaagccagacctggaagccacgtgtccctatcaggccagctcccaatatgctttcttatgtaaggggacatgggatgtggccatgtctgagacagaaggagtgtgagacctaactctgggaaatgaacaaagggtagtggaaaaggaggtgggtggggggttggggtgactgggtgatgggcactgaggggggcactcggcgggatgagcactggg

SEQ ID NO: 6809 - DNA, 575 bp, Canis familiaris
  misc_feature (1)..(575): n = a or c or g or t
agaacactcgatacctgctgcgnnannccnnngcccaggactcagctcntggggtgagctctctgntgcacgggaccacacagtgccctgtgtctcagggtttcctcccagagaccctgtactgtgaggtggctcccagagccaagaccacacccaagcctgtgtcccctgtgatgtccctaggcccctccccatgccaggccctgaagactcctgaggtcacaggccactgcagagtccagagggccactgtctgggactcaggcagcagcttgactctaggcagtggcccaagtccctgtcccatcctctacccaggctccagccccacagccagggtcagcctgcaccgctgcctggagcccagctcaacagcccccagtcctgagctgatcacaggaggtctcttctccagcctgcagaagatggacctgctggaggagatcttagcagagctgcaaggtggataccaacttggagacaagcccagcctcaaccctgctcttgacacagattcttagagtgcccatgactgcctctctgcagataccacccccctcagagcctcccaggag

SEQ ID NO: 6810 - DNA, 581 bp, Canis familiaris
  misc_feature (1)..(581): n = a or c or g or t
acgnnttgacgctccttgaacccatnngtcaaacttgccaaaactcagagaaattcttttgtgcctcaacgatgcgaatgtaatggatgtacctcctgctttcaagaaatggctttcttccttcttcctctagtgcctgctcggtgcagaatgcagatgccctcacctctgcgcagtcatggagaccatgccggtcctgcagagagaatgaagctaccaaagagaacacagatacaggacactcaagttaaacaaaaccacagcggcatggagtccttctcattagaaagtcaaacagacatccagaaagctgcaaagcaaattggagagatgccaggacttcagtagaaatcacagatgaggatttcatacttcatgacttttctttaagcaggtacaaaagcagaaagctgaagaactgtctgcgatgagcactaagagtcctgaaatagagtgggactcatagaaggacaagaacaacatagaccacccagaggaggatccagaaggaatacattttattctcagccacactgcctaggcttatcatcagttctttagtgaggaagaacaagaaacca

SEQ ID NO: 6811 - DNA, 571 bp, Canis familiaris
  misc_feature (1)..(571): n = a or c or g or t
aaggaggaagaggaggannnggaggagataggggctgacatcggccccctgcagtgnnnattgggtggagtggggagnnnnagccaggcagcaagnnnngnnnggggcctccagccccccgacagcctctccaaggggttgagggcccnnnnnnnncctcctccccacccccactgtccctcactggccagcctggcttggaaacgtggtaggcatttggccataaataggcaggagaagcacccaaccatcagaccaccgtgaagtcccagttggctggtgccagaggctccattctctttaggttaattagtcactccccttctttcagtcccactccatctagagcaggggggcttggagaggtaatgaggtagatctgggtagctcttaaatcttagcctcagttttggggtttggttacatttgttagataaggccaagacgtagagaatcagtgggaagataccttcagatctccaacatgttggggccccccctccaggggagtctctctgcattccagattcagtccctagttttgcaatgacttgtacattgttaggttttt

SEQ ID NO: 6812 - DNA, 610 bp, Canis familiaris
gagaagccagactccactgctaccacctcgacccccggaaaggggaagaaagccgaggcatcaggaagtttaaggaagttgcctgaggttgcacatcccagaaggggcagagcggggatgcagacccagcccctccccacgtccccagtctccacaccaaggcccggctgccttctccccatgtgctccgatcccaggggggggtcctcagactgcagcacagcaagctggtgggctctaaggccctgtcgaccacaggcaaggccttgatgactctccctactgccaaggttttgatttccttcccatctaaccctgagctcaagttggcatccagcgtcctgaaaccaagaaaggctgttattccccagcaccttcgtggtccccatcctgaaagtgccttgtggcctctacccttcgaagttggaactcttcctaatacccacaggaagatcaaggccaaaggcaagttcaaggccagactctatgacaaacccaaggctgaggcatgcctcatgaagacactgagccttccaggacccctgccctttatcaatgcataccaggagctagggggcatgggggatgtgaggctggagaagtccttgct

SEQ ID NO: 6813 - DNA, 584 bp, Canis familiaris
  misc_feature (1)..(575): n = a or c or g or t
ccacaacnagcgcaacgccaacatctcgtacgccttcgacacgcacaccaacacgcagatcgtgccgcgcctgctgtttgagaacgagtattcctacaccacgcagatcgactacaaccccaaggaccgcctgctctacgcctgggacaacggccaccaggtcacctaccacgtcatcttcgcctactgacaccccgggcctgcgggcggaggcgccgtgtgtgcgtgcgtgcgtgctgaggacgggtgcgaggggggggaaatatatatatattattttgtataatattgcaattgtaaaatgacagtttgggtctatttttttttaaagtggattgtagatcgatccatacgcgtatgtgctggtctcatcctccacggtttatatttttgtgcaaatgaacttcttttgaccaggagccaccttccttcgacccctcccgctcccagatcccagccgctctgctccgaggggttcatccatcagggtcccgcaggcaaccgggagcggaggaggcgagaaagaagtgtcaaggggcgggaacatttttatgtattggagaagttttaaaaacccagaaaaa

SEQ ID NO: 6814 - DNA, 572 bp, Canis familiaris
  misc_feature (1)..(572): n = a or c or g or t
cngactccctgtgctaattgttcaacttatatattattatatagatacactgtttannctgtaccaaattgatttcaaaagtactacattgaaaataaaccggtgactgtttttcttcataaagttctgcgttctttcggcatcttcactctttccaaaatgtatctgtacatcagaaatgtcactattccgagtgtctttttagtgtggctttagtatggcttccttttaatattgtacatacattgtatctttgttttatggtaataagtaataaaaatgtagacttcatattttgtacaaaatgtcctatgtacagaataaaaaaaagttcatagaaacagcaaaaataggtaagtggcacaattatttttctttagaagatatctgtaactttacgctttagtgaaatgttaagtacctacatattttttaacattttgtaattcaaaactttttgttctgacattgtttatgaagagaaaacttcatacacgtgccatttaatatgctcttttatccaattttaaaaaagaaaaacctctaaaaatggtgtattatatggactaaat

SEQ ID NO: 6815 - DNA, 633 bp, Canis familiaris
gcgtacacagcccgggacaagagcaagctgacccagctgggcatcacccatgttgtgaatgtggctgcaggcaaatttcaagtggacacaggtgccaagttttaccgtggaatgcccttggagtactatggcattgaggctgatgacaaccccttctttgacctcagtgtctactttctacccattgctcgatacatccgaactgccctcagtgttccccaaggccgtgtgctggtacactgtgctatgggggtgagccgctccgctacagttgtcctggctttcctcatgatctgcgagaacatgacactggtggaggccatccagacagtgcaggcccaccgtgatatctgccccaactcgggcttcctccggcagctccaggttctggacaaccgactggggcgggagacggggcggctctgacttggtgagcagccgggagccctgaccccctctggcccgcatggcccaacccaaccagcccggccctggggacagcagcctctgctgtttccagtgaccttgaggtataaatagcaggtgggggcttagctgaggcagaagcagggagaactgagtggtgacctttagcaggtggatttccctgacccaatccagagattctttata

SEQ ID NO: 6816 - DNA, 689 bp, Canis familiaris
  misc_feature (1)..(689): n = a or c or g or t
tgacttcntggctcatgctccctgatggcatcactgtnnaggtgattgtggtcnaccaggtcaacgctgggcacttgttcgtgcagcagcacacgcatcctactttccatgcactgcgtagcctggatcagcagatgtacctgtgctactctcagccaggaatccccaccttgcccaccccagtggaaataacggtcatctgcgctgcccccggcgtggacggtgcctggtggcgagcccaagtggtggcctcctatgaggagagcaatgaagtggagatacgctatgtggactacggtggatataagagagtgaaagtggacgtgctccggcagatacgatctgattttgtgactctgccattccagggagcagaggtccttctggacagtgtgatgcccttgtcagatgatgaccacttttcacctgaagcggatgcagccatgagcgagatgacaggaaacacagcgctgctggctcaggtgacaagttatagtcctactggccttcctctaattcagctatggagtgtggttggaaatgaagcggtgttgataaaccggtcnnnnnntggagcgaggacttgctcaatgggtagacagctactacgcgagcctctgacccccgtcccccacagccgcttctggagtctttttgcactgttgaaattgggcttggtgctgaggcaa

SEQ ID NO: 6817 - DNA, 564 bp, Canis familiaris
  misc_feature (1)..(564): n = a or c or g or t
acacaattttgaannanntgaactcagtcaggctnnagaagaaatagaagagcaggccattgacaacagttctataactgagtattctgaggaaaaaaacaaaactaaaaatgacaccaggcaagatggtaaagcaagtcaaggaggaatgcccatgggcaatgaagagtatgaagatgcatgccctcatctgattgccttgtccttaaacaaagaaatcacgtctttcagaaatgaagaaaatacagaagatactaaacagtacagaacaagaactctgagtgttacatctgtgggcagtgttttaagctgttcaacaattcctccggaattggtgaaacagaaggtgaaacgtcagttgacaaaacagcaaaaatcagctgtaagacgtcgattgcaaaaaggagaagcaaatatatttacaaaacaacgaagagaaaacatgcaaaatattaagtcaagcttggaagcagccagcttctggggagagtaatatatttaagatcttgaatatttttcaaaatgttactatgatcccccttttaagacaccccttcactngtc

SEQ ID NO: 6818 - DNA, 589 bp, Canis familiaris
  misc_feature (1)..(589): n = a or c or g or t
cccccactgtgtgagcnncagcatccaggtacctgcccgnnnntgacagggagcagaggtggggagtcatccgtcaccgaaggcgttcagcagtgggtcgtnnnaaggctttacagggattccaaaggacaggcagtggggttttaactttcatggcaacagtgattttcagaaatcgtcaaataaacaaattgcactttcacatgtctgggtgtgcacagacacttgggggtgagtctgtcctgggccctgacaataagcagttttaggatacagtcgttctggttccttctgcctgcccttgggacacatatccataatggatgcataaaggaaggaaagaattgctctgtttcacgttgtagtataatttaaaatgaattttattgacaaaagaatgctgaagaatgaatgtgttgaaatgagttaaccgtgtatgttgaccttcatgttatcctccaccggtccttagtgagtggtccttggccccgggtgggtcgtcccacagcgtgacagcagtggaacgggaaggccggtcgcctgatccctggggcatcttctctcctcttcacagtctgnnctcccacaa

SEQ ID NO: 6819 - DNA, 452 bp, Canis familiaris
  misc_feature (1)..(452): n = a or c or g or t
gcgcaggctctgcannagctgtccaccagcttcnggcgtgcacagtcgggctanctcaaacgcatgaagaatcgagaggaaagatcccagcatttttttgatacatcagtaccactaatggatgatggagacgataatactctttatgatcggggttttacagatgaccagttagtgctggtnnagcagaacactctgatggtngaggagagggagcgnnaaattcgccagatcgtgcagtccatttctgacctgaatgaaatatttagggacttaggagcaatgattgtggagcagcagggatttgggtcctgatccccctgcaaccagctgcacaatggagtgttgaggccatggaagatctagttacagtaattactcccacggttcccaaggaactgctcttgctatctcttctgatacagtgtgttccattaagagccctgnncttc

SEQ ID NO: 6820 - DNA, 526 bp, Canis familiaris
  misc_feature (1)..(526): n = a or c or g or t
cttnccacactttatttcnttaataagtttaaggaaacttcataaagaattgagttcaagaaaaatgacacgttttgtagtgttcacattttttttaaaggtgttttttaaaggaaagtgtttggacaggttcctctattagagtagatttgaacaaaattctgtcaactgcttagacccaactacatttttcctaagggtttttgcttttatttcatttcacaacataattcaaaattgctgaactggacattgtgcaataaaatggaatttggtattaataagtaagctggcttccaaactacaatttgatacataacataaatgagactagtatggtgatgttgtaagagaaaagaattttgctgtctttgtccttatctacaatgttaatgataacctaacatttgagttagggtttttgagtataattgacacaatgttacattagtttcaggttaatatgtagtgcttaaagacagttttgtgccattgtctttccaaagttaaatatgttactgaatgt

SEQ ID NO: 6821 - DNA, 488 bp, Canis familiaris
  misc_feature (1)..(488): n = a or c or g or t
agttccaccagttcacagcagtgcctcatcnnnnngtcnnncccatnnnnnncgccagcacgnnnntgcagttagggatgatgtgaggcccgaatgtcccagggcctgnnccccatgtgaccccaggcccagcccagnncnacgctggaccccttttactttgtaaagtttgtatttattcccctataggtttgcagagggggtggnnngncnaccagagggtccgctccccggagaaagagaaagtaggtggagaggctggggttggggcacatccgggcattgcagagggagggaggcnnntgcatgtggggtgggnggggcccagaggtttccnnncctcccttgtttgcatggcccctccccctgaagcaatagggccccgccataggaagacccccccagaaggagggtcatcagnnnggcctcgcnngcatccccccctcctggcggccccgagatggggnnnggctggggctcaccccctt

SEQ ID NO: 6822 - DNA, 599 bp, Canis familiaris
  misc_feature (1)..(599): n = a or c or g or t
tggtgtaagttagtagntgaaaattgttgtcattactggcatatgtatttaggatgtagtagatagctgttccaaactgatgccttaaagattttcttgggggcaggggagcagggttgagaggaggaattggtagnngtcctggatttcaaagaattctacacccttcagattagtttctatatgcccaattactagaaacaatgaaacacattttataaattcaatattatcttactctgttgcatttacgttttgtgtgtgtgtctgaactcagaagttaattagttttgaggaaatattttaaaataagtttactaggtttcactttttttctgaagtctgtatacatagcttatgggtaagaaatactatgctcaaattttacatgaaatattttactactactttactttgcaaattctgtaattccactgaaagatgaagtctaccaaagaacttactgcatgtgcacatgtattacaatctcaatgccagtaaaggaaatactgcttcactgttcgcccgccagtaacagttcagtgctggtatcatttgagtccctggtatcctaagagccatatgttatgtactgtaac

SEQ ID NO: 6823 - DNA, 320 bp, Canis familiaris
  misc_feature (1)..(320): n = a or c or g or t
ttgagnacaannnnnannnnctggagcaggtgtgtaaccccatcatnnncgnnntgtaccagggagcgggtggtcctggggctggtggctttggggctcaggctcccaaagggggcnnngggtctggccccaccatcgaggaggtggattaggacttcttccccagattgttcctgtttgtgtcagaaacggttaggattaaggattctaacattgccttatatgnntgtgtttcatcagtctcaactctgcaagttgtttgcaaagtttcaactgtcttttggtnnnnttatgaagttcctttttttttttagagtcca

SEQ ID NO: 6824 - DNA, 706 bp, Canis familiaris
  misc_feature (1)..(706): n = a or c or g or t
gaatgtnnctttctcaaattctaatatttgtgttttctttccttctcctgttattacaaaactttgtacttnnacagttttgctctgtaaagcatttcagatgcagcttgtgtgaaatgcattatgcaaaataaagtttattgtattgtattcccagccaaacaacatgtaatctacagtaataaaaaatatatctcattttgggctcaaagcattaatccagttactgaaaagagaatacaagtggagcaaacaagagatgaagatcttgagacagactcattggactgaatttccccctccccccccttgatggaagaatgttgcagattctaaattgaggacttcattaatggcattattactgtgttatgattgttaaaaaaaaaatttcctgtaaggtacacactacataccaaggtcggccatcattcctgttaaaagttttttaccaagcttaaaatgaagctttgtgtttgaaagttagaagatggtggttgtacattatttcatttagaaaatataaaaattcattttgttttgaagctaggtgttaaactggaatagctcttataccccagagaatggggcagttgtgcccttcccttgacattcctttgttgtttaattctttagaattcttaataactgtttttttttaatcctgagagattaaacagtagacttgttaagaaaacaaaaatga

SEQ ID NO: 6825 - DNA, 610 bp, Canis familiaris
  misc_feature (1)..(610): n = a or c or g or t
catgattccgtnancagcataagcagcaatccatgggtgagactagctacggtgatgctgaccaggtgtacagcggagaacaaggcggcactcgggaatgaggtcttgaaaatctgccgctctttatataacaccaagcagatgctccctgcagagggtgtgaaggagctctgctcgctgctgctcagccagtccttgctgctaccagccctgaaacttctcctcgagagccaggatgagagccttcatgctgtggcgctggagcacatcactgctatcggcaaggtgaatgactcaaactgtgaccaggaactcctctccctgctcctggacgccaggctgctggtgaagtgcatctccactgccttctacccacgtatcatcgagcacctggtggccagcccgcggccagggcgctgggacgcggaggggctggccaggcacctgcgggaggctggccacgaagccgaagccgggtcgctccttctggccatgagggggacgcaccgggccttgcgaacgttcagtgcagcgctcagcgcgggtcgccagtgggtgtgaggctccccagcccccgtgtggaaggagccccacagcccagtgcgtccag

SEQ ID NO: 6826 - DNA, 536 bp, Canis familiaris
  misc_feature (1)..(536): n = a or c or g or t
gnnnacaccccactccccactccatgccacacagatccaagataagtggggtggtactgttctcatacggggattttacaatgggatcctccagggagatctagctgctaaagaatctaaagggcctcccctggaagtggtctcagagcatgaccaggagtgagtattgggcttacgatcctctattccacagtcagtccatttttttcccctcttttctaccttttcttcaatttattcccttcttggggtgtcaacagggccaacatcccctggaaagttgttagaaatgaagactctcaggcccatccccagaccttctaatcagaacctgcattttaacaaaatccccaggtaattactaaagtttgagaaatactgatacataggacacaatttttgaattctcccaaaggggaattttagccaaaggagctgaatttccccccattttacatatgctgattattgtacaggcattccttggctgctgaactagtcagcccagggggtctgccacagtcattctgcggaga

SEQ ID NO: 6827 - DNA, 573 bp, Canis familiaris
gaatgtgatccgagaattcaacttgaatgaactctatcaacgggccaagaagctatcaaaggctggagataatatccccgaggagcagcctgtggcccccacccccacggaagtaccagatggggaaagcaagaaagacaaatagaatccctgccttgtctgtgcttcctcacctttgaggccctgtccctcctgtaaccacaagccttgtgtgaggcctgggccttttatttatgttttctcctttggctctacctgagtggggcagggtgctgcttctgattttaaagaggcttccagggaattgacaggcaccctccaggaaggcctccactgctgtggccaactttcactggaagaagggagaaatctacaatggatgaagaaaggctttccttccaagcttgggtcactgtatcagttatggttaccactcacatgtccccactatgctgtgttttcatctctcctctcagtggacctacacagtctgcttagattacattcaacctaaaacagaagacccctgggtatggagtctgcaccaggattttcccctcaaggacccttgct

SEQ ID NO: 6828 - DNA, 585 bp, Canis familiaris
  misc_feature (1)..(585): n = a or c or g or t
tgcttttttcctcctcnnngnnnctggtnacanctgcagcctttctgcagagcagctcgtttgctgtgacncngagctcagaaaaccagctggaccatggtttgggagcgggaatatacaagtgnnaaggaccaattnnaaaacnngtcttcttgctctttctctagttctgacagtagactgatgcatttcaccataatttgccatgaaaaacctgacccaacgctttcaggacagatcacttgtcacctggctatatcataaagtccttgcagtattaggaacttttcatgcctggcacccgcttcctaaactacaacccaaacaattctgctgttcccaggggcagtagaggtagccatatatcccactctttcctgctgctcataaccaattgccagcacctctttctcctctggatctgttccaagtcggagctgtcatctgtagactcaaccattccctttctcggaggagtgctgttgacagactatatacaaaacaatgtacccaaacagcacaatgccacgtcttctcaatggttggacactgtgatctaaagtttgtatttagggcagcccaggt

SEQ ID NO: 6829 - DNA, 512 bp, Canis familiaris
agaataagcactagatgtatatttattgaagtaaacagctatattgttaaataaaaaaaggaagttacagaagaacatgatatgttcccattttaaaaatagacatacacagtgtgcattacagcatctgaaaggatatttgctgaaatgttaacagcatctatctctgggaggtgagatttggagcatttacattttcttttttgcatatctgtaatttctgatttttccacaatgagcatgtagtatctgtgtaattttttcagggaataaacaacaatgttcacgacatatattaaatgaaaaaacatgttataaaaccgtatgtatagtatgacacaatatttgtaaaaaaagaaaattatatataaatatatctacgtatgtatatatatgcataagaagctagaaggacatacactaaaatgttaatagtagttatttatgggtagtgggattatgggtgattattttttctttttgcttttctgtgttttctaatttttctacaa

SEQ ID NO: 6830 - DNA, 543 bp, Canis familiaris
  misc_feature (1)..(543): n = a or c or g or t
acctgggatgnnngggttggcttcccccagcgaggctgggagtgccgaggagtaaccgtcccctctgatctctggccagagattggatgccctgtgcctcctccccacctgctcaaggccagcctgcactcacacgtcacccagacataaaggaaaagacacattttttaggaaatgtttttaataaaagaaaattacaaaaaaaaattttaaagaaccccatccctttgtgtcctcccccccctcattccccactgctgcctccatttctgaggtgccctaggaggcttccctccatttggggtctgaggacttttctttttgtagctggggctttggtgttccttgttgtgtcatttcccactcacctccccacctggtctcctgggtgttgtcaccagacctgaacccgcgagaggacagggaaccaagtgcccttcccgccggcctctcgtggcctctctgcctccctgtctcctgtctcccctctcccttgggctctgatgaaaaattgctgactgtaggtttgggagtttagttctt

SEQ ID NO: 6831 - DNA, 182 bp, Canis familiaris
  misc_feature (1)..(182): n = a or c or g or t
gcncntgagtaaaccagtgctnnactcagtgnntagaaagaagnatgaccatctggtanngtctccttcacgtccatgcctgcctcctctgtcctgtcccttctctggtcactgtctccatagagctcttaaggagttgaaggaaagaagggctttgggtggggtggccccgatggcttagc

SEQ ID NO: 6832 - DNA, 650 bp, Canis familiaris
  misc_feature (1)..(650): n = a or c or g or t
aaatactcaaggacaganntcttgtggcgntacattgtnncagctatggntacacaatggcttaaagaactctgaaaatttcatccgattactgatgcgcaattcagagtggcagaaataatttaggaaactgtcaacagaaaaggaacctaaatgcaccccataggcagggctgatgtttaaaattcataaaggatcacgctttctaccctcccttcccggttcccttttatgttttctgtttgcgacacaattagaaaatataaaatcacagtggtcttcaatttaaaaagtgctaattgaaagtagtagaaattgtcttttttcatatttctttactcttatccaagattgtgttaaggcaaaaatcttattctacattccacctccactatgtaactgtcttgttaaaagggtgttttctctttattttcctatatattaagttatattaggacatccagcctggtatgttctgttgcatgtaaagtgctgtttatattttggaaaactattgtatagaatgtattaatttagattgtgtataaagccacaaaaatatgtattttcccatattgaatctatattgcaatgatgttttttagctttttaatattttaatatataatgtaaagtttagactgatgtga

SEQ ID NO: 6833 - DNA, 613 bp, Canis familiaris
  misc_feature (1)..(613): n = a or c or g or t
tccatctatcaaactngcattccactatatnnatttttgccaaaagatgagttnnatntgtttgaaatctgagacactatgttcaaattggtctatctttgttcaaatttcttcccacntaatgtnnaaatccttccttggacatcacactacatgtaaggctggtaaggatgactcacacaagcttatggttttcattaccaaaatttttagattctgaatgtagatggagtctcgtttaagagtcaccaaaggtgcctgccccccttttcctgctaagaagagtccctttgagactgtcccaagagtgtcagagaactcagtgggcaggggttctggtctgcttgccatctaggtgtgggatgtgagggacattaatgattatgttgaatctaggctctactcctctgaggaatggaacacaaggtagtcacctatcacttaaatttacaattccaaaagattactacaaccatgtccatgctcagattcaaatggtttttcatatcactttcgggtagtaaaatgatttacatttttttcttaattggcagcaccaattgccattccttacactctttgatttgttnnnnnnntgttttgtttttactga

SEQ ID NO: 6834 - DNA, 563 bp, Canis familiaris
  misc_feature (1)..(563): n = a or c or g or t
acccagagctgacnagnnctccccgccgaggccctgctaaggacaagaagctcctggccaccaatgggacccctctgccctgaccccagggggccagggaannngnnnaaccccctcaaccccccttccctgccccctaactgtgaatctgtaaatagggcccaaggagtatatagggaggggagagacacaacaaacccagcctcaccctgcagggatggggctcagggggccgtgcccaatggggggtggttctgggggggaactgagggcgggggagctgtttctattttatttattgattaatttattattttatttattgatcaatctctcggtggggtggggggagggacgggggctggttggggtggcttagcagatccggacggagagggccatctgtccttgtgtccccaactcctccttcccaggcacccccccttccccagctctcccctcccttcaaaaccttctgtacggatttgctctccggaaggaattctggtttcgcgtgaccctgcctgcgtccgtgtctctgattccgccggcggcaaaacaaa

SEQ ID NO: 6835 - DNA, 555 bp, Canis familiaris
  misc_feature (1)..(555): n = a or c or g or t
atgtactcccacttcaaggactgtgannnnnngacttctggcatnanctcagcgncagaccagctaatgccgtacttcgtcatnnagatattctccatgatgccaggactgcctggactcttcgtggcctgtgccttcagtnnaactctgagcaccgtggccgccagcatcaacgccttagcgacagtgacctttgaggattttgtcaagagctgttttccccatctctccgacaagctgagcacctggatcagtaaaggcttatgtaggtacagccggtggatcttctcctccacatcacgaaatgtacgtgtggtgcatgtcaaaattcaggacccacaggcacgaatgcacactgaggtgtgtgaggaatttcacacatggattcacacttccagagcaccaggagggtaatgggagataatcaccagctagcgtgcctttccccgtccttagatttgactctcttccgtacttgccctctgctctatattcatcacttcgtcatcccttggttctgccttgtgttgatcatattcgcccctctacatggga

SEQ ID NO: 6836 - DNA, 528 bp, Canis familiaris
  misc_feature (1)..(528): n = a or c or g or t
atcaccatgtgtcaaacaaggnnactcctctagaagacctctaaggtccctttggctctgtagggttctctggagaatccccacctggaatttaccaccacctggaaatcatagggtatgtaatatgatgaccagcaggtggcactgtgttccacccgtggtgatggtttgaaagggaatgttggtgccttctgtgtcacaagttaatgttaagatgctaatgttttaatcaaaataagcactgatcttaaaataggaagataggagctttcctctcgggagattttgtcataagaccggtgtcaggacccgctgaagagccaacagtactggtctcgccaagtcaagattttatcctgcttggaaatagagcccctctccatttgagagagcagagtggttgaaagcttaacttatctcctgtcagctttcagggcaatttgattgtgaaagcattgagttttctggatagaaaagcggaaggtattaaattggttttaaaggaaagtaagtttaatgtctgttgta

SEQ ID NO: 6837 - DNA, 580 bp, Canis familiaris
  misc_feature (1)..(580): n = a or c or g or t
cagatttttggcagatgacntgnnaacaaggctnntcaatggnngtaatgttgannacacaagtnnnacgtnncagagntaagtgtcaccagtattggccagaacccacaggaagttcatcctatggatgttatcnngtcacctgccactcagaagaaggaaacacagcctatatcttcaggaagatgacactgtttaaccaagagaaaaatgagagtcgtcaactcactcagatccagtacatagcctggcctgaccatggagttcctgatgattcaagtgactttctggattttgtttgtcatgtacgaaataagagggctggcaaggaagaaccaattgttgttcattgcagtgctggaattggaagaactggggttcttattactatggaaacagccatgtgtctcattgaatgcaatcaaccagtttatccactagacattgtaagaacaatgagagatcaacgagccatgatgatccaaacaccttttatctttggatagattcccagaagtgggattgctgggtgaaagagtcaatacagatttgtttgtgnnnnnnttttgaaagtttatga

SEQ ID NO: 6838 - DNA, 489 bp, Canis familiaris
  misc_feature (1)..(489): n = a or c or g or t
caagcccctgcccgaccacacgccttnnnaagcccatcgcagctttgcctggccacggaacaagtgcaagcacaccctcatcgccactgcagccctgccccggagcagcagcccgccaggccgcaggcggacgcacacagctggttttgaggagagtcgtgccgttcgcatgagttagagaacacagtcttgtacgcagatgctttacattgaagttggtagatgcagaccactgtgccgtccttcctggggcgcagggagtggacgggaccgtgggcccttgggaatcttgctcgtgggtgagaacgtggaaagagcaggagagcgataagcatgagataagtgggatttcctcagcctctcctttacnaagttacagaaggaagatccatccagaaagccctacccgatcttcagtttttatttcaaacgctaaatgagaaactgtcccattttnngaaaccctccagaaaagaaactggttatcag

SEQ ID NO: 6839 - DNA, 578 bp, Canis familiaris
  misc_feature (1)..(578): n = a or c or g or t
ccagcgtggcangaggctctggtgccatcagaaagagtcngaacgtngaaaagcnnatgctcatcccctcggaggaactgtagaagggccacggatcaccagccacctggctgtgaccacctgcccaggcctctgggaaagcacagggctcctcacccaccagccctcttgccaaagcccctcctgggagccctcctgccaggcctgtggagccacctcccagtctgcctcccaccggcaggcccttggccccaggaggggacacctgagcttatctgatgagcctgggaccctcggggctcccctggccatcagctcagggggctgctgtgagatgggcaccngcaggctnncactgcatggatggaatccagaccgggcccctgcagggcaggacggtgttgggagagtgtggcacggcaggcgccataggcagcggggccagtgagctcagctgggccctgccgggccgccgcataccccctctggcggtggagattctcagaaagcccccacctcgaggtgccacctgcacagaacctttgccccgnnnngcccacggagcttgtggggcttct

SEQ ID NO: 6840 - DNA, 576 bp, Canis familiaris
  misc_feature (1)..(576): n = a or c or g or t
atcgatcaatgagcgnngctggctnntgnnnnncagacaatccacgcncttcacagcacagcgtcttcaaagagtatttttcctccgtgtnntgatgatcgtgaaagcacnngcgaaagttctcgatccccgtgtcccccgcgtgagccctcactttccacgtggagaccctgcagctttccgtgcgtcggaccttcgggcgtcatgccaaccctgccgtgggggtgagatgctcccgcccgacgagcacgggagccgagccccagaaggacaatcgacttgttccaggaaggtccggagcctttgttcttcagtcacgatgactagacgacgagcaaatccccgaggggggtggtttcagcccaggacctcgccggcgcccggtctgcaccgtggagtgaaggcgggagcccccgtgtgctcccccgtccgtgcacgcgaaggtcttgaggaccggggaccggggtggggccaggctgccctgtgacgagggcgccgcgggccgggccagagcgcggctgcccccggggacggaccgcgaccgtcctgcccacnntccctgccgccgccgccccc

SEQ ID NO: 6841 - DNA, 569 bp, Canis familiaris
  misc_feature (1)..(569): n = a or c or g or t
acgcacagattctgaaagtcattgaagcttactgtacnngcgnnaaaacgcggcaaaccctcaactcaagttcgcgcaaagagtccgctccacaagttttgcttccagaagaggagaaaatgatagttgaggaaacgaagagtaacggtcagacggtgattgaggagaagagtcttgtcgacacggtctatgcattaaaggatgaagtccaggagttgagacaggataacaaaaagatgaagaaatctctggaggaggagcagagagcccgcaaagacctagagaagctggtgaggaaagttctcaagaacatgaacgaccctgcctgggatgagaccaacctctgaggaatgtcgttgcttcttgctctgagaccagctaagagaccaagccgggagccccatgaccctagccagggtgaccttaaggaccatggggcaaggctggacaaaagtcatcttgctttcccggcatggaaaagctggagtttatcacacaaatagaaacagtcacactgttcctgaagaatacaaacatgaggtgtggacccngggggctggactgcatta

SEQ ID NO: 6842 - DNA, 676 bp, Canis familiaris
  misc_feature (1)..(676): n = a or c or g or t
gagangcaggctccatgcaccgggagcccgacgtgggattcgatcccgngncnccaggatcgcgccctgggccaaaggcaggcgccaaaccactgcgccacccagggatccctagaaccttccttttgttctgaagagctctcacacctgattcttgggaccccaatccctgggaactggcccagtggcagctggcattcaaggagcccttgccctccaggcctgtacatctataatcctcttgagtcctggccacaatcctgggagaaggatgcttgtacccacttcacagaacagctcactgagtctgagaaaacacacttgcccaaagtcactactcaaagctgtagcagaaagccaagttcacctagaagttaaccacctccagagacctccccacccccagtcctgcccttccttccattatctgtacctctcctcccacaggtattcccacattatcaccccatagacctctcccccttagcaaactccacctagagtgtttcaggtcaccccttgatccctagaatgcccccaatcttcagcccctttctcaagagtctacaaccacccctgggtccttcccgatctctcccagcccactccaggactccagtcttgttcatgtttgttcagaacaccccccctccccaataaacgcttcaaggannnn

SEQ ID NO: 6843 - DNA, 623 bp, Canis familiaris
  misc_feature (1)..(623): n = a or c or g or t
taagaggagaaaacnnnnngctacagtggccccaccttttcttcccccaagggagtgtctgtcagccttctactcttnacctacccttttgtaatctgctcccaaannnngccagccaacgtgagtttggtcacaaccttttctggagcttggtgaaacagatggtgcctgggaataggactgtgatctcctggttgaccatggcctaggtgaggcctctgctccatctggacataggaaagtcctaagctcagtgtcccatgtagcctttacaaatccatggcccaccttgggctttggcctcctcattctccataagggcccaaagaaggagtggcaacctgctttagcagatggctggggtcccttgataaggccaaccctgaagaagctcattgaggcatttcctgtggccttccttagaggtcaggcttctgtttgagaagagttatcctgttcaacactcagtcctaggatgacttgatgggggagtgggaacaggggtaggggctcatactccttgtttgtggccatgagccaatgcggtcttacagcgagtcactgctaatagaggccttaaccattagaactacagactatgccacatgacccagtgcctatgg

SEQ ID NO: 6844 - DNA, 579 bp, Canis familiaris
  misc_feature (1)..(579): n = a or c or g or t
actccgctgccgacatttcaaaccttngtagatatttctcccaaatcacatcnnnaggagtttctttttggtggtttggtgttagttgtgatttaaaaatagaaatagctgggtaataatcttttgaaatatgtgtagtccagaatccacttgtcagctttaaagctggcttcggggcagacggggatgttgcacgcgggggcaggccaggggatggtgggaggtggtaaggtcctcatcaggtgtcccaggctgtggactggtctttcggtctgggaatggcatcccttggaaagggtcagaaggtagaactagtttgctgactagtgagttttaaaaagatacacggttgagtgtgttgtgcagtgaagcaagcagttggtcagcttcctcctggcctctcgtgcccctgcccccttctgggcccctggaggtctccgtggcctggtcctggccttggcacacagtcggggctctgcgagacccctccctgctccaacacgagagtctccatttacagaagctcctcgaggctctgggaggacgtctgatgttggtgacagagctgggaanngcanc

SEQ ID NO: 6845 - DNA, 695 bp, Canis familiaris
  misc_feature (1)..(695): n = a or c or g or t
aaaataatggagcacatttccaaactcaatcaaatgagaaggtgtcagctcagcatgaactgnaggaacaagtgaaaaaactggaacatgacacatattcattgcatttgatttcagctttgctggaaaatgaatgtcagatcttacagcagagaatagagcttctcaaggaactccatcatcagaaagagggaactctgcaagagaagccaattcagaaaaacggtgaaaaggacaagaaaaaacagaagctatcagcagagcataagccaaaaatgcaagaaaaagagggtacatttcagaaaaaagacaaattctacagaggcctggatgctggtagcaagaaagcgcttaataaccacttcaatactcatattgcaagaggaactcctgtggaaaaatcatccagcagcctaacttagaaaataccaaaagtagaagaaaaggcaattcttcaaaaactgtaacacatcaactctaggcataatcaatcatcaaacctaggatagatctgctggtttgacaagagtaaaccatagaacaagaagattaacacttagattgttcattacctcagtagttatgtaagtttggtgtttcatgaccattagtgccagtatcaagttcataacctgttgtacaatttgcttgttttttgtatttattagagatcctatgacactgtaaccaagagg

SEQ ID NO: 6846 - DNA, 515 bp, Canis familiaris
  misc_feature (1)..(515): n = a or c or g or t
tccaaccagcatactgctgacaaggagaatgagattaatgctgaaggattaaaagggcccggggagaaacaggatgaccagaaggaggatgaggagtccagggggccctgtcccgtggtcacccctggtccggagggaccgtctacaccgcaatctcaaagatctggggtcagtccaagtggatctgaggggcgcggggttaggagcagcagcccacaggagagaagtccccccagggctttggcatatgagaaggtggaagtgatggagtccattgagaagttttcaactgagagcattcagacatatgaagaaacagctgtcattgtagagaccatgattgggaagacaaaggcaaacaagaagaaatcgggagaaaagagctcttaaaatgtccgggctcaatgggctacaatgtctttggggcccctgcaggagaagtgctttgatattttagaacaaatgataaaaaaagagtgaggtgagggttcnnnnnnnggattagaccatagctg

SEQ ID NO: 6847 - DNA, 627 bp, Canis familiaris
  misc_feature (1)..(627): n = a or c or g or t
aattgnagcaagagaaactgannagacatgtgaagagaaagtacaccccaaacctaaactctatcgaagaataaactgacactgacgttattagtaagggaaggagcttttacctgaaaactggacttcgtctgcagcctgccatcagactgatggcgaggatggggaacggtgccctaaagtagccaacagcgtttcccatgtacctcgtggatctagagtaaatttaactcttaaaagctacgtgacctagagttttgccctggtgttctgtatggttcttcatactgactgttttcttttccaaagggttaaagcagcagggggacgtttgtacaccattaaagcagagaacacagttgattcctcacaaagctcttcaagcacctggtggttggaatctggataaaaatagggaaactgggtccttaagaatctaccaaagaggaagggaggcttggccagcggggtcacaagcagactggtgcgggggctccccggtccttgcccagcgatggcaaatgggaaggaggtcccagcagcagggtccgcccgtggttgtgctcatctccggtccacactctctttcattcactcggtctggtgtgaaaggatcacatttggttt

SEQ ID NO: 6848 - DNA, 537 bp, Canis familiaris
  misc_feature (1)..(537): n = a or c or g or t
ctccagcaccgacccgnnctccaccaccagcaaagactagggcgcccactctgcctggggctcctggctggccatctcggcatctctgcctcaagattggnccgtgactctccatttctctcccggtgttgggcctctgtgagtctagcaccacatctgtatgcccccaccctgcacccaccctgcaccacatccccatctgcttccacccacccctcactatgtcctccgctgtctcctggtccctttctattccaaccctcctttccctgtgtgtctctcagtcgcttgttctcccggcttctcgttcgtgtgtttctgtcctgcaatcccctctctctccccagctctgtactaagctctcccattgtctccctgcctcctgtttctgcttccacacttcgaatcccctttcccagacccaggctctccttgtacctcatgtctctgtctctatagctcctcattcctcgtgctccataggagcccccagtatggntgagtagtgggagcggannnnnagcagtgatgtcaggg

SEQ ID NO: 6849 - DNA, 688 bp, Canis familiaris
  misc_feature (1)..(688): n = a or c or g or t
catgcacatccagtgcaccaagcctgacactgnnngctgtgcnctgaatgactctcctgtgggcctggctgnnnatatcctnnagaagttttccacctggaccaacccagagttccgagacctggagaatggaggcctggacaggaagttctccctggacgacctgctgaccaatgtcatgctctactggaccacaggcaccattgcctcctcccagcgcttctacaaggagaacctggggcagggcttcatggccaacgcgcatgaccggatgaaggtctacgtgcccacaggctttgctgccttcccttgtgagttaatgcacgtgccagaaaagtgggtgaaggccaagtatccaaaactcatctcctactcctacatggcccgtgggggccactttgccgcatttgaggagccagagctgctggcacaggacatccgcaagttcgtggggcttctggagctacgctgatgcccatggggactggctgtcaccctggggctccctggccaacaacgtctgcccctttacctggaagcccccacaccccgcctcccggcgccggctcccaaggagcagggaggctcccagtgttctcttggcaaagatgtacacccccatgcctgtcccctgcccatgcctggaccccatgctcactgccagcaccagtgctcccacacacacaat

SEQ ID NO: 6850 - DNA, 642 bp, Canis familiaris
  misc_feature (1)..(642): n = a or c or g or t
ggatattgatgaccacacagacntcgccctgnaatatgaggtgtccgctgtgcccactgtgctggccatcaagaatggggacgtggtggacaaattcgtgggtatcaaggacgaggaccagctggaggccttcctgaagaagctgattggctgacaagcagggaagaggcctggctgcccttgcccaccagggcccctgcagttcgaggaggggccccgtgagaactctgagcccttccgtgttggcccttcctgcctcctcccttttgcccggcccccatgggcccgtgctttggagaccaggcccccaaacatgggtgcccggctgacctccagggtggctacccggggaatggtgctgccactgacctggggacagccatctcctacccactgtcttgtctgctcccactagggcttgtctctgtcctcccaggatgctggaaagagccccaggccagcccacagtgctccgtgccgggtgacagctcggtccacgtcgccctggtcccttctgatctgcaccctggtgcctggcccatctgtctcctgcatttttctttcctgctgctgttttgtaaaaagaaagaaggaaaaagaaacccaaacaagggagagtaatatataattctctcatttttt

SEQ ID NO: 6851 - DNA, 596 bp, Canis familiaris
  misc_feature (1)..(596): n = a or c or g or t
gggaccagagnnctgcaggnnagcnntgagcacaacagagaggctggccagggtgggcacaccatnngcggcaatcttccagctccacactacagacacctattgtgtgttcagaggtgttgccacagaggctgagttcatcatttttaagacgtctgaaatagcacagaattgtctgtgtttccgtgagggatgaaaaggcacctctccctttttctggaccttctttttttaaagtttatttattttttagtaatctctatatgcaacatggggcttgaactcatgaccctaagatcaagagtcacatgctgtactgactgagccagccaggcacccctgtatcattttttaagcttaagtcttcatcatcctaaaattactacttaaagattttgtttttatttccatcctcctttccattcatctttaggaaatgaggttaagcataaagcaaagaccttacctttctcagctggtagatgggaaggtgctcacagaaaggcatggcccagcagtgtctttacccgataatagctttgtccctgtagacatgccattcagcatccctgttcctcgtgtggaatggagattca

SEQ ID NO: 6852 - DNA, 615 bp, Canis familiaris
  misc_feature (1)..(615): n = a or c or g or t
aggctcagaatggatcacagnctgaggtgtctgattctcaaaggactcatcagtcaaaaatcaagtatnannggtatcnnacagaatctcaagtaatcattacacttatgatcaagaatgttcagaagaataatgtaaatgtggaattttcagaaaaagagttgtctgctttggtgaaacttccttctggagaggattacaatttgaaactgagacttcttcatcctataataccagaacagagcacatttaaagtactttcgacaaagattgaaattaaaatgaaaaagacagaggctgtgagatgggaaaagctagaggggcaaggagatgtgcctaaaccaaaacagttcatagcagatgtaaagaacttatatccatcgttatctcattatacaagaaattgggataaattggttggtgagatcaaagaagaagaaaaaaatgagaagttggagggagatgcagctttaaacaaattatttcagcagatctattcagatggttctgatgaagtgaaacgtgccatgaacaaatcatttatggagtctggtggtacagttttgagtaccaactggtctgatgtaggtaaaaggaaagttgaaatcaaccctc

SEQ ID NO: 6853 - DNA, 703 bp, Canis familiaris
  misc_feature (1)..(703): n = a or c or g or t
ttgntngaaacactgaagctngatgagnncccccagagcctnctcatcctcaacctgactnnaaacagcngnancaaccaggatgggtacagnnagctggtgacagaagccctgccattgctcctggacctggacaagcagcctgtggtagagcgttggaccttggatgaggaagatgaagcctcaggcgatgaggatgaggagttcccagagctgagcagcccattctgcacagagcgaggcttcctcaaggagctagagcaggagatgagcagacacaaggagcgcaggcagcaggcagccctgaccgagcaccttctgaggatggagacaaagcccgccctcactgacctcccccagctgcctggggagcccatggcaagggacagcagtccttctgtcactcccaggcaaaggaaggagacatcccccaagcccacttccttgtcacaagctacctctgccaccaggaaactctgcccgctggtttccagccagcaaagcatcactcaggcaaagaaggggaccagagcagccctagtccctaagnnnctctggctggggcccctggcacaaacaaaactgtgaccaagagaatcaagaaatgaagtacatacagcctagccttatcagcagtaccaggggaacaagggatggggaagaacagggcatgaagtggggcctcccctccttctctgacccc

SEQ ID NO: 6854 - DNA, 599 bp, Canis familiaris
  misc_feature (1)..(599): n = a or c or g or t
gaagagtggtagngtncctgctcaaggctttgggctcgaggnnngngggtggcgaccntgcgggtggcctcgggattgaggcagtctgcacctccttccttcacccttcccgccttccggctccagatctcgggagcgctcttccccttgccaggtgcagctgggtcaccgggagctccgtgcgcaggaggaaggcagtcagcatgtgctcctcttctgccgtagctcttacggccgccttccccccagcgcagcctggttccggcccccagggtagctctgatgggacagctgatgccaccgagctgctccctgtggtcggggcccacccgggcgcttggctccccgccccctcccccacactctcccaccagcatggggcagtgccgcgcccctcgcttcctgcagcacctggcccctcactccggcccccagggccaggccgtcccccgcctccccgtgtctgccgctgctgagccgacacttggtgggaccacgcgactgagaggctgagcggtggctctgagttccatggctcctgtcctgggattgccactcgcctnnnnntcattgcaccggtncnnngagagaaacgtttg

SEQ ID NO: 6855 - DNA, 664 bp, Canis familiaris
  misc_feature (1)..(664): n = a or c or g or t
tgnaaagaangaacatgagctcancacnntggganatcttacgnnntcaagcactgtgnnnnnnngctgtgatatgcaggaacgattcagaccagccatcaaatattnnggcgatattattagtgtgggacaaagattgttacaaggggctcgaatgttaggaattccagttattgtaacagaacagtacccgaaaggtcttggaagcactgttcaagaaattgatttaacaggtgtaaaactggtacttccaaagaccaagttttcaatggtaataccagaagtagaagcagcattagccgagattcctggagtcaggagtgttgtgttatttggagtagaaactcatgtgtgcatccaacaaacagctttggagctagttggccgaggtattgaggttcatattgttgctgatgccacctcatcgagaagcatgatggaccggatgtttgctcttgagcgtcttgctcgaactgggatcatagtgactacaagtgaagctgttctgctacaactggttgcagataaagaccatccaaaattcaaggaaattcagaatttaattaaggcgagtgctccagagtcaggtctgctttccaaagtataaggacatttgaaggactggtatgctactactcaccatcaggtgacagaactgtaagcc

SEQ ID NO: 6856 - DNA, 472 bp, Canis familiaris
  misc_feature (1)..(472): n = a or c or g or t
gcagaagaaccagctgcaggccatgcctgccctgccccatctcagccagcnnnagctcatcgacctcagcnncaatcccttccactgcgattgccagctgctcccgctgcacaggtggctcattgggctgaacctgcgtgtgggggccacctgngccacccctcccagtgcccacggccagagggtgaaggctgcgactgcggtctttgaaatgtgcccaggctgggctgccaggaaggccaagcagatgcctgcttccggacccagtgccaggaggaccccatgaagatcagatggtggacagcagacaaggtggggaaggaggcgggccgcctctgagcactggagcaggccggccctgtcttgaccccgcccgggaggctcttactctcttcaggaacaggatccgatgagctcttctctgtggcctgcaggtcatcctccagcaggggcttcctggacccctgtctga

SEQ ID NO: 6857 - DNA, 175 bp, Canis familiaris
  misc_feature (1)..(175): n = a or c or g or t
gggcaaagctaataatctatgttnnctgttagaagtcaggagaatggttatcttcagtgagaggtagaggaggagatagtgtctgaaagagagtctgagggggacttctgcagtgctggtaatattttgtttatctgggtgcttgtttatgttggattatttagttcattaaaat

SEQ ID NO: 6858 - DNA, 600 bp, Canis familiaris
  misc_feature (1)..(600): n = a or c or g or t
cccggaagtatttcctgtgccttgccagtgggattccttgtgtgtctcatgtctgggtccatgatagttgccatgccaaccagctccagaattaccgcaattatttgttgcctgcagggtacagccttgaggagcaaagaattctggattggcaaccccgtgaaaaccctttccacaatctgaaggtactcttggtgtcagaccaacagcagaacttcctggagctctggtctgagatcctcatgaccgggggggcagcctctgtgaagcagcaccattcaagtgcccataacaaagatattgctttaggggtatttgacgtggtggtgacggatccctcatgcccagcctcggtgctgaagtgtgctgaagcattgcagctgcctgtggtgtcacaagagtgggtgatccagtgcctcattgttggggagagaattggattcaagcagcatccaaaatacaaacatgattatgtttctcactaatacttggtcttaactgattttattccctgctgttgtggagattgtgttnnnccaggttttaaatgtgtcttgtgtgtaactggattccttgcatggatcttgtatatagttttat

SEQ ID NO: 6859 - DNA, 623 bp, Canis familiaris
  misc_feature (1)..(623): n = a or c or g or t
atctgtaaatttcaaaaggattacatttgtaggggctgacctgacttcattatgtctttgtgttaaattattcccaagcatcaacgtgttcaagtatgtgtgtgtgtgggtgtgtattgttggctacatgttttcctttaatcgattttaactcttgtccctctaggccagtagttctcaacctttttagtctcaggacacctgtatattcttaatcatatcgaggaccccaaagatcctttttgtttacatgggttttatctactgatgcttaaccatgtttaaaaatttgagagatttaagaataattgttttaaagataataaacccattgtttgataatgtttttatgaggaaaagaaccttccaaaaaattagtggtattcaacgtttttgtaatctttgaactctctggcttaatagaagccagattatcacgtctgctgtgttaagtctatcgtgataacgtggttttggttggattctatgtagcgtatccagcttcattcctgtccttggagaagagaagcactttaagaattgttctcaggtggttggtgtgggtattctttgatacaacaccaaaaactcaagtggtaatnnnattatgtggtatcctaaat

SEQ ID NO: 6860 - DNA, 680 bp, Canis familiaris
  misc_feature (1)..(680): n = a or c or g or t
atnngttgaagnncggaaannagatgaangcagaacagacagannngtctttcagcaaggactggaccttctatcttnnggtccacactgaattcactcccaatgagcaggatgagtttagctgccgtgtaaagcatgttactctcagtgagccccagatcgttaagtgggaccgagacaactgactagcatcacagctttgaagatgatgcatttattgaactaatcccaaatgctttggtttttcttcatgctgataggtttttatgctttaatcataaagttatattgaaacaaatacaaatacaatctagttgttaattctacattgggcactgtgtcactatgcttgacctatctgggccagtagctatagttgtggggctggaagcttagagatacggaggagagaattctcatactcaccatcaatatcttggtcagacctgaactcttcagtctcttcagaaaaactggataagaagataattatgcctgtttagagttaatctccaatttgcatactttgcttagaatttgggagacattttttgaaagataaatgccaaattattggaaatttgttacagtggataatataccttattgtataaaattcatatttacctcttccatatgttagagacactgttgcacatgattctacttacgttaatttt

SEQ ID NO: 6861 - DNA, 612 bp, Canis familiaris
  misc_feature (1)..(612): n = a or c or g or t
gagntcaagttgagtnnnnnngcatcnnnagtcccattgaattcatatcatcggtagaatgttctagttctgtggccagctgcttagagctttactgcatgtattctctcaagaattttatccgttttgtattttagaaatgtcagttgctgcattcctgaagtctttatttgcaatatgagcttatagactatccattccctttgggtggattgttgtttgacttgtgaatgaaaaaaatctcttaaaccacaccactattgaatgaaaatattgaaattgtatctgtaagaaacatttaaagaggagatatattagttttttaattggtattttaatttttatatattcaggaaagaacagaagtgattgaatattgttaattataccactgtgtgtttagaagagtaaggagcagtcagttttcatatcaatgacagcatttaaggtattgttctgttgaataaaacatatgacctggaattattttactgtttcagtagtattacctgtattttctcacttgtttggatgatttccggtgaatctgtgtcaacagttccttttaaatacaaatcaataaattccaaaaaactttaccacattttgaat

SEQ ID NO: 6862 - DNA, 555 bp, Canis familiaris
  misc_feature (1)..(555): n = a or c or g or t
ccggnntgattttcatcatcgtcnnngtcaacatcttcatcactgcctttggtgtccagaagccggtgatnnacgtggcccccnnnnngtaggggctcagatgcccccagatggaacccggccacagccacccagatcctggagccgcctcgccctgaggcccacccccctgtgggagttggtcctggaaactgcaggaacccaggcgggccccgccgggccgtatcccaggacaggctgcccgtggtgaggccacccaggccaacacggagcctgctccccttgagattggctcaggacacacaactggggcagggtcgtggccaccacggacacacagcagcccaaggatggtgaggcgcccannnnnnnttggtctcaggatgtttccagagggacaaggagaccccccaccctctgccagtgcaaggaccgtctgggcctcggggccccaccctggtgccccaggacacaggcctgccagccccctggccacgggccctgaacacacctgccaccagcagtgagggggcagcnnnnncaccctcctcaggg

SEQ ID NO: 6863 - DNA, 440 bp, Canis familiaris
  misc_feature (1)..(440): n = a or c or g or t
gtcactccagaaacaaagacnnnatcctactttccagaatcccaaaatgatgtagggaaacagagtgctaaggaaactctgaaaccaaaaatacatgcatctggtcgtgtggaagaaccagcatcatcgttagcagtctatcagaaagctctagaagaaancagcaagttcgtaatagaagagcctaaaccctgtgtgcctgtcagtatgaaaaagatgagtaggactcctcctgcagatggcaaaccaaggcttaaccttcatnnngannnnnngtccagtgggtctgagcaaaagcagggagaaggttataaggtgaagacaacgaagaaggaaatccggcacgtggaaaagaagagccattcgtaacagtaaacggatcatgtgtttttactgccagtattgagaaattcatggaagatatgtcagcannnngtgaa

SEQ ID NO: 6864 - DNA, 591 bp, Canis familiaris
  misc_feature (1)..(591): n = a or c or g or t
ctcnnaacccctggcgcaaggcccagctgctacgtgtnnagggtgaggtcagggcnntcctggagcagctgggaggtgctgggagctgatatagtggcactgggcacctagctgcgtgacccctgggccgaagagccttccctctgtggcctcctggtttgcactactgcttccaggaagatctttctggggctggtggtaaagggataggcacaactgtgccagctgctttcctggggcatgtccatccattgctctcaagtccaggaacagggctcctctccattggggccaggaggactgagactcatgctgtggcagccagttgccctgcagcgccaccagcctttcctctgtcctcccgaggagcttctgattgtgccaccagggggcgcacttcttaagtgacctggccaaaggcgcggccatccaggtgcaccagaaggcctgtcccttctgccttgctgcttatcagaggacgctgaggatgcctgcggccacctccttctcttgttggtgccttctcctccccttcatgttcccttcctcaacannnnacctgtatcgggtacagntaccgtacttggtggc

SEQ ID NO: 6865 - DNA, 556 bp, Canis familiaris
  misc_feature (1)..(556): n = a or c or g or t
cactccaannatgatacacacacccaaccnncagaaagtgctttnngctaaaaattacgtattttcaaatgaacgtgaggacaaagcttgagtcataaaaaaanntttcagnnacctggttcttcccccaaatcatctccagtccctccccnnactcggatggtttgtgcctctacctaccccaaaacaggtgcggacactgtgcaaacccagctgcgacagcatggttctctcttccctcccaggaggagtcgaccctcaaaaccagagtgaaagcgagggatgtgtcttgataccgtggaaaccagggaagctacctgaatctgggtttggggtaggagtgagggtataagcagagtctcccttggcctggcaccaacatcagaagtcgcgccctgaacaacacagcaggcctgccgttcacagagggagccacatgagatgggcgaaggacgaatcctgagtcaccatcaagggatgagggagcgtccttggggagaggtgatgggggtggagggatgccggcaacttcacaagggaatttgtctgaacagag

SEQ ID NO: 6866 - DNA, 474 bp, Canis familiaris
  misc_feature (1)..(474): n = a or c or g or t
cannanaccccaatcatnnaggtccttgtgcctggnatgnaggaaattgcagtcaggatatgcatcccgggctcccagggcacctcaagccctattggtaggcaccaggagaccccaaacaggaattctcatccctggaaaccggagtacttcaatgccctgagtcgatggatctcaagacacccaaatgcaaagagccccagcccccagggaaccccaaatcctaaagcctccatctctaatacatgaagggccccaaggccttgaggggatcccaaatcctagaaccctatttcaagctacgttctggtcacaggtccaaaacaccaaatctgagtcactggccccaaaggacctcacagcacccgggccagaccaacagcctgagggagaacctgaaggcccagggggtctagggtggacctggggccctgaccaccaaggacagctcannnntgccccttcantgcatgt

SEQ ID NO: 6867 - DNA, 503 bp, Canis familiaris
  misc_feature (1)..(494): n = a or c or g or t
gttgtannaanatctacttncttctccaccccactttaaaacacttctgttgttggtgttgtgcagcagttatgtgctagataagctattattaaatgtgagtgggcctttattctcaacacctcttgtaactaaaacaagaaccatagtacctcacatcagagtgttggtagaaatagaacttgaaccaatctttagtcctgggagtccggctcacatctttgtacttgggaggctggttttctcattatatgttttgccttcaaacgttacggaaagatctaaaataaagaaaagggttatagagcatgagaaagctttctctctccttctggggatttttttaaactgacagcttacgtttatgagcaaatgggaggaaaatctctccctgatggtctcatcccaaattatgtctttccctttaatgtctggctttgtactttgcagtctgactgtcgaatctgcagtagatttttgaggaggtggcaccggatataaaa

SEQ ID NO: 6868 - DNA, 601 bp, Canis familiaris
  misc_feature (1)..(601): n = a or c or g or t
gcaggttttaagggcaaatctaaacctnnnnnnctaanacaagaaaccagcagcctggcctgttgtttgaggatcctgtttcggatgtatgtcgacgagaaccacagggattcctgggaggaaatacagcagcgacttttaactgtgtgcagtgaggcccttgcctatttcatcacagtaaattctgagagccatcgggaggcctggacaagtcttctgttgctgcttctaacaaaaaccctcaaaataaatgatgaaaagtttaaagcacacgcttctatgtactacccctacttgtgtgaaattatgcagtttgacctgattcctgagctccgagcagttctgcgcaagttcttcctacggataggtgttgtatataaaatatggattccagaagagccatcacaggtaccagggacgctgtcaccagtgtggtagccctgacccctgcgggccacaactacagctctgcggaacattcaccatgccacctctgcctggcacatctcgtgaagggtcagatcgtagaaatagggagtcggcatctgggagctcagaacggcctggaggaagctggcctcgacatgggtcccatcagtcc

SEQ ID NO: 6869 - DNA, 578 bp, Canis familiaris
ctgggtggcgaccgaggacttcagagacccaccccacttccacagacacttagggacgggatcagaccagcccaggctgtgcgaccacttcacacgttctctgcctttggtgagcagaggctgtgaccagggctgctggcagggagtgccggtcctgctggcaggaggcaggcaggcccaggagactcccagctcgcggggctcccagggtgtgggggagcagaagtcaggccttgctgtcagtctctgaggccgccctggagctccctgccctccccagctgcaggctcctgcgcggtgacaccccagacacagctgccaagcaggaggcacatgcggcccccagggagcctgaactctggacggtgagaagccagtaccgcggcccagcagggcccctgtggtgcatttgggggcgggaggctctgactccctccacctcgaagccgtctctgttccgcaggtgagcagatttcaagtccgtcacaaggacttgcgaacaaagagaattctcttccaagaatgtctctgtgatgctgtttggtctctagaaatagaatcacttttctaccacaata

SEQ ID NO: 6870 - DNA, 566 bp, Canis familiaris
  misc_feature (1)..(566): n = a or c or g or t
tgnnggcaggggctgtgacctcggtgaatctgaccaagctagannnnngcgtggcctataatgtggtacctgctactatgagcgccagcttcgacttccgtgtggcaccagatgtnnagctgaaggctttcgaggagcagctgcagggctggtgccaggcagctggtgatggggtcaccttcgactttgctcagaagtggacagagtcccgagtgacatctactgatgactcagacccctggtgggcagcatttagcggggcctgcaaggacatgaatctcaccctggagccagagattttccctgctgccaccgatagccgctatctccgtgcggtaggggtcccagctctgggcttctcgcccatgaacctcacacctgtgctgctgcacgaccacgatgagcggttgcatgaggccgtgtttctccgtggggttgatatatacacacggctgctgcccgctctggctagcgtgcctgccctgcccagtgatggctgagtgccgggcttcccaacttctagactgggatcatcctcctgatcagggtcaaggacccttccctcc

SEQ ID NO: 6871 - DNA, 600 bp, Canis familiaris
  misc_feature (1)..(600): n = a or c or g or t
ctganngctgcttgctttccntcntgtgtgttcccctctgtcttcaaaccntcagtggnccatcttatgcttccatccctctgccctcctccactgtttcaaggtttgtataattagattaagcctgctgatcaagtctccctattttcaggtcagctctgccatagaacatagcataatcacaggagtgactgcatagatgcagggtcctaggatgggtggggggtggcgtgggccgttctaggaccctgcggaccccagacattaactgcccattgcagtggagtttcatccccaaaaggtgggcccttggaagagttgattgtttccagccgcagcattcaactgtgtgtttactgaatgaactacagaaatagcttttctgcttagaggggattgttctgtattttaagttattttttaataaaatttaattatgttgtgtattgtgcttcttaatagaaaatgtattattggactgtttttgtaacgtcttgtttactgcaaatgaaacatatagctggtattgttcaaaaactgtagaaaatacttttgtacatattggcagtgtctaatttgtatacacttcatgtaaatgtt

SEQ ID NO: 6872 - DNA, 591 bp, Canis familiaris
  misc_feature (1)..(591): n = a or c or g or t
tatgnnaatctgccccatggcagtgattcagtgattaaggatagtgaaaacttggaaaaaatttgtgcactgtgtagattttaaacttattactaccactactatatagaaatgtcagaatcttcaatcatttaaggtgattggaactttaataaaatgtatttatgaccctagtgggtcatttttttttttttgatttgccttcctaaacatgaggtaataaaaatttttatttggtaatagaataccctttgttatatctctacttatcacagctggcaactgatagtgatatttaatccaatccaacgactgcaggctgggttgaatgaaaggtcatattgtctaaattccaagtggaattaaatataatcccagagattcctaaattttccttatatttaagggaaatcactttttttttttaaatactggctcatcagaattatgttgctctaattggaatcaactcatttggctagctatttgccacttagaagaaagagtttgtttcttagatggaaaaaaattgcagttatattcagcttaaaaatttagtattttattnnnnnnttgctctgatgctgcctt

SEQ ID NO: 6873 - DNA, 664 bp, Canis familiaris
  misc_feature (1)..(664): n = a or c or g or t
cagtaaaattgagaacatnngcaacttacaccagctgcagatgctggagctggngtccaatcgcatccgggcaattgaaaatattgacacgttaancagtctggagagtttgtttttggggaaaaacaagatcactaagcttcagaacctagatgcacttaccaacctgacggtcctcagtatgcagagcaaccggctgaccaagatggagggtctgcagagcctggtgaaccttcgagagctgtacctgagccacaacggcatcgaggtcatcgagggcctggagaacaataacaaactcacgatgttggacattgcatcaaatagaatcaaaaagattgaaaacgtcagccatctaacagagctacaggaattctggatgaacgacaatctcctggagagctggagcgacctggacgagctgaaagcagccaagagcctggagacggtgtacctggagcggaaccccctgcagaaggacccccagtacaggcggaagatcatgctggccctgcccaccgtgcggcagatcgacgccaccttcgtcaggttctgagtccggctggctcctcgcccggtccctctcgacaagaacgtcccagccacggtttttatccactcgctcctcgagccgtcgctctctcagcggtcacaaacccaatgg

SEQ ID NO: 6874 - DNA, 577 bp, Canis familiaris
  misc_feature (1)..(577): n = a or c or g or t
aaanncaatcacaatagatggtgtgactccgnnattcaatgcatgctcacaaggcagtgccagctgcacagaacttctcttggaatatggtgccaaaccccagctggagtcctgtcttccttctcccacacacgaggccgccagcaaaggtcatcatgaatgcctagaaatactgatatcctggggcatagatgttgatcaagacattcctcacttgggaactcctctgtatgtagcttgtctgtcccagcaattccactgcgtccggaagcttctttatgctggtgctgatgtacaaaaaggcaagtactgggacactcccttacatgctgctgcccagcagtccagcacggaggttgtaaacttgctgctagaatttggagcagatatcaatgccaagaacacagagctcctgcgacctgtagatgtagctacttctagcagtttggtggaacgattattgcttcaacatgaagctactccaagcactctttgtcagctttgccgactctgcatcagaaactacataggaagaccaannnnncaccttatcccacagctccagctgccaacgtta

SEQ ID NO: 6875 - DNA, 648 bp, Canis familiaris
  misc_feature (1)..(648): n = a or c or g or t
gagnagtgttttcatgtcccaannacaaattnnaacaaccataatctgcnnntagtcatcataaatataaatgtannngtcaaacagatctcgttaatgtngccaagataaatgcaagtctatattttaaggcatttgaagttctagagaatagttggagctttttgtggggctaagagatcttgtatatgtgctatcaaaaggctgagaaaattaacatgcttccccctctggtttttccttggacagatataaacgtcttggggatgtcaagtaagattgttcacatagtttctggcctccgttaatgcttggtggggtgaagcttagttcttaaagctgtattcttttcatgatgctcgcagtgcttctgaaaagaaacaaaataaagatttcaagacttagcaatgtgttgctcaaccacattttcctgtattacatggtgccttgaagttttaattatattagtgccccctgccccaccagctcgcttcctgtaggaggagccccttttcaacagatgtgtggctgacattttgcaatctatatgctggcagatggtgttctgggcatgggctggaggactgggcgaacctttgtcttcctctccattacaccgtgctcacaagcattggctgttgctggtgg

SEQ ID NO: 6876 - DNA, 619 bp, Canis familiaris
  misc_feature (1)..(619): n = a or c or g or t
agttcattacaaagcagtagtttatgtngggattactgactgttacnaggtcataaattnnattcagataatctgtacctcatcaatcagatttggccagtttactctcnaggtctcgtactctcttttggaattaataaatagcaggtgtgaaggggcccaggcttcatcacacaggcttcttgtgtgatgtatcatgactaaatgttaaaccacctgaatggaaaccaggggagttttaacagctaggaagccacacactctgcttctttgagatgaatttgctgtaatgaaatactgcactttgtaaacaaattgccaattttttacttgcgggtgtgatttttttttaatagttctttacatatctaagtaaaattaggtttaaattatcaaaatatgaggctgtcccataggcagtgtttgcttaaaaagtctccttttagatcttcccctgtcacgaaccgcctgtttctcctttccaatatgaccattaaatgtactttgactattgatggaggttttctctatttaagtatttatacatatttaagaggattgttttgctttttgacatttcaaacactgatcagtatttaatacacttgtattgatgtta

SEQ ID NO: 6877 - DNA, 647 bp, Canis familiaris
  misc_feature (1)..(647): n = a or c or g or t
atcagatctcntacttgtgatgtcannnctctatagncttaatgcnngatctttgacgatgagtgaaangcgggaatttcctacagtaccnttggntaaatnaggcagttcttttaccaaggttcaggattatctgagaaggtttgaaagtataccagatatgcttgaattggatcacctcacagtttcaggagatgtgacatttggcaagaatgtttcactaaagggaacagttatcatcattgcaaatcatggtgaccgaattgacatcccacctggagcagtattagagaacaagattgtatcggggaacctccgtatcttggaccactgagaggaaaaatactgtgtacacttcatactaattatgggctaaacagtttcttacaatgaaatgttctctaggattctaaagttggcaggtactttactgtgttactgtaccctgcggtgttaatttttaaagtagagttttttgcaatatgcttttagtcgaagaaaagcacagatggaagcaatattttttcttctctgaagaggaccctgaaagttagttcatcgtaaagtgcaatactgtttaatcttaaaactggggcagctctgctggaacatcttttaacagaggcctcagtgatggtcactttgaa

SEQ ID NO: 6878 - DNA, 632 bp, Canis familiaris
  misc_feature (1)..(632): n = a or c or g or t
cnggatgacatgaacgaaatgcagaagnagctcanganctatgagtnggacaagcagatnnngatttgtacaaaagcccgtttgaaggtcgctgagaaagagctgaaggccctacagtgggaacatgaggtgctggagcagcggttcctcaaggtgcagcaggagcgggatgagctatatcggaaattcactgcagccatcctggaggtacagcagaaggtgggcttcaaaaacctggttctggagcgtaagctacaggcgctgagtgctgctgtggagaagaaagaggtgcagttcaatgaggtgctggcggcttccaacctggaccccacagcgctgaccctcgtgtcccgcaaactggaggacgttctagaatcgaagaacactactatcaaggacttgcagtatgagctggcccgggtctgcaaggcccacaatgacctgctgcgcacctatgaggcgaagctcctggcctttgggatccctctggacaacgtgggcttcaagcctctggagacggctgtgattgggcagaccctgggccagggccctgcgggacttgtgggcacaccaacgtagagctcgactgggactgctccctggatgacttccctttcaccaaggacaggagc

SEQ ID NO: 6879 - DNA, 639 bp, Canis familiaris
  misc_feature (1)..(639): n = a or c or g or t
agctcccagagnctggctggccccagagactacatgnngtnnttcaaccaggatccctccagctgtggnnagggaagagtcatcttcaccaaaccggcccgagctggcgaggccaggcctgagannaagagggccctgaggaaggcaggagagtcaggcaggggtgcccctggggacctgngagcagcagggggcgagggccctgtnnagctggcccacctggcagggcctgggagcccagaggctgaggaagagaacagcccccacggggggctacaggaagtggacgtgccacagggggctgcccatgctaggtcagcggtggggcccccagtggtggagactgttggcttccatggtagcaggaagcggagcagggaccatttccggaacaagaacaacacacctgaggccccaggtgcagagatttgagagaagagactgcctggctggcgtttcctgaccatgcggtggaggagggcagccggggtcactggccacttggagtggagtggagcttggggccccccgccctggaaagggagccagcggtctgccagtgtgaggcgccagcagcctgggctagggctcgggatagtggtctctgaagcagacagcttgccagtggacagcaaagac

SEQ ID NO: 6880 - DNA, 441 bp, Canis familiaris
  misc_feature (1)..(441): n = a or c or g or t
aagctgcaggcacagctcgagagtcacaacgtgccagggatgctgcgccacctcaccgacgacgagttctactccaccctagagggaaagctgcccacgtacaacacccgcatcgccctgccccttgccagtctcaaggacaagttcttcgacgaagaggagagtgaggacgaggacaacgacgtggtgacccgtgcggcgcttaagattcgttcccagaaattaatcgaatcccgcagcaagaaacgcagtcgtttgaagaagtcctagactcaccctcgcgcacacctggcgctgccgggcccctgaggagctcccaacccctctgggcccaggctcaggcccacggggccccctcaagggctaaacgcggccgggatgagggagcagagcagggcccgtggcgccgggagtaaagaagggggccggactgccggncgt

SEQ ID NO: 6881 - DNA, 637 bp, Canis familiaris
  misc_feature (1)..(637): n = a or c or g or t
ctgtacagcgagatcctngacacgaagttcgctgtcnnggtgacggcgcggaccctggacctcattgacgngnnntacgggttcgacttctacatcctgaagactccagannaggatctgtgctccnngttcgggatggacctgaagcgagggatgctgcngcggctcgcccgacaggacccccagctgcacccngacaacccccagaanngggctgccatcttcgacaagtacaaggagtttgtcatcccggaggcagaagccgagtgggtcggcctgacgctggatgaggccgtggagaagcagaggctcctggaggagaaggacccgacccctctgttcaaggtctacgtggaggagctgattgggcagcttgagcagcaggccctgtctgagcctgtggtggtgcagaagagggccagcagggagtgactgcgcggggacctgccccccgcccccgccaccgtgggcgcacgagtctggtgggggctggtggatgaaccccatcttctgtgctggctcagtggctgccagggctggatgggctttgtggagccccaggggtctcctgtcccagggcccccagaggtctggggccagcttgctgcctctgtagtcccctcttctcccctgaggt

SEQ ID NO: 6882 - DNA, 667 bp, Canis familiaris
  misc_feature (1)..(667): n = a or c or g or t
aatggtgcagctggnntgccatcctaacttggacaaactgngctactcacaaaagatgcgattcacctactgagcatcctgcttggggtnntgtttccctgcagttatcctcagacagtactcacgctataagccctagattcctttcctgacagtatcagcctttttgtcttaactctggagcccaaatctggatgacacccgcaggaacaaaacccatgtagccatggaagagggcggaggctgaattgctctctggaagccccacccccacagccctaatctccctgtgattgaaggtccagctcaggcccatggagcaatttcttccatggatcagaaagaaggaagcatgtacattcgttccgtggtagcatcacagtgtgtgtgtgtgacgaaaggaacaatctgcgtaatgggttttccttaatatttggtgcttaacccaagcagattctgcacgtgcgagtgcacgtgcagcagccttacagacaccgtctcatagagattgaggaagggagaaaatgatttctttagaccccagagaagggaatctgaaatatgtttgtgtgtgtgtctctccctgcccctgcccaggctggaaggagacgactacccacagtctaagaacatgcctgtggcagaaacctctggctatgcaaataaa

SEQ ID NO: 6883 - DNA, 572 bp, Canis familiaris
  misc_feature (1)..(572): n = a or c or g or t
ctgagtatggtaactcaacccaaagtgaccaaaacacccaaacaatatcgnncaaaggaaacaacgtttggtgccactctnngcaaagacaccacctttgctagcactgacaaggcttttgtgccctacccagaagagacatccatagaaaccatcaattcacnngaagcagcagctgcaactctaactattcatctccaagatggaatggttacaaacacaagcctcactagctcaacaaaatcatccccaacacccatgaccctaagtattactagtggcatgccaaataacttctctgaaatgcctcaacaaagcacaacccttaacttacggagggaagagacaaccacaaatgtaaagactcgcttaccttctgtggcaagtgcgtggaaagtaaatgcttcatttctcttaatgctcaatgnnnnngtcatgctggctgtttgagggtctgcattttttgaaactaatgaaagaactcctccctgatgtatagttgggaaaatatgcccctatctaaccagtgattcaagctatttaagtattcaagaaagtcagtcttacatttc

SEQ ID NO: 6884 - DNA, 469 bp, Canis familiaris
  misc_feature (1)..(469): n = a or c or g or t
gatgttattgggctgtatgaagaggccattngaaatggggcaacaccaatacaagagnnacgggaagtcgnncttaaaattttgcaagacccaaacagaaccacagaaggagttacctctgactctatagnnnctgacacaaatataacatcaacagaagaactggccaataagacagaatctgaaatgtcttgtctttctctgaacgagagagaacaggttacagcaacaccccaaataaccaaggcagaacaggataatcatcctagtatcaaactacagatcgccccaatccctagaataagtggaatgccagacgtgcaagacatgaagctcatcacccctgtacggcgttcggcaaggattgagcgagccatgtcccgctacccagaaatgttgcaggaacatgatatagtcgtggcttctcttaatgagctgttagaagtggaagaaacagagtgttttatat

SEQ ID NO: 6885 - DNA, 674 bp, Canis familiaris
  misc_feature (1)..(674): n = a or c or g or t
cnacagcggggccaggnnnagcagacaggnnntcagggccaagctggaaaggncagcagtggcttctcccaacgtncttggggaccaaatatatttaatggttaagggacttgtcccgagtctgacagccagagcattgcaaagggccagtggccctcccgcatgaccttgtacctactcagagactggggcccgagtgtagactatccgcaccgaggactcggtatggtttaaaaatctgtcatctgcacggttgtgtttgaaaggaaaaaaaaaagtttccctccccttataataaatgataaaattccaagtctttatcactgcctttcctttggaaccatgtttagaagagagtagcttgtcctacactggtctacactggttgctgaatttacctgtattcctaactgttttgtatatgctgcatttagacttacttatagcaaagaaggcattttttttttaaagaaaaaccaactgaagtcatgatgatatatgaaagctacatatggctaaaaagctctgaattcaggtcctagttgctgtcacaaaggagtgaacggagctcccagccccaccccttttttatataataaaagtgccttagcatgtgttacagctgtcaccactacagtaagctggtttacagatgttttccactgagcgtcaca

SEQ ID NO: 6886 - DNA, 614 bp, Canis familiaris
gggagtggtatcagagggcctgttagtctcggggggctgccctggacccagccactgctccccctgctgcccttggccctcgggctgcggtgacgtggctcttgagggccttctgtgctctgaccatcctgggtggagccttgtgaagcttgggaggcagtgctccctgggtggggctttgccgtccccgaggttggcagggtggtgcacgtctctccctggcgacagtaggacagtagctcagcctctgctcccaaaaccctagaggttcctgagaacgttggagggtggttctgattcctgactttaaagcgagatgctgccatcgcgtttggtaaagtgagggtcattctccacgtgtgcccagccgttctgaggctgggccatcccattccgagaaaagatcctctgggaacacagctgctcagtgggacgctgcttcacccctgcctccctcctcgcccccaagccattaagcacatcgcttggtggcacaccagcctcactgcctagtccaggacaggcctgcatgtcccgtggatggagagggcgtggcagggacatggcgggggcgtgggagtcagcataatctggtctgcaaccaaagatggtca

SEQ ID NO: 6887 - DNA, 419 bp, Canis familiaris
  misc_feature (1)..(410): n = a or c or g or t
gnnatcagaactctccttgtttccngagcccgtgtgcttttgtttgccccagccccnnncgcctcccctccctcccccccccctttttgttacattggtgtaaaaaatgtaaaacaaaaaaattttatgnnntnnctgtggtgtgtgaaagagaagaaaaactggaaatctgattccacgtgtgtttgggagttgcnnngggttggggccggggggacagggnnnagctcccggagaaaggaggtggccctcannntcgtcctgcacagactggcccctgtcccacggagcccacgtggtgggggcgcggagtggggcttgctgaccgtctgcnnntctggccaggtgcttttctgtcaatttttatggaatgcaaaaggagttttttgttttantttgtttttttgtaaagcttaaaa

SEQ ID NO: 6888 - DNA, 551 bp, Canis familiaris
  misc_feature (1)..(551): n = a or c or g or t
ttactccatttactcagattagatatcagnctactnnatacagacaagtggattgtagatttttaaaaaagggtcattttcttatccataaatctgacaagggcataaaacccaaatcagcaaaaaagtaacttggtgcccattacaattttgaagttaagtgattgcttacttgtaaaatgactaccttaatgtatagtatttaagagacccccatctactgtgacttgagaaaactctttatgtatgaaaaaattgctctttaaaatcatatcacccggctgaaaccttaggttgaattttacaggtaaaatagtccttgtaattatcagaattgtgggggccagatgagatgataaccatattcttatgcactgcaacggcagcattattgcttggaactttaaccattttagagttagatcctaaagatactaattggtcgtcatcctttttcttatttctttttttcccccacccttatatatcannannnnnnnnntttctccctttcgtcacttcccanngtgtatttttcagaagaagnnntg

SEQ ID NO: 6889 - DNA, 560 bp, Canis familiaris
  misc_feature (1)..(560): n = a or c or g or t
tgagcagccacatgctnnctcggttcaaagtttgtctgncttcttcaatatgtagggttgatcgagctaacacttactagcaaacatcccttatatgaggttaactaaaaatattgctgtgtctggtctaaatgttcgcattttgttcaattaaattaatatctgtaggttgcaagttgttttaagtgagagacactttattgagtttttaagtctttatctcctgttcaaaggtgcctttctcacctcccattgactcagtgactctgaaagttcctaatttgcaggtgaaaccagtctaacagagaggaggaaaccaggcacagtgactaattctcatgcccattagcaaagcaaaactacaagaaaagatgaaaacctgagcaactaaattaatggatcacttcattcaaccagcctgagaatatgtcagaaacattaacttatctccccagaagctgatattttttgccttaaatgacatggttgtgtttttgtaagagaaacttaatataactatgtgcattttaagtgagcagttctaaaagtcaagtatgaca

SEQ ID NO: 6890 - DNA, 497 bp, Canis familiaris
  misc_feature (1)..(497): n = a or c or g or t
antaaagggaaatatattttttannnnnaaatagataannnnnatcncagttttaagggattatgnnnattttggaagaaaaaattaaaatgnnnaaacttnnncatttnnnnnnnnnnngaaaanatgtnnnnnnnnacataatttnnnnnnaatatttaaaataannnngnttaacatttgagtccataggnnnaataaatttacannttattaaannnnnnnncatcannnnnnnnatggtaaataatgtgactnnnnnaatgtttttaaaaaatccatttaaannnaggataataatttgatgggtatataaattaagcattgtagatagaaattaatgtnnantagtatcaacccaacctttgggtgaaaagtaaaaactcnnnatttctttaattagcatgaatttatnnttttagattagttgnntagtnnnattatactcagtgctttgacttattcacatttatgtttaattttgttaaattctttat

SEQ ID NO: 6891 - DNA, 472 bp, Canis familiaris
  misc_feature (1)..(472): n = a or c or g or t
tggggggaagaagagtccccgagccctcagatcctcctaattggtcctggaagcctagaaatggggagaggcagtcggacacgctagtgtccctgccctttctggggctcccaggtgagggaggagggggaggcagggcttcaggggcttgtcttggtatgggaggccaccagtcaccacctgcacaacacagtgaccacctctgaccctgtgtgtgctacgtttgggtattggcctgtatgtgtgacatgactgaccagtgagcaaggggtgggtctgtgcctgacctgactgtagccatccttggcatctgtgcctgccctccctgtcccaagcccccaccgtggcttccgagctgcccacagtgtaggtgcatgtgaggtgctcatgtgcctgaggctcacacgtgtgcatgactggtgtgtggtgggtgtnnngtcactgacatgtnnnnnntgctcacaccctcctg

SEQ ID NO: 6892 - DNA, 620 bp, Canis familiaris
  misc_feature (1)..(620): n = a or c or g or t
atagagtctgtgatcatgcagatcagcgccacgctggtgaaggggaaggcacgagtgcagtttnnagccaacaaatcccagtacagcctgacgagagcacagcagtcctacaagtccctggtgcagatccacgagaagaacggctggtacacacctcccaaggaagatggctaaccctggagagccgtccctccctcttccccaggcgccactggaccaattacctttgaatgctgtattcggatctcacgctgcctctgtggttccctccctcatttttcctggacgtgatagctctgcctattgcaggacaatgatggctattttaaacgctaaggaaaaacaaaaacacagacctgtttcaagtactcaagactgacttacagaccaaccaaccacctggctggaacccctgctagcaggcattcttataaaaagaaactttcgagcctccttatattgctggaaactcagctgtgctccagactagagcctccttacctatgctatggatttttaatttattttctcttatttcatgtacactgctttttttggttacagtgtatgatggatgtgtatgaaaaannnnnnatctttgggaaaacaattannnnnnn

SEQ ID NO: 6893 - DNA, 624 bp, Canis familiaris
  misc_feature (1)..(624): n = a or c or g or t
cagatagaaatgtacggttgcnacattcaatgctnnatatagncaannnnnnnnctcgcccagagcnggcagccagatannnnanncgcaatctgttcccagagaaagtcttggtaaaaagtaacgtctatggcancctgggccatggcatgcgtgccnttaaccccaataggatcagcgctcttcgagagtttctccaagacatcttcccaaattgcagcctgtcagaagctggacatgactggaagttgtgtgtgacagctatcaatggctctatccgtagtctaagatatgacctcaagaagtccttaaacaaagcatagaagcttccggcaacaggccctcattcaagaaaaggtgctcaacatcactactcatcagagaaatgcaaatccaaaccacaatgagatatcacctcacacctgtcagaatggctatcaccaaaaagacaagaaataagtgctgatgagggtgtgaagaaaaaggaacactcatgcattttgaagggaatgcaaattggtgcaaccactgtggaaaacagtatggatgtgactcaaaaaattaagaacagaactaccatatgattcagtaattccattactgggtatctacccaaagaannnn

SEQ ID NO: 6894 - DNA, 497 bp, Canis familiaris
  misc_feature (1)..(497): n = a or c or g or t
agatgctgttctgaagaggaaaggtcacagcgagattcttttccgtgcatgtgcacccagccctggtgggaccggggcngcgtagatgctggacgtcagaggaagggcaatggggctgctgaagccagcagcattcacaccacagtgcttctcttcccgaggctgccgtccccggggctcatggagcgcgtggtgcctttgtgccgcccggggctcactgcctcaggacacggagtccgaattggatctccttcgtggggtgagggcacttctgtcacaggtgatgaaagccatctgagatacatcggaaaagctgctgtacacttcgcatatggctgctctgggtatttctagaatcccagggagccccagagcttgtatcctgggaccatggacaccgtctgatatgcttctctagatcattccagaaagattctgcaggactgtgttgattgataggtctgtttagatttttccaaaacgttaatatgccctcg

SEQ ID NO: 6895 - DNA, 507 bp, Canis familiaris
  misc_feature (1)..(507): n = a or c or g or t
agctgaaggagaaaatcgannngcgctcgnnnaagaagctnnnnnacaaccccaaagccctgaagtncggcgannnggccattgtggagatggtgcctgnnaagcccatgtgtgtggagagcttctctcagtacccgcctctcggccgcttcgcggtgcgcgacatgcggcagacggtggccgtgggcgtcatcaagaacgtggagaagaagagcnnnggcgcgggcaaggtcaccaagtcggcgcagaaggcgcagaaggcgggcaagtgaagcgcgggcgcccgcggcgcgaccctccccggcggcgccgcgccccggccccgcccccggccccgcccccggccccgcccccggcccggcgccccgcccccccgccaggcgcatgtctgcacctccgcttgtaagaagctctcggtcagcgactggatgctcgccatcaaggtccagtggaagttcttcaagaggaaaagcgcccccgccgcccccgcttccgcgccccgcctcc

SEQ ID NO: 6896 - DNA, 601 bp, Canis familiaris
  misc_feature (1)..(601): n = a or c or g or t
acagacctccttacagacaggcttgcgnctgtggttaggacattgnnggcctcctcaggtcacctcaaacctcaggacacacatgaccagaggaggggaatatccactattgagtaatttccatatgccagacactgtcctaagcattttataaatactatcatgttttacctctgtgtggcatctacaaactttggcacataggtgtgagaacactataggaacctcaaaaaagtgtcccttccccatggctcatgtttgtggtagtatctactcttcctagaatcaagtaattgttgggccagtgggatcaagggggatcaggaggcaccaactaaatggcggcagaccctccatcttgttaccctcccctcagaactttcccaccaccggcagaccgcccaaggacacatcatcaggtggagacaggacctatgcaggaaacctgaaccacaccttacccaaaccccatataagggcataagcagttatcaccccatacagacacaactccctacccctctccccttaaaagctcacatgtactccctttgggcgcgccttccctggcccatgactccccactctctccctctcctgt

SEQ ID NO: 6897 - DNA, 631 bp, Canis familiaris
  misc_feature (1)..(631): n = a or c or g or t
ggtttctatccaggccacattgnngtcaggtggctccggaatggccannaagannnagctggggttgtgtccacaggnnnaatccgtaatggagactggaccttccagatcctggtgatgctggagatagttcctcagagcggagaggtctacacctgccaagtggagcacccaagtttgacaagccctgtcaccgtggaatggagggcacagtctgattctgcacagagcaagatgctgagtggaatcgnnnnntttgtcctgggtctgctcttccttgcagtggggctgttcatctacttcagaaatcagaagggacactctggacttcagccaacaggactcctgagctgtggagatggtgaccctcaagaaaaaaccttcctttccagcttcttctcagagtccaaaggtttccagcttggctcttattcttctacaaatacagcgctttctcaggatctggtttgccctggcttcagtgaccctgcacagcttgtgttccccaatggctccctctgccctgtccttgacctggaacccccagtgctgactgcagtaccttatctgcattctctccttcctcttcctatgcagcccttatgtttcccttgcatgggaactcaccttc

SEQ ID NO: 6898 - DNA, 680 bp, Canis familiaris
  misc_feature (1)..(680): n = a or c or g or t
gaggtgcccnnnnaagaagatggtgaacaggctcagatttaccaaagcaaggtctgtgcagacagggtaaatacttataattgtggagaaaaaatttcaagctggttgtcaaggttttttggccgtccatgtcaactgatcaaacaaagttcaaagtttcaaagaagtgcaaagaaacagggcaaagatcagcctgctggtacaacagccagcctttctctggtgaatgaagcacagtacttgctgataaacagatccagtgttttggagcttcagcagcaattaaatgccagtgatgagaatggaaaggaggagttattcccaatgaaagacctcatctcacgtttccgtgccaatattattaccaatggaacaagggcttttgaagaagagaagtgggatgagatctctattggttccttgcgtttccaggtttcggggccttgtcacagatgccagatgatctgcatcgaccagcaaactgggcagcgaaaccaaaatgtttttcaaaagctttctgagaggcgcgagagaaaggtgaacttcggagtgtacctgatgcatatgtctttggatttatcctccccacgtttcctgtctgtaggatctcaggtgtgtcctgtgttgaaagaaaatgcagaatgccctgatttacctgcttctgactaacatcaggatgt

SEQ ID NO: 6899 - DNA, 613 bp, Canis familiaris
  misc_feature (1)..(613): n = a or c or g or t
ggccccctacatgaagaggccttcccggggccagactgttgaggatctgttggaagttctgagtgacatagatgagatgtctcnncnnagacctgagatcctgggctttttctcgaccaacntgcagcgnctgatgagctctgctgaggagncctgccgaagtctggcctttggcctggccctgcgctccatccagaacaaccccagctttgcagcggacttcttgcccacatttatgtgctgcctgggcagtcgggacttcgaggtggtgcagacggccctcaggaacctacccgaatacaccctcctttgccaagagcacgcagccgtcttgctgcaccgggcctttctggtgggcatgtacgggcagatggacaccagcgtccagatctcggaggccctgaggatcctgcacatggaggcggtgatgtgagccggggtggcagcctgactgcacgccagccctgggtccctctgctggtcacctgctggtctcctccggggcagggagggtgcccagccgccacagagctgagcaggggcagcacccagagcccacggctggtgactccctgcctgcacagtgacagagacatggtccaacgccagcaga

SEQ ID NO: 6900 - DNA, 614 bp, Canis familiaris
  misc_feature (1)..(614): n = a or c or g or t
ttttaatatccgtttcaaaagatctgtgccagatttcctgtgcacancaagaactnnagatcnnngnnnntctctcctagcccggnnntcgtgccttaccccggaatgtcccatggtggggtgtagacaggaaggtcgaaaagaaactccaatctgagggctcccatccactgcaccataacctcccttccctagaccaacaggtgtggggtagaaagtttctgaggcttctttcactcaaggggtttctagcagcacagttaccactttactctctggtctactcttgggatataagaaatgccattgtaattattgtacagggctgtaactcctttatgtttgtaaatgtgcggtccactcagcccctctctacacatgtagtgtcagcttgtggtgctgaagatatttgaggcactttaggggatgggatttttctcaagagctctggtgactttaggcatctggggtgactgagcatttctgcctccacgaatgcggtattaacattgtgcactgtgtttctatcaagccagattccaattcagatttccatgttactaagtttgtaaatgaataaatagacattttaattacaaaaaaaaaaaaaaaag

SEQ ID NO: 6901 - DNA, 574 bp, Canis familiaris
  misc_feature (1)..(574): n = a or c or g or t
gaacattgtttgtaaggctgtagatgacagctacaatgtgcnnccagacacagtggccccaatctggnacctgcgaggtgtgctcagcaatgcctggcaccgtgtccatgtccgtgtcgccccatgagaaggtgaaatnnaattacctactcccagaatcatcttctcaacccctttccatacccatccttttccctcattcccacagaaaaagctttcttatcatcacttcttggatcccaaccctgtagtgtcccttcctaaaccacacacagatacacacatggcccatttccaagcgggcaccagctctcctttgactctaggttacgaaactcctattgtgccaggaattgagagcttttggaggctagaagtggggaagctcagtacacaagcactctcctcttcctaccccatctccgcttctaatgtacaccaccactttacttggcttttcttcttgggagtcttcagagactgtgtgtggctgtaagaaaagcgtatgtacaactttctacggactttctgggttgccagaggttgtaaagggtgaattccttccccctttata

SEQ ID NO: 6902 - DNA, 622 bp, Canis familiaris
  misc_feature (1)..(622): n = a or c or g or t
ggggtacaataggcagttccttccaannagatgtcgattccattctccaacacccactaccgaattccacaaggatttggcaatcttcttgaaggactgacacgggagattctgagggagcaaccagaaaatataccagcttttgcagcagcatattttgaaaatcttctagagaaacgagagaaaaccaactttgatccagcagaatggggggctaaggtagacgaccgcttctataacaaccatgcattcaaggagcaagaatcacctgagaattgtgagtcagaaaaagaaaaatctcccccatctgtgaaagaggatgagacaccagtcacagcctttgaatcttctgaagaagaaaaacaaagagaggaggatgctgctctcaaaatccaagcagccttccggggacacttagccagagaggaggtgaagaaaatgaagtcaggtgatgctgaaggagagaaaagagagggaaatgagtgagaagactggttttactcccccgctccccagaaaaacatgaaaaaatcatccagatccatcagcctcgctgtgattgttgtttttttcttagtaagggagatgtgatgtagtgaannnacatttgttgctgttgtga

SEQ ID NO: 6903 - DNA, 464 bp, Canis familiaris
  misc_feature (1)..(464): n = a or c or g or t
aaagaagattaaatgctgaaacatnnngaatcccacttcgtccaaaccgtggtcgnnnngggtacagaggcagannnggtcttggtttccgtggtnnnngagggcgtggtggtggcagaggtggtactttcactacccntcgaggatttcgtggtnnattcagaggaggtcgtgggggcagggagtttgcagattttgaatacaggaaaaccacggcttttggaccctaaaataggtctggattgatcgtacaactttctgaaagaaagacaacaaagttgctgcatagtctacaaacaagtctttgaaaataggtgaatttctagctcttcatggtcctgagaattggtttcagtctttgagaagaatgaagaagtgaatttgctgtatatttgtcaccagcactgggtttttgtttgtttgtttgtttttctgcttaatttcaaagattcaatgcagttact

SEQ ID NO: 6904 - DNA, 625 bp, Canis familiaris
  misc_feature (1)..(625): n = a or c or g or t
tctaccaatgttattgtagannnngggggctttgatgaactaggnnnacttctcaagccaacagtnnnnnctcagaaccagagtcttcctgttgccaaactcccanntaacaagttagtatctgatgacttggattcatnnnnngccaaccttgtgggcaatcttggcattngaaatggaactactaagaatgatgtaaattggagtcatccaggtgaaaagaagctaactggaggatctaactggcaaccaaaggttgcaccaacaactgcttggaatgctgcaacaatggcaccccctgtaatggcctatcctgctactacacccacaggcatgataggatatggaatccctcctcagatgggaagtgtacctgtaatgacacaaccaaccttaatatacagccagcctgtcatgagaccaccaaacccctttggtcctgtatcaggagcacagatacagtttatgtaactagatggaagagaatggaattattccaaaaagacgagtgctcaagcagcaaatacttacttccagcaaaatccaaactgctgtctcttaaactctcttcttccattagaatgctacagtaacccagtgaaggcccatgaaggaaattgggact

SEQ ID NO: 6905 - DNA, 669 bp, Canis familiaris
  misc_feature (1)..(669): n = a or c or g or t
ctttcnntatcccagcnctagagcaagaaagcgatccaggcgncctggaccttgccaatctcacgtgtttgctgagtgaaagagccaaagaattcctcatggagaacaaagnnnnanccttttaccagcaggaattggaaattgtggaatctctgctatcccttgccaatcagcctgtgattcacggcacctcctctgagcagaattctaagaatgacaccacttccaaggcaattcatagtatatttaagaatgcaatacagctgctgcaggaaaaaggatttgttttccagaaagatcatggttttgatnnnctatattatgtaaccagagaagacaaagaactacatagaaagatccaccatatcattcaagaagactgccaaaaaccaaatccagacaccgagaagggctgccacttccagcacatcttggcctgtgctnnnnnnngcatcagcccgggcctgagtgaaggtgtgctgcagcaggtgctggagctcctggaggaccagagtgacatcgtcagcacaacagagcactactacacggcgttctgaggagaggccttctgaggagagaccagtggacggcgtgggcggggccaggccagggaagaggaagaggaagacgggtggtggtcactcctgnnnnnngattttaaacatcacc

SEQ ID NO: 6906 - DNA, 595 bp, Canis familiaris
  misc_feature (1)..(595): n = a or c or g or t
atctcnatcntcagctccagagtnnnnggtnnctgttcaaggacnnatggnacagcatatcttccaagatcaagagcaaaggacatctnnnnagaatagaaaatccactgatgacacaatgagaccaaaggaaatacagctaacaatcactgaagctctttgggaccaagtacgaatggcttttagggatatacaaaannagctgcaggaagatgctcggattcgagggatgagcaacttctccatgacannnaggtcatctacagctaggactggtgtcgggcctccaaattctgggatgaccctaaatttgagaagcactggagagctgccatcaagggtccacccccacaacctaagaagatagttctctgatagatcagcttgctaccctggaccctaaccctacaatcaagagaggaaagcctcttctgcttctgccagggcacagctttagttacctgaagaagagaagtcattagcagacatcaccactgcccagaagtaaaagtgatactcatgggcagagactccaggatctatggctgcacctgggaacttggaaatcaaatgaaacccaagcacatcacaatca

SEQ ID NO: 6907 - DNA, 488 bp, Canis familiaris
  misc_feature (1)..(488): n = a or c or g or t
gcagggacagcagtcgggcgttgtgagnntgannagntctccttnnannatgccccagtnnnaagcagggagcacctgggaccccaccagcagcaggcacacagtggcctttaaagcacagagccacagtcaccactccatagcggcagcaaagctggcaccacctaagtccgacttcctaggacacctcactagcagcgctaaccaggaaacagacccacccaccaagggcaagaagcgacccgcctacagcccccccagcaagtcagcagcagaagcaggctgggcccgacaggtctgtcgacccccctccagtccagggcactccaccagctagctcacacgtggccttgtcagacccagtcctgagcgagactcactgcctccctgcagcaccggcggtggggctccgcatggtccgtggtccgtgaccgcggtgggggggctnnnnnnngcttccaggggacnnnnactgtggatgccaaaac

SEQ ID NO: 6908 - DNA, 618 bp, Canis familiaris
  misc_feature (1)..(618): n = a or c or g or t
gatgannntcagaccatcgtccccacctgtcagcagcaggacttctccattggctcccaaaagctcagcaaagccattgtcctacagaagaccattgactacatccagtttttgcacaaggagaagaaaaagcaggaggaggaggtgtccatgctacgcaaggatgtcacggccctaaagatcatgaaagtgaactacgagcagattgtgaaggcacaccaggacaacccccacgagggggaagaccaggtctctgaccaggtcaagttcaatgtgtttcaaggcatcatggactccctgttccagtccttcaatgcctccatctctgtggccagcttccaggagctgtcagcttgtgtcttcagctggatcgaggagcactgtaagcctcagaccctgcgggagatcgtgatcggtgttctgcaccagctgaagaaccagctgtactgacctggctcctagaacctgcagaagagccaacaagaggcctgagtctcctacttggccacagagctaccgggcttatgagattggactgtgatactgcacactggtccactggttctcggtgtttggttccccagcaccccctcatcttcagcggggctagggtatttg

SEQ ID NO: 6909 - DNA, 625 bp, Canis familiaris
  misc_feature (1)..(625): n = a or c or g or t
cccagacaccgccaccgnngcacccacccacgcacccactggcctaccgatggacgaatgggcnnnnnnagccagcaggtccaatgagcctccctgggagccaacatgtccctcccttggggtgggggcgcgtatggggtgggcggtggggcagcgaggcaggagcctttagagcggagcctggagctgagccaccttcttccactacatccgagtcaggagaatggaccgctttccagaacccaggagccacgtgcagagacctggcatgctccccaaagcagcgcccagccccaggggctccatcttgatgccccctgctctgggccttgagaggcagtgctcccgctgggtccacactcctagaaacaggtccaagcccagctctgaggacagcgttgtctccatccaggctagttctctgtgctctgggctgtgcaggaagctgccccaggcagctgagggagacccttgcccctctcgggcactcacctgggacccagatggaggctggggaacacagcagctggagaggaaaggatgagtgggttcagcgaggagtggggaagacatgggctgtgcctgtcccaattactctccctnnnnntggggcacctttgagaat

SEQ ID NO: 6910 - DNA, 671 bp, Canis familiaris
  misc_feature (1)..(671): n = a or c or g or t
aatcagaaaagatgaaaaaaaaccacccatacgtgaccaatagtacatattnctagctagaatgttaacagtctttttttttcactgtttacccatttgtagaagggatgaaaaggtagagagaacacattcctctaatttccagacttttggctgtctctcactgaagagaaggtatttttccactctctagaaaagggactgtttttctatggtctggacggaagtcacagaattgtgaaggaagtctttgctcttacgtggagataaactgctgcatttctatgtattaagtgttggtctgttcgtccatgtaacagaatgaaggatccatttggaaaattggtgcttccgtcaccttacgcgctgtcactgggagcatttatggaatcagcacttccgtagcccagtgacaagtaggtggatgtttaagtttagagggagataaaaatgtactgctgactggtaagtacatttctttctccagaagcagtattgccaaataaataaacacacagatttgtactttggtcttcagcaggtcccgtagattggttcaaaactcaaattttgtgtgcagatatgtacagagtccacacccgtgaccgactcaactttgcagctgccgcacacattcgnnncttctcagcggcagcaagagatgtgaggca

SEQ ID NO: 6911 - DNA, 621 bp, Canis familiaris
  misc_feature (1)..(621): n = a or c or g or t
tcagaagcttcatgttaaaagtagcagagtatgatcaggataagaccttgctgattctgaccaacaacccacttccctgcccaattgaccagcaaggaaaggacatngnaccaaaatacttttccaaggagttgccgctcaaggaaagttatcagcataaacctcctgggactgtctgcctacccctgatgtctcagaaaaaaaagttaagatctgggctgaaaccaacctttcctgtgaccctgttggaggatcctacatcccagcgagaacagtggtttaggttttccaccgacaatgatttcaagagtgaagggaagtatttaaaggtctgtgctttgaggaaacagaaaaaaatgtacccccagctcaactttgcttcagtctgtaaaagagatatgaggaaagatgtcgccaagtcagggagtgacgtgccgacctccgaggcggcccgcgcaccgccgagcctttcctcgctcccgaaccaggaacccgccagccctgtgcccggggagcgcgcccgccgcgacggaagggccccgcagcggatcgtcaggaaggccgctgccctccagtgaaggcgaccctcccggccgccgccgcctccccaggctcgggggc

SEQ ID NO: 6912 - DNA, 653 bp, Canis familiaris
  misc_feature (1)..(653): n = a or c or g or t
attctttttaggttaaaagatggtgtagcatttnaaatnnnaacttnctctccnnggtnngnnagtatcctgagtgtatnctctgtaagtatagctcaaatgggtcagtgtgaaaggttaacaaaagcaagatgtcaatgttacgtgggtggttaaggnnagggcctcccctaccactgtgccactgacttgctgtgtgaccctgggcaagtcacttaactataatgtgcctcagttttccttctgttaaaatgggataataatactgacctacctcaaagggcagttttgaggcgtgactaatgctttttataaagcattttgggatccttcagcagaggaatttttttaagtcctgagtatttttatagtagcagtatccaccgtgaacttatgtccaccgtaaaccacgtgtcctatcattaatcgatattctctctgagagattggataaatccattggataagtggtggataactagccagacaaaatttgagaatgcataaactcattgccatggaaacaatacacaggataccttttccttaattgggtgggattttttcccttttatgtgggatagtagttatttgtgacctaagaataattttggaataatttctattaatatcaactctgaagcttagttgta

SEQ ID NO: 6913 - DNA, 596 bp, Canis familiaris
  misc_feature (1)..(596): n = a or c or g or t
gggacaatggcacccanctcgcagggctgttgtgaggactttnnnnnncagggctttgaactgggattctgaaggcggtgcgcgtgcccccggggggctgtgggctgggggctggaaggcgggaggggcagcccgactcagcaggttagaggaaatcactttgccgaacatgcaggaggcattgtggaatagagtgctcaatttgtaggacacggtaagctcagacaggagtaacctccgcagggaccttcatgctggggggatgggagcctctttgggcaacacctttggtccccccctggggtacgcgttcaccctcacctctgtaaaaggttggaagcacccgctgtgtctcgcctaccgctgtgtctggcctgtgggcggcacttccacatgtccccctgcaagagacctctcctggccgtgtcctccctcccgaaacattaggcatcagccatcaaagacactgcgatgtcccctctctcaattaacaacagttgggctcagatgccagcagcccggatgcctaacacagtaccaagccagtggtaggggtcgccttccagttttnnnnacggatgcatgggtgaatggcc

SEQ ID NO: 6914 - DNA, 599 bp, Canis familiaris
agtaccaagttagagacgcagcttcgccccgtatcctgtgagaagcctgccttttcctaaaatgggtttgtcatctgtgcgaaggaaacccagggtcgggaggtggcctgacacgcctgccgccagacggccagggcatgctgtccccgggtccccgctgagccatgggagctcagcaaacagggctacagcactgggcgggggcagggggggcggatctcccggctgtcagggccgacaccgcattctaaccaccttcagcggggctcctgtgccccgggtcacacgttggtgccgaggcaggagcgcggctcccagcagggcgtccacgcccctccgcacacaggtgttctgcaaacagcccctctggcctcccctcctgtctgggaagcgcaggtgtcattcctcacttgcttgtgccgagacagggtctgccccgcagcggttggtggagcccgagtacgtgggaagctcgacgtcacacatgggtacccacgaatccaaacgttcaagtattaagtcacttccgggaaagttcagattaaccttttctgcccctttccctgctgcttctttacgtgcacagacctggaaaccca

SEQ ID NO: 6915 - DNA, 516 bp, Canis familiaris
  misc_feature (1)..(516): n = a or c or g or t
tcagatgtgacagnngcctctgcccctgtncaggtgtcccaagggattgcaggactccactnagctaacctgttggggctgtcctcctcgtgggaaagcactctgttcaccgcatgcgctagntccgggactccccgacaggaaggcgtgcgtcctaaccgcacccatctactggctgtcccgtctgttttaaagcccaggccatgtgcactacgcgcttggactttctggttttcacacttctgtttcaatctgctaactgccagtataaaaccactgccccttcggctccgtannnnncatctctgtttgggccagagctttacacggcctggttacgctcgggaacgaagggggcccatttaaggggcaggagtgtcagtggaccccgtcatcactaaacgccttgaggagcagagagagtattttcactagcaccggtgaagggtttcaactgttaaacctcagaacaaatgcatcatngccttagaaatgccnnnngggcatgaagaaaac

SEQ ID NO: 6916 - DNA, 654 bp, Canis familiaris
  misc_feature (1)..(654): n = a or c or g or t
atgtagatgaaataatgttantataaaagaaccaaataccaagtgcacatgatnnnnactanntannnntacacgcagctggctggctnnagctcaggggaatgaagctgcatgaaagaagcctccctgtaaaggttccacgctgtgtggttcatcaacgtgaggttctcaaactgacaaaagtaaagagaggagaccaggaagggtggaagggtggggagagagagggaaggtctttgtggggctgggacagctgtgtgtcaggctcgtggtggtgattccacgaatccacgaggggaggaaactgcacggctgcacacactcacacacacacactcacatgtgtgtgcgaatccacgtaaagtgagtggaatctgaacaaggtcggtggatgggtggaagggcacgcacgaactctgttctggcggcctccttcgatctgtaactattcgaaaacaaaaagtaagatcctcaaatttaaaaccatcattagaagacattaagaggggtttgcctgaaaataaggaattttggggaagggggaggggccgggggggacagggttatggctggacatacagtggccacgaggggtaatggatcaagagtgttttgttatcctcttctctctctttttgtacatttgacattttc

SEQ ID NO: 6917 - DNA, 559 bp, Canis familiaris
  misc_feature (1)..(559): n = a or c or g or t
cacctgtaactntgcaaaatgantnnactcagacattctcaatttttacttgnnnnngaccaactctttaagtcccctttggacttatatatacagatatnntaaagcaagagtgggaatgtaaagcataacctaattctctttcctatagagattctattttatttaaaatctatttttacactagttagaatcctgcttttttggccaagtacttgtcttgcatgtctgaccttgcagaagctggggtggatcgtagcatactaattaagagaattagaagtaatttacaaagcttgctcgctcctcattttcccaagatcacctccatcaagcagccctaccaccagctgggagaacagagattttcagtacaggtgggataaatgctctgaaaggctgtgcccagaggaatgagcaaataggcagatgtttccaaactacttaaaggtttaaaatttttttccagaaataaagaatcttatcaagatatattaagaaaatgtttttgaaaaaggtcaaagagtcatgtttgaatttgacaaaattacataagata

SEQ ID NO: 6918 - DNA, 556 bp, Canis familiaris
  misc_feature (1)..(556): n = a or c or g or t
tcccaggccctgnnngagggctcactcaagaactaggacaagagactacaaggagtttgcttctgagaaggggttgggctggtctgatttctctcacctcccttttatgagggtcctcttgtccatcttctttcaagcctcacagagagggcttgcataggagtgcagactgaagccaacagagaggaaggactgacggaggggctgtctgtcccctgatgggaagatggggacatccctggtcttgtcctctcttctgcatagcacaggtcccagcactggctttggaagaaaaaaaaataccctgcctagagggaaagccaggaaagattgggaagcaggtggccaggagagaaggcctgataagagccttcagacaatgggggggcctagtggagttggacaatacaggaactgttcctgggcccatgggagggtggggaccatagtactccagctcaaagacgaggggagcattcattaccttggcttggcctggaaattcatagggcagggcccaccactttccaaagaaataaaaaaagaattatntnnn

SEQ ID NO: 6919 - DNA, 629 bp, Canis familiaris
  misc_feature (1)..(629): n = a or c or g or t
ggccccatgnnagcattgagcagcctggcccagactgnngtgaccctgagtgggacagcaggcnaggnnttggcccacatnntctgtcagaggccccgccagcacccaacccaccagactcaatgtttctccatcctgcctgacttcagcctagatctccaagagggacccctgctagaatcccagccccacccagatcctcacatacccccggtggagcccacaactcatttgacctttaaccttaacctgtccaagaaagagagagaagccaaagacagcctgacactgcccttccagttcagctctgaaaagcagcaggctctcctgcgtcctgggccaagtcaggctaccagcaacatcttctatgagccggatgtgtatgatgacttggaccaagaggacccagatgatgacctggatgtttgactggcgggttggactggcctagaattggaggggaaagaccttggacccataaccatcctttggctgtttgctttggccttgccctgtccctgcccccaccttgttccctggtgtgggggccctgccccgtgacccgtaagtcagagtagcttcccatcaggacaaaaggtggggaggggggtgttaggggaaggtgaaga

SEQ ID NO: 6920 - DNA, 601 bp, Canis familiaris
  misc_feature (1)..(601): n = a or c or g or t
ggactctcaanntcaaggcgactgaagttggnnnaggtagctttatccgtgaaggaccntggagtgagggtcagatacactgttgctgtctcctcgccgtcttgtggaaatgcaaaggcaagtccacctttccagtgatggcaccgggaagcatggtctttagggatgtgaactttgcataggacaaagcttcaagaccagttttcccagcatatcccctgttacagtccaagaggtaaattagtcctggcagcagaaggaacagcaggagaaataagtgactcatcatttagaatccaaaaaattttcaccaacagatggcaggtggttttaacacaacagtccttgccctgaaagtacctggggatccagccaacagccggcaagccagggcagtcctgatgaagagatgcaggtgaacgtgactgtcactccagagaacctgcagaaaatactccacaaacaaagaaacgtagacaagtcttgaagtttccattataattaaaagccttcaagtccattgtcagatctctctccccatcatgcattacaaacgtaggcgctccaggagctgagctgcttcactttggtccatgctctt

SEQ ID NO: 6921 - DNA, 617 bp, Canis familiaris
  misc_feature (1)..(617): n = a or c or g or t
agaatcccttctacctccatgtaggaatggatattctgcagagtctggaaaagtacacaaaagtcaagtgtgggtatgctacattgcatcatgtcatagacaaatccaaagaggaccggatggagagcttctttctcagtgagacctgtaaatacttgtatctgctatttgatgaggagaatccagtccacaaatctggaaccaaatacatgtttacaaccgagggacacattgtatctgtggacaaacatcttcgggaatctccttggaaggaattcttttctgaagagggagggcaggacccagaggggaagtctgtgcacgggcctaaatcacccgagataaaagtcatcaactccagctccaattgcaatcgtgttcctgacgagaggagatactccctgcccttaaagagcatctatatgcggcagattgaccagatggttggcttgatttgatctactctcctctgtgtggcctcatctgatacgggatgtaaacagctgaacccgcgccgtgcagagatccagtctgagacagaagaggatggaagtctggccatctgcaatgatgtaggannnnctgtcccactcctcacacacacctaacagaatctt

SEQ ID NO: 6922 - DNA, 70 bp, Canis familiaris
  misc_feature (1)..(70): n = a or c or g or t
agtaaaggtatggcagctgngcnnnnngttcacggaacaaggaccccgggagaccgaggacttggagcag

SEQ ID NO: 6923 - DNA, 499 bp, Canis familiaris
  misc_feature (1)..(499): n = a or c or g or t
ctggggacannntcccccaccccagtgcacacaagaggaaagggtcatgtggtcagtggttgactctgcagangtgaccccgtttgccagaagctgtagacctctccttgacaggagactcttgttggctggttctccagagggcctgcttcccacgggcattgcaagtgccgcagtgcgggggcctggctctgcgcgctgaggaaaagtctgcagacccccagccctccgcaataattcaccagaccagaagccactgatgtacagagaacatttaagaaaaatgtattttatgtgaaaaaaaagttaaaactctgtatactgtatcagcagctttgtgtaaaaatggcaatcaagagagtctaatatatttaaaacttttttaaaaaaaatcctcgcggatctttgatattgtattgaagtaacttccagttagctccttgccatgtggcagtggtgggcctcgatccaagaccgtggctcgaccacgccccaaagg

SEQ ID NO: 6924 - DNA, 500 bp, Canis familiaris
  misc_feature (1)..(500): n = a or c or g or t
acttttctgatcnnaaggtcccttccagtcaatttgcagcttcagataagctgttaacctgatttctggcactgcttcagttgtaagttttatactgcttctgtataaaatgcctttattctgtgtctgtgtaccttttataagatgtccttcttagtatgaaagaacagaaatctgagtcctctttgaaagctactcactgactggagcctgggtagctggcaggaaaaatatattagaaagaaaactagtaaggggagattaggaactggagaaaggtcagctcttatagtatagtttttaaactgggacaagctatccttccagagcctgcctctcctgaggtagtgagcagtagcttgttcttcacatttactcctgggagcatgggctgctgcttcctacacagactgctggnnnnctagaaatatttccccaggcatcacagtgtaaaatattacagcattctgtgttaaagattaactgtctgaatctctata

SEQ ID NO: 6925 - DNA, 563 bp, Canis familiaris
  misc_feature (1)..(563): n = a or c or g or t
atactaggaagggataaacatacntggagccnagtgngncnnacacnctgagatagaaactatattagagtgatnatntcacaggtagataaatgggtctannnctgagattgcacactggctcccaagaccccctccccgcagtngttttgtttactgatggaggtaagtgagccagtttgggagtttgatgtagaccaaggtagacaatagtccaggtcctgcaggcctcctgttggcaagccagcctccaagtgactgcctgtatttctccatctgcagataaactcgccagcaagttatctgattccatgatgtctgtcctcgacctctctggcaacactgatgacagtgctagtgactgatccgacttatctcacccttccttgtccctccaagcaccagttccagtgggatggaggaatacagatgaaatggtgtgtttctccatgaagtacctgcatattcaaagaactcacccaccatgcctcttctcactgtcacctccattcttcaagaaaaagnnnnnnaagttgctgaaactnnnnagccccatacccttt

SEQ ID NO: 6926 - DNA, 603 bp, Canis familiaris
  misc_feature (1)..(603): n = a or c or g or t
cccnngctcagtgtnntggctcagagcctcgcacaggggcaagcagtnngcggnnnnngcnctgagttgagggtangagcgtggggggttggcanctgctgggcanctgcatgacatagccctgcctgagcccgggccggcctcgggtcacccatgagggccccttggcccagagcccgaccgcgccggacgcggtgtccggggcagggcagggctaggccatgggcctcgggagcctaggttaggggcccctctgagacccccattttgtgataatgttttgcactttttcgtacgaggggcgggaggctggggggggaggggccagggccctttggacttttgatgctttttttgggggggaggcctgacgtttctgctttctgctgagaccacccccacccaacaccagcaatccccctccgtcctggggcctggctcagatagaggccaggagttggggctaagctggttttccctccttcctccctgagactcaccctctctctttccagaggtgaaggaagggtatccatgcctaggccccttacacagtcgggggacagcacggccttgctttccctccttcagtgggtcctgccc

SEQ ID NO: 6927 - DNA, 596 bp, Canis familiaris
  misc_feature (1)..(596): n = a or c or g or t
tatcagatgaaaaatnntgagagtgctcccccatctccccagtataaaaaggtcattnnnnnaggtgcaaaagaaaacggtnngccactggagtatcaaaagaagttaaatgcaatagaaccaaatgactacaaaggagaagtctcagaagaaattgaagacattatcaaaaagggagaaataaaaactcgttaggacctaatagaatatatctacagatattttctgtatgtgctaatatatttttaacatttagaacagagatttgagatatctctatgtttagtacattttcagcagtgctctgaaggggtgtcttacttaggtgattctttgttttcagattataaaaagaaactaggttagaaattagataattgaaaaggttgccatgaggcactggaatgcatgacaagtggatatgggtactccatctgtgaatacttagaagttattttctgcagttgaacgtgttcttgctctgtgacaaaggagagatttgcaacttaacgattgtgcgggtgaattgctctgctcttggatttttaaaatcagtttaataagagcannnaaactgcagagacagttgataattt

SEQ ID NO: 6928 - DNA, 649 bp, Canis familiaris
  misc_feature (1)..(649): n = a or c or g or t
canctagaagtagcattgatgttttcaggagcgacaggcntagaagtgtgacaataaagtcacatcttgtacaatttgctgcttatctgcatgatctagtttcatctgtaatactatgnccacaagctggacaagaagctgagtatttggatttaaagatgaattatcttgactctgagcttgtatcactatatctgaagtttgttttgtctgacagtattgcagtacttgggaattctgagaactgaagaactgaaaggaattttttaaaaaactcaaacacaccttgaagtcaatgtgttttacagtgaaactattttgtgtatattgtgtttttaaaataaagatcctgtagatcactgtggtatttcagttttgtttagttttaattgacaacgtttgctcttaaaactgataggtactcttggaaagcaagataaagcccgagccagtggaaaagcctgttacagaaaaaaaaccttttgtgttattgctgtggtgtgcatggcttgcagagattaagtgcattttctcagtctatactgatcattgtatataggggatgttataaatatacatttttgtcatcatcatataaatcccatgatttcaactgtaaacatctgtccaatggtgtagcttnnnaacc

SEQ ID NO: 6929 - DNA, 634 bp, Canis familiaris
  misc_feature (1)..(634): n = a or c or g or t
tggcttctnnngacccaaagcagccctgtttgaggttngnnagnntcaggaactggcttacaagaagtataggaaacttcctaggaatagggagaaataantctgggcacccaaacctgnctgagcgctacccagtcccatcgggcccaaaccttgtcacactgtgtcacttccttgccttctcagctgtcatttgtgctcacagaccccaatatcctgagcctgagtgggaaggtgctgccatcttgtgaccttgctcgccgctacagccttcaggatgtggatggccgccccatccaagactatttgtctttgagctcggttctctcccatgcctctagcctgggctggctggcctcctacttgcctggcttccttcgtatgcccaagtggattatgaccctctacgctagcaaattctaaccgtcctggcctgatgtcacaactctgttctctctcaggctacatggtatggcaggtctcagtgaaacaaggcaggctcttctgcctaccacatacccttgataggaagagaaagcttccactgtgtttcctgggtgagccctggggcccctaagggatccccctttatgccttaattttacctgcccctacattttactctttgccttag

SEQ ID NO: 6930 - DNA, 586 bp, Canis familiaris
  misc_feature (1)..(577): n = a or c or g or t
tgtccctgtcatcagtancgtcatcactctgccacatgtgatcgtagaaaacattcccctccatgtgaacgcagatctgccatcctttgggcgtgtccgagaatcnnnacctgtcaagtatcacctacagaacaagactaacttagttcaagatgtggagatttctgtggagcccagtgatgccttcatgttctcaggtcttaaacagattcgattacggatcctcccgggcactgaacaggaaatgttatataatttctaccccctgatggctggataccagcaactgccatctctcaacgtcaacctgcttagatttcctcacttcacaaaccaactgctcaggcgttttatacctaccagtatttttgtaaagccacagggccggctcgtggatgatacctctattgctgccgcgtgaagttcaagactagccctcggctgttcttagagaaggcagacggagctatagaagtttttcattgtgaactgtagctttgatcatggtaaaagttaatcttttctattttttaatggatgtcataccaactcttcagaggaactcatgctaaaaatattaggaaaa

SEQ ID NO: 6931 - DNA, 613 bp, Canis familiaris
  misc_feature (1)..(613): n = a or c or g or t
aagggcatagttctttaattttttatnaaattgtcataaaaaatcttgacctggaacttaattatatcaagatgtcatgtttgtattagttgtgttggagttgtacatttacagacatttcttgcaaattttgtaaatttcagtatgcctttaaaatagaaacatctgtataacaaggaaaggtgaaaataatactaatccaaatatgtaaataggcctagccctggccagggctcagtttgattgtttgtaaattttgctatgattaactgcctactgtatttagatcagaagatcagaagtcttcatgtgcggatgggtaaagcttgtttttctgaaatgcttaatagctgagatgttgctgcctcagaacatcacctgtgtcccgagctaatgtatttatatcgctcttctttgttaagtacactttaaaggaagttgtactggttctatattagaactgccaaactgcctcatgtccattttgcccattattatttctctatgaaattattaccctttaggttctatacgatccttccagagatgctttcactggccatctgaaattatttgctgcttgccattaaagtttcatgtcagtgtggagcat

SEQ ID NO: 6932 - DNA, 569 bp, Canis familiaris
  misc_feature (1)..(569): n = a or c or g or t
agcaggtttccaggatgatgtnnacnttgaagatnagccacntagcaggccnntgctgcccgtgggccccatcaccaaggaaaacatcacttcttcnagtgaggannaagcagagaaggtggcagggcaccccaaggccactgtccccatcccccagaagtgctctgagccagagaccaaacggccctccacaaaagctgccaggctgcacaggggtatggctcccagggctgcagagtcccgccagccaagcacccgcaaatcccccgctgaaggcccctctggaggccgtgaagagggcaagaaggaacaggcagcgtcatcagagagtgaccccgaggggcccattgccgcccagatgctgtcctttgtcatggatgaccctgacttcgagagcgactcagaccctcagcggagagcggacgagttcccggtgcgagaggacctctcagaggaaactgatgaggatgctgctcctgcccagccccccccactccccaagccccctgtggcctccttcagactgaagaatgactcggacctctttgggttgggactggcagaaacca

SEQ ID NO: 6933 - DNA, 611 bp, Canis familiaris
  misc_feature (1)..(611): n = a or c or g or t
cttgccttgctgcaannnnnnnntcannngcancggcntaagacccngnnngagctgnannntatcaatgccnagtannnnnagatcannngcagtgccatgatccttaagctgannntnnnnnngctaaagatcttgnctgacacttacactgctgagaaagtagaagttcatcgtctcatcagggaccgtttggagggggccattcgnntacaagagcaggacatggagaagtcccaacaggttctgagcacctatgaggtccttggggaggagtttgacaggctggtaaaagagtacactcaactcaagcaggcagctgagaacaagcgttgggccctccaagagtttaacaaggcctgccgctgagcactggctggggcctgtccggaggcggacttctgcacgggcgctgcctccccacttgctgctgaaaggaccaccaccacctgaggcctgctttcattccgagagtgtggggacacttgcttgaaacactgcagtgggtcaggcactgtcctggtttttattccttgtttacagtgactgagtctcttctgggaaatggagcagatttatataattctgtgtgtagctatttgtcagtgtca

SEQ ID NO: 6934 - DNA, 634 bp, Canis familiaris
  misc_feature (1)..(634): n = a or c or g or t
gagcnntagnaaaacactttccctttaagtgntngctgtgatccctgacccngtnntcttgcttctacagcttgtctggtgactgaggcatctgnnaggtcagctctcaggcacctgggatcggtcaccctgtctgagtaaacggcacccatgaggtaggtgagctctcatggctgtgaagacataccccacacactcaaggtgatggaaacaaacccccacgagggctctgtcctctcctagttactatttattttcagcacctgtttgatgcggtttttttattctctacctattgcactgttgtgacttgttggccattgtttgatttttgtacgagaaaaagctttgttatagaaatcagcatactatttttttaaatctggagagaagatattatggtgactgcagatatggtcaggtgtcaaatataaacgtataaaagccttcttgctgtcctgtcggtcatattacattcatttcatatttgctggcaatattgaaggtttcttttttgtttgtgtaaactcttaatttctatcaaggtgtcatggatttttaaaattagtatttcattacagttgtctcagcattggttaactaatttttgccaggaccattattgatcaagcaa

SEQ ID NO: 6935 - DNA, 564 bp, Canis familiaris
  misc_feature (1)..(564): n = a or c or g or t
ccagccagacacaccaangcccaaacaggaaatacatacaaatacatacaccccaggaaggggtctctcaagtctctgctgtttctngaagtttcttcagtaggcagatgatgaagagtgtattggggcagagggacatggttgggggactttggccagtctggtggcatttcccatgagactggcctctcagatgggggttctgtgtttagaaccctgggcctgtgccctaccctgtagccagagcctaatgcagacggcttgctcagtgctgggctaggagccgagcctgtctggggccctggaaactggtttctgttggggcaccttgtgccttcagtgcctgccggcctctctggcagtcagggaggggccctcctgggatagaccctctgccctgccccagggctgctccatggtggctataagccccagctcatgccctccttagccccaggagtcctgaagtcctgccctcccagggcagcccctgcccaacacagaccccaggacccagggcccacacagacacctggagtggaggctttggtgtttggtttctgt

SEQ ID NO: 6936 - DNA, 608 bp, Canis familiaris
  misc_feature (1)..(608): n = a or c or g or t
tcagatcagtgatactggtgttagtgttgtaatcaggnnaaacacacttccattaaacttgacaggactatagaannacaatattttttagntcatgaattctacttttcaaatatataaaagctgcaggtnggataaaatctcatacatggatatttcgtgtccgctgtcttgtgtacttttgtacttaaccttgtacagttattttcatctcttgaaacatgaaagaaatgttatgtagatgttctttagaagatctggccatttggtacataatccagcacaaatatgctgggtggtgatgacaataaaaatggttttctcaacactggtgttaatttaagttacctggaattcttattttgattttgtttgatggtttttgtagcattttgcaattgctattagagaacactaggaagaaatttttttttcttttaagaacaattaactatgctctaggcaataccatggtgagcaaaaatgtaaaagggaagttgggaggagtaaacaaactactacagtaatactgttttcctactactgtaaggaacacaattggtgtacagttatttgttcaatattccatatgttattcaggaaataga

SEQ ID NO: 6937 - DNA, 553 bp, Canis familiaris
  misc_feature (1)..(553): n = a or c or g or t
agaaaggctttngaactgattattgactcagaaantggctttgcatcttccacaaatattttgaacttggtcgatcaacttaaaggcaagaagatgaggaagaaggaagcagagcaggtgctgcagaagtttgtacagaacaaatggctgatcgagaaggaaggggagttcaccctgcacagccgggccatcctggagatggagcagtacatccgggagacgtaccccgatgccgtgaagatctgcaacatctgccacagcctcctcatccagggtcaaagctgcgagacctgtgggatcaggatgcatttaccttgcgtggccaagtatttccagtccaattcagagccacgctgcccccactgtaatgactactggcctcacgagataccagaaatcttcgaccccgagaaggagcgggaggctagtacctccaaggccaacagaaagtccttgcggtccaggcagcactagctggcccaggcttgctgcctttgggggatggcaggtgagccctgttgggaggactagcatcagcgtgactagcgggact

SEQ ID NO: 6938 - DNA, 662 bp, Canis familiaris
  misc_feature (1)..(662): n = a or c or g or t
cgagaggctcgannctgacaaaangnngcaggtgcacaagangnnnnnntgccctgggcnnataatcacctatcattcggtgacagtgncgnnnnntggnnagncaggcnntaaagaagagaatgtnnatgtnnnagggctggatcctactcccacagcttctgcactgactccccatgccggcactggacccgttgtccctccacctcgctgctcgcgtactttcatcacttttagtgatgatgcaacatttgaggaatggtttccccaaggccggcccccaaaggtccctgttcgggaggtctgccccgtgacccatcgcccagccctgtaccgggaccctgtcacagacatcccctacgccactgctcgagccttcaagatcatccgtgaggcctacaagaagtacatcactgcccacggactgccgcccactgcctcagccctgggccctggcccaccacctcccgagcccctccctggttctgggccccgagccttgcgccagaaaattgtcatcaaataaggagatgtttaatccttagaaacctctttcctgccctgacttggggctcttcatgtttccccttctctccctgcttctcccctttgtcagctctgagctttgcccagcccttttctatttctttccccccagttcc

SEQ ID NO: 6939 - DNA, 606 bp, Canis familiaris
  misc_feature (1)..(606): n = a or c or g or t
agctggacatgctgctggagaagctgccccaggtggcagaggagatcagtggtcncttgacctcagccaataagatcacactagtgtccagtggaggtggggccatgggggcggccaaagtgaccggagaagtactggacatcctgagccgcctgccagagagtgtggagagactcacaggcgtcagcatctcccaggttaaccacaagcctctgcgaacagcttgagccctcaacccttgccgatgccttgcttcatggttgccagaatggtccccatactgcatgcacaactggcttctctgagcacacccttgacaatggggttccacccctcatctccttgccaaatagcttgtgccttgccttggagaggaggggttgctcttcttccgagccccacactgctaagactacccagtcccccacgggtttcatgccagccttctgattatcctactcaccccgcaccctgcaatttaactttctaactggactgtatacatttatggtctagaattttcctgaccaaaactgagggatcgcctggaggttctcaactttatcaaatgagttgctgttacaaagtactgatactgattaataa

SEQ ID NO: 6940 - DNA, 715 bp, Canis familiaris
  misc_feature (1)..(715): n = a or c or g or t
cctgacgaagaaatttgctgagctgcanagccccnncnngttnnnngtgttcatnnnnnacggtnnnnngccctgggtgtctgacttcaaccaccctcattacatggctgggagaagagccttgaagacagtgtttggcgtcgagcccgacttgacccgggaaggtggcagtattcctgtgactttgacctttcaggaggccacggggaagaacgtcatgctgctgcctgtgggctcagctgatgacggcgcccactcccagaacgagaagctcaacaggcttaactacatagaaggaaccaagatgctggctgcgtacctgtatgaagtgtcccagctgtaggagggagcgggtcccctcactcgtggagcgccgtgggaggaattgcttctgccctcgctccaccccgaatgttcaggaggctgtcagcgcgatggtctccggaaagtagccaggatctaacagcgcacattcgtcagaggttctggttgccgtccagctgggctgcatggggggtcttccttcctgccccctctctgcctcctgactctggcttgggcacacttaggagatttagtcaggggcacgtgatgccctgaggggccaccccttctcgtccctcgccctcatgtgggttctgtccttgtctccagcctgaaaccagtactgctgtttcctatcttctctttatgatgattcctcaaaacctaaacc

SEQ ID NO: 6941 - DNA, 556 bp, Canis familiaris
  misc_feature (1)..(556): n = a or c or g or t
ctttataaaaacacatttgactcctgagaaaacacatacacaaatatnntatgttcttctcacacattaccctgtcttctttgctcccattcccttcctcccagacctaatcactagnctccagtgtttctaantctccatcctccagcttccagtgccagccatcacccagaaaggacacaagggctgggcctcagcacccccaatgtgccaagtggagtttgagatggcctgtgctgctatcaagcagttgaagggacctgtgagtgatcaggagaagctactggtgtacagcttctacaaacaggccacccaaggcgactgcaacatccctgccccacctgctacagatgtgaaagccaaggccaagtgggaggcatggaaccagaataaagggatgtccaagatggatgccatgaggatctatgttgccaaggtggaagaactgaagaaaaaagatactggttaaggaggacagaatatcaaacacaatgaagtagcatggctcctctggtagcgaaaagggtttcttaaaagaccaacggctgaaacgtcc

SEQ ID NO: 6942 - DNA, 496 bp, Canis familiaris
  misc_feature (1)..(496): n = a or c or g or t
ggcgagtgtcagtgnctgcacctggacctcatcaagcagatgcggcagnnnngcaagtcgcnnntccccgtggtggcctacgcctactgnaccatccccacctaccccagcggccagataggcttcatgctgtgcagcaaaaacccgagcaccgacttccagaagcctgtgcagcagctgacacagaagcaggtggaacagatgcagctgaagtactacaactccgacgtgcaccaggcggccttcgtcctgcccgagttcgcccgcaaggccctgaacgacgtgagctgagcccgggtgccggccgctgcccgcgctgcgcgggagcctccggggtgctgggcgcctcgagccctggacgcgacccccgcccgccgccgtgcccaccaagcaagtgttacaggccccagatgctgccccagctgccctgctgggcggactgtccgtctgtctgtggcgtccacctccgagcctcgaccagctgtgtacagcacct

SEQ ID NO: 6943 - DNA, 554 bp, Canis familiaris
  misc_feature (1)..(554): n = a or c or g or t
gaagatatactanntggtagacggttgcagcagaattccctgatggaggagagagctagttagagccatcaggtccttccgtctcggatcacaacgcaactgccagaaggtgccactaaataacaacactgctttctcctggacgctaaccaccacctcagacagctgactcctattttgtagctcctgttttccctgttaacatcacttctggccacttcactcctaagttgctggctaaacaaggcattaaaaaagtaatctttaaaaaaatagcctaaagatttactaaaaaattaaaatttaaaatagaaaggatatatatacacagacacaatctcagtttaaaatgctgctcagtggggccatcgtattaaagattgcgtctcttcctcacccgttcccgagctcgctctctctgccctgttttctcctagcctttatccccctttattttaattaattatatgtcttgtttctagtctgtctcttggcactggaatgagaactccataaaggagtccatcttcactgatgatgggtgcttaacaagc

SEQ ID NO: 6944 - DNA, 288 bp, Canis familiaris
  misc_feature (1)..(288): n = a or c or g or t
ttctgtccacagattnagtgggttttgtctcccagactacgagatatgtcttnacgaaacatgcttcagatgacttcccttgttcttcgtgttagaatcccaagtttaggagaattaanacatcagtttgttctnnnaatatttaaggattattaatatatcagtatttctccagcttgatgagcttaaccatatcttcagatctatggcatgacaaccagtaggactgcttaacattcactttgaaccagaagcttccagggtnnnnatgaaaatcgtagttgacta

SEQ ID NO: 6945 - DNA, 596 bp, Canis familiaris
  misc_feature (1)..(596): n = a or c or g or t
tntgtncatgagtgtacagccacctgtgtctacctgcatgnnnanagcagacgtgtgccannnntgtgtgcacagnngnngtgctatnnngagtactagggaatacctcccctttctctccagttctctgttccaatgataaccattcacttttagctgagcccaaaaccagctctagatccaacagttctgctctgacctagacctcaaccttgaggccagcacctcccattatctccaaataccaccactgaagtgcccagatgtttctgggtctaccacactgcccaatctttctctccactgtgcaactgctctccttcctgaagggccctcccaagccccctacccaccccttagtgctcccagaaagcagccaaggaagatgtgagagcaaaggccatgttccccgtgtcaggaatggcatctccatgaaggaggggcccgaagccctcatggnnngacctcctctgagcctgtctgaagggccggcccttagtgcattcaggctnnggcccctggacagggatgctacccctgcttctctggaggntntgccctctcccctcaccctggtccctggcattagactcccc

SEQ ID NO: 6946 - DNA, 238 bp, Canis familiaris
  misc_feature (1)..(238): n = a or c or g or t
aggtggtttgtatttnnnggtacaaaaaaaaaatgctgcagatctagaagtgtatatatatttagcaggtacttgaaagataataagcattatttataactgaagagtattacatcctattaagtaaaatgctctggtaacttgtatacattcttgcaggtacgaacccaaaagtctgtaagcattgcataatgtgacggttgtataatttatgtaannnnatgcatgaatcagaatt

SEQ ID NO: 6947 - DNA, 565 bp, Canis familiaris
  misc_feature (1)..(565): n = a or c or g or t
gctgtcttcactagaaaaacnnaatggcatatgttaatgatgtgttaaaactgtccccccaactttttcattagatnggcgggatatcttggctttgtcacacagttaaagactgaacgtgacgttctttgttaaaaatgacttgcaggattaagtgtgcttattttaaataatcctggtagccagtctcctcatatatgtacgtatactgtgtgaacacagagggaggagcctctggggttgcgatttagcacctccacatgtcctcatgaacagcaacaggggtgttttacctgccgacacccggcctatcacaaatgtcacggcatttgaaagctctcccggtttcctaaaaagtgacacaccttttcaggagggcagagttttgcctttgtcttgtgggtgtttctgagtgattctcaagatccagtagacttaaggacacgtgtattcttacaatcttggctgtatttaacggcagagcttgacttccgcagatgagggcagcatttcaggattaacatttttttcaaccctttgatcatgtaatctgtgtgacagactg

SEQ ID NO: 6948 - DNA, 669 bp, Canis familiaris
  misc_feature (1)..(669): n = a or c or g or t
cttgaaattatgggancagttgctcaaactaatgattatnnncgaanataaagatgnnnnctgagatagcaagaacttccagatttcagagtagaagattcacatatcgttctattaaacaccagtgagccacttagtcnttggtcaactcaaagagaacctgaaatctgtcactagtctacttttacacactttcctgtttatagcaatattcagccaggggaacgatgctggccggtgtctccgcagctaaggacacaaggtccctgcggggaatatttaaagcaacgtcaggtttaaaaatgcagccctgacattgacccgccagcggtccgtgtcccggaggaaaggggaagcaggatgcgtggctgaggggcctggtcggggcggcactcgggcgaccggttacccacgtgtgtcttaacccaaccctgagcactccaggtctcaggagcatcccgggtactgaaggggttcggctcttgctcagcgacctgcagcccaccaaagtggtgtccgagccaatgacagtcaaagacacaccgtttgccacccggacaccacaccctgccatgcttatgtgtggagctgggagggactgtcgtggaagcttgttccttggcttcaccctgggaaaacgctggccgcatgatgaaaataccgccttgt

SEQ ID NO: 6949 - DNA, 256 bp, Canis familiaris
  misc_feature (1)..(256): n = a or c or g or t
cgtcaattaggaattaggttacattagtcaggcgaatnnataggtaacctgtgtgctaatnnaaacgggaagaacctttataaagcatattaggtggtaaaacttgagtagggtggggttgggaaagcatcccaacgaagttgttgtgtcttctagttggaacatgggagtaattgatgtgcccctttcagtaccttaactgtcagtaacagtagaggtaacagtaaaaaccagtggtcatcaataggactctgag

SEQ ID NO: 6950 - DNA, 648 bp, Canis familiaris
  misc_feature (1)..(648): n = a or c or g or t
gctatcatgatgagtatctgctngcagtccatggtagatgaactgatggtgaagaaatctggnnnnngcatcaggaagatgcngcgnnnnngagtgggggnnnnnnnnngacgctcagacagnnagcnngcagtgaagtccccgcccctgcttgagtcanctgatgncagccgggagtccatggnnaaactctcaagcaagctgagtgncgtgagcttgcgggggannngcagtcccagcacagatgccagtgccagtgatgtccacggcaattttgnnntcgagggcattggagatgaggatctgtgatctccagtgctcagatgtctgccctataccctggaggaatgttcagaaacttgccctgtgcctgtatcccccaagccaggggcgggaggggtcttttctttccttccttcccctttcttctcttggccaggggcttcctaacccaccttcccttccaccctctgggctggctgcacaaaggattcttctctttccagagctagccctcaatgccaaattagcatttagtattttgcacaaactccaagggaccatggctacctgccttggggaggaaccacagcttcccctggggctgcttctggcttcttggggccatgggccaaggggatgggcaga

SEQ ID NO: 6951 - DNA, 689 bp, Canis familiaris
  misc_feature (1)..(689): n = a or c or g or t
agtcttnannaatgtctntnntcatacttttccatcatggtangcctgctcnnaggcattgttttgccaacnnnangggagcagtctctnnnnccaaacagagtgtgtatgtatngaatttgagatcagaccctggttcatttacaacgattttacaacaatttttaatcttaaaagaatcatatactgtaaaaaactcaaaaaagattacgtttagcagattatcaaaaaggcacagctaagacattcaaaactattgcacactgcaacagcttttacaagttctaattccagcacgcttagaaaatccatgaatgttccaaaacatattattttatagtggaaaacgcacattaatatcccacacgtgcattctaccatttgccttaatattgaatatactgtttacctcacactaaaaataaagccagaagccttatttgtgattttgtcagagaagattctatttcaaagtcaaaaccaaagaatgctgattcttatggaaatctccataattaagtcatttcaagatgaaacagtgctgaagatcaaattatgttgtatcagtatcttttcttcccttccctgttgcctccagaatctaccagctgggaaaaatgtgtctttttttcataatatccatttttgtggtgggaaagaatttgaattnnnnctatgtttaaatttgg

SEQ ID NO: 6952 - DNA, 620 bp, Canis familiaris
gatccacactcagcccaacgagtccccccagctatcaccccaagatgtcaccactcatgctaagatcatggctgataacccatcctgggatggtgagaagaccattatcatcacctgcagcttcacaccaggctcctgcacattgacagcctataagctgacccccagtggccatgaatggggtcgccagaacacagataagggcaacaatcccaagggctatctaccctcacattacgagagggtccagatgctgctgtcagatcgcttccttggcttttttatggtccctgcccagtcctcatggaactacaattttatgggtgtccggcatgatcccaacatgaagtatgagctgcagctggcaaatcctaaagagttctaccacgaggtgcacagaccttcccacttcctcaacttcgctctcttgcaagagggtgaggtctactctgcggaccgagaagacctctatgcctagttgtttcctcacctcccccttcttcacactccccaagactggagccttttacaaaaccccaaaaagaagctggtgacattcagcagcttggttccttttctccctgtttgtgcttcttgtaattgatctctcgtggcatgta

SEQ ID NO: 6953 - DNA, 651 bp, Canis familiaris
  misc_feature (1)..(651): n = a or c or g or t
gagaatgtgcagacaattccacccccatacgtggtnngcancatccttgtctatagnngtccgccctgccagccccagttctccctgacggagcccatgaagaaaatgttccagtgcccctacttcttcttcgatgttgtttatatccacaatggcgctgacgagaaggaagaggaaatgagctggaaggacatgtttgccttcatgggcagcctggataccaagggtaccagctacaagtatgaggtggcgctagccgggccagnnnntgagctgcacaactgtatggccaagctgctggctcacccactgcagcggccctgccagagtcatgcctcctacagcctgctggaagaggatgatgaagccactgaggttgaagccaccgtctgaaccatccctgtgcgtctctgccttcccatgcggtgaagccctgggcttggagaatgggtctcaaagtaggctgtgtggcaccttggtagggagggttccaggaggctcctggggactctgggcactcattccccatgttttccagccctcctcccactagcagtttgtccactgtaagttttattctcccctgtgtgacttttgtcatcaaaataaaaanntgagaatccctaacnnnggtccacaacagttacattg

SEQ ID NO: 6954 - DNA, 685 bp, Canis familiaris
  misc_feature (1)..(685): n = a or c or g or t
gagtgatgacagtgaacccgaactggattactcctcactcccagtcctggaagacaccccagatgcgctttcaaacatatncgcaatccccagggacacctccaggaaggctgagacaccctttacggacatatttaaagcagctaagaggaactcggaaaccccaagtagagacaccaagtccccacgcccgctgatccaggagctccacggcgaggaagcttcagaccagtcaccaaggtcgccaacctgccaaagggacaccacaccacccctaccacccccttccagtgaggacggggacagtgacctgcttccagcctcttccccagaaaacatcaccaaagagaatgaggcgctgtctgagcccgagcttgtggagcgtgaggcggaaggagaccgagaagacattgaatttggcttggactgaaccctcaagtggcccttctgcccccacactaatggggacagctggtggctagggccctccatgggctcaggtcacccccttgactgggctccccttccttcctgagagtgctcggggcctccgctgcccctccactggtgcctctgcaagcgtgcgacagccgtgttcctgttctcaaagcaggacacgactgacctcccccggttctgtggcataagctgtgtaactgagcattacagacattnnncatccacg

SEQ ID NO: 6955 - DNA, 619 bp, Canis familiaris
  misc_feature (1)..(619): n = a or c or g or t
agctgctggctatgccctgtacggcagtgccaccatgttggtcctggctatggtgaatggcgtcaactgcttcatgctggacccggccattggagagttcattttggtggacagggatgtgaaaatcaagaagaaagggaacatctacagcctcaacgagggctatgccagggagttcgagcccgccgtcaccgagtacatccagaggaagaagttccccccggataacacagccccttatggggccaggtacgtgggctccatggtggctgatgtccaccgcaccctggtctatggagggatcttcctgtacccagcgaacaagaagagccccaagggaaagttgagactcctatatgaatgtaacccaatggcctacatcatggagaaggcaggaggattggctaccactggaaaggaagccatcctagacatcgttcccactgacatccaccagagggcaccagtgatcttggggtcacctgaagatgtgaaggagttcctggacatctataagaagcatgctgccaaatgaggaactggccttgcccgcaccaaaaagaattaccatttatctggaccttttatctcatagnnnnnnacctctttctgactgtgc

SEQ ID NO: 6956 - DNA, 681 bp, Canis familiaris
  misc_feature (1)..(681): n = a or c or g or t
catcatgtacatnctgctgtgtgggtatccccccttctactccaaccatggtctcgccatctctccgggcatgaagactcgcatccgaatgggccagtatgaatttcccaacccagagtggtcggaggtatcagaggaagtgaagatgctcatccggaacctgctgaaaacagagcccactcagaggatgaccatcacggaattcatgaaccacccctggatcatgcaatcaacaaaggtccctcaaaccccactgcacaccagccgggtcctgaaggaggacaaggagcggtgggaggatgtcaaggaggagatgaccagtgccttggccacaatgcgtgtcgactacgagcagatcaagataaaaaagatcgaagatgcgtccaaccctctccttctgaagaggcggaagaaagctcgggccctggaggccgcggccctcgctcactgagctgctgagcccgtcccgctccactggcggacaagcaataactctcgacctgaatatattttttaaacgaagagacccaggactgcccgcttcacctccctcctcggcagcgtggagcccagagcccgtccgaggccgcatcccgcctgtggttcccaccacctcggagagggagaggctgggaggctgcgggcggtgcggagagaaaagagcaagacgctctggaacct

SEQ ID NO: 6957 - DNA, 610 bp, Canis familiaris
tttgtgagaggtgaatgttgaagtttgaggaattttgtgagccagtgatcaaattgttcatagcttgaaatctgccatagtggtagtatttacaccatagaaatttgtaaatgttgtaagtcagggcttctcttcccaagaacttgttaaacatttaccagcatactactgggaccatgtctgatcctcctgtgtgttctcaatgccttgcacagtaggtatagcataaatattccccaaatcaggaaataaaaatgagttaatgtgtaaattaagtcacttgctcagttgaataattgagatcttatggtcatttgtaaacattgtcattggaccttacacttgattcttttttctgccttaaaagtttattttcactttgtcatgctgcagggtttgggggactgtttgtatgcagatgctacttatgacaaagttgatattgggctaagctgctatctaaagcttgtcactaggaactgtttttagaggtcaaaaacctattttgaaaatagtattgtgtaaatgttgtaagtgttgtacatgtctgtagttaaaaaaatctgaagaattcagttatggtgtaagatgttacttggttcatatttgt

SEQ ID NO: 6958 - DNA, 670 bp, Canis familiaris
  misc_feature (1)..(670): n = a or c or g or t
ccctcagatatcaagtatacactgttcatggtgtgtgtgtgtgtgtgtgtgtgtgtnnnnnnncatgtgtccnnnnncntttnngttnnnnnngnntgtgatcatgnnnnnnatgatanctgagcagggttgcctttttttttttaatttatnancattatatattatattatattatatatttgttgctttctnataactatagannnngtcaaatcttggtattaaaattgtttaaaaaggaataaattgtccagttgataaatgatcactggtctatctaaaatatgaatttgtctttagttattgtggaataatgtgccagctatctagtccacacagtgattttgtatgtaggatagggaagcagtgatgctctcaatgggaagatgtgcaacacgagtaaggggggactccatgtattttatctacttcagcaatggaactgcaacttggggcttttgtgaataaaatttagctgccttgtatagtcctttgaaagagacatatgtgatctgtgaaaattatagttttctttttttagaagaaaaatttgcaaaagatctttccaaagataacgtgccacagatcttttgtttgttgttctctgtaatgaggattaattgctgtttaaaaaaaaatgtaattgacttgttaatcttcaaattct

SEQ ID NO: 6959 - DNA, 293 bp, Canis familiaris
  misc_feature (1)..(293): n = a or c or g or t
ttatactccaaaaagtcnnngggagaacccnnnntcttttccatcctgnnncnnnnnnncaaaggttttnnnnncngctgggggagnntaaagaannannnnnatctttctcctgtntnnnagcnnnnnaaatcccctnnnctccatccctccacctatggagtgtctaagcatctatgctggagatttttccatctggctttcatcatattgccctaagcactggagcatgggggtgggggtgatgatggtaccattacaattatttacgtaaaaatattttttatttttgt

SEQ ID NO: 6960 - DNA, 435 bp, Canis familiaris
  misc_feature (1)..(435): n = a or c or g or t
cctgccaaggataatnnacgcctgcagctctttgggctgttccctttgcagttcgtccagctcttcgtccacgatgaaagccgctggcagcttaaggtcaagttccgcaccggccgcgccttctacctgcagctgcgggccccgcccgagacccgagaccgcgagttcggccagtgggtgcggctgctctaccgcctgcgcttccattcggccgagggagccgtgcccttcacgcaggaatacttgacgatggaggatggagagtatgatgaggacgacgaggatgaagaggaggacgatctgatcgagcgggaggagcttcaagaagacatggaagccagacttgacccacagacctctgaactctggggactctgattcctccaatatcctttgaggtcaccaaaggaccagagatcaaagaaccctacctca

SEQ ID NO: 6961 - DNA, 594 bp, Canis familiaris
  misc_feature (1)..(594): n = a or c or g or t
tngacatcagtcagtttttatgaacgaaccaagactgtcagacttcaaacaagttcttttacgggaggggattcaagctgaatttgtaggaggtgtgcttgtttgcaacaatcaagtagcggtccgtagaacggaaactggacgcattggattagaaggctgcctttgtcaagatttttataggataagagaccttttatatgaacagtatgccattgtgtaaaggacatgatgtcaggaagtatctgtttgacctttctaagaaaaaagcgttcttattctaagcttttgcttttttgtcttgtaacatacagaaagaattgccagaaaaatttaacatgcattcgattttttaaaaaatgtaaatagagtccattttgctaatgctcaaatgagcactccacattttagctttcagagtgatagagatcctaacaagtgtgcaggcccaagaatcgaaggtgattggttttctctacagaccccttgttctagaagggctttttacttgaataaaacaatgcaacttagcaaaccagctcatggccttagagaaacatgtttgcatgttgtgaattcttgcaaacagtttct

SEQ ID NO: 6962 - DNA, 495 bp, Canis familiaris
  misc_feature (1)..(495): n = a or c or g or t
gtgtgactagaaaaggcagtaatgtgcttatnnnnnanagtctgtttcctcagatttnnntagccttccatctacagaaacatgacattttccattcatnactgcttttncnacattggcccatttagaacnnnnaacctttttaacttaatgtgttccattttattgagtagatggtagcttgnnnatgcctgaaatatcngagtaggtttaatgccaaacacttttggggtcatgtctaggtgaactctgactccctgttttatttcaagcaggtgctatattccagcnacaaacatcatggaaaaagctagaaagtcnnnctgcctttgaggctactagggggagttgtggtgttttaggatgggaagaggtagctcatctacctaaaaatcttaatttctttacaatattcaggcaagatattagatcactatatgcaaataaatgaagaaaanannnnnnctctgaaaaccacttagtanacgtgtttat

SEQ ID NO: 6963 - DNA, 707 bp, Canis familiaris
  misc_feature (1)..(707): n = a or c or g or t
gtgacactcgcgtgagatagtctannacacatgtnnnncatgtgatnntnnggcatgtnngtgttttcatgtnntcctcccgtcagtactatagnctagacattattttaatctacgtttcatagataagaaaacagagatgctacctggcctgcttgtaagtggtgtatctggggctcctggtctgagtatggtgaggactgggaaggaggggcccagaggatcgggccccatctgtcctctggcagagtccaaagaaccagagattgccttttccttggtagctcgttattccaagaaaggtagcctaggcagtaaggcacatactttaggaaatatttgaaaatgagctcatcacagactttggctcaactgtggcatatgccagtacctgccgctctgtctgtggttctgctcaggtgcatgggttccgagagcagagcttttccaggatacctggaccaggtgagcaggatgagaacttttccagttataacagagtactgggtagcgtgtgctcgctcttggggcagggggtagggtgggggacgcccaggcagagcccaggagagcctgctcttgtgcacgtgtgtacgtgtgcatgtgtatgtatgtgtgtggctatagctttgtgcacgtgtgtgtgtgcgtgtgtaggtatgtgtgtggctatagctttatgttctaaatacaaataaaatgccnnn

SEQ ID NO: 6964 - DNA, 576 bp, Canis familiaris
ttgggccaaggattaaatgtattcctacattttcattttaatattatgctataaacatttaattttagtgttggggttcttctgttttttactatctctaggttatgttccacttcagtgaattgcatatttgagagactattgtcttgattcttgaaacaaacttggacaactgttgctttactctttggttggaaataccattggttttgggatggacttttaaatgtcctttagacttcagatatacccattgggaagcccttaagtgttggcctctccttctaagactttggtgaaggggagacaggagccctggctttctcagacatgggtctgggagctaaggaggctctttttgggtgaccctttagggacttcatttgctcttcgtatctcaagcaatagggaatctgttgtattattcagggggaactattcttgtcatattaaccacggatcagttttcctaacttgttatcactagagtggcggctccaggaactctgtaagggcagggatttttgtctcttctgtcttctgctgtatttccagcacctagaccagtgtctggtg

SEQ ID NO: 6965 - DNA, 526 bp, Canis familiaris
  misc_feature (1)..(526): n = a or c or g or t
catgatactcaagatggcagattcccagcgtttcagacagtntatcttgcttacccctcaaagcatgagttcacttccatcaagtaaactgattagaattcttcgaatgtctgaccctgaaagaggacagacgacattgcctttccgacctgtgggccaagaggaagaagaagaccgaagttgatctacagctccctgtgccctgtgccatgtcctcatgttgccagatttgtaaagggaaagagattcaggagtatttgatgaaataaaatgaaactgaagataatctaaaataaaagaaactcctttatatatctggccccagtaaaatatgtaaataagtctaggaagcctacgacaaccagcaatttaaaattactgttactttactttgaggaaattaatttcatagtattggttttaaatctttttttaagtttgtttttttttaaccatctacttttatagattgttttttcagaagtaaaattttgtacatatgtacatgtacatatctgtttagttt

SEQ ID NO: 6966 - DNA, 523 bp, Canis familiaris
  misc_feature (1)..(523): n = a or c or g or t
gtangngtctgtcattcccacttcttcctcattgagaacatctgtcttctgcagacccttctgnnnagccaggnnatgatcagcnnggctnnagttgttgggctgggcataagnnagcttctccagagccaggcttgaagtttgctctaaccaacatttaaaggctcccagagaccagagccagatagctcctgccccagtgccttggtcgacacctcctcaaagtggaccagcactgtcttgtctgagttcaccccagcccatccctgcacctactaattctngtctccttctcccttcttccaacaaaagtattgaatactgtctccaatcggtatctcaaggaggtttctgagacagttgtagaaggctcaagatgaaggctggccattcagctacaagcctgataaggcctgtgtttctctgaccagaggtggaaccccgagggcccagcaggcctttcccagggcctccatggagcaagctgagccaccttggaaaacagagttaaacggaatatttt

SEQ ID NO: 6967 - DNA, 580 bp, Canis familiaris
  misc_feature (1)..(580): n = a or c or g or t
ctcaccgaccacaactcatggcccccccggggggcatggcccacccctgcccaggcacaggcagccccagctgtgtgagtcctggatgttggaaatgagnnagcctggctcttcgctgccctcgggggtgctgggcagggcccagatggaatcagtgcccctgcccctcccacctctgtggcccctgtgacctcaggctctcgcctctgcctttggagagggccccagagcagggtgttgggaccccgtgggatgaggatagaacccatagacctcccactcccttctccgtagcatgggtcagaaagaaagggcagcctccccagcaagccgggcaggtgactgagggactggcccccgtgggaatgggggcttgaaactgaccccatggccccttcctttcccagggtgggcttagaaagcaggggctgcaagagggaacccccgaaggtgccagatgtgggagcaggagattcagaaggagagagggtggacgagatgctggagaggagaggagaggaaagaggcagagagtggtctcaggcagggggaggggtgcccccctccatgcctgcccctc

SEQ ID NO: 6968 - DNA, 450 bp, Canis familiaris
  misc_feature (1)..(450): n = a or c or g or t
gagcatctgttctgtatgacatcgtgtgccaggntctgagggtaaggtggggaggtcatcctgccacgcggtgctgtatggnctgggaggagatgtggaacttatcaccccaaactttaactgtccagatagctcaccttttagactgaaagcgccatcagaacagggacaaaatctaaaaatcggacctgttcactgttgaattcctgactgctggcccggtgtccggcgtagaggaagtgctcagtgagcatctgaagagaatgaatgctcatataattgagtgagcaatcatgttctatcagcccctataaagattataaagcaggatgcctgggtggctcagcagttgaacatttgccttcggcttgggtcgtgatcctggggtcctgggatcgagtcccacgtcgggctccctgcaaggnnnnnncttctcccattgcctnnnct

SEQ ID NO: 6969 - DNA, 518 bp, Canis familiaris
  misc_feature (1)..(518): n = a or c or g or t
cagataaatacctttgatctaagggttcagnctttcaatgtgatngaannaaaatattctacagctcaagactgcagtgccgatgacgacaacttcntcgtgcccatagcggtgnnagcggncttggcaggagtacttattctagtgttgctggcttactttatcggcctcaagcgccatcacgctggatatgagcaattttaggacctgcagtccaatcaattataaagaaatacatgcacataaaatttttcttgcctctcaattttgaaacacgttgctctttaagattgatatgttgaaattttaattcttaaatcagtcccagcattttgagattaagtctctattaataaaaaccgttctcttttatcagcttaaaattactgtattcactggtcctgaagacagactnnnnnnatcatcggtgtgtggtgtgttaaggtctagcctaagaagcctcagccaaattttgatcctaacttgagatgccttaagcttattaannnngccattat

SEQ ID NO: 6970 - DNA, 589 bp, Canis familiaris
  misc_feature (1)..(589): n = a or c or g or t
atgatgcctcggaccatggnnnnnccagccagnnaggcccgnnnnnncnnnnntctctcttcntcgcccgagagtggtgcntatgtcattaccccctttcactgcactgacctgggagtcaccatcctggtcaacagagggtttgtccccaggaagaaagtgaatcctgatacacggcagagaggccaggttgagggagaagtggacctagttgggatggtgaggctgacataaaccaggaagccctttgtcccagagaacaacccagaaaggaaccactggcattaccgggacctggaggcaatggccaggctcacaggcgcagaccccatcttcatcgatgcagacttccagagcacagtccccgggggacccattggagggcaaacgcgagtcactctgaggaatgaacacatgcagtacatcctcacctggtatggcctctgtgcagctacatcctacctatggtttaagaaattcctacgtcggactcctggtgtatgatctactgaagtagctccgctcctctcctgaataatcactaagtcacagattttctaagctttctttttaaagattacgtgggtta

SEQ ID NO: 6971 - DNA, 570 bp, Canis familiaris
  misc_feature (1)..(570): n = a or c or g or t
tgagcttgagaagaagctagagtatgatcagacactcaggcccatttgcctcccatgcactcannnnncaaatcaagctttgaggcttccgccgtcaaccacgtgccagcagcagatggaagagctgctccctgcaaaggacatcaaagctctatttgtgtcagagttatccaaagacaggaggaaggtgctggttcggaaggaggtctacatcaagaatggggacaagaaagccagctgtgagaaagacgctcagtatgcctccggctatgagaagatcaaagacatctctgaagtggtcactcccaggttcctttgcactggaggggtgaatccctatgctgaccccaatacttgcaaaggtgattctggtggtcctctgattattcacaagaagagtcgcttcattcaagttggcgtgatcagctggggtgtagtggatgtttgcaaagaccggaggcggtggcagcaggtacctactcatgcccgagactttcacgtcaacctcttccaagtgatgccctggctcaaggagaaactcaaaaatgaggatttggaatttctgtaagg

SEQ ID NO: 6972 - DNA, 558 bp, Canis familiaris
  misc_feature (1)..(558): n = a or c or g or t
cagataccattgatgatggnncttgtattttntctgaaatatactttacaaagtaatggctagctannnnnntttgtttttaacactttgagggagtggagattaaatgattcacttatggnannacacactgcaatatgcgttgctatgaagtttcctaaaaacatgtcccaatttgtacacttatgtggaactttttgttctcaaaggtagctaatgacgtaaaaataatacacagaaatatggagctccttttgacacctgaagcccactaatacgtgctttcccctaatacatatttcttctcaagtttaaatgcatgtaaatactgaaaactagatagtatgatttataagtaaaaggaccaaaaatacattgatatgagcagccaccgatggtgccactaacaccctgacccaggagagtggcctgcttgggcctccgccgccttcgcttctacatcgcaccagtcctgttcgtgtatgtgactgcaggctattcctaaaaccataatgataacacagaagtggccttctgcttttaaattgataccctata

SEQ ID NO: 6973 - DNA, 597 bp, Canis familiaris
  misc_feature (1)..(597): n = a or c or g or t
gggnntggggggccngcgcccaggcccnnnnccatgtgttgcaggtggcagagctgaagggccccgtgctccggctgcgnnagccactgggcgtgctggccatcgtgtgccctgacgagtggcccctgcttgccttcgtgtctctcctggccgccgccctggcccacggcaactctgtagtcttggtacccagcggggcctgtcccatccccgccctggaggtctgccaggatatggccaccttattgccagcaggcctggtaaacgtggtgaccggagaccgggaccacctgacccgctgcctggccttgcaccaggacatccaggccctgtggtacttcggatctgcacagggctcccagtttgtggagtgggcctcagcaggaaacctgaagccggtgtgggtgaacagaggctgccctcgggcctgggatcaggaggccaagggggcaggcccagagttggggctgcgggcagcacggaccaaggccctgtggctgcccatgggggactgatgcccgagtgccacctgctccatcttggacacgggagagatggaccctgacagacaccagaagcctggaactttcttttttt

SEQ ID NO: 6974 - DNA, 272 bp, Canis familiaris
  misc_feature (1)..(272): n = a or c or g or t
tacatccccccacccctnngcatccagcctcccgaggccctggtctcccatctcgctcctccgcaccccnnnnnngcagtagtcctggcaggccctgacctccctgccccttacaggcacccagggcccagagccaggggcnggtgcnnncagcctgcccatgcctgggagcacgtgaaagcaggganagcacgcttgttggtttcagatgcacttttctgcttgcnnngccnnntctgtgcgcttcctnnnnnnnggacctggctttattg

SEQ ID NO: 6975 - DNA, 590 bp, Canis familiaris
  misc_feature (1)..(590): n = a or c or g or t
aacgggctnnnngctatgggggcttcctactggctgnctacgacgannagagtgnnnnnctccaggccatatgcaagctcggaactggcttcagtgatgaggaactggaggagcactaccagaggctccagttctctgcaggccctggtgctgcccaccccacgctcctatgtccgggtcgacggtgccgtggcccccgatcactggctggaccccagtgccgtgtgggaggtgaagtgtgcggatctgtccttgtcgcccatctaccctgctgcccggggcctggtggatggtgagaaggggatctcccttcgctttcctcggtttatccgggtccgtgaagacaagaagccagaggaggccaccaccagtggccaggtggcctgcctgtacatgaagcagagtcagattcagaaccagcagggcgcggacttagactctgactcagatttctactaggctcctaccctcccaggggctgggtggtacagggtgggtgtcctgttggtcagcagatccggtgttgcggtcgtgtgggttttgagtgtcaggtgtgtgtgtgcatgtgnnnnngaatggtttaagctggg

SEQ ID NO: 6976 - DNA, 673 bp, Canis familiaris
  misc_feature (1)..(673): n = a or c or g or t
gcagagtgnncagaacccatcagccagatanngcagagannnncaacagcaaatnnacccctttccagctctgntaaaaaaagttccagctgcnnnngctcctcccatcctcgatcaagaagtgcagctgctcgatcattatctagagctgcttctgaaatttcagaaattgaatatattgatattactgaccacaacgagcctttcttagatggcactgctgatcagcaagctttagaaagtttggaaaaagaattaaatatgctgagaaatcttgcagatccttcagaaaagctttacagcctaacctcagaagaattaccagccttcaacaaccattcgttgaacataagtcagactacactagatttccgtaagacctcaagtgcaagaggcccctgcacagttgaagaatggagctcttctgaaagagatactgaaactcagtctttgctaacactttctgaaagcagcacagatgaggaggaagaggattttcttgacaagcaacatgtcatcacactaccatggtcatagagtgcctaatgataatgatcatttgttcattactttttccattttgtacctaaagtaaagcaaacagctgaaaaagtgaccaagtgattacctgtccaggtgctggagattttgattattgatgtttctgatattt

SEQ ID NO: 6977 - DNA, 603 bp, Canis familiaris
  misc_feature (1)..(603): n = a or c or g or t
cgagcacagggaatganntagaggatatagcagctggtnntcaagaagatactnnnnnntcaaatgggtccacactgaaggccctgggcctgcctcagnngcacttccacagccttgtcctggacctgagtgccctctcctttgtggacactgtgtgcatcaagagcctgaagaatattttccgcgacttccgagagatcgaggtggaggtgtacctggctgcctgccacactcctgtggtcactcagcttgaggccgggcacttcttcgatgcatctatcactaagcagcatctctttgcctctgtccatgatgctgtcctctttgctctccaacacccgaagtccagccctgccaaccctgttttgatgaccaaactctgaccacgctgctgcccagactgagactactcacctctggaggttgtgaccaggcacttgtgagaacgtccctacccttgggctgcctccagatgtcacccaggagtcctctccgtatatacacatacatacaactcagggatggaggttttgggactcccaagttcagtgctataggcttgggcctgggattgggcactgnnnnnngaccagcactggctgg

SEQ ID NO: 6978 - DNA, 609 bp, Canis familiaris
  misc_feature (1)..(609): n = a or c or g or t
aaacaaacatggctnntgctgactccccntatggatctcagtttgctcctttttatnnacctcttaatggagagaaagtaatcctctacagaatgnctgaattcttgcattctttacccttccatcactgtattgattttttttttttccttctttaaacccaaactcttgcctcacttcgtctctacagagtgttcacagcaaaacacgtttggtctgtttttagattcttgaagaattaagtagtctttcatcgagacgtttaatgtgtttaaagctgggaacccgttggaagttcacaaatgctgcatatgctgagtagcaaaagaaaatggaaaaaaaaacataaaaaccccacaaaacaaacgtttttaaaaaaatttgccaaggtttagctgctcatttacattagtgtgtgtgcattcgatcagccccatggtggtgaattttgtttcctttcccttcttaaggctgggatacagtgggcgtcagggactttgtgctataagcctgataaaatgtgttccctaagggcacagagccccttcagcctccaggaaatcatcctaacacagggggcctcagctactctgaggagaaaagatcaga

SEQ ID NO: 6979 - DNA, 588 bp, Canis familiaris
  misc_feature (1)..(588): n = a or c or g or t
catatctcctcacttnggcacaagctantgcctccagtgggaactccaacaccangtctttcaagagagagctcaattatctcnnnctatgangncttccntgcatcctcagaacagagttgatacccactttgtaatgaccacatttcgtgtactgcttttcattgcccttttgtcactgtagtgtatagttgacccttgaacatcatgggtttgaactgaatgcgtctatttatacttggattttttttgtaataaatgcagcagagtcccataaatgtattttctcatccttatgatttccataatattttcttttctctagctgaccttattgtaagaatacagtccatcatacaaataacacacaaaatatgtgttaattgactactttatcagtaagtcttccaatcaacagtaggttattagtatagtagtattgttaaatttgggggaagtcaaaagttttttggctgtgcaggggtgcattgtttaaggatcaactataatattctttttgaatctatctcctaacaaatggtgagtttctgagaaaaaccatatcttgttcannnaaaacattgcctg

SEQ ID NO: 6980 - DNA, 539 bp, Canis familiaris
  misc_feature (1)..(539): n = a or c or g or t
caaggtttgaatgcatacctgtgtttttanngttttgagattgccaacttccctggtttcnnnaaggtannagagaacttaacctgtatttcatcgacacaaataatccatctacacatgtgcccagatatggcaaagcaggtgaagaccttccgattaaaagcatgtttaactggaagctgagagcctgctttgtccatcaagaattacataagcatgtggatatgttatagtcgaagtaagacactctgccaagtntcttctgtatagaatttacccatttctcaaaatttaaaaattcagacttcagcctttgcactcaggagggttttgcgccagcatgagctcttgtactctacacagatctaatttatacagtgggtcaagaagtagaataaatgatccaacatagcctttcttttccttttttctctcctttgaagtgagttgagttctcgttcaaggtttataacatggctatttcctagttgtaaagttatgccttcataagtgccnnnnnngtaaggtggtgttttcct

SEQ ID NO: 6981 - DNA, 553 bp, Canis familiaris
  misc_feature (1)..(553): n = a or c or g or t
aagtgaatttaaannnagtcaggaggtcatttcttatatctagtttgagagtaatagggttgttttttttttttttttcagcaaactctannnnnnntggttcacccttcaaaatgttcatttgaagattccatccatcagctcattaatgatggtggaggcaagtgtatcatttgtttcctggggaatttggtcaggtgcaggctgctctttccttagcaaaacctggagcagtttcggtaggttaaatggcttgattaaatcttgagctctgagttggaaagagatgagaagttaaccccttnnnccatgtggtctcttcaggatcaagaggctgtacatgtgtgaaaaatacggactaagaacctgtgttcatagacaatccgaactgtgtttctgaagtttgtgcacattttccttcactgtaatattattttacagctgtttgttaaaatagtgaataatttaatggttttaaaagtaacaggttttgtgtgtgtacttgtatatgtgagaattgccttattttcagattgttttatttaatgatggt

SEQ ID NO: 6982 - DNA, 545 bp, Canis familiaris
  misc_feature (1)..(545): n = a or c or g or t
gatgtgactactatctggaaagtgtaatgaactaaactcactttctttaccaccaattttgtgtgtttgcattggtagggtaatactttatagatcaccccaaaataacagttaacttttgaaattcatagttctctgaaaaacatagaagacatttaattcagtgctcaaaacctggggccactcactcttgcaaatgaccatatcctatgaaagcagttatagtgttacccatgcatggtaaaatccaagagctaaaaaatacacctaatttatataacccatgagaaatatttttagattctcttcaggattaattaaataaacannnagtttatgaaaatataattgtttatcacttttatgacccaaatcacaattgtaattcatgataaactggtgagaataaactgaacatatggtcatattcacaattatttattaactgaaatgttactccaacatcagagctaatgttgagatttaaactgtaatgtctaatatttggaataatctattaagtatcagcnnnnnnttgatttcca

SEQ ID NO: 6983 - DNA, 517 bp, Canis familiaris
  misc_feature (1)..(517): n = a or c or g or t
gaccagatctgtcccataggnnaccagctcacaagttctgatttaaatgcaaaaaatgaaaccattcaagtgccagcaaagaacacatgacattattttcacaatcttgaagttgggaagacctttctaagcacaatcaaaaccagaatccataaaggacaagacatttaactgcataaaaatttaaaacttatgtgtaactgaacataatgaacaagcctaaagacagacgacaaacagcttcccctcgttctagcagaatgtgaattgctgcagcctgggtcacatgccttcctctgtgggggaggagagtgcaccaagtctaacaacagtaccaccagggccacctgctgctactgctgctctggactctttcagtaaacgccattgctgccagtcagtggaaaataatgagtctgttcatcttgaaaatggtcctgagggcagcccaggtggctcagcggtttaagcgacgccttcagcccagggcctgatcctggagacccaggatcgagtc

SEQ ID NO: 6984 - DNA, 695 bp, Canis familiaris
  misc_feature (1)..(695): n = a or c or g or t
aaatataaatatataaatatatatataaatnnnagtgaaatcatcaagggagaaacattttgcatgtataaagcttcatgaaggtctctttaaaaaaaaaaataccaaagcttgtttattccttataattaacccaagtccttatgaaaatacacaaaacgaagagattatggctggtgttgccaaaaatgccaaataggacgacgggcctgcactcaaatatagttgctaatgcgtcagtcctaggagagcatgctgttttggtatgtaaagcccacgggctccattctccctttggtttatataaccctgtcttccacacttctgggagcctttggtgaggggtaggtacctgccacatgcctgacctttccttccttctttgctcattttaccatgggtatattttaatcttgtataaaaatatgcatgagtgggtcatgcacatgtatacagtacgtattttacatgcagtggttaaaaaaaaagttcggtttgtgttttttgaaatgtcagtacattttgtgccactaacactgtgatgtataaaagagctgtttgaatgccttttaatgttgtgttttgtactttggaatcacatggaaaagtttgatttgtaatttcaatacatattttaaatgtattgtgtcttacgtagtttgtcccccctttagaagggatttctttttaaagag

SEQ ID NO: 6985 - DNA, 426 bp, Canis familiaris
ttcaagtcatccaaacagatcatggtattaatacccaaacccacgctccagccttccctttccaagttgtttgcgacttcaggcccccactgatttctcattactgatgtggctgtggaatgatctaagggtgtccctggcatttcgggaaatcgcatggtattccctgacaattatttattagggagaaaggtcaggaaaacaaatccaccacctacctgatcacccctgaaatgtggggcttctacagatcttgagaatagctcgaggcattgtctgctcacagcagattctaatccagtggcagagtcgaggcgatccccgatccccgagaccagcgctccgaggaatggggcctgaggatcaggggtcttccctccctgacagtctgcagtggtggtgctggattattggtaaagcttttaa

SEQ ID NO: 6986 - DNA, 637 bp, Canis familiaris
  misc_feature (1)..(637): n = a or c or g or t
atcaggnnctgttcgagctcctgnncntccggaacacatcnntgaatcatgctcnnnagtatcgctggtancagatgctctaccaggctggcgtctttgtttcccgttcttctctccattgctgtcgcatccgtttcacatgggtcctggccctgctgcagtgcctcaacctggccttcctgctggtggacgtgtggttcagcttcctgcccagcatctacctcgtcttcctgatcattctgtatgaggggctcctcggaggtgctgcctatgtgaacaccttccacaacattgccctggagacaagtgaccagcaccgggaatttgccatggcagctgcctgtatctccgacactttgggaatctccctgtcagggctcctggccctgcctctgcacgacttcctttgtcacttgtcttgacactctggcttcccaggacatggaaaacactaacctaggcctacactgacaggcgggcgagcgctggcgcacagcccagagcccactcaccagctctgcttcagacttcccaagggcaagcagcgggggcgcagagaagtgctcaggtcccatcccccctttgagcaagagcccacggtttttgcctactcccaggctggcctcggggagtttct

SEQ ID NO: 6987 - DNA, 544 bp, Canis familiaris
  misc_feature (1)..(544): n = a or c or g or t
ctgaggatataaatacactcgcctgttttgattgccaagttgctttttctgggagtagtgatactgtttagaccacaaatcaatgcgaatagactctgataacatgttcccccactagaggaataagagtttcctcctgaaaataattaggcagacaacactgatatggtagggccagtcttctccctctagtgaaataaactggccgttcaggggaacagtctcaaatgaataacgagaatatccaggaatagacaatgggtgaccactgatactgaaactatcctcacaaatcttaagaaagtactgcctcagagggaagcaggggcagaattttctcaggtgattgccctgcctcgttctctgcattctgatccccaagagatagtcttatcataggaacaaaaacactgggctcctctgccaaagccaaattttcatacacttctagaaaagcaggacgccttaggaaccagctgaaagttctcatgtaaagatgcttnnnnnnctttctttctttcttacagacagcttcaggatcact

SEQ ID NO: 6988 - DNA, 567 bp, Canis familiaris
  misc_feature (1)..(567): n = a or c or g or t
caaaacgtgaacgggttcagcacactcggggaaaacatcgnngacaacggaggggtgcggcaggcatacaaggcttacctcaagtggatggcagaaggcggcaaggaccagcagctgccagggctgggactgacctacaaccagctgttctttatcaactatgcccaggtgtggtgtgggtcctaccggcctgagtttgccatacagtccatcaagaccgacgtccatagtcccctgaagtacagaacctggcagccttctcggaggccttccactgtgcccagggcagcccgatgcacccgcaccagcgatgccgcgtctggtagccacgggcaagccactctgccatggtccacgcgcaccggccacaggaggccaggcatcccttctgcgtgcagctggagcagcgggccaggccagcacgcatcccaccccgcgccgcctggagtgcagcnnnggcaccccggttaagcggggccacctggtgccctcggcgccccagccctgtagacgtgtttaactgtctgcacccactctccaaagtgtccttgtcagctgtccgcaagc

SEQ ID NO: 6989 - DNA, 633 bp, Canis familiaris
  misc_feature (1)..(633): n = a or c or g or t
agnagcnagccaagatagcaaagcnnngacttaagctgggtttgctnannnctgatgccaactgtgagatcaagaaatgggaggatcaggaaaatgagattgttcgaaatgggcggaacatgtccagtatggcctattctctgtatttatttactagaggagaggggccactgaaaacttcccaggatttaattcatcaactagaggtttttgctgaagagggcttaaagcttgcttcaagcgtacaagttttctcaaagcagctgaaagatgatgacaagcttatgcttctcctggaaataaacaagctaattcctttatgccaccagctccagacaataactaagacacctttgcaaaatcaagtgtttctaaagattgataagtgtattataaagacaagatccatgatggctattttggtccaacttctctcactttgctataaactactaaggaagcttcagatggaaaataacagatgggtctcagttacaaataaagactccgtcgatggtaaaacttgagaagcttttggggtcagatctctggaacagcatggagcaaagctggtatttttagaaagcaaatgatcctttatattttcagaaatttaacaattttataaggaaa

SEQ ID NO: 6990 - DNA, 638 bp, Canis familiaris
  misc_feature (1)..(638): n = a or c or g or t
gtagtcatagnagacaagggtgtngtcttgaggagccccagnnaacatgccctggactgggactctggcnnctctgangtgtcaggcagcacatgnagagaggaagaattgcctgtactccagcacccatcacccccagcatggcccccacatagacaacgcctctcagccagtggcattcccctgcccagcagagcccctgcggccagtgcaccacctgcccaccggccacgtcccaagtctaccccagatgcctgcctggagcattggcaggggctggaagctgaggactggacagcagccctgctgaacagaggtcgcagtcgccagcccctggtgctgggggacaactgctttgctgacttggtgcacaactggatggagctgccagaggcagcgggtgagggggacaatggtggtgggccccgtgcccgtgctcgtccccctcagttcttgcttgggctctctgagcagctgcggcgccagctggccagggcacgccgggcggctatggcgggaaagcgactgtcgtgcccacctcgcccggaaccggaactgcctgcagatgtctcacgctttgcagccctcatgagctnnnnnnnccgccaacctatcatctgcaatgatgtcagctacct

SEQ ID NO: 6991 - DNA, 559 bp, Canis familiaris
  misc_feature (1)..(559): n = a or c or g or t
gatgaagaacgctcagaggaagatgnnncgcctggggaagaannnnnnngnnnnnagacacgtgtttgatatgaagcccangcacttgctctccgggaagaggaaagcgggtaaaaaggacaggaggtagtgttctgcagctgcagtggtctggctgtgcggggtgtctccagcccgccaggcgtgcggtcacggggtcggagtcctggcccatgaactgcagataataagcaaacctgaagctcttgttgctttgctcacctggggcgcgcggctgtgggaggtgctgttgctgcctcgcagcccaggtgttccgagcagacggtgggtgtggcattccacggagccttgattgctccagatctacagaaccagaaagattggttgacgtgaacgtgtgtcttactcttttctgcaagagggaacttcgaatttacgtaggtctagtggggttttttttttgtgaggaaagcccctctggtggtgggcgtgggcccagggctgccagccatgcctgcctgcagcagagcaagctccagcgccggctgattttcccatc

SEQ ID NO: 6992 - DNA, 533 bp, Canis familiaris
cttatttcatgtaactgataatttaattttttttctttgtgtggtgttagtttttatcaaatgtcagcagtttcaagcctaatatttatgacttcatattagaaatttggagataaagatacatcaaggagttatgttggcataatcttaatgagtcttgtttgtattttagaataaaattagaaaaataaaattattctttgcactttttctccctgatttttaaataccttaacctttgaaatggatttctagtgattttttttttctagaaagaatacctcagttaggaaaatatttcccagctgattagattagtgcttgtgagccacagttttcagagttgcttctctcataatatgtgtcttagtacaggaatatttatttattatgatactatgcaaatgattgtctcctgttaaagaaattaagtggtcctgtctgtgctattgagaatgtgaatatgattatcttttgaaggctgtattactgcagaaaatcacccactcctgggtcatttggtccctgtgatt

SEQ ID NO: 6993 - DNA, 601 bp, Canis familiaris
  misc_feature (1)..(601): n = a or c or g or t
aatcaaagagtcancatgtaccaaatcccaggtcagcagctgtgcacttcagccccctgactctgagcctgttggtatttgcaaaggtnctctgggtcaaagagaattagaaaagttcgtctccgtgacttgtcacttctttgaaccacaggttcctgcacctggagaggaaaatgcttctgctagccagggacctgtggacctccctggggtgggagagttccagcagaaaaacacagctcctaccaactcaccctccaaagctgtgcctaagggatctgtccaacatctccctgacttagatgatgagaagaagcctgagggtgctcaggaaaacagccctgtcgaggccttccctgtgaagctagatctcaccacagatcctcagggagaaagcctggatgtttccttccttttcctgggacctatggagcggaagctggttgttctgcctttccccaacaaagaacaacgctctgctgagtgcccaggaccagcgcagcagggcaaccttcttattctcccaccatgagaaccatatagaggattccatgggggtacagtgccttgtgggagaagggaggtgctggagaatggggac

SEQ ID NO: 6994 - DNA, 617 bp, Canis familiaris
  misc_feature (1)..(617): n = a or c or g or t
gctcagaataantagacttcttaaaaaccacatagttctcactnnaggnnaaattcangangcggctgctcannaggcctgggtgggtctcgggtttgctgtccccgggtcaacctctgattcagctttgcggtgtctttcctggtgatgccttgttccgaagttctgtgggtttgggtgggaggggaagaaccttcctgaatgtaatctgctagctctgtgtggaggtcctgtgggcttggctcgtgtgtgtgtgtgtgtgtgtgtgtgggtgtgggtgtgggtgtgggtgtggtgactgcctcttgcttgctcttgtgtccgcccgactgctgaagccttgccttgtgcatctgtagtgctgcccggagcccacctttgctctgggcgtcccggccccttcccctgcgacccccatttcgtttgacctttaggtaaatgtggatgacaagctcctaagcctctggctgtcaggtgcagggtgtgctaggcgtgctctccaggggccctggctgccgccctgcctctctcacttggccacctcttctgttcactttaagttgccaggagacaagacatgcagttactattaaatagacttaatgactttttggttt

SEQ ID NO: 6995 - DNA, 647 bp, Canis familiaris
  misc_feature (1)..(638): n = a or c or g or t
tcagcacttgttcctcggnctcccagccctggtccnnnagaccaggacctgccnnnnncaacaaccccccagctgtggtggtcagctccccgcaaggctgggctggnnagnngtggnaccgggcccagcatagncttccccnnnnngcggccntnnngnngacagagccctcgnngcccccttcagctccccgggagtctgatgaggggctgccttgccccggctgctgtcttggccctttcagctttggcttcctatccatgtgccctcgccccacaccagctgttgcccgctaccgcaacctgaactgtgaggcgggcagtctcctctgccaccgagggcaccacgccaagcctcccacacccggtctgcagctgcctggggcgcgctcttagcggtggggcctgtggtctctggcctccaaccttggccttcaggatgccccgtgaggacagagcacacacattggatggtgccagccccagatgggctgaccgcctcctctccccacatagaggaacctcagcatggactcacgagacagaacatttcctctctggcccctgggcttgctctcccgtgggcgatcactgaaccagacaaagcattgctgacacatgagactaacacgtgcaaattatttaaaa

SEQ ID NO: 6996 - DNA, 690 bp, Canis familiaris
  misc_feature (1)..(690): n = a or c or g or t
agagaatccacannggtcaaaaacccttngagtgtacccattgtngaaaaagcttcagggccaaaggcaatcntgttacacatcagcgaatacacacaggagaaaagccctatcagtgcaaggagtgtgggaaaagnnnnnnntcaacgaggtagtctggccgttcatgaaagactccacactggacagaaaccctatgaatgtgctatttgtcagagaagcttcagaaatcaaagtaaccttgctgttcatagaagagttcacagtggtgaaaagccctatagatgtgatcagtgtggaaaagccttcagtcagaaaggaagcttaattgttcacatcagagtccacacaggcctgaaaccctatgcctgcacacagtgcaggaagagtttccacaccaggggcaattgtatcctgcatggcaaaatccacacaggagagacaccctatctgtgtggccagtgtgggaaaagcttcactcaaagagggagtctggccgtgcaccagcgaagctgctcacaaagactcaccctttgaccactctcttcaaaggaagttttctttatgaattaaaagtacaaaatcctcagatcaagcaacctatccaattctatggaatgaatggagannnnnncagaaagaccatcattgggtagggcaaactgacttttccctttcccccnnnataag

SEQ ID NO: 6997 - DNA, 518 bp, Canis familiaris
  misc_feature (1)..(518): n = a or c or g or t
ctggtnnctggaggagctctgcctggaagtcaatgtcaccacctcccagagcgccacccttgatgcctgcagctttggggtcacgggtttgaagcttcagggggccacgtgcagtaacaacaagctgtcgctgtcccacgccatctccacggtccttcttctgacgcagctgcgctgggtcaagcagaccaacgcagagagaaaggctaatgtggtgnnnntgcccgtctacctgaacttcacccgggcagacctcatcttcacagtcgactttgagatcgccaccaaggaggacccacgcagcttctacgagcgcggcgtcgccgtcctctgcacggagtgaaacgaggctcccttcgttcccctttctgtagtagtaactctatttaatgtttcttcatcattaaactgtttggaagaagtggacgtgtcggaggaaagtcgttagtttgagttcggaggaagcggaaaatgaaggctgctggccgggagggtaggagggctgcgtttggtgctgc

SEQ ID NO: 6998 - DNA, 614 bp, Canis familiaris
  misc_feature (1)..(614): n = a or c or g or t
tcatcgtnntctcctccctgttgaccgatggctaccagaacaagaccgagtnntcaaagctccactgcgtcctcaatggcaacaatgtggcctgcagcttcaccgtannagccggcctcctggctttcttcagctgcctgaccttcctcgccctggatgcccacgagagccgcatcggcagcacccgcttcaagacggccttccagctcctggacttcatcctggctgtcctgtggataggcatctggttcgtgggcttctgcttcctggccaaccagtggcagcattcaccacccaaagggttcctcctgggaagcagcagtgccaaggccgccatcaccttcgctttcttctccatcttcacctggattttccaggcctacctggccctccaggacctccggaatgatactccagtcccttacaagcgctccctggatgagggtggcgtggtgctgaccaccctctccccgccctctgccaccagccctgtgaacacacccaccactggccccaacaacctgagttatgccggttctgcttcgtccccctatctgaccactccgaaggccccccgcctcgctatgatgcctgacaactgaacatccttctct

SEQ ID NO: 6999 - DNA, 510 bp, Canis familiaris
  misc_feature (1)..(510): n = a or c or g or t
antngttccatcagtgacatcgantnncatatctatcaagantngcattctttnctcctgcagaagtttgccagccagctcagattacatgggttcatctacctccaagctactccccaggtttgttngnngagactacaccagagggccagngaagaggagaaaggagttgagctgacgtatctcgagcagcttcacgatcaacacgaagcctggcttgttcacaagacaactgagctccactttgaggctctgctgaacattccagtgctggtattggatgtcaatgatgatttttctgaagaagtaaccaaacaagaagaactcatgaaaaaggtaaacatctttgtaaagaatctgtaactggtactaggatgttctggccatgatctgggctaactttctaaagctggaaaaatcctgagtcatgcaccttgctatctccttttacccctagagtcctctgactctcatgtctatggttggtattagtcttcgactttgcaatta

SEQ ID NO: 7000 - DNA, 698 bp, Canis familiaris
  misc_feature (1)..(698): n = a or c or g or t
tccaacccccaagacttccannntcagcacttcctnnatgagnaggnnnagttnaagaagagtgatgcttttgtgcccttctccattggaaagcgatactgttttggagaaggcctggctaggatggagctctttctcttcctcaccaccatcttgcagaacttccacttcaagtccccgcagctgcctcaagacatcgatgtgtcccccaaacatgtgggttttgcgaccatcccacaaaattacaccatgagcttccagccccgctgaacaagggctgtgcaagggccggggtatggggagaagctaaggggagtggggaacaggggtgtagctactggggggctgcaggggtggggctagtaggagggaggtggcttttggagaattatagggcagggtgaataggagaggtagaggaaaggaattgactccatctattgatcttgttagagatggatccttaagaggtggggtaagaggaagggaaactttatactatactgttgataataataatgcgtattatttattgaatcaaactctgtgttagttctgtgctaaaaggtcacacacttacatcacttaatgctcacaaacccatctgccagtgttcatgcccattttacaagtgacaaaacttaactgattcccaaggaatctacagcaagaacgaaaaattcttttaataaatgagt

SEQ ID NO: 7001 - DNA, 597 bp, Canis familiaris
  misc_feature (1)..(597): n = a or c or g or t
gccagaaatcagcagctgccaggggcnngcgtcaagaggtgatcattacagaaagtacctggttctagcaactctgcctgtgtnnagcctctttggctaaagatccctatgaagggaattgccttctctccagtggagggtggaagcagtnnngagactcctgagggtctggcgtggccggtgccaggctgctgggctgagcgccagcattgccatccactgaggctgaaggctgctttcccactcacttctcttcccccacatcctggtcagatgctcccccaacctcaggcctgcagaccctggccggttaacaggatggcccgttaacccctgccaggctctcatcttcacaccttcattcagaactcctgactcacttcactgagctgggagctgcaggtttcttacctctgatctaccagagcagatcataggacagaaagggaaggatcggggggcgcctgggaagctcaggtgatgaaacgtctgccttcagctcaggtcatggtcccagggtcctgggatcaagccccacattgggcttcctgcttggcaggaagtctgcttctccctctccctctgcctactgcttcc

SEQ ID NO: 7002 - DNA, 694 bp, Canis familiaris
  misc_feature (1)..(694): n = a or c or g or t
ctggttnctcgtaagaagcttcagctggnngggattacagctctgctcttggcttccaagtatgaggagatgttttctccaaatattgaagacttcgnnnncatcacagacaatgctnatannagttcccagatccgagaaatggaaacactgattttgaaagaactgannnnnnagctgggtcgacctttgccactgcatttcttaagacgggcatcaaaagctggggaggttgatgtggaacagcatactttagccaaatatttcatggagctgactctcatcgactatgacatggtgcattatcacccttcaaaggtggcagcggctgcttcctgcctgtcccaaaagattctgggccaaggaaaatggaacttaaagcagcagtattatactggatacacagagaatgaactattggaagtcatgcagcacatggccaaaaatgtagtgaaagtcaatgaaaacttaacgaaattcatcgccatcaagaataagtatgcaagcagcaaactcctgaagatcagcacaattcctcagctgaactcaaaagccatccaagagcttgcctcgcctctgatgggacggtcgtaggctgccgtggccctggggggagaatgnnnnnnccgtgcacttnnnncttactgatttggannncttcactttgtatatagtccnctggtctatttcatga

SEQ ID NO: 7003 - DNA, 643 bp, Canis familiaris
  misc_feature (1)..(643): n = a or c or g or t
tttgtttaangcaagnngccaaagtgtctcctcancagnnacatnnnnnacagtggttgccatctaagaccgcnntaccctgcaatatnnatttccctagagcgatctgcattctcctgtaagcagggacgcttttgtctgcaccacagaatcacacaatctgatgaccattcatggaaagctgctaaatagcctagtttggggagtcttgcatagagctttgcatggagcaaatacgattaaatcaggttcagttcctccagctctctacaagcacagggcttagactgcaagcttccttgggctttctcagtgtgtatatgattttactaacatattgcggcgcctgttaggattcagtgttcatggaaacaaacctcacatgccatgactctggactccattgtttttggaaagcagggctcctccacctgctagtaagcccatgtggacaaatctgaatgtctttcctttacacttgtctttaaataatcaaatttcaagaagcaatttgaacatgtttctgttgcctatgtgtttgtgaaatgtatttgtattagtaggcttccatattgcatttaacttgtttttgtaactcctgattcttttctttctccccccctccccnnnnnnggatactatt

SEQ ID NO: 7004 - DNA, 671 bp, Canis familiaris
  misc_feature (1)..(671): n = a or c or g or t
agagtatcactcccagaagtctagaagaaaacttaagttttcagacttgccttttcnagggagaagagcttcttctcttgacagccttgccgttaacgtaaaggttatcaaagagccagatgaacggattattttaaggaaagattcaccatcatctttagattcaagtaagtttggaaaaccctcgcccagttacaataaccaaggggatgctgatcttcacccggaagcttcattggccaccttccagcactccagatccccaagccctcttctggatcagcccgttttccgagaaaggttcaacccttattctcagaacacgtggaggaagatccatgaaagggtgtgcagtctcctgacatcccacagagctcagcaacacctacacaaggaatatcctatctctgaagcaaattgtatctttgaacaaccaagctacctgctgaagaaatacccagtgcatgaacagagatatttttaagctgctgtcttatgggaatctgaaggaaagctggaggaacatcttgaagatctctctcaaggagccaacccccacatccttagagaaatgaacaaccatttttgttatgtgtatcaaatcaccagggtctcacccctttcaaatcaaaccctgtactcagtcttttgtggccaggtaagagtcattg

SEQ ID NO: 7005 - DNA, 577 bp, Canis familiaris
  misc_feature (1)..(577): n = a or c or g or t
gttccaggactaccaccaactcnagtnnagctgctctatccagtgtctagatncagcaatgtcaaatccctccagcaccttngcagattccgaatccgacagctcgtccggatagatcacatcccggatctcccactgcctaaacctctgatctcttatatccgaaagttctactactatgatcctcaggaagaggtatacctgtctctaaaggaagcgcagctcatttccaaacagaagcaagaggttgaaccctccacgtagcgaggggccccctgctgatcgccaccaagggcatttgttgccaagctccagttttgaagaaccaaatgaagctactgtggaagagggagcaaggagaaaggagggagttggaagggctgagatcctccgcgcaaagactttggttcccctgcagccctggggcttgggagaagcacacaaccacactctctgagcgggggcttcacctcttcacctccagcccctgtggtatcctggaactggacaagctccttggaacactggaagaagtctcaacactgttccttttttnnnagttttgttttggatattt

SEQ ID NO: 7006 - DNA, 382 bp, Canis familiaris
  misc_feature (1)..(382): n = a or c or g or t
tttttncttttgaaacttctaaacatacttttgagcaggaagatacttaaaaatataattatatggcttcactaatatgaaaaatggcttatgaactaaccgagtacatcttaaaatggccaagtgaaatttttgtgttttcatgccctgtttttctttgaaattacatatctcagaaattagctcattatctgaaaaaaattatgaagaactggtgaattataatataggggtattgccactgaatggactgtttgatntngccaagcaggtaatgaacagtgttgttgtcaaattcactaagcagtcatcttaattaggacacatactaagggacattactccagtagtcttttgtatcctggtcccatataaattattt

SEQ ID NO: 7007 - DNA, 415 bp, Canis familiaris
  misc_feature (1)..(415): n = a or c or g or t
cttttacccaccatgtgannncggacaccactgacatcaaagatgaggagnnctccataatcatccagaagaaactcaacatcgtcaggagagcctttaagggcacggaccgcacacacgtgggagttcacatttttggcttattcatcgagggagccaggtggaatcatgaacaaaatgcactagaagactcgctgcctcgtgagctatgctgcgattttcctgaaatctatttcttgccaacaaagatttctactgaaacaacaaatacttctgagcagagagattcagaactctacacatttgaatgtccagtttatcaaacacctgagcggtcaagaattttgacaactggcttaccctcgaactttctaacatcagtgtatttatccnnaaggagacctcctnnnnnnng

SEQ ID NO: 7008 - DNA, 594 bp, Canis familiaris
  misc_feature (1)..(585): n = a or c or g or t
tttcntctactactttntaaaaaattccattnnatacntccatttaantcaaaaggaaatttttaatccatctcaaatttatttgaagatgttgtaagatttaatttttgcagatagttgaccaattggttcaatattttttttgggggggttcagtatttnaagccatttcctcactgatttgtaatgctatcattgtagaatattaaattcccatgtgtcttgtggtatgggcctatttctgtgccttgcagtttttcctgcactattttaataattacagatttaatcagcattaatatttggtatacaatttctccaaattctgtcaactataacctccagaaaagtacacaaaacaggtgtgcagtttaatgggtaaaacaaacagctatgtaatcacaagccagatgcagaaaagctactgccagcattcgaatctccccaggtaccctgtggataccctatttatccctcagaggtaactactatcctgaagtagtacttccccctttaaaaaaaaaaatggttttaccagttatgtatgcaataatatggttaatttgttttgctgcctacttttgccttataaaa

SEQ ID NO: 7009 - DNA, 541 bp, Canis familiaris
  misc_feature (1)..(541): n = a or c or g or t
agccccctccccatcannnnnngagctgtggtcccgagggnngcagatctgctccgagttactccgggaggccaaagagtaagggatgcgccagttctgttactacgaaaaggacttttcttaggaccagttgggaagggtttgacaactgcaccagggaggccttcctcctccttctctgggcagccagcccttccagggggcccccccaagccctccaagtcaaaggcgaacttgacctgagactgtcttcagcctatgcatcccccaccccccccggccctctcacctgtggagttgtcgagctttctacgactccagtgacttctccatacagaacctcagtctgtcaccccttggctaggcgttgcgctcttttccttacagacaccccatctttcaggattgcgtttctccaacgtgtggtccccttcgttgtcacagatgcccactggccacattaaaatccagacttgtgggggcccctggtggctcagtggttgagcatctactttcagctcagattgtgaccccagggtcc

SEQ ID NO: 7010 - DNA, 557 bp, Canis familiaris
  misc_feature (1)..(557): n = a or c or g or t
gggcgnnttccntgtgcncggctccatagagcccagcggnntgnnaggtcnnngctgggcccctccccgcctccagactcgaggcntgtctatcacaccactgtggtctgagaacccatggggtgcaggcccactcggcccccggctttccctgagccgggcttcccggaggagagtgtggaggaggcctccttgcccacggcccagcgggggccggagggagcacctggtgggagaactcagggaagtctccccttttaggggcgatggtagctctgcccaggggccacagccaccaggctggccccaggggaccccgtgaacctggagcatggcccccctgccccggctggggggtggagcacccacggaggttagtgcacaggatgggagtggggaaaaggcagacgccctcccctccccagagtcgctcctctgtggccctgttcagagatggacagacggataagacatagggagggggagatctcagccctctctgtgccccggggcagggaggggggcccccagctccaccaaacgaagcnnnnnngaga

SEQ ID NO: 7011 - DNA, 231 bp, Canis familiaris
  misc_feature (1)..(231): n = a or c or g or t
caaggggtgtacgtatgnnngggtctccaggccgtagaccctatacttgaagttctcttcattgtgaatngaaagtgatctccttcgctttcttacctcctgccccctccccacttgcacgtgacccgacgccccttgtgctggccgactgtaatcctgtgaggcagtggggccgacgcttggtcttgggtcagggtggttgaatgtctttaggaaaagaattcaaattgg

SEQ ID NO: 7012 - DNA, 603 bp, Canis familiaris
caggacatcgtgtaccgcaccatggagatcttccagctcctaaggaacatgcagctgccaaatggtgtcacttaccatactggaacatatcaagaccggctagcaaagctacaagatcatcttcgccaactttccattctcttcaggaagctgagattggtctatgacaaatgcaatgaaaactgcggaggaatggatcccattccagtggagcaactaattccatatgtagaagaagatggctcaaagaatgacgatcgggctggcccacctcgttttgctagtgaagagaggcgagaaattgctgaagtgaataaaaaactcaaacagaagaatcaacagctgaagcaaattatggatcaattacgaaatctcatctgggatctaaatgccatgctggcaatgagaaactaagctggtatttaaatttccggctttacacatgttataccattttttccccctcaagtattttttccctttgaaaaagattatttatctgcttttattctacttaccagaagtaaagttcctatttttacattgcagttttacatcagtgttcactggcagtttgtttttttttaagctattaattctaca

SEQ ID NO: 7013 - DNA, 627 bp, Canis familiaris
  misc_feature (1)..(627): n = a or c or g or t
acttttgcacntcgtggcttttgcaagtgttgctgtttctgcnnggtgcatcctcctctacaccccattgacccaccatctggtcagtgcgctgtgtatccttacagctcagacaaaaatctcctcctcctcttagatcagatgatagagcacccaggagctccaggggtcctggaatagcgagtgatcaatcgtgatgagtgagcagaaaactccgtgtagagttctggggtaactgtttctgaaataagtggtttctttttgaataacgatactagccattgttcacagtgcacctgtgtatgagccaagacatcagtcttctgctcttgaactagaccttccaccatcaactctcttggggctctagtttgccaactgcagatcttgggttgggtcttgtcagcttccataatcacatgagccaattctttataatctattggtgctttttctatgcatctatacagtaatatgcatccagaaagttctatggatttccacaaactgaacatatgcatgtaaccaacaaccaaatccagattcagaacatccccagcaccccggaagcgcccccatatgtctctttcaatcatcttccacccnnnnnagggtaaccactttcct

SEQ ID NO: 7014 - DNA, 614 bp, Canis familiaris
  misc_feature (1)..(614): n = a or c or g or t
tnnggatgcacgcagannncagagccntgtnnaacagtnnagcccacgtcccacaagcaagagctttactggcctccgtagagaataatgtttattnctgcattcgaacggtcaattcctcatggagagtccatgttgaagtttccaagtcaaagggcaagcacctcatccaccacggagagagaccctgaccctgtgccagcctcgcggggagcagaggtgcagcagtggagggagggaggctgcttcccgggggccgtgatgggagctgacgggcacagggtatgggatgagctcacggctgctctgggcagtgagatccggctgtgggggtgaggggcgggggctcagacaggggagccaggcctcctgctgggggcgggggctggggacactgggtggccctgagctaggctgtggtgagggagggacagggtcctccttggccaggccacctcgggtggggggaggccagctcacagggccgtgctgcctcctcacaccagggaagaagaacggatgcgctccctgacccggaaggcccttctgcccccatgggctgccctcgaaggtgtccggaggccaagaaagcctaagagggccatagccacttg

SEQ ID NO: 7015 - DNA, 635 bp, Canis familiaris
  misc_feature (1)..(635): n = a or c or g or t
atccatgatgcagagagtgccctccgcatnnnagccaaagacaaagaatgtgttgctaatcatatgagaacagtagaaaatatgcttcataaggtcagagatcagatctcgctgtcacggactgcggcaagtaggaatgacttcaccctgcagctacccaaactccacctggagacctttgcaatggaggggctcaagggcggaccagaggtggtagcgtgccaggctatgattaaaagtttcatggatgtctaccagcttgcaagtgctagaattgctacattagagaaggaaatgacatctcatcgaagtcacattgcaacgttgaaatcagaacttcacactgcttgtttacgtgaaaatgaaagtttgcaatcaacaggatcacgagaccattcaaatctctccattccttcaagagctgctcttcctgctgacacagttagtgtgggggattttttgccattgaaagctgaactggatacaacttacactttcttaaaggagacatttttaaatcctctgacgtcatctcactcctcttcagtgacaatgtctgctaatgccaaacgaccaacgcagattggataatgactttgtgaaattaaaaaaaaaaaaatgcaggaagagttaac

SEQ ID NO: 7016 - DNA, 537 bp, Canis familiaris
  misc_feature (1)..(537): n = a or c or g or t
tatnctcttctagattcattgtcttctagtggaaacttgcagaggaaatggatcaacagatggaatnctctggtgttcttgagttgtctaaagcttcactcagaaagtgtatgtgacttgactcggagtcattttccctttgaaattattttaggcacatattggccttagtcttttcactctgcaagtactgtgtccatacatggtgtctaaggcaatattatggaacagctataaaatgtatgaggctgtccctggccacaccacctgtatcagtgaatttaaagtgtaattgggagaaaaaaaagacaattttaacacaatagttgacatagtagagtttgatgaagggaaacttaaatccaaattcaggattcagcactttatagctaatattttaaacattttaacactgcgcatatgtattctgagactcatctttctcatccattctctggaagtaataatactttccttgcagttattgacagaatttgaataatcttgattacacataatatggaaatacataagaaa

SEQ ID NO: 7017 - DNA, 684 bp, Canis familiaris
  misc_feature (1)..(684): n = a or c or g or t
aactgagagactaanganttaaacccatccaattccaaacattagaaataaaatcagttcctagaaaaacatatnnnnnnggagaattgaacccagacagtnaanagcactgaaacagaataaacttacaactttgcagttggactcattagcccattcagcagactttgaatattctgggagacattggtgttacatgccatagttacaatggggaagctgagttaacgtagtggagctccttcagtttgttactcaaaaccaagctttattccattatgtcatggtgcaccatcagggaaggtgggtcttggtatgtatttctaaaacttctttaaagccagccattagatataaaaatcttctctgggaaagtctaataactccctagagaataattgcatttcctggtgagtctatcatttaagaagacaacttggaattttagtttctatagtttgcaatctggtacagaatggtttattttccacatatgaaaatgtgcctaatattggatgtgttttttccaaattatactttgcccacatatgtgcttttcagaagcagtggtttaaagggtttagagccttattttgaagaaaaggaaaaatgcaggcttactgatagaatgagaaaacaagttctggcaagtcttactgtttcatcattttttgagccttttaa

SEQ ID NO: 7018 - DNA, 295 bp, Canis familiaris
  misc_feature (1)..(295): n = a or c or g or t
cccgaccattcctcccagnnngnnnnntgcaannngnagtccntgnnnnggggnnnnnnngncnannnnnagtatgtgttccccgggtnnngagcctttgatgccccgaactccagcatgatgcnnnnnaggtgannngcngnnntctggctnnnccctnnnnncagtcttcccaaannngaggaatgaggacagggaaggaccatccctgaggccccagagaggttntgcagttccctctccagcccccacnnngcttctcagttcnctcagctgctggaaggggaagaggaga

SEQ ID NO: 7019 - DNA, 611 bp, Canis familiaris
  misc_feature (1)..(611): n = a or c or g or t
cccccaaacacagtagacactccgctgacgtggcctggcannncggggggctcancttccccatggttgttggcctcggatgatcagcgtccagtgtgatggggacaagtgtggcagccggtatatgtagcaggagggctgctgcgttggcaagaacaacacaaaaggggcctgggggtagtgcgtgaggggatttctatgttctctctctttttttcatttgggatcatggggcagggggctctcattctctctggcattttcgagttctcctcactagctccagtgaaaggaattgaggtcagcagagccattatgaccttggagacaaagggcgnnnttctcatcctatgcagctctctagaaatacattacatgcccagcattttgtgtgtttgcctatggaaactgctgagatggggttggcggttccatctgcggtgactcgtgacaatcctgtgagttccagaaggacttgaaggggtaaaggtgaccagaaaaatcctctgattgaaaggcaattacattttctaaattacttccttgatatgatgtggttttgataaaagnnnnntgcatatgtttatnnnnngggaaaatattagaatggt

SEQ ID NO: 7020 - DNA, 573 bp, Canis familiaris
  misc_feature (1)..(573): n = a or c or g or t
ttccctcaagaagagtgatcaaaatggatcattcctggccctgcctcttcaggatgcatacatgaggatctttggggtcatggctgtggacaccctaagagataaaaaaaaaataaacatctttgtacctcatgagatcagattctatcagggtgttgctaatgtctttagcactgcctatcactatgtccacagcagggagcacatcctgcatgttgtgattannnnnnttggctggctctgtgacatcacatctgacatcaccgccatcactacatngttcattgagcctggcctaatgcaggcttcttcctctctgagtggttggaccaagctgataaggccctggccaaagagcagaatcacagagctctctggcagaatgaagagactgtggaggcaatacagactttctgcttgaatgagaaggaagggggaagagattctcaggaggaaaaaaatatacaataccacaattaatgtttcacaactcatcatatatgatagaaagcaattttttttctacctcaggcttcaaaaatactgttattttgcctaaaatactctccccac

SEQ ID NO: 7021 - DNA, 230 bp, Canis familiaris
  misc_feature (1)..(230): n = a or c or g or t
aagnacaagcgctacggcggcttcatgagctcnnagaggagccagacncccctggtgnnnnnnnnnaaaaacgccatcatcaagaacgcccacaagaagggccagtgagggcgcagcggggnnnnnggcttctcttcccgnnnagtccacggaaggcccccctcctgcctgccctcctgccctcccgcccccccccagccccggatgtgctcctcgccnnnnnnntgggg

SEQ ID NO: 7022 - DNA, 144 bp, Canis familiaris
  misc_feature (1)..(144): n = a or c or g or t
aaacattttgcaaggaattaagtaatgaagtagaaagaaggcannaagctctaatatagggagaattctgtttcctgaaagtcttattttaaaaatggcttttgaggggcaccttggtgggttagactcttgatctcagctcag

SEQ ID NO: 7023 - DNA, 524 bp, Canis familiaris
  misc_feature (1)..(524): n = a or c or g or t
actactttttccanncagcttcacccccactccacnnnnnggccgggttgtctatgtttgctcctcactgcttgttctgctgctgattgttctttgcctggtgctggcccagtggccaggtctgctttctnnagacccagggtggatcacagtagttgtgttgctcctggtggtcatcactgggatcactgggatcatctggagacagccacagagctcccatctgcctcattttaaggtacctggtctgcctctcctcccactcctgagcatctttctgaatgtttgccttatgatgcagatgaccgctggcacttgggtccgatttggtgcctggatgttgactgggtttattatctacttcgcctatgggatccagcacagccttaaggaccaaaccatagaccttgaactcagcagtgccagtacattttcggtttgatgtcatcacacctgaattcagtctggttccctacacagtaatggggaatactcttgagcacatgggaatccagggctcctat

SEQ ID NO: 7024 - DNA, 583 bp, Canis familiaris
  misc_feature (1)..(583): n = a or c or g or t
agagccctgnaggtgacctcaggnnnaagccctcgagcccagggatgtnnaggcccaaaggcagcaccagattcagcagccagagtccctggcctgcggcgcatgctgcacctgaaccctatcaccccagcccaggcccccccctagtgtagcccccacccccccacactgccaagctgccggggaccccatgtgaactctgacttcagggagcccggggcttcttggggagtgtgtgggactgggtaatggcttgacacaggagagacccttcctggtggaggggagtcgggcataagaaaagaggccaggctgagcgggtcagctgcccactcctcccacggggcctggcttcccaggaggaaggggcaggggaaggcctggaagacaggctgggcccgcgcccggggggtgggggtgggggggcggtggtggcgggccccagcagcgccctggcaggccctccggaggccagggtgcagccaggcctcccatccccgggcaccggtgcggctcctcgcccacgcgggacgggcggccagctcccttcccttggggggagggaccccaaaaccaagcgaat

SEQ ID NO: 7025 - DNA, 445 bp, Canis familiaris
  misc_feature (1)..(445): n = a or c or g or t
tgaccggaggcatcattttcattgtggnnnnnnntgctgccttggtannctgctcctggtacggccaccagattgtcacggacttctacaaccccctggtccccatgaatattaagtacgagtttggtcctgccatcttcattggctgggcagggtctgctctggtcattctgggaggtgccctgctctcttgctcctgtcctgggagcgagagcaaagctgggtaccgtgcaccccgcnnnnnccctaagcccaactctgccaaggagtacgtgtgagctgggacccccccccagccccagcctggcagcctctggtgtgcccaggtgctgaaatgacctggggggcagagctcagcccatgggtggggtgtggaactggagcctcgcctcatcaccccgcacaccatgtacagttcccagggtgggggtggggtggggtgggg

SEQ ID NO: 7026 - DNA, 353 bp, Canis familiaris
  misc_feature (1)..(353): n = a or c or g or t
ttgttgtaccagaacctatgagtttggtcattacttgccaggggtccattttctcctcnnnnngccaaatnnncatcnngtgtnntaaggggctacaagccacctggctgtccanctttcccnngactgcccagggcngggncagcntggagatggaggttcattcatagatgtgcctgggtcttgtggccaacactggttggnnnnncnancaggaaggnnacaggctattccggacggggcgactggctccccggnnnagcnnngtgttccttnnnagannncgggcttccgtggaccatgtaagcacttaatcatttctnnnntagcctctcttcnnatgnntgtgagnn

SEQ ID NO: 7027 - DNA, 450 bp, Canis familiaris
  misc_feature (1)..(450): n = a or c or g or t
gcggcgcgnngtgnanctccccgaccggactgcaggggcgctnnagcgagagctcccagnnnncccnnnnagagcgncttccagccngccacccccccgctgaggcgcaaggaccccaacaaagcttannaactctgcaagaagagtggggcaggtgcatcccgaaagagacagaagaccccagactgtaacagtgccttggaacagaacgccccacccgcaggtaacgggcacaatgtctgcgaattcagatgccaaagcaccagcgcaaagctacaaggaacatgaaaaatcaaggaaacgtgccaacataaagagaaaatgagacttctccagggtctgagctccggggcgcagaattctgtgatcccccctgataaagaattcaatattgtggtggtatataaaagtatcaggtcaacacctgaaattgtacaccttaaattcaca

SEQ ID NO: 7028 - DNA, 649 bp, Canis familiaris
  misc_feature (1)..(649): n = a or c or g or t
ggtnntccttcagctctacttccggaccctggnnactggtgtgctgtgtccacgttggtgccctgtgctgtatgctgtggctgtggcccatgtcaacagcttcatcttctcccaggacccaaagagctcagatgaggtaaaggctgcccgcaggagcctgctacagaaaacttggctgctggcagatgagggtctccggcagcaccttctccactataaactccctaattctgccctcccagaaggctttgaactatatccccagttgccccctctgcgtcagcagtacctccagagactgacctcagggatgctccaaaatgggctatcagaggcctagtatagttgctacagataaagacatggatacattctcctggggttcaccaacatgtgcctggccagacaaaaggattttgtttcctaagggtgaacaggagacccaaggagtaggaggcttgccgtttgagtttttttggagcagggtgagccctaccattatgttctgatgtctgaagcccaggatctgggccttttgagggtctgtattgagagtgaatggtaacataactatttacccctcttttggggacaaaacagactannnnntctctcctccttctcctgctccagaccaggatatatgaat

SEQ ID NO: 7029 - DNA, 542 bp, Canis familiaris
  misc_feature (1)..(542): n = a or c or g or t
caaattaccactgaaattgccaaagcataaaaaattaatcnnnnntccacagagtaccaaaagaatttctaccgatcctgtagaagccctgcaggaccagctgctgcgctggctggcccaggagctctcccaggaaagtgccaggcgcctgtcctcatccctccccctgcgccgcagcaccatggagctcatcaggctgaagaaccctgcggagcccacggaacagatccacgagcttctgtgcttctggaaaaactcactccccagttccaccgataaagtgcgccttctggcccgtcacctgcgcaggatcggcaggagcgatctctccgaggagctcaagctcaagtgggaggggaaggtgtccactgagccaccgcaccggttccactcagcagggtaaagccaggctgctctttctgttgcccccagaagggtcacagcaggtgctcaggttgcttccctcaacatgccactagaagtttccaagtaaggctgtttgggccaagccttcccccccccctttttttttttgacaattt

SEQ ID NO: 7030 - DNA, 57 bp, Canis familiaris
  misc_feature (1)..(57): n = a or c or g or t
aagacaaactnnnntaccaaacctcagaagtcctatgtggtgggattttctatctaa

SEQ ID NO: 7031 - DNA, 605 bp, Canis familiaris
  misc_feature (1)..(605): n = a or c or g or t
gtacaacagatgcattccatttnaantctacttgagctaaaagatcaaatannagaaaaagagaagtatttgccgatacaacctaaagttaaaatgatttaatctgaatgattttacataaaagttaantctctaacattcccaattattgtaaatagtatatatatttattattttaaatgctacatgttaatatttcatttgcctgtattagaaaaaggtacagtgtaagtctttggcatgtgtaacataagctttattcagttttgctttctaagtgtgaaatgatgaattctgcaggaaaaaaacctccttttttcatacctatcagtttcgcatttgtgtctgttattcaacaaatagtaatagcacatatgtctatttaaccaactatccaagcagcattcacacacatttttatacttaatgggaaagtgtgagttaatatcagaaacattttatcctgatccacagtggagctttagtaattgttttttgttagtttcttcactgttacctggtataaaagtatagataacaagaaattttcgattctcatttagtaagatgaattttagtaattgtacagatgtttcatctataat

SEQ ID NO: 7032 - DNA, 569 bp, Canis familiaris
  misc_feature (1)..(569): n = a or c or g or t
atgcagaaacatgctgatgtctataacttactttgatatnnagcaaaaaataaaaaacaaagatgtactaaggaatggatggatggatagatttttataaagtaaatttagcaaaatgtcagcaattatagaatgtagctggtgattatgtgtgaatcccttgtaaaatttttctgaatgtttgaaaattatgataaaaagattcgggtaggaggatgtgcctgccttctgaccctgtagttcacgatccaattctatgcccagaaacctgtctttgggaacgagaaggatctataagaacattgtgctacaaggatttttatcacagtcatatttgaggcttatatttgtgaaaaattagtaggagtctaagtaggagcccaaaaagggactttgttcagtgctatgctgagccacactgatgtgagggcaagaaaggaaaaaattcagtaatactgatcctgtctttatttgtaatgttaatggtttgctcatcatagatttttacgttaatttttactttttaaaaataccacatggggctcctgggtggctcagtggttgagcat

SEQ ID NO: 7033 - DNA, 689 bp, Canis familiaris
  misc_feature (1)..(689): n = a or c or g or t
gatcatggagcacaannagctgctaaaggtgncctgggannnncagatcggactgctctacgnnnnctttagtgcctgcatgttcggtctctacagcttcatgccagtcgtcataaagaaaaccagcgccacttcggtcaacctctccttgctcacagcagatttgtacagcctgttctgcggattgtttctcttccactacaagttttcaggcctttatctcctgtctttcttcaccatcctcatcgggctggtgctctactcgtccacctccacgtacgtagcccaggacccccgtgtgtacaagcagttccgcaatccttcaggacctgttgtggacttaccggccacggctcaagtggagccctcggtcacctacaccagcctgggccaggagaccgaagaggagccccacgtgcgcgtggcctagggggtggccctcccagcccattgaagtccacgctgtggccacgtgcttgccctccatctctgtattgtacatagagaaaggtatttattaggtgcggtttgcacaggtggactgcaaggtagcaaatctgaaagcctgtaaggggcatgcgctcaccatcgccggagacgcaggccccaagccacctgacttagagagacgcctagctagtatgtatcctgatcacagccctcctgcattaattactgtgaagactttt

SEQ ID NO: 7034 - DNA, 352 bp, Canis familiaris
  misc_feature (1)..(352): n = a or c or g or t
tattttctatcatctcattccttgaactttgacacatttcctgccctctattttattcctgtgtgctctcatgggggagggggcagaatggaggaacaagaaagtctgacctttggcatgctgaagagctgttgaccttgagtgggaggtatgtgtgcacacggatgggttacnnnnntaggtggagaatttagcctcctagtagtcataccaacctcaactctgcatttctcaatatctattatgtgagctactaacttgacctctttcacccatcacccagcatttttgaattataaaattatttcctgccttgttactttgggaatttttaatctctttggttttgttt

SEQ ID NO: 7035 - DNA, 90 bp, Canis familiaris
tgcataagcagaacagcctggctttttgaatgtatttttcctggttttttttttttttccttcctttttttagttgagagatgcagtaac

SEQ ID NO: 7036 - DNA, 550 bp, Canis familiaris
  misc_feature (1)..(550): n = a or c or g or t
aggaaactaggagagcattgagagattcggatagtngactagaaaaaatggctgttggtcatcatcttcacgaccgagctcatgtcattaaaaagtcaaagaacaacaagactggagatgaagaggtcaatcaagagttcatcaatatgaatgaatgtgatgctcatgcttttgataatgagtggcaaaatgagattttgaagtacaaaccagtgggacaatggcgcaacgtggaaaaccctaggatgcgaagcgttggtcatgagaattcaggttgccgagaacttaaaagaagggagaaacctcatcaaagtccagccattgaatatggaagaagatcaaatgtttctgtggacaaactcaacgtcaaaggatctcctgtgaaaatcaacaaaaaataaatagccttgcatttgatttgtttagtcttgattgttttaacagagaaagtaatggtgctgggttatacccatgagaccaatctcttgttcagtcagtactgtacttcactttcttctgatatctgaatgttctcggaagagagcctgct

SEQ ID NO: 7037 - DNA, 437 bp, Canis familiaris
  misc_feature (1)..(437): n = a or c or g or t
gattgatgaggnnnatgaggacnnnagtggcacagtggactttgatgagttcctggtcatgatggttnnntgcatgaaggatgacagcaaaggaaagnnngaggaggagctgtccgancttttccgcatgtttgacaaaaatgctgatggctacatagacctggatgagctgaaggtgatgcttcaggctaccggtgagaccatcacggaagatgacattgaggagctaatgaaggatggtgacaagaacaatgatggccgcattgactatgacgagttcctggagttcatgaaaggagtggagtagataccatcacccacgtagaactgcctgtgccaccttccaactccagctgggccctggggtggcggcaaggggccggggtccccaggatgtgagcttgggtgtgtcctcgaccatgggccctccctgacgg

SEQ ID NO: 7038 - DNA, 680 bp, Canis familiaris
  misc_feature (1)..(671): n = a or c or g or t
ttccagagcancttnncagggactgtnnacatttcgcaaagaggcttgatctgagctnnnnncttctgaggtcactnnnangactgagagcgttcgnnagnctnnannaactcatcctggacaacaatctgctggggaacgacctcgtgttgccagggttacccaggctccataccttaaccctgaacaagaaccagatcactgacttggagtgtctgcttgatcacctggcaaaagtgacaccagctttggagtacctcagcctgctgggtaacgtggcatgtcccaacgagctggtcagcttggaaaaagatgaggaagactataagagatacagatgctttgttctgcacaagctgcccaatttgaagtttctggatgcccggaaagtaaccagacaagaacgagaggaagctttggtcagagggtcattcatgaaggtggtgaagcccaaggcttccagtgaccgcgtcacggcctctccagagcaccactatacacccctgccttctgcttccagggatctcaccaatcaccgaggtgtcctggggaaatgtcgctatgtttactacgggaaaaactccgagggcaacaggtttatccgagatgaccagctctgatggcaagttctgtatgctttagcctatgtcatgagaataaaagaaaatgggcaagtaaaa

SEQ ID NO: 7039 - DNA, 606 bp, Canis familiaris
  misc_feature (1)..(606): n = a or c or g or t
aggtgccacagaatgcnnttgtggccactggcatttggggcaggttgccccgttctgggntcgtggtgacgaaagnnngnctgagaggcacagaccgaatccccaggcagctgcaggcggctccagtcccggtnctgagggtcctcgtcaccacagtcatgtgccttagtaactgtgcccannaagcgtgctgctgcttgctgcaccgctgcttttcctccttgtgttttcccctgccacccttccacacgtcacaactgacagatgactccctggtcttccccggcgcctgggggaggggctgacagtcctctacaccccaccttgctggtctgcagcgggccaaggcttgcctagcagcctggctctgaggccctggtgttgaagggggtggggtccatgctcccagatgcttttgctgacaggctttcgctgtgccacctgtgaatgctgaccagcacgggggtgcagagctcagccaggctcctgccatcctcaaaagacgtggcattaaggaatgcttatttctgttttgtttttgaagccctggggctggaagtcttggagctgaccctgccggcacttctgctcctgcctgagccactc

SEQ ID NO: 7040 - DNA, 447 bp, Canis familiaris
  misc_feature (1)..(447): n = a or c or g or t
cagaacaggngactttctccacccctgacnnngagacccaagtgcactcatttatgggtnnnncacttttttttttttttccttttttctgtaaggcaatcttttagcacgcctgggacttaaccaatggcccaggtaatttttcatttaatggactctggactcaaaaggatttgatccttttgaattttgcacagctctagatataatcccttttgataaaagggtctttgcttctgattacaggagcactgtggaacgactgtaaatatgtttttataattgtgtgtaatgttggtgtgccctcaaaggaaactagtccacggcagctgctgctctctgtacagggccacgatggaattcagaaggaaccttgggagttggggagggtgccgggttggaannnctgtctgttccccacaggccagncnnntnnncagatcttta

SEQ ID NO: 7041 - DNA, 642 bp, Canis familiaris
  misc_feature (1)..(642): n = a or c or g or t
tcataanttcagcataaacatttaannaaagataaggaactcattggttaatactgtatttaaaagaattggtaacttgaatgtgtgtaatttttggaanctgtctaaaaaccaaatacccntgcaaacagatacagtccaccctattctatttaaatattttgctgttttattttatagaaattattttgctgaattcacaaatagaatttgatttacgaagaactttttgtcctgtggtgtgtttttggttttgtttttgggttggttttttggtttttgtttttgtttttgtttttgttttttaattctttgtccatttttattgtttttgtttttgttttttgaaggactgcataataaaattaattctgtgcatagcctgcttaggcatgacactgaattcaggagttcagtcgcattgagcttttgtgcacagaaagatctgaccttaggcccttgactaaagatttagagaaaacaggatgttgacactgtaaaagtttcctaacataatcaatcttgtactttttgtatgttttttatatacatgtatatttaatgagcacaagcttggttgtattttttacaatttagttaataggaaaatgttttgtcaaaaaggctatagttnnnnntgaa

SEQ ID NO: 7042 - DNA, 591 bp, Canis familiaris
  misc_feature (1)..(591): n = a or c or g or t
tnncaagactgagcncaaatcgttttcagaaactngctccacacccancgtagagcccaatgcagggcttgaactcatgaccctacaatcaaganntgagctgagctcaagagttggatgctcaaccgactgagtccccagagcaagtgtgaagcctgcaatggaattgaattgggattttacgcacgaacaagatttcaatagccatttaacccatcatgaaacatagatccatgagttgagagttcaatgcctaaccagtagaagagtctctggactcctctaactcccagataccagatgggaagagcgtgtcaggaagaaaggacagacagtgggcactgattcacagaggccagaggaagcgggttgatctggagttgaaactgcctagttgaacagcggttgccaagcaaggcgtgttcagcattttggaggctcaggaacgagctttccggcctacctgcggtgacaacaaagtgtccctgccgcccacgctggggttccagggtggggtgaggtaagagccagggcattagcacaggaatcagaggcagccggggaccaggcctcttttggggcctaggtgac

SEQ ID NO: 7043 - DNA, 521 bp, Canis familiaris
  misc_feature (1)..(521): n = a or c or g or t
ttattcatcaggaataaaaaaaacanagttttattaaagattgaaaatttgatacattttacagaaactaattgtgatgtacatatcagtggtgacatattattacttttttggggatggggggtgggtggggtgaagagatcttgtgatttttaagaacctgctggcaagagtttaacttgtcttcagcatattctgattgtatcataatcattttctgctgttgcagaggatgtgaatacacttaaggagctcacagaatcccagtagcacaaattgggctttggcaaatcgtgtattttgtgtatagaaggaatttaaggagaggtattacttattttcatattgtattttaactgtttctctgatcaaatttttttacttcctcctcctattcctcccgacctccctccttttccaattcagtatttggagttcaacactgtctctcaatcagatcatcttgatctttttctttatgtcccttcccctccctgagtcccatatcttggtcataaata

SEQ ID NO: 7044 - DNA, 457 bp, Canis familiaris
  misc_feature (1)..(457): n = a or c or g or t
acctccaggaactcnnngagctgtgaggtgcagccagtgagcagatggacctggcacttccccctccgagcctcaacaccctcatctcttagggtgcattagctacctcatggtggctcacacaggagaactgcagttcaactgctaggatttagcacgagagacttcatacctccccagcaacctttctgccacagcagcaggggccatggacggcatggagatggccagctgcannntgagccagaaatgcaaacagaaggtttctagggctgtcagaggccttggctggctgaggtgnggacctgaggggaagaaggtacaccagaatggcaggtgtagagatgaacagtctaggagnnttgnctgttccacttgtgagatgggtngaaatcctcacntgnntacccctctcaaatagacagcctggggtcccaaccaggtcacttcagtcaag

SEQ ID NO: 7045 - DNA, 608 bp, Canis familiaris
  misc_feature (1)..(608): n = a or c or g or t
ctgtccccnnnnctccccatcaccaaaatgtgttcaatctaagacaaacactgtactcagcaactgctcacttcccgttgtttagntcttgcaagcagaatcgctaccattggttcataataatctcgaaataggtaactttctgcctttctatcatcaccaagaacctttctgctctgggagttcacaaggcccttacgcacatcttctctggcggcaggaacattgtgactctcttactctagtctaaactggaaccctacagctgaccctgtggtcaggttcagagccagcagggggagtagcatactcaaaaaataacaataacaaaatagaagcaaaataacagcagctttcatttcaagtgcatgtaccaagctgtgtatgacaatatatcccacttgctagtattaccaggaagtttcacattatttccatggatcgattagcgccacagcctgtccgatttgaacgtaccttttattcttctgtattctctttcctattattcattgtgtgtgtttgtgtgtaacaaagaatgtttgcaaaatgctggacacatttttacccttcattcccatggtctgtaaaaaaggaaagtgtaaaac

SEQ ID NO: 7046 - DNA, 354 bp, Canis familiaris
  misc_feature (1)..(354): n = a or c or g or t
ctggnnncatgtttgtgnnntccccatgnnncacacctcagtgggnnngtcnnngagnncannnnncagaaaatnnnnnaannnnnagctactcacctttcaatatccaannnnngcagnnngtagagcgctgtcatgtttttataaagaccaaagtnnnncatcctcaaatangannnnngtgagtagagattaaccttnnnaagggttttctttctcagataagatnnntnntnnncnngnnnaatgctcnnntcatcnctatgcacttggacnnaannngtggattcaaactggnnnaaggaacatgtgaccttggatttctctcagaannngngccaccttcgagttctg

SEQ ID NO: 7047 - DNA, 657 bp, Canis familiaris
  misc_feature (1)..(657): n = a or c or g or t
gctgctnnngagcgcgggggactcaggcnnctttttctgcagnnnnnnccacgnnnnnnagagncgcacggtgcttcacgtgctaggggaccgggcagattgcaaggctccagnnnacgggtnngtgtatccccaactcctgatccccctgctgggcgctgggctggtgctgggactcggggcgctgggcgtggtctggtggtggcgcagacgatcacctccgcatccgcctcgaccactccccagatttgagccactagtgaaagtcgactcccagaggccagtaaaggaggaggagcctaagatggcaggggacctggaccaggagccgagcctgctctacgcagacctggaccattcggccctcagaaggccactacggttgtcgccagtggttcctgctgatgcctccaccatctatgcagttgtagtttgaagggaagcccttattgtaaacctcacaagctggaggttctccacaactcccggccccttcctggtccctcacctggaaaaggaatgcaccgcgagatagaactgagcactagcttgagtcaggaaccctgagttccaggctatctctttgccactgatcttgctccttcagttacctcatctctcctataaccttcacgtctccttcaccaccagtgccct

SEQ ID NO: 7048 - DNA, 528 bp, Canis familiaris
  misc_feature (1)..(528): n = a or c or g or t
atgtcagnctgttacnnntgccacacaccagggactcggctggggacagggcctacccgtccatgannagacgcactgctgaggctgtgtggcttgcttcagctaaaacatcacccccgcccccatccccaagccttnnagctccgcagacccgataaaaggaaactgtcatctgtgggtgcctttggcaaaatgaggttttaattcttgtgccactgcccacgggtagtcaccccaggggatggcaagaagcaaggtgggnnagtnactagtgcgtggtgggaaccgagagtcgttttctgttcaaactccaactccactgctcgcccccgactcccgcgtgacttgctctttgttaactcgtgcctcagtttccccatctgtaacctggatcaggaggggaagggtggtgatacctacctcacagggttgttgtggggatnnnntgctactttgaaggacatgttgcccagtgttacaaatataggtccatnaaatatggcaggaaannnnntgagcttagagcta

SEQ ID NO: 7049 - DNA, 454 bp, Canis familiaris
atggtcaacagcaaaatgttatggtttatacaacgtcatatcaacagatttctggtgttcaacaaattcagttttcatgatctgaagaaatggtggcatggggagtggagagaagcaaaagagtctgtatgattctggaaacagagaccttataaggaagtgattggggaaaagatgtctctttgtatattaaatagctgtaatgtagcttcctgatgcttgactaattgaggtgttaattctgacttgagaatcttttttcatgaatgattttaaagaaaaatttggattttaaaggtattaaaatatttttgttttgtacgagagtttgttgctctgtatgactcctgtatgcattgtatattgcaatttattactgtcagagatttgtagacagtttcttattttcatattgaatcatgttacttttgtaattcaagtaagcagctgggtt

SEQ ID NO: 7050 - DNA, 475 bp, Canis familiaris
  misc_feature (1)..(475): n = a or c or g or t
cctgccnnnctcactccccaactctcccatcaagttccgcccctccggcctccccacacccctttctgccctcactacctgtatctcaccggcgtgtgttcaccctcccgggtgtgcacacactctcattcacacacacaaatctcaggaacaaacggtcccagagtcctcctggacccctgcccagggtctccgcaggtctctgccccacgcgttcccgtcgctgacaaagccaccagctgcctcctttaagcttggtgctccggctctgggcctttctcgctctctctttttctgtctctctttcttgctctctttctctctttctcttttttttaaagaaaaaacaacaaaaagacaatgaaaaaacccagaaaacgtcatgtgagtgaagagatgtcactgtctgtggtcttggagaactagtctagtagctgaggggaggggtccctctggtctggggcactggcaccca

SEQ ID NO: 7051 - DNA, 500 bp, Canis familiaris
  misc_feature (1)..(500): n = a or c or g or t
gcccaccagaaannngggcttcccaannnnnngtaccctctgaannaacagtagatctgctcccntggcatcccaggnnaaagtttaancttgccactgactggagtgaaaaaagttctccctcctaaggacnnnncaggccctcacatgggtttgcacatgagaaacctcaagccaagagtgtaagtggtcccagaaagtggtggtctcagatgcttgatagacatgcagatcctccctgaatgaaccttgattcattgcagtcctcaatgaacccccagggataaagttccaggaaaagtgagcggcttctggaaaaggtcaccagatctactaggcagcaaggcactgagagcaaaggacatcagcagggatgtggtagacttgcaaaggattcacacattagaattaccaggcacatgtcttaaatgtttaaaaatgatgtaagaaggnancccgggtggctcagcnnntnnnncgccaccttctgcctgggttgt

SEQ ID NO: 7052 - DNA, 427 bp, Canis familiaris
agcacccactagtcaggggagcaagtaattgtgggggcagcagggccccgcggaggtcaactccccctgcaccgcagggcctggatggtcagccagcccgctggaggggttcacatctagcccttttgcctcctgattctctctcctccttccccttcctctgctgcccactgggaatggttcagcagtgataacggggcttccaggtcccaacaggggtgtctgagctccaacccccccgccaatgcagagagcagatccagcctgtgaacttgaggggtggggatagaaggcgcccacagggaggggcccccagagccctagagacagccaagtgggccagctgccaccataagccaaagggtgggggagccccaggtctagggtcctcaccctaccacctgtcccctgggcctccactgcccac

SEQ ID NO: 7053 - DNA, 520 bp, Canis familiaris
  misc_feature (1)..(520): n = a or c or g or t
aagatgtaatcagaaaataganntacgaatgtgtacgcacatatacttgcctgtgaaactgaagtcacctgtcacctctgctttcctgatcattcattagagaaatggattgagcatcctttaaaaaaattattcttctgtctctaaaatatttgcataatgctcaaaatcacagttttggaagtttgaaaagtttaaaaacacagagatgcttttttttttttttttccccacagagatgcttttaatgaagcttttcatggtttggcttttttcttaaacacccccaaatttatatttggctttctgttattctttattcctcaaaaactgttggcttccataggccatctgaaggccacctattaaatggttgtgttagtctaacacctaaaacaatttcaaatctatttaactatggtttatttgaccttattcttttatttttaatgcactgctggtttcaaatataaaaaagaaagaaagaaagataccctaagaaaatatggacaaagtctgt

SEQ ID NO: 7054 - DNA, 217 bp, Canis familiaris
  misc_feature (1)..(217): n = a or c or g or t
cgtgctcctggcacgtagggcagggagcaaggtcnctgtgggcccagaaaagacacaaatcacatcctggggtgtctaagagttgaggctctgtcccatgtcagatgggatgggctctttnnagagggagactggggaagcagaaagaagcctcctaggctgtcaggggtggcccacccagggtggggacagacacaagcttggggcaggnnntgta

SEQ ID NO: 7055 - DNA, 475 bp, Canis familiaris
  misc_feature (1)..(475): n = a or c or g or t
tcccgcgtgtnnggcgtcctcactggacgaggggcgtcgtgatgctcccaggctgggctactacgatacatacagccgccgtgcatgtctgtgtgtgggtccctgtactgactgtgttttgatttgggggggaaatacccaggactgggtcgtccgggtcacaaggcaggcgcatgtttaacctgccaaaccgccgtccaaaccaagctggccgcgccggtcgtatcgccacccgctcggctgagagagccccaggtcgctggacgccctggtcgccccacagtgtagcggctcttagagtctggccactccagtgggtgcgtggtggtgtctggtggcggcttaaaatgtcctttctcgggacgcctggggggctcagcggttgagcacctgccccgggcccagggcgggatctgcggtctcaggatcgagtcccgcatcaggccccctgcctggagcctgttttttcctctgc

SEQ ID NO: 7056 - DNA, 574 bp, Canis familiaris
  misc_feature (1)..(574): n = a or c or g or t
aactnctttcaatatgnngattcagcatgactaccggggcntnnngcatcagtggcnnnnngggatttggattaaagngcagaactccnnnggtttcagaagatngttnnngacgatgcagttggctgggacaaaacctggagcgggtttaggatgagactcgggctgaaagtacactcagctgatgctgatcggctcccctgagcataggaaccaagggacttgttaccacagaagttgggtgaannncaggtcttgccannnnttgcattcctccagtaaatgtgagtgcttaagaaacaaattgatgtagcttttaactgatttcttcaaaggaaaagactttgcccccagccaccctagccctgctcccttcagcctgcaggggaggacgnnnggagaccccagccctgggcnntcatgcagcgccaggctctgccccaacatgttgcctcacccctgtctctaaggtggttttcccatttgagagtttggagctaaggagacttaaaataccttgtacctgctttgacaaacaaggccgtgggatctctgttcatgttctgtgttttaa

SEQ ID NO: 7057 - DNA, 499 bp, Canis familiaris
  misc_feature (1)..(499): n = a or c or g or t
tttcaacaaggaaagatacctcctactnnnnnnnnngctccnnnncctgcaggggaatgatcccacctccccccagnnnnnnnngtcctcctcacccnagtatgaagccagccctccgtatggggggccctcccatgatgccaatgatgggccctcctcctcctgtgttgatgccagtgggacctgctcccagaannnggccacctatgggaggccacatgccaatgatgcctgggcccccaatgatgagacctcttgcttgtcccatggtggtgcctactcggccaggaatgactggaccagacagataaggagagacaggaacctctttatattagttttatattacttgttctacttcaccaggagatcatggtgctgtgactctgggtgttctataacagcatgacaannnagacttgcttccccttcctatcaaagagagaatagtttttgtaggggagtagtaggacaaaaaaaaaaaaaaaagacaactttc

SEQ ID NO: 7058 - DNA, 469 bp, Canis familiaris
  misc_feature (1)..(469): n = a or c or g or t
cngagtctcttcnacgacaangaaannacccattnnngaagatcagtgatcgctttttctttctttttttttttttgttgtttttatggcttttttgtttttaagcactgctccaggagaacaacaatctcaagactgtagcttcttgggagggaagcattggttgaggagcagcattcccagggagtagccgcgtcggccggcaggcgacagacgggtggtccctgtgttcctggaagaagatggagaagcagagtccttcgatgcccgtcctgtaggtttctcagagaccagagcgagacccaagacacagaggaaggtcactgctgctccaagatgcataattgctgacttcaaacccagagaggcaactttcttcttttaggtggaaatacatatttatttttttgtaagttataccattctttcacattagataaaccaagtttttcttggggatctttttcta

SEQ ID NO: 7059 - DNA, 576 bp, Canis familiaris
  misc_feature (1)..(576): n = a or c or g or t
cgtcacannancagaaacgccagnnngagtcaggncntngacacatgaccagnnncacctnnggacttgaagcaggacagtggggtaaattttttaaaaacaaggtggtggaggaatcagatccctcgtacgaagccagcgggaatgcagaatgaaggagccgcaggagcaaagcctggaagggtgtgcccatgtccggggtcccccgtcccccggagaatgtgccagaagccaaacacagccccacacgtcagcagctataatcctgtagggtcagggagaccccagacccgaggtgaccggggaggctgctcaaaaccccacagcgcccaggccccaaccccgaggtcagcagtgcagcagggacacctgtgaccaggacggccagcacgggcgccaggacggagcccctcacacaccagctgggacagcatcgaccctgggggggcagctcagcagtagggacccgaaccccggggagccagagggaggctgtggccggagaccggcagcccgccgcagttcagtggaagccagggtttcggcaaattgtaacctgtcacctgtctgtgtttt

SEQ ID NO: 7060 - DNA, 198 bp, Canis familiaris
atactctgcacgacactgcaatgatggatgcatgctattatacatgtgctcaaacccatagaatgtacagtaccgagagtaaaccctaaggtaaactccagactatggatgattatattgtaaattcatcaatcgtaacaaatgaaccactctggtgggagatgttgataatggggaaggaagtatccaggaaatctc

SEQ ID NO: 7061 - DNA, 414 bp, Canis familiaris
  misc_feature (1)..(414): n = a or c or g or t
ccctgttctgtaaaagtagccagtgnnnnnnnnnnnncagcccagaatggtgaggcnngctatgaggtgttcaccttgtcacagtctagccaaaggcnngactgcgactgtccacctngtgtgttcaatgaagaagggcgtgaccaggctgnncatcaccnngtnnaggctgannagggccagctggtgctgccatcttcctctgttgatatttccgaggattggtctcttcgctcagacgatctccttgagtccatgtgatccccaggtttggtatggggagtctcctgtagatagatgctttttctaacattagtatagagtatttttgaatatcagacaaacgtgttttggaagcccccttatgagtgccattgagagagggcagttcgtggttgtttcttgaataaagct

SEQ ID NO: 7062 - DNA, 215 bp, Canis familiaris
  misc_feature (1)..(215): n = a or c or g or t
ggcctnnagagattctcaaactgtaggtcactgaaaaaaaaatattcttctctaagaggtgtgcacatattgcatcttttaaagattcccacctaaatggaattttaatatattattggttcatgtaaatttttattttctgtggagttttctttgctgtttattttctgtttttttttagactgccatgtacaattaaattcctgcttctgctg

SEQ ID NO: 7063 - DNA, 570 bp, Canis familiaris
  misc_feature (1)..(570): n = a or c or g or t
cattgagactgtttcccnngcntcnncnnctgctccagnnntagctgcaaaatcaaatctgctgcagggaacagcatttgagagaaagaaatnnnnngagttagagnntgaaccgaagaaaccattatatagggataatgaagattatgattttagagaaatatatctnntaaaaccaggctaggatcctgaaaccctgggttctgatnctaccttgtgcttcaattaatggggtcctaacaggagattgagaaacaccactgcttcttacctcaccccacttagtagaaccaccatatgaactgaaaccatttcttctggcaaannaggctccccgnggtannncntnancgctactgggacagctaacatttgatcctttaccaccataggatttatntnnnaaataatcannnnntttcttacactgtcagaggnnnatttnnnnnntttgtaaaacnnngttgttnnnnctttnnnnngctnnnnannnnnaaaatnnnnngntttttgtatcaannnnnnattttgacttttnnggccagtggtttgtgcaatcannnnnnaatg

SEQ ID NO: 7064 - DNA, 464 bp, Canis familiaris
ctccaccccccgcgtgtcctcggggagtccggggtggggaggtggccgggtggagcagagcatcggctcttcggccggcccgtgtcaaggcggggggtcaggaggttcgacgctgagctgtcgctgagtgttgtgtgtccgtctctttttttgccccccctccgagttgtgcggaggcgccacgaattggacagatcgggaggaccgaaaactgtcagtgtcatgctggtcggcccaggcatgtgggcgtggattacgtgctgcttgcaggagcctctccaccgacgttgtccttgtttgagggaaggtgggcggtgtaaggggtggagggagcgaggttgccggggtgaccgaggctcggcccgggggggaagagcagatctgaactgttatcaatagttttaattcttcggcgtgcctggcttggctctcggtttggaggagccgtgcgactcttggcctgg

SEQ ID NO: 7065 - DNA, 550 bp, Canis familiaris
  misc_feature (1)..(550): n = a or c or g or t
ctctttttacagagacaagattagcataaatatgtactatcantgacagcnngtaacttttttcaagtacttcagagtntnnnnctttgtgtnnacttcagactggcattaccttttatattttgatgtctaaattggctcagatcatgaatttgtgcaatcttttaccgaagttcaggtggcatcattttatatttatcttttgtaggtattttctatacaaattcttaattagatactttcttcactgatagtcataccaaaaaaaatttctttcaggccatttgcatacctgaagttacttttgccccttgaagggagttaaactactacattcattgtgaactatcaaagtatcacctaaatactcaattacactaattgatattcctgacgctttgtgtgtaacagggctcagaatagacattactttggctaatggaacttctatttttccaaagatttattaagatttaataattgttctttatttggcatggtccaactttatacatgaaaatgacagctttataaatagtatgtttaaatt

SEQ ID NO: 7066 - DNA, 137 bp, Canis familiaris
ggtggcaggaagggagccctgcgggaaaggcagcaaggtgaagtttcagagaaggggtttgctgcgcccacccgagtccagccatttcaaccctgttcattcttacttcaccccacgcctccctcccctgttctatt

SEQ ID NO: 7067 - DNA, 495 bp, Canis familiaris
  misc_feature (1)..(495): n = a or c or g or t
gttgtgcattgactangagnctnngtnntgtccttnnaccagagcttggcccacaaccagaacctttacttaccaggtggnntcggccccgagtccaagaggatcctgacgcccaccctcaagaagcggggccgagctggccgaggggaagcagccaagcaggaggaggtggccgagcggcccgagcctgcacaacacgtggccctcagcctgtctttcaagcgttatgtctttgacacccacaagcgcatggtccagtctccctgagtgtcccagtgacctcccccaggaccccttgcccaggccccagatgtgcctcgacctcttgcagtatgtccctccccatgaccctgcagacgcaggctcccaggcctggcaaggagcccggggctacagtgggnnnggcaccagtgccggcaccctcccacgggctggtggccaatgtttccagccactgagctggcagccctatgagggcccatccacaccgtgccc

SEQ ID NO: 7068 - DNA, 517 bp, Canis familiaris
  misc_feature (1)..(517): n = a or c or g or t
gacatcattcacgttcagaaaggtttgggcgttttgagaactgnngccctgcagctgtccccactctagcaaacatgnnnnggccagcagaggtaagagccagtggcttccaggcccccgtacggcagagggccccctctaccaaaattcctgaaacccccatttccttgcactgcccatcccaggagaagagaggtatctttacaacagcagcaccagtgggtgcgaagcaaccatgatgtcacacagttccccagtgaactcagctctaccctgtggtcggggagggacagagtctttcgttgtgtcagtttttaatcagaggaagtggtaaggtactgaactgagctaaattcagtacctaaaatgaccattaatcaacaagatggagatttccactgtctgtggaaatgcattgaatttacagaacaaatcagtggggtcttcttattcccatattacaaattaaaagataaggcccggggaagtccagaagcttgaacgagataccaagtat

SEQ ID NO: 7069 - DNA, 536 bp, Canis familiaris
  misc_feature (1)..(536): n = a or c or g or t
ctctaaaacagcaaactgtggntctcaagattaagaagtaacaaagaatatgccccaagctcattacctgtccaatgtgttgtcatgtattcatccctgtttcttacctatatattgtttttatttcagtgaaagaaggaaagtcatatcctagcctataatcatatctatcttaggaaaaattatttccagattgcttcctaacattctatactgtgcccttgaatataaaacaccaaaatacacttatctgtccgtatttaggttttttctcttgagaggactaattttgactccatgaacatggaagaacacatggtagaagctaaaatatgctaaagaaaggcagttctaaccttggaaccattctggggttctaagattaagttgaggaggaatgatcttcgcatcctcagaaatactgtaaaagaaatcattctccactgaaatctcagcttcctgtgttataccatggagacctgattgaaggctgggggaaattggaaaagtaggttcacatttagcacctccgtcaa

SEQ ID NO: 7070 - DNA, 574 bp, Canis familiaris
  misc_feature (1)..(574): n = a or c or g or t
aatgcnntaaacttatacatgcaccaggttttgattcgcagaacaggaatcccaatcagcatgtccctgctctacctgacaattgcccggcagttgggggtcccactggaacctgtcaacttccccagtcacttcttgttaagatggtgccaaggtgcagaaggggcaagcctggacatctttgactacatctacatagatgccttcgggaagggaaagcagctgactgtgaaggagtgtgaatacttgatcggtcagcacgtgacagctgcactatatggagtggtcaatgtcaagaaggtgttgcagcgaatggtgggaaaccttttaagcctaggaaagcgggaaggtatcgaccaatcctaccagctcctgagagactcgttggatctgtatctggcaatgtatccagaccaggtgcaactcctcctccttcaagccaggctctacttccacctgggaatctggccagagaaggtaattattttactttgctgctttgctcttaccttagagagggaaatcctagcttgaaaggcggcccttggaagtttatccttttatcagcctggag

SEQ ID NO: 7071 - DNA, 502 bp, Canis familiaris
  misc_feature (1)..(502): n = a or c or g or t
ttgctcctgcctttccgttnngtnnnnnacccttctgcccgccggatctggggtaatgtgactcgctggttnnncacatgtgtccagcagccngaattccgggcagtgctgggagaggtggttctgtactcaggggccagactcctctctcaacannnaggccncgaggtcnnngcacccccaaagacggcctctcaactcaaaaaggaggcaaagaaacgggagaagctagagaaattccagcagaagcagaagacacnnnagcnncagcnnccgccggcggagcagaagaaaccaaaaccagagaagaggggaaaacgggatcctggggtcattacatatgacctcccaaccccagctggggaaaagaaagatgtcagtggcaccatgcccgactcctacagccctcagtatgtggaagctgcctggtacccatggtgggagcagcagggcttcttccagcccgagtatnnacgttccagcgtgtcagcggcaaatcccc

SEQ ID NO: 7072 - DNA, 655 bp, Canis familiaris
  misc_feature (1)..(655): n = a or c or g or t
ctgtcacctnnagncatcccaaccccactgctcatgtacaccagctnncagtcnnnnnnnnnngagccatccttgatatcctttcattatataccacattcaattctgcctnnnnnntactnngtcccatagcagnatggtnaatgtnaaacaatctactcccagaaaggaaaagaaacctgatttgtagtgcttatnnacatctgtggtgtcaacactccgacgtggccaatgacaagctgccagcactttcacaattagctcacaaaactctcaggagtgagtgtaagcctcctcccgcacaccagtgagctctacccagagtctgcacactgttccctcccagggctgcttgctccctgatcctggccaccagcatctgttcctggaccattgcttcctctctagcaggccctctagtttcagccacagtgattccttaaaaatggaagtcaaagtatatgtctcctctgtttcctccccctaaggatctgcatgaccgtctctccctctttcaagttctgctgacatgtcactttatttaaagccccttacataaaccacccttataaaatatcaattcctttctcttgctctgtgttctgatagatcatagctgaattgaattgtttccctagaacttatggtcagcgga

SEQ ID NO: 7073 - DNA, 155 bp, Canis familiaris
tacaaccactttggccagtcggtgcaggagatctttgaggtgaacaacttgcccatggaaacatggcaataactcagcctccactcagtctgaaatcctcctgtgtcccaaactctccaaggtcccagccactcggagcctgtacctgaaggctg

SEQ ID NO: 7074 - DNA, 580 bp, Canis familiaris
  misc_feature (1)..(580): n = a or c or g or t
tagaaatnactgaagagaggtcatctcaagagatacttttcgctgcctnngaaagagnngccattnctaatttgtngaatatggattaagtttagatttacattgaagtttagcaaagaagaatactaataatgaaggaaaaaacatggatgacatgatcaaaaccagacccttagcctccttcttcaaaaagctattccatggcgatgctggtcccatgaatagattttctctccgacaacaactggcatgtacgttctgatttgaaactggaagactggctctgattttcagggtcttgctattgtttgggggcattcttgtaaccataatagttgggctatttatgagccattgcatttcagtaattccctgatacttaattctgaagggttttgcggatctaatgctaagattattcagtcccctggaattacgagcatttagtcttaagcagcattcaaagatttcaagctaatggtttctgttactggttctgaagacccgtccatattacgaagtctcaccgtgaccctggctaagagaataaagtcatcggagagaacaaaaggagctttat

SEQ ID NO: 7075 - DNA, 428 bp, Canis familiaris
  misc_feature (1)..(428): n = a or c or g or t
atttttgannaccnnnncatgnnnnnnnnnnnntaatcntaggnnnnnagattttaattnnncntnnntttgcnccttcctnnnnngagaaaatgatttggnctttttcttccagtnccctcccagcnnncctnntgaggaatctcncnnnnnggttntctttcacctgnaccagcannngnnattagncngngntcctnnccacccnnnnngngctgtgagcatgttnncttgctgttttatttcatggtatnnngntnncnncaagnnnntcctccatgcnnnnnnnanncctcatgnnnnagtttccnnnaggccactttccccccagtgtgtnnnaacagacactgcagggctcatgtccagtggtcttttaaaagnnnnnncccaannncaatgatttttgtttctcttnnncaggtttgtnt

SEQ ID NO: 7076 - DNA, 587 bp, Canis familiaris
  misc_feature (1)..(587): n = a or c or g or t
tctctcngtcnngcagaaatccccaaaggtggctttgttaaatagcaaataannaanaccaacagtacctttttgtgtgtgggtggggaagatgttttaaaatccagtttcttgggttaatacaagcttatgagagaattgttttttaaaaacataaatgtgcattaaaatgatggcaatactaacagtttgataaggcatagggattttaaattcttaatattcactgttcttctaacaatagtaaatggtcacattttccagcaagagattgacatttgttaattttttatatttaatactaacatgacccagtatcatagtcatgaaatggtcttcattgttgtaagcattcgtgtcctttttcagtttgcaatatattaagttgtggctgttttatttcaaactaaaatttgaacactggaaaatgattgctcagtgatttgtaatttgggacttggattatttatctagggatgtttgtatattttgtcaatgaataatactgcgctgccatcatagtgagcgtcatggttctatataaatgctctccatctgtccctctaatgttgcatgttttcagtggt

SEQ ID NO: 7077 - DNA, 168 bp, Canis familiaris
cagcccatacaaactagctcctccttgtaactttctgattttcctcttatattagttagaaagttcattttgttttcatttgcgttttgtgagttactggcaagtttcatcatttggtgtatttgagagccgtttgggttccctcttcaagaattgtctgtttaggga

SEQ ID NO: 7078 - DNA, 476 bp, Canis familiaris
  misc_feature (1)..(476): n = a or c or g or t
aagatgaagaaggtggtactgggtgtgagagcntgggcnnnnnnaaggaggagcnnnagcccattgccaaganntgatgaggataacagcactgttattcttggnctaacagctgaagagtttgcctagacccaaacagaagaacctggagaatatcctgatattctggctaaaacccaagaaaatgggagggcaaattgtcactgaaggtcaggccagttcctgagcagttcctcaaacaaggagaactgtgttcgtgcatcacttgtagcctgaaccatgggccctaaatgctgaggggagatcagctctctccagtagccagagtctaccagaaaatcagaggataaggccctgcccctaatggctgagtacctgttgtccttggggccactatgtccagacctgatcatacagcttccacagctataagatggggatgataggacctgccttccttgcttgcagagctcnnc

SEQ ID NO: 7079 - DNA, 509 bp, Canis familiaris
  misc_feature (1)..(509): n = a or c or g or t
cgaacgctcgagcaaacaaagcaaactcagtnngacggtgcagtgacacaagagaacaccccccgtgggcgggcaggtccctgnnggtagagcctgagtgggaagctggcaggggtgtgcgtgtcggggagctgagcacggaggtggtgtcagctggggggcggcacccgggggtccagagtgtctcagcccaccccgaagagggcggcaaccccancgcacctcccattgcctgaagacaagcctgtggccgggtccctgcagccacagctcagaaggacctgccccccaaccgtgtgcacccccactgccccgccccaccagggcctgctctcccagattctggttggtcatggcttgtgttttgggtttttttttttttaagatttaaaaaaaattggggatgcctgggtagctcggcagttgagcatctgccttgggctcaggttgtgaccccggggtcctgggatcaagtcctgcatcaggctccccacagagagcctgcttct

SEQ ID NO: 7080 - DNA, 576 bp, Canis familiaris
  misc_feature (1)..(576): n = a or c or g or t
gggtgcaggnctcgtagtgtngntaattngtctaggtgctatgctcctgtatgtcattaatagaatagtnnagaggaggtatatcccnntnntctgatactcagaaaacacttcagctcagaagtaatctgttttctctgnntaaggctctgcagagagtagcgnngctgtttctgtcgtcttgagcaaacaaccagagaattggcaagtcttgggaaatagtcgatggaagtgatgggtaggccaagtagatatttggtgacatttttatgtggaatgagatttttttctgcacttaaaaaaagaaggacaagaattcactataaaagagacagcatgacatagcaaattaaatcttaaagtactaacccttaaagtactaaagttgagagtactaaaagtctcagcaaccagtttgaggtcctgtccctctatgttctgattgaggggatgatcttgagcaacaaatgagaactccctcactcccagtgcctcatttgtcaaattctgatgaaaatgctatattttaatagntnnntntagccagattaggggacatatattggatcctccact

SEQ ID NO: 7081 - DNA, 667 bp, Canis familiaris
  misc_feature (1)..(667): n = a or c or g or t
gaattttaatacttttaggcttgnnagaaaagtgtgtaaagtatttattttttatgtcctattcttgtgacctcttcccnnnnntccnnnnnnnngnnnnntncnnnggctcctgttaaattnnnnnnnnaaataaagtnagtcttgtcctcttcattagaagnanntgagaggataatactgagattcttggcctacgtacaatgcagctgccaatggtcatctttttttggtataaaaatatcatctaaaagttgcactgcacagtccaaattatcaaaaagtttattatacattacaattttagatgcccattttagacatgtctttgagacaaaaacaaacttaaagaattaaggcttcttccgttctctgaagaaaacaaaacatttattttcacacaaccagaaatgaagatctgatatttggccaaaggctaaaggactttttaccattcggagcaattatccagcacattgggcacaaggatcttttcttctaaattttaggaaagtggtgttggcttttgaatatgaaatctcatagctccctaaacaagattagaatgtacgtgaatatcagaaaactttaacttaatatatacatcatttatgttgaaggtaaacaacnnnnaaattaattataannnnattaaaatccccatttt

SEQ ID NO: 7082 - DNA, 667 bp, Canis familiaris
  misc_feature (1)..(667): n = a or c or g or t
acgaccactcagnntgcatttgtaaagatanncactnnngnntcatgcatgaaaatatcactaaggaaagtggcttcagcaactgcagcnctgactacttctacaagtnnntnngnnagcataaaggggcctgcctatnnaacaagcctcggcccaaaggtcgcctgcgtaggcaagccacgtgtggaaatggtgtgttggaggaggatgaacaatgtgattgtggacctgactgtggtaataacctttgctgtgaccaaacatgtcggttgaaggagcaggcacagtgtaatgatggactatgctgttttaattgccagttcagacataaaggattcatgtgtcgctctgctttgggagagtgtgacctcccagagtattgtgatggttcttctggtaaatgccccacagacctctataagcaagatggtacagtgtgtgatataattcactattgctttagaggccggtgtaagaaccctgatattcagtgcatggatatatatggttcccctgcagtgtctgctccagaagactgttatatttctatgaacagcaaaggtaaccggtttgggaactgtggctgtcctactgcagttgtcccaagatatgttaagtgctttgatgagaatatattttgtgggaaacttgtatgtacaaatattac

SEQ ID NO: 7083 - DNA, 573 bp, Canis familiaris
  misc_feature (1)..(573): n = a or c or g or t
atcatctnnnactgccccctccccagaactccccacatccctnnnnnnnnnancagacttgtttgtgagnnnggagnncacatctttnncatgnnntcaacacttgtaaagaaagcagggtttggggccagtggagtaannngttaagggtnnnnnnccattcacagctccatcttccatggcacagctccaagtcattggcattagtggctgttacaggaatggcacgctgttttgcttttgaggagaatctttcaggacattttacactcnggnnnnnnnngttcccnncnaccctgagatgattttcttcnacttatcaaagaaactaggctngnnctttctcctttggccatgttctttaagtatcatgcatcntcgtaagccttgnncccatttcccctcagaacacattgtctnngagacaatagacatttaaaatctgatgcagatttatgatccagaccacaatcagaattttgtcttgggccagtttgatcccttctgttctcgattctgtgcacnnnaagtattttttttttacattangggttgcaatcctttnnngggttg

SEQ ID NO: 7084 - DNA, 544 bp, Canis familiaris
  misc_feature (1)..(544): n = a or c or g or t
gctgatgggaggaactcagggggctgccgcatcttcattaatgtggccccacaggcncgaattgccatccatgccctggccactgatggcacaggaaccggtgccagctatgtcttgatccgggacatccacagcctgaagacgatgacattccgtgggcagcaggcactctactgggagtcggagggaagccaggctgagatggagtttagccagggcttcctggaggcgcatgccagcctgcgaggccagtactggaccctccaatctagagtgcaggaacctggctgggctgagccctagcttcctctctgagcacatacctccagtgacctgtgggcacagggggatgcctcctccagaccccagaagagaaaggaaggagcctgacatttatgagcacctcttaggtgcccagtgaggcccggagggttgattctgggctctgaatgctctccaatttggattccctccaatctctatctcctttaggacttcctccannnnntcaaaggctgggcnnnnnnaggcagggactggactc

SEQ ID NO: 7085 - DNA, 95 bp, Canis familiaris
  misc_feature (1)..(95): n = a or c or g or t
ttattataaacnnngctgctcnnggtctgtgatgattggtctcaaaggaaaaagtaagatagtaaatatttatttattataaatgtttctaagga

SEQ ID NO: 7086 - DNA, 685 bp, Canis familiaris
  misc_feature (1)..(685): n = a or c or g or t
atctagatgtttatatgttgaaagttttgcttatgtaataaaaacaaaaacaaaaatatctgaattgtatagtgtctgtacatgaaagaacttgaaacagtggncttatgataagtagcaaattttatatcagatttttcttttttctgatgacagtttggcttataacttgaaattttcttaagtttcttaagatcaaggcctatataatttatacatttcatattataagaaggcacgagaaaaggtgcttcgaaatttccatcaggtagttatgaatgcactgaatttttaccaattggttcattctgttttttccaccactgtttgctctttccaatttcaaaatgctattgtggaaaatatataaagattttgtaatttatattccatcttactttccctcagggcaagcttgtgcatatcatatttttaaaggctttttaaaaatcttacagacaaaatctcatatttggaaattgtactttactactacagcattatacattttgcaagcacctgttataaagtgtttattttaagttcaattgtattgagtatctactagcataagataaaattgatgggattttaaatgatattttaggtcctggtaccttattatctttatgttttctttgttctgcataatagtatgtatacattcccaattaaaattttgtga

SEQ ID NO: 7087 - DNA, 566 bp, Canis familiaris
cccttctcctcagtctaaactgggttccttcacatctccaggactggctggcgttctccttctctctggaacagcctttgctcctttcttctggtgaaacccaatgccgctcctctgtggtcccaccgcccttctcctgtggttgtcacttgtgtgtgcatctagcctgtctccaagccccaagctgcatgtgggccagggagggggccctgtccatccccatctgatttccaggaagagagtccctgtgtcctggagaggctctgccctccacgcagcctgtctccgtgggccgccgggtgcgtgtgggccacagcagcctcgtgggaccaatgtctctgaccagcgccagcggcaggagccctgccagctcctgcacctttcagggagcaggtcttaatgaagcagtttgctgacccccgtgtatgcatcgatcctaaacagagctagaagtactgctgaggggagaaaagcatatatatatacacagaaagagagaaaaatacagaaaggaaaagaatacaccagagtaaacgggatattggctatgagaagtcatcttctag

SEQ ID NO: 7088 - DNA, 469 bp, Canis familiaris
  misc_feature (1)..(469): n = a or c or g or t
cattnnaatgtgtgaaaaatcttgatgctctcttgatnngtnngcatttagtatgacagtgagataatgattaannnaataaaaaatatcaggtcacnngcttttttccaatcttatnnacttctctgatgaannaatgttcagtgcaaaagactgagcaaatattacaaaattttacttaatgttgatttcattggttcaaactaaaggcattattagccatcttaaatgcaaactaatcattgtaaattatattttagcatggtcngcctcaaatagtaatgtatttttctgcatttacttggatatatttagaatcactttctttcctactgtatcacagaaagagtatgtactgatttgtacagacatttgacaaagccctctgacgtgatttcccggactcttgccttcatatttcattttgaattcannnnnnngnnnnnnnnncatannnnnnnnnnntttt

SEQ ID NO: 7089 - DNA, 665 bp, Canis familiaris
  misc_feature (1)..(665): n = a or c or g or t
atgaacatgcnngctgttactgtctanctcaagaagctatcagagcaaaatccagctgcttcttactataatgtagatgtattaaagtatcaggtatcatcaaatggcattcagtccactcctctaaaccttgcaacatactggaaatgtagtgctggcaccacagatcttagagtggattacaagtataacccagaagctatggtggcacccagtgtgctttccaacatacaggtggtggtaccagtggatggaggagtcaccaacatgcagtcccttccccctgctatatggaatgcagaacaaatgaaagccttttggaaactgtctggtatttcagaaaaatcagaaaatggaggttctgggtccctcagagcaaaatttgatctttcggaaggacctagtaaacccacaacacttgccgtgcaattcctcagcgaggggaataccctctcaggagtagatattgaacttgtaggcactggctataggctttccttagtgaagaagcggtttgccactggacgatacctggcagattattgatggacctgggaaactggttggcttgagagagaagtacaggcctgccctcctgtgttgtctattctttccaacactattttagcttgtattatgtctttgaacttacacatatttgagaa

SEQ ID NO: 7090 - DNA, 467 bp, Canis familiaris
  misc_feature (1)..(467): n = a or c or g or t
aggatcaaatctgagnntctgtggactggtcaggtccaaggctcataccagnnaacaagactgacaacactcccctcgggggtcacagtccagtgttgctatttcggttactctgatttcagtgaattaatcccagcatgttcactcagtnncaggcactgctcttaagccttttttttttttttaatggtaaaatacacatcagattggccgtcttgactattttccagtgcacagctcaggggcattaagtacattcagcattaagcagccatccccaccatccgcctccagaacccttcatcttgcacaaccgagaccctgtccccatgaaacgctgactccccagcccctggctcccaccgtctgcttcctgtctgtgaatttgactcctcctagggacttcctgtaaatggaatcatacggtatttgttcttttgtgactggcttattttacttagtataat

SEQ ID NO: 7091 - DNA, 442 bp, Canis familiaris
  misc_feature (1)..(442): n = a or c or g or t
gcacacccagnnnnnngccatctgcttcaccatcctgggcgtgctgaccagtctggtggtgctgggcaccatgggcatcgtcttcctcaacaagtgcgaggcctggctgtccaacctgcgctacaaccgcatgctgcgccagaagaagaacctcctgctgcactacaacagcggggaggacctggccgtcaacatcatcttccccgagaagatcgacatgaccaccttcagcaaggaggctggcgaggacgacatctaagcggcgtccccaccggcccctctctgttctcggggtcccgcagagctcactatatgcggtctgttctcctctttgtgctggagtttgctctattttgtgtcgaatctggtgaacgctatgcttccatatattatctttgtgttgctctgtgacaaatgcaaatgccaaaagcatcctctttct

SEQ ID NO: 7092 - DNA, 132 bp, Canis familiaris
  misc_feature (1)..(132): n = a or c or g or t
accaaaaggatnnntccattttcaataataagcctttccacagcaaaaaaaaaaaacannaacaaaaacagaaaagaaagaaagaaaaagaaaatgtataacatatccctattaagcatggagttgtaatag

SEQ ID NO: 7093 - DNA, 372 bp, Canis familiaris
  misc_feature (1)..(372): n = a or c or g or t
aactcccagannagggaggacacactggatgaatctttcatcagaccaactctgtgtgctccgggcatgacgtcttccaccagacacttaagcagatgccagaggacatgagggcatgaccgcaggcctgcactcctgcggcctcctggtggtgtgtgacggcggggcagccgcccagggtgggcaagcagggagacaccagagtgcccgagccccacaccagaccagactctgcctggacagggcagcgtgtctgaaagcgtggcagctagacagcacggggtgcacctccaggaggcgggtctgctggcagcaaagcaagcgggccaacagaactgccgtgggctacgcttgtctcagctnnnttaatgt

SEQ ID NO: 7094 - DNA, 637 bp, Canis familiaris
  misc_feature (1)..(637): n = a or c or g or t
tcaattgttgtgctctcaggannnnagacgttatccgagctgaactcttagaaattgtcnnncgaattgagcttccctgcgcagaacctgcttttggctcaaaggaaaacgctctgaacataaagaaggctctcctgtccggttacttcatgcagattgccagggatgtggatggatcaggtaactacttaatgctgacacacaagcaggtagcccagctgcaccccctgtccagttactccatcaccaagaagatgccagagtgggttctcttccacaagttcagcatatctgagaacaactacatcaggattacctccgaaatctctcctgaactatttatgcagctggcaccaccgtactatttcagtaacctgcctcctagcgaaagtaaggatatcctacgtcaagtaatggatcacctttcacctctatcaacaatgaaaaaggaaccgaaaatgtgtgagaagtgccctgagactactgagcagagatgcaccatccagtgacttcagaatcttccataaaaagcaagatgtgcaataagtgccccacactagcctaacaaacagccagtctgccggagggaggtgcagacgctcaacttgaatgagatcatgccccatgagtcttgaaa

SEQ ID NO: 7095 - DNA, 625 bp, Canis familiaris
  misc_feature (1)..(625): n = a or c or g or t
aaaaatcatggtnngaaactccgaaattactatgcannnancannnntnntnnnnntgccagaatgagcaatgtggtagaacctgtggctcctccagctgttcctgttgctccgcagatgggttcctttaagccaggaggcagagtgatcctggccacagagaacgattactgtaagctctgtgacgcctcctttagntctccggctgtggctcaggctcactatcaagggaagaatcatgccaagaggctgcggctggcggaagctcagagtaactcattctcggaagcctcagaggctggtcagcggcggacccggaaagaagggaatgagtataagatgatgcctaataggaggaataatatgtatacagtacagaataattcaggtccttacttcaatccccgctctcggcagagaatcccacgagatctggccatgtgtgttactccaagtggccagttttactgctccatgtgtaatgttggggccggtgaagagatggagttccgacagcatttagagagcaagcaacataaaagcaaggtgtctgaacagcggtacagaaatgagatggagaatctgggatatgtatagtggtatttgtattcagatagagcagctt

SEQ ID NO: 7096 - DNA, 595 bp, Canis familiaris
  misc_feature (1)..(595): n = a or c or g or t
tanngtgaatgttctatagacacaatatcatttgattctgtttctaacaatctcttttgattgaatagcttaatttttatttatatttatatttattattattaaatatttatttatatttaaagtaattactgatagggaaggacttgctattatcactttgataattattttctgtatgtcatacagcctttttgtccctcatttcctactttaccaccttcttttgtgtttggttaggtttttgtggtgacatgttttgattcccttctcatttgctgttgtgtatattttatagatattttctttgtggtccccctgtggattacataaaacatccgaaagttatagcaatctattttaaacttaacttcaatcacatgaaaagaactttattcctttacacttccacactccgcccccattttctgttattgatgttgtaaattgcatccttatatattgtgtacccattaatatagatttatagctcttttttatgctcttgtcttttaaatcctataataacaataaaaaatagagttacaagccaaaattaccataatacatgtgtttatatttgttcatatattta

SEQ ID NO: 7097 - DNA, 667 bp, Canis familiaris
  misc_feature (1)..(667): n = a or c or g or t
acagcccatcccagagagnnnagatgtgaaggaaactccaangnctgatgctgagtnngcctccctgtggtgatctagccccttcactgtgcccatgtgaccatacacgagttaagcactgtcccagtcagggctctgccttcccccatatacaagtctgcaaacgcgcccatctcatttaagtgggcctgggagccagccagaggtactgctgccgacctggtcccatgacctgacccttatgtcctcaggccagaatctgggagcctgtccgagaaggtctctcacctggagtccatgctctggaagctgcaggaagacctggagaaggagaaggcagacagggcagccctggaggaggaagtgcggagcctgcggcacaacaaccagagactgcaggcggagtcggagagcgcagccacccgcttgctcctggcctccaagcagctgggctcacccaccaccgacccggtctgagctgtctggcccagctgcagcctggccacggacctgcttgaaactgctcaggtcatcaggatacctgggccccctggggccctgggccctcctcaggaactctctcttagcactgccccccaactcccccgctggatacttggtggtgaagttgccctnnncccatcctttgtgtgtaaatattctgtgg

SEQ ID NO: 7098 - DNA, 579 bp, Canis familiaris
  misc_feature (1)..(579): n = a or c or g or t
aatgctgtnnncaaaaatnntagagagaaggcatnnntatctgaatcctcaannatnnnnggnnnactccttaccntgaatttaggtatatgaatgtgattgaggtgagcggtagttcaaactctcctgctccactgactgagccggccaggtgcccctctgtcccaaccctcttaaaaagtaagacggagattcttagacttctaatccttgggatgccatttggaccaatttgtattgaaatcaacttataaaaataagttgattattatagctcctttgtcactgagatagtacctgcctaaatgcatttaagctgctttacttgttcccaacaagaccacactgactgtcccaataagtattgttttgttcaattcagaaatacatgatatagtcttctgagacggttgattatttcaaatcgattgacatgttagaacccaggttcctggattctgtttgcagtaagtacttctttgcctctgcctnnagttcaacatcaccagcccttgggaaatatatgaggggactttgccattttccacccctgccctgaggaaagcgaggctcagggtg

SEQ ID NO: 7099 - DNA, 570 bp, Canis familiaris
  misc_feature (1)..(570): n = a or c or g or t
cgggctnnagagnagtacagagnnnaactccattgtatcnntaatatttactttctttgaagtagacagacctgangcaaataaggcaatatgctaatatttgctaaagctgatgtggccatcattagcgctgcccaccaaccgagtatatctggctctctgccttncaggcccatggtaggactgcatttcccatccactctgaagttaggggtggccttgagactgactttggccaatgaactggagtggaagtgacttctatttctggcctcatgaaccagtgcacaaaaattttgtccaacatggcagcacagagtcaaatcttctcacttccttggtccccgagcagacaccatgtctccaagcagcccatggaggatgggtggattggtaagacgaacctttgttgctctcagccactgagatttgggatgtttgttagcacagcacaaccaagtcttttcctgactgatacagccaggaagttggtctacgggggtttcctgtattgttagtctctgactttatctacatattgaaaaattacaaataaaatctgtaaaatta

SEQ ID NO: 7100 - DNA, 561 bp, Canis familiaris
  misc_feature (1)..(561): n = a or c or g or t
agatgtttttgccgggaccaagatagaccccagtgccttggtgcannngctggacccagacacgaggagcgttgcttccgtcaggagaggtgcagaggcgaggactgttttgcccaagaaggagaaactgaagctgcggcgtgagaggtggctgcagaaaatcgaagccataaagctggctgagcagaagcgcaaggcggagcggagacggagggccacggtggtggtgggggacctgcagcccctgagagacgcgctccctgagctgctggagctggaggctgctggccggcagccacggaccagaggggtgagcagcaggccccggcccgccgagttcagccgcatgagcgctgcacagaggctccagctcctcgaggaagaaagtgcccgttttcgggagctgctggccaatccgacctacagggccagccccctgctggccatcgggcagcggctggctcagcagatccagctggacagtggcagccagctctgagtggctgtgaccccgccgggaagcgtgccgtgagccccaagatcgcccctcgccggccttgc

SEQ ID NO: 7101 - DNA, 600 bp, Canis familiaris
  misc_feature (1)..(600): n = a or c or g or t
tgcgtatttaaatgcttcgtcttcctggtctcnnagaaaccattaaggcgtctcattngcaatttgtctaaaatcttttgggatccatcgaagcttccagctagtatcatctgttaaggctaataaatctcctatgtttgtttttctaccttttggtcttttaaaaactttgtattacagtatagtatttatacagaaacgtgcacagatcatactgtacagttcgatgaattttcccgaagtgaacaccgtgatgtagccaatacccaagcacatagagtatattgccagaacctcagagacctttacaacagaaaccactattctaacttctagtactatagagtatattgggctgggtttttagattttatttaagtgaaattctgtattaatttgtgtatagttataggaaattctctattaattttatataaatgaaattctacaggacatcttttgtatctaacttctttcactcatattaattttgtgcgattcatccgtgttgctgtgtgtaacagtagttcatttatctttattgctatgttccattttatgaatatactatgatttctatagccaattaactaacagacc

SEQ ID NO: 7102 - DNA, 564 bp, Canis familiaris
  misc_feature (1)..(564): n = a or c or g or t
catgtganngtcntgcttcagcaagagnnnnngcggggagagaatcttttcttgaaagccgtcaataagatttgccaacaaggaaattttcaatatgagaattttttcaattatgttacaaatatcgatatgctggaggaattcgcctacttaagaactcaggaaggtgggaaaattcatctggaattgctacccaatcaaggaatgctgatcaagcaccacacagtcactcggggcatcaccaaaggcgtgaaggaggacttccgcctggccatggagcgccaggtgtcccgctgtggtgagaacttgatggtggtcctgcacaggttctgcatcaacgagaagatcctgctcctgcagacgctggcctgaccggagcccttgccaccagaggaaaggcccagggccctggcacctctttatgaagacatacagcatccatagatgcccttatgatgcttagaagaaaacctctgagttctaattccttagtggcttcagagtagttcccaagagtctgagaagctatttctatttttaagagttgttttttgtaatttttgt

SEQ ID NO: 7103 - DNA, 375 bp, Canis familiaris
  misc_feature (1)..(375): n = a or c or g or t
agctgcnagggaactgagggcacccagtttntaatgtccctcnnngtgctggactgtagagcacctcccaagtctgcagcagcacagttgctatttgggtggaagtcgttgccctgagtcctgacactagtatgaggtcccannnnnnnnnnaagtgaccctctgggtgcctgtgtcccagaggaccnnnnnnnnnnttgagaagcctgcactaganaccactnnnnnnngaggggacggtgatccccaaacaagccagcaaggggctgcaaggtgtgaggagagaaaacccacagagaccaaccagtgttggggaagaggcaggaatcccagaggcagcctggcacaccccctgggccancgtgtttgcttccc

SEQ ID NO: 7104 - DNA, 478 bp, Canis familiaris
  misc_feature (1)..(478): n = a or c or g or t
taananccacacttcagaatnnctgagcctatgatcacgtatntggnngtgtgctccttttagctannnnnagagagaatgagtgcgtgtgtttttcctctgtgaagaattttgtatcatgctacttcttgaaagtttacttttttgatgctgtaagggaatagccagatggtttatacagataatctctacctgcaggatggtggattgttaaattagagaaatactgtttgggatatcaagacttatggttggattcaacttaaccaattgcatttttataacgtagtatattccttcattgactgtattatcaattcataaagtgcttttaaaacctaaaaaagatttatggttggagactaaactatattaatgccaaatgtgttttggtcgattactagagccttctgtacaaatgcatcacctcttcaaatgctgtacagtttgcttgtttgaagggcaggtagtagggagg

SEQ ID NO: 7105 - DNA, 114 bp, Canis familiaris
  misc_feature (1)..(114): n = a or c or g or t
gccccccccccccctcgaggaccagatnnngaaatggtcggtctttattatgccaacagaaaacaaaaaaattccctaagtgtaaacaggagaaaggtgctggttaagttactc

SEQ ID NO: 7106 - DNA, 644 bp, Canis familiaris
  misc_feature (1)..(644): n = a or c or g or t
ttgaatctnnaaacaatcnnncgtgcaattcgggaggtcattgttnnagcacgttaaacacacaggaacgcactttaaaagtacacataaattcttggtctctgtgtgaggtaacattcggcagctcgtcccggtgccttctgtgttgggcttggatgctgcccccttccctgcactgggcagtgcaccacccccggggcgcttctcgtaagttgttccgcataaacactgtctgctttcctgtggtttcaatcatgtagaacagattgttgtttgtcaatattgtgaaacgtgtaccaccaaatggcaggttgtcctgagctgcaagttaagattgaccgtgtcctggggacttttttccttgtggcatctactgcttcttaaccgttgaccccccagaaacctctttcctgtttcaacatctgtcggtgttggccgtgttcacagttacacgtgggtagtaggtttgtggcttgttgacatgtttgggactttttgaaaaatatttttataccaagagaatataatttaatggtaataacctaaaaccagaaatggaagctactggtttttcttttaacttttcacaggattcattacagatttttttttctgtttcttaagtgcaatttgagataaactgg

SEQ ID NO: 7107 - DNA, 492 bp, Canis familiaris
  misc_feature (1)..(492): n = a or c or g or t
tgcnnggtacaggatacaattgtaaatacttgnnggagcaataaactttgatcaaaataagcaaatatattaggcacatgcatactctgcccccaggtgtacctgaaaaagcaccttagtgatactaagctgggcctttgttagcttatgttggtaagtttagtatggtccaactggaatatttttttctttttttttttgctctttcaaattccagatttagttgttaggcacagattagacaagctcagaatcatgatgtacctttctagaactggatatcttgaagtgttgtaggacaacaagaattccatagaagtgggttgaggatagtttggaaagggagacagtggaggcagtaaccacagatatctacccccgagaaactaggctctaaaggagaggagagggatggacctagcaacagtatgaaagggatgtccaaacagtttttccttccttatgtgtctgtgtgattagtttttgtttctg

SEQ ID NO: 7108 - DNA, 166 bp, Canis familiaris
cctccaacaattaatcttatcggagaactatttgtagtgatatcctcattctcatgatccaacattactattatcctaataggaattaacattatcatcaccgccctatactcactttatatattaatcaccacacaacgtggtaaatattcccaccatatcaaaa

SEQ ID NO: 7109 - DNA, 382 bp, Canis familiaris
  misc_feature (1)..(382): n = a or c or g or t
anacantagtgatccttttaatattcaagatactcacaatcacattcttttcctttcntagtgtcttttttttccctttacaatatgactttccaagggagtgccagagctcaggtttgttaaaaggtagtctctgtgcttatgcaattgctaggggaagtagtcagagctacaattgctgaagtccatttgacagtaagaaattcatgcataggacagaggttctggcaatgacacttgtaggtcatagtcatgctttgttcccaagttttggccaagctcataagccataaaagctgcgaaatgtggtatcttttcatgacagaaagattcaacactggttgaattcttagcagtacaggggtacaggggatccctgggt

SEQ ID NO: 7110 - DNA, 162 bp, Canis familiaris
  misc_feature (1)..(162): n = a or c or g or t
cctcaccctcctgtcacttgtgtgtcccgggggngccgggctgcgtgatgcnnnnnncaccctcgctgtgatataaactccccgttattccatctcccacactttcatttttctcttctgttaagttacttagaactttctaagnnactccatgaagtgagg

SEQ ID NO: 7111 - DNA, 589 bp, Canis familiaris
  misc_feature (1)..(589): n = a or c or g or t
ctctcacagtgttttatgtgtatttttctgnaaggtnactttcatatntaaaaatnnnngccttctcactgcccatggtggtgctataaaagcaacagtaagacgtcaagcagcatagactctgttanntattttcctaaaagatgggagatatgattaaagcctttaattaaagtgttgccaagaaacaggattagtcactctgtattcctgaggatgggttatgtctgcccctgttctgtggggcagaacttaacagggaggtgcagtatacacttgccagtgattctgtataaattaattctccaacaggtttgtccgataattagaataatcagcattttgtgggaaaagtacgcatggaggctaaatcattttagtagcattgaagaaatgtctacattgagaatggaatgagcaagatgacttttaggtctcagttttatnannnnaaatttccagaagcaatccaacagttctaaaacttttttccttcaaaatcctttatatgccgtaagtatagagcacttaagaaatttttttcagctaaagagttttggtttttggttaacagaagaagcctctcctg

SEQ ID NO: 7112 - DNA, 401 bp, Canis familiaris
  misc_feature (1)..(401): n = a or c or g or t
aagctttccagcagttagggcaaccagctgtcctttaatcagtaggccaaggcaggtgctgggctggactggctgtctttctgggggtgtggtgaagaggggcacacagatattctgaaactcctgctccctttcctggagtgatgaaagaacatccccgaatatgtgcctatgccagagcctgtaggtcaggcttatgctgtagaaagccctccccatcctgggcagaattcagaggctgcattctttgtgaaaatcacgaggtgaaatcacagttttgaagaaagtcagaaaacaagcctgagagtgatttgttaaacccannnnnntattaataagaatgaacctttctcaagcacctgccatgtgccaggcactgagctagacactttatatatagg

SEQ ID NO: 7113 - DNA, 315 bp, Canis familiaris
  misc_feature (1)..(315): n = a or c or g or t
atgacctttgcctctnantggggtgnngaggtcagaagaggaggctggaccagagtgannngnannccggcctgtcagtctgccacccatgtcccggaaccctgcacccatacccagcaccccgtacctgacacacacattacagaccaggaggaaagcccggtagatgatgtccaaatcttctgggacccctgagaatactcagtcgccnnccgtaggggaatcctgcagcctgctgcggcggccagcaggccagatgtcgcctcgtagcctggggagcagaggtccagcaggaatannnggagtgcattaaag

SEQ ID NO: 7114 - DNA, 687 bp, Canis familiaris
  misc_feature (1)..(687): n = a or c or g or t
tgtgcagtgctctgnnaatactgagtgctgctcacatagcacattccaagcaannngcanctgccatcgagccagatcatcatggctctcagagtctcntagtggttggtggnntgncnaccacaagatctcacagtagagatcttggagcacatcaccagggaccagggctgaatgacctgggagcatccatctgaaggctaccctttcttctgtgtcccaagaggcctggttgcagaattttgccattaagttgccatctaatacctgttatcccagactctttcctggagctggagccagtcctcaggccatattctcacaagggcatgtttgccaaacctctgagcagatagatagaagatgcccatgacccagaagccatcagatttccatttgcccctcgttcagtggaatctctaccaaccccatgatgcttaaggtatttagtcatgagtttctttgtctctcagatgctagagttgtgataatccatgactcctaagagtctgtgatgttttgtccttttattctaaaattcctgtctaatacctgctggtctcttcctgccacatgacttcccttggccttcgatcctgggaaggtgaagaaaactgatgagagccaggcccagagctccatgcaggacttcccccttggattacnnnnnngaagaaacactgtctc

SEQ ID NO: 7115 - DNA, 541 bp, Canis familiaris
  misc_feature (1)..(541): n = a or c or g or t
agccacnnngccacccaggtgcccgccaaaatcttttttaaattttcctttactctagataaaaagcagttgttaaatagaatgtcattatttacttcagaatattacagaagagattaaggtctaattacttggttacttgtgttgaacattttaaagatgacatttatgttttgttgctagatttttaaaattttcttttctcttttgtgttaaatcagattcgttcaattgaaggccaatatggcacacttcaagcatatgtgactccaaggattcaacctaaaacctgtcaggtgcaccagtaccttatcaaaccgctttcactccatcaaagaactcactttattgatcatgacagacctatgaatacactgactttaacgggccagttcagttttgctgaagttcactcctgggtggttttttgcctacctgaagttcctgaaaaacctccagcaggagaatgtgtgacattttactttcagaacaccttcnnnnnacccaactnnnagtacctacagaaaannnaaggaatttt

SEQ ID NO: 7116 - DNA, 568 bp, Canis familiaris
  misc_feature (1)..(568): n = a or c or g or t
gtctttagaatatggcatatcctaaaatgnnnncgatgcactgaagaggattgactctactttcctggtagagccattgacacttgtattagatgtttgttattgagttaagtaagacatgatgctaagttttcagacattatctttgtatcctttcattatttagttccttctgggtgtagggttaccaggtaaaaacttcagtccacatgagtcttaacacctctgtcagaggaaacatcttttgtgggtttttatgtgcttttttatttaataggctgtgttttccctcctgctctacccctcgcaccaaggtgctgtctcacctctgtatccatggtctgcttcctgaaggtctccctgagaatggcctttaggtgctctgtctcctgcctttactgctctaactctcatactagtgctgcatatgcatcagactcaaatagacttcccagctgtctcttctttttggtgttaaagtaacgtttgattattttctttttctctcttagtaagcattactttgcaagtactcccacttggaagacccaaagtattttcagaaatg

SEQ ID NO: 7117 - DNA, 601 bp, Canis familiaris
  misc_feature (1)..(601): n = a or c or g or t
gagttcattgaagaagaagaagatcannnngangnngagtccacagagagaaaggaagaagggcancngtannnnactggatgagnnagagaccttctagatgcagagagactggggagggtgnggatgggcccagctgccttggtgacaggcccagggtgggaggggtcggggcccctggaggggcaatgggaaggtgtgtcttctctctgcccagagagcagggactagcaataggacccccactgctgtgtccagcggccactgaaccagaattggaaacgtgcttgaaacaaccacacaggacacttttctacgttggtgcaaaatggaatattttgtacattttttaaatgtgatttttgtatatacttgtatatgtatgccaattggtgctttttgtaaaggaacttttgtatgataatgcttggtcatggtgtgaccagctattgttagaaagaagggagagaagccaggctgacaaagctgccctcttcctttcctgggagggagggctgggtagcacacaggcctacgaagggatactgtactgtacagatgtcaatgcctgtccctgnnnnnngggatggcaactgagttt

SEQ ID NO: 7118 - DNA, 473 bp, Canis familiaris
  misc_feature (1)..(473): n = a or c or g or t
cagctgtcggtgtggctgaggagcctcgcagatccagcagaggaggcctgcgctgtccccgcgcccgcaggccacacatgtgggcaggtggctccctgtgtcgcctctgctcgcccaggggatcggaagtgactgcccaggccacgtccctcaggccctcgcaggcccgccgcgcctgctgggagaggggaggggtcctgtgtccgggaggcacatgcacacggctccagccccgggcccggccgccccgcccggagggagagcagggccgcttctgaggcttcccctcgctcccctccaagctctgaagacggcgaggctgggggccgcccccccaggcactgtgacggctctcgggtcccagctgctctgcggggcggcctttccaggctcctgtgctttttcctgtggacaccaaagaggagacgagttgctggctccttccaccggcnnnnnnggtttccgccacttcc

SEQ ID NO: 7119 - DNA, 426 bp, Canis familiaris
aattttcagcctctactctctaacactgatatcctattttctttcagaccctacagtcccatattttttttgctgatattgtggcatccttcattgctatctcctattgagcatatcacatctctagtgctccattaggctgaggctctaggttagccaagggctttcggatgtgtgcctagagagaacaattctgtacttgggcttcagtttccccacttgatatatgaagccccttggattcagaacagagagaagaggcatattaagatgaatcatctctggggtgcctgggtggctccgtcggctaagcgtctgcttttggctcaggtcattatcttagggttctgggatccagctctacattgggctccctgctcctaagggagtctgcttctccctctgcctctgcctgccactccccct

SEQ ID NO: 7120 - DNA, 270 bp, Canis familiaris
  misc_feature (1)..(270): n = a or c or g or t
ctcttcgcctttgactcggagggaaattacatgctgacgtgttcggccacagggggcgtcatctacaagctgggcggggatgagaaggttctggagagctgcgtgagcctgggcggccaccgagcccctgtggtcaccgtggcttggagcacggccatggactgcgggacgtgcctcactgcctccatggatggcaagatcaagctgaccaccctcctggctcataaactctgaggggacccaccctgagnnnnnncatggaagcagtat

SEQ ID NO: 7121 - DNA, 447 bp, Canis familiaris
  misc_feature (1)..(447): n = a or c or g or t
gaaagtactnacttacatcagtatattataaaagggtataactcaggaagagccagatngaagagttttacattgggcaaggtcccatgtcacttaggaaattccaagggctttaggagaccaaatactatttctgttattaagtcacccgtttccttgttgatactcggcacggttttcttcattatcgaaagtgagtgttgaagtctccaattgtcactggtaaattgtcttttttcttttcatttctgtcagttatttttgtcatgtattctgtgtgctggtattagatgtgtatgtttgtaatttttatatcttcctggtggagtgagttttatcatcataaaatgtaccctttttttcctggtaacattgttttgaagtctgttttgtttatcaggatagccacattggctttcttgtggttactgtttgcatgatacatct

SEQ ID NO: 7122 - DNA, 524 bp, Canis familiaris
  misc_feature (1)..(524): n = a or c or g or t
ggcagnggtgcagtgnnnacccacctatcnnncagaaatgtaccagtacagtctgnntcggccggcatacaggttttcccagcttcctgaaatggtcatgggctctccccctccacctgtacctccccggactggccctgtggctgttgcttctctcaggcgggtgcatcacctgtacagacaaccgcgtccctggggcaccccaagtaccatgagggaagtgggagcacagagagggttgaccaactttcttatcatttgaaatgagaagtcctgtagaacgcacaattgaagaaacccaaggtcaaccaacctataccctgaaagccccattccctgacttttaacacctgaaaattattccagctcaggctactatggtggctgcctccagtctgggcatctcttggcacccagaagtctctttgtttcttagaggtggtgtccaagaggccaaggagtagcgtgtctgggcacccaccctaactcttgacttccaagacaggaggctgagagcatgtgaa

SEQ ID NO: 7123 - DNA, 595 bp, Canis familiaris
  misc_feature (1)..(595): n = a or c or g or t
atatctaggnnntttattatgctttgaactnnnnnctgnntgcagttncttgtgtagatttgaaaattgtataccaatgtgttctctgtagactctaagatacattgcactttgtttagaaaaaaagaattgaagataaaaatatatattgtaaagaagggataccaagaattttagataactccttgaaaatgatggcttatgtcattagtaaaatacccttatattatgaggatgtaatatgtgctcaattgaattagaaagttagtgaccattattcacatggacaaatgtcatcctgttaatttataagagttttggtgggtggggagggaggtggaactagttgagtagaagttgttaaaaattcactattgttaacagtatttctgttacattctgttgtatagtggatgatatacacagtggtaaaacaaaagtcaattgtttaaaatatatggtgaaaaatggcactatattttcccatttaacatttttctctattgggtattgatttctgacatcaaaacttggacccttggaaaacaagaattcttttaataaaaaaaatctttgtgatttacaatttgcacaa

SEQ ID NO: 7124 - DNA, 553 bp, Canis familiaris
  misc_feature (1)..(553): n = a or c or g or t
acaactacatacaagacttcaataaaccattatnnnttttnntngagacannngcgncagcactacaatgctcatgcagcaaagaataaancttnacagngcaatgaaaataccccacccattacttgccacaaccaaactgaacaaagtatggcaagtcttgattacatagtaaaccagagaagcagcagggggcatcgaggagatgcctgaaggaggcattatgtttctgcctccactggaagctaagattttgggtgggttaaatgacctacattttagaccaaataaagagttatagtgtcattaggtgtgaagagcaaatgattaataatcagtatttagctgagtctttacttaaaaccaggtcacttttattaccagttttgatcacagaatagtgattttcaactttggctacacattagaaacaagaaaatttccaaaaaattaccaaagatcaagccctatctcataacagttatataaaaattcctggttcagtccctgacaacatcctttaaaaaaaaaggagggggggggcagcccgggt

SEQ ID NO: 7125 - DNA, 613 bp, Canis familiaris
  misc_feature (1)..(613): n = a or c or g or t
ccaatnanntcacacagcagtnnnagaggctccgttctatcatcttctgttctgtgtcaggatatggagtgatccccactcttcactgggtttggctcaatggaggaatcggtgctcctattgtacaggactttgcaccccgtgtaattgtgatgtatgtgattgctcttcttgctttcctattctacatttccaaagttcctgaaaggtattttccaggacaactaaactacctcggatcaagccaccaaatatggcatatccttgcagtagtgatgttatattggtggcaccagtcaacagtgtatgtcatgcagtacagacatagcaagccttgccctgactatgtttcacatttgtgaattcagaatcaggaatgaagattcagggagtatctgtcatcttatggcatcccacctggacaaagtaaccgatttgaagattgtgattgactggcataaagctgtgcaacaccatttggcaggagttaacgccaagagtctgtcagaagtatctactgtttagaaggaaatggagcagcaccaaatgggtctaattcaactgactgggactgttgggactgatgtgaagtgatgctttgcaccacaagttc

SEQ ID NO: 7126 - DNA, 647 bp, Canis familiaris
  misc_feature (1)..(647): n = a or c or g or t
agggagtagntcccaaatacacaggatttactgataaagaagtttttttctgcccttcatatataagttcatacttaaatataaaattataaaatagccattagaaaaggtcaagaggcttatttcagaaaaaaattaagccttttatgcaggatgatggatctgacttactaatgtactgtcacagacaagtatgggtagtttttttttttgtttgtttaaatggtaagcaaagtaatatatactttataccagttgatcaccaacacctgacttctttgttacagtgctaatgtctgttttttgtgcagttatccattacaaagcagggtggaagttcagtattttggcatttaaaaagattagttatataatgtctgcttccagccagtgagaaacatctagccatactttcttatgcaagccattcagttatcaggactgtgaattaacactgtatgaataaatttctgtacaccttattgtttggccagaaggccaccaagtgtacttatatgtaatccttaaattttaaagtagctgtaatttttaaatctttctaaacttttcttaaaccactaaaattaagctcttactacttagtcaactatcctcagctgtattcgtactcaattgtcagtatggca

SEQ ID NO: 7127 - DNA, 574 bp, Canis familiaris
  misc_feature (1)..(574): n = a or c or g or t
agagcccccaccattcactgtgacatccttccatgtcaccnnnncnnnnngaggctgnnnggnnagaggggnancagctcccacagaaaggagtgtnnnncntagatcatgtgacttggtggnntcggggcctgctgtacctgctgcatttggaccacacagggcctgggtggtgtgcctcccatacttctccctgaggcccactcagtgcgcacttgggagtggactcagctcctttcagctccactctcaggggctacccccaacccatgctccttatgctgcttctcccaatactgctgccaacccccactgatagaccagctgtgctcagctgttagtagaagcctgagagcctttacgaggccacctgctgcctcccagtttccctgggctcagaggggaagtatgtatggtgtgtatgtataggggatgctggttcttgtgtcttggggcacaagtcataggggctggactgggcctccctgacccaagcagaaaagcgaatagagcagggagagagaaggacagagtttatttttacagggaagagggtggggatggaggggtgttg

SEQ ID NO: 7128 - DNA, 559 bp, Canis familiaris
  misc_feature (1)..(559): n = a or c or g or t
cagtgctgctcaccacggcnntcaggcaccagcaactccgtgcagcccggcccagtgtctgcccgcaggccagctgggagcctacagtatggaggccgaagcccaagtccgtattcccactgtatttattgtagagtacctccctgtcccccgcagggcggctgagcccacatgtaccctagggaggaggatggagctgcgaggtcgggcagcccccccccgggtaggagcctggaccactggcgtctcaaggaggttcttgggttatgagcgtggagagggacccagcccatgtctgcgttgggaactcccacgtggacctggcccctgcccgcctgtagctccccaccccatgcgaccctgcgcatcctgtggtcaacgcagagctgcccgtgtgttcagcagtccttcgacaaagccagtattgaagccagcctcaagccctcgttctctacaagcctgggtgcgtgactggagggccggccgtggccctcggcacctgtgcattgaaaagcgtgctaagcggctatctgacctcattgtcaagtcacgtgtcatg

SEQ ID NO: 7129 - DNA, 151 bp, Canis familiaris
taaacagtgcacttaaacagaaaatggaaggtggaattgaagaattcaaacctcctgagggaagaacaatctgaatagatctgtttcaaaatactagattaacagtcatagtaaagaccttgaaaaatcatgtaatgtatccccttttctt

SEQ ID NO: 7130 - DNA, 720 bp, Canis familiaris
  misc_feature (1)..(720): n = a or c or g or t
gacaagggctttnnnnctgaccannncagnnttccagtcacctcatgtnncagagcaagagttcacgtcatccttcacannncnnnaggccacaggacatcaaataaagcaccagaccaggcacttcccatgtagggcccacccccctatcctcatgccccttaggctaggaaccatgtctgctctcacagtcctcagcttggctctgggtgagatccccccgccccccaaaaaaagaaaccaattctagagaggactggtatagcgagagatgccatctggggtggggcatggccactggggagattatgctggtctcagccgtgttcacactgagggtggagctgggttgccccagaggcttacttgggaggcccatgctggagtgaagggacaccctccgcaatggcaggttatctccttagggaggggccctgggagctggcacggggcccatcctgcctgtgagtctctgtccacgtcaaagacccacacggcagagccagtacacttctcactccttgctagttaagatccaaaagctaaataggaaggcacctaactgcttcctgcagccccctctgctggtgacccaaacctgcaggcttcggggtgagctccagtcccttcacctaacctttacactcaaaggctgggtgttgaataacctaagaccaaggcaaagaatggtaaccaaggaaagataaataaataaannnn

SEQ ID NO: 7131 - DNA, 573 bp, Canis familiaris
  misc_feature (1)..(573): n = a or c or g or t
agaccagtgtnnctggcttcatcgtggtgaccagtgtngacctggaacatcaggtgtttactgttctctctccagccccccgcccactgcctaagaacttccttctcatcatggatatccggttcatggatcttaagtagagactggtatgaagccttgctgcctggggcatcgagatcttctggccatcatgaaaggcaaaaaagttgggctaaagtatgagactctgttgaggccaaacagacgagtaaatagtgaactagtagaaagcatatttctacctcttaagatgggtggtgggagcctaactcttctgatcttgaaccaaaaagaaccaggagaacataattggtttcttggatcaccaaaggtgccgctttgtattctccgaggccctggagaatcgtattttttccactatgctacttggtggactaatttttaggaggaactttttaaaaaattatcactgctttatattctgtacatagtacttgttattccatttatccaagatgaaagattgaatcagaaggcctctttctagtaaagttcaaacttgggaaattttaa

SEQ ID NO: 7132 - DNA, 679 bp, Canis familiaris
  misc_feature (1)..(679): n = a or c or g or t
cctgtaaacttcagaatgcagaaatgattgatcgctttggtnnactngnntagtttccctcatttttcccccatcccctacttcctaaatcnnagacttccccatgtnctgaaannnngcgttgctgcacgttttccttcggccacaccaagccatcatcctccattgctcccggggactcaagaggaaacctgttgctctgctgtcagcttcccgtctggctcagcatagagtcactttgccatcatatacatggggataaaagcaattctgactgtccaggagctaatctgaccgttctgttgtgtggatgaccacatcaaaaggcaattttagtgtattaatcatagattattataaactataaacttaagggcaaggagtttattacaatgtatctttattaaaataaaagggtgtatagtgttcacaaactgtgaaaatagtgtaagaactgtacattgtgagctctggttatttttctcttgtaccatagaaaaatgtataaaaattatcaaaaagctaatgtgcagggatattgccttatttgtctgtaaaaatggagctcagtaacatagctgcttcttggagctttggaatattttatcctgtattcttgtttgaattcctcctctatttaagatatatacatggaatcgaagtgtttatgtaatagttc

SEQ ID NO: 7133 - DNA, 546 bp, Canis familiaris
  misc_feature (1)..(546): n = a or c or g or t
gctattgaaaaagaaatatctcaataaatatgacatttctccttccttgtttctgtaaaggggtccatgtcntgtgcagaagagctttcccttgcagttccatgagttaatattagagactctctctctcctctctgttgactcttgcatataaaacatcaacgttagaatccttaggtagtcctggggaaggagaccccactgataactggtcaatcccagatgatgactcctttgaacgatttaggattgttccaagcctcttaagaaatggatctttactttggctaagacagtgtgaaaagttaaccaggaggctactcttaaaaggtttcttttccaaaaagtcatttgaatgctcctaaattgtcaaaaaccattaatcccatatagatggtgaacaatatcaaatctttatttaacccatttttcaagaaaccagcagaatgatataggtgctttaaaaaacatttatacagccttcattatgtgggtactggggttggggaaaagcatgcagaaatgagnnnnnnnatgtacaaactt

SEQ ID NO: 7134 - DNA, 233 bp, Canis familiaris
atgcataatttgaattattgtgtaaagtttatgtttgtttttttttaagtgtgcagaatctgagaagcaatggtttttacttatctgtattaattgtaatattgactctattttgtaacttaaatttctagcccatagtaccttcatctgagttgtttatgtactactgaactgtaccagttgcacatgcctgaatcatagtaacgttagcttgttctaaagctatccattgt

SEQ ID NO: 7135 - DNA, 544 bp, Canis familiaris
  misc_feature (1)..(544): n = a or c or g or t
ccnnnatgcaaatgangagtttaagtccatgtcagggaccatccagttgggacnnnngcntatcacaaaatataatcgccgagagctgacggacaagcttctcattttccttgccctggcccttttccttgctacggtcctctatattgtaaaaaagcggctctttccatttttgtaagatctgaatttaccagctttggccctttatacttcagagtcaggatctgtccatgctcctgagctctcccccaggctgccaaactagtgtacacctctgtggcctgctccagttgcttggcaggttgattgcagacgcagccctccagctttctccaggcagctggttggcctgtaaagggcaaatagaacaagaggagggaggcctgtcattgggacacctacaggacacagggactccagaagccatcatagtgtatatggctgtcacaaggggcacacagaggccagccttcaggatttaatccctctctacttctgctgtagccttaatgctagatctggtggaagaagaaagtggggagac

SEQ ID NO: 7136 - DNA, 516 bp, Canis familiaris
ttcttggtactattcgagatgatcatggatcttcattggacttatgctgttttctacagtccaagagaggtcaaagtcgtagccaaagggtttagctctgccaatgggatcacagtctcactagacaaaaagtatatctacatagctgatgtaactgctcagaacattcacgtactgaaaaaacatgagaactgggatttaactcaagtgaaggtaatacatttgggcaccttagtggataacttaactgtggatcctgatactggagatatttgggcaggatgccatcctgacggcaagaagctgctgatctataaccctgaggatcctccagggtctgaagtacttcgcatccaggatgttttgtctgagaagcctaagataagcaccgagtacgccaataatggctctgtgcttcagggaagcaccgtggcttctgtgtaccacggaaaacttctcataggcacggtatttcacaaagctctgtactgtttgctttagatcccagacattcca

SEQ ID NO: 7137 - DNA, 63 bp, Canis familiaris
  misc_feature (1)..(63): n = a or c or g or t
cccaggctgtcactctagacctctcccttccccatccccacttnccccaaccccagcctgtcc

SEQ ID NO: 7138 - DNA, 157 bp, Canis familiaris
  misc_feature (1)..(157): n = a or c or g or t
gatgtggacacttcctggcacaggagctccccttcnnnaggcttgggaaagaccaccaacttctgcccacacatgtgttccnntgacagtctttcttattcaattgatagnnntcagcattttgtaatccttttctagctgtgtgcnccagggccca

SEQ ID NO: 7139 - DNA, 546 bp, Canis familiaris
  misc_feature (1)..(546): n = a or c or g or t
ccggtatcctcagtattacnctnntccgccagccccccagnnnaaaggacccttccgacaagatgttccaccttcccctcctcagcaccacagagtggcctaccaggaaatgggtagaccagggccccgagggggcagcccagaccagtacccctaccgcgcccaggatcccaggcagaagaaccccatgactgcagccgtgtagctgaataccaccgagctcagcccagcccagaagggcgacatctgacatcaccttcgccctccctagactcttaaggccttcctcctgtccagaagtctccatggtacagataggttttgctcaccgaggttgcaacacttgactgctgaccagaggggaaaaggagaggacaggagggtgggagagaaaggacaggagtcacaaagacagcactgcctgggatttgaaatatgtttagaatctctcagttgagggcaagtggcagttgagcaggcaaataccaatggaaacatagcacacggggcctccctggcgtacatgagccgcacagaatgggcaac

SEQ ID NO: 7140 - DNA, 495 bp, Canis familiaris
  misc_feature (1)..(495): n = a or c or g or t
tnaatatatacagatatgtattaatatacacatactcatatacacatgtacgaatacccacacacttgaatgtagttttttaacaaaatggaatattatgnncactattttgcaacttaatttttacactttgcaatgtattgtggacttgctttcatattagtatatggaaatttacctaattttttttaaatggcagcataacatttcgtggtatggttgtaaaacaattgagtgattcagtttgcctccagtcattcactattacaaataatagtatcactattacaagtaacttgctcatgtgtttaagtatttctgtaggatagattttgaaagaacgaattgctggatcaaaggatgtgtgttacattttgataggtattaagttacccttttaaaacgtgcagtttcagctccggtttacagcaaatgaaaatgtctgtttcaccaaaagtggaannnntgccatgcccccacnnncacccccacccc

SEQ ID NO: 7141 - DNA, 478 bp, Canis familiaris
  misc_feature (1)..(478): n = a or c or g or t
tggatcacatattctctgtttaaggtagaatttgccaactgagcaaatattaaaaggttttatattttgcttaagtgattctgaaagnactataaaaaaaggagagatagaatcagacctgtcatctgagccatcagtgctcttttcaaacaatacagtgggaatgctccatgtgacatatagaaggctgctctctctgatgtgctaattgttttttactatccagaaaataaatacccataacatttttgtatctcttaatttttatatttttaatgtaaaaagatgacattcaattgttcatttcactgtggctaaaatacatctttgaatattattgtatcagttctcattgtaagaaaaagtagaaatctaaatcgaactatgttttgtaaatatttattgttaaaatttaaggactgttattttaaaagtcttcacatgccctttaaaaaaactaaatgggggatccctgggt

SEQ ID NO: 7142 - DNA, 540 bp, Canis familiaris
  misc_feature (1)..(540): n = a or c or g or t
ttcttcctttcatactcaggaaaatgtcaccnngtaccctcttcnnnggtccacaaaangaagaagaatctctctctgtccccccccaccaccacccccagttttccaaagcatctaagcttatgcctggctgctcccaaataatcactcgccacagcctgctccctgcttcctggcagccaagaaaagccctttcttaatgtttagaaaggagcacatccgaaaagttagcttcggggtgtttatagagaaaccgtaatagaccaagnnnnnnnnntgaccatcaggccgctggccacacccttggtctgctctgannnaaaagctcaggagtgaagaccaggcattctcactagacccacctgtctcccgaagaccccagggcccctgtgacttcataacgacatagcaagacacttcgctttcagacgtacaaaaggaatagtttggctcatatgactttatccaaatccatttatgcattagcttacactgtttgtgctaaattgggaacattttgtatttaaatactagaaatag

SEQ ID NO: 7143 - DNA, 534 bp, Canis familiaris
  misc_feature (1)..(534): n = a or c or g or t
aagaaactgncatcaatgaaattttgaaactagaaactttgtcatctcnnnctcttgctggggtgttccttttaatggctcttctctttttcattccaatttgactccaaattgggtacacacatgacccatctgtagtgctgagttccaaaagtctgttttttgcaggcagttgatttctgtgggactcgaccgaatgaacaggtccctcccagcatggaaaactcaatgttttgataaagaaactgaaatcgaccgccttatattcccaaccaacagctcattccaatatgatcccatcagcttcttaacatatcattgtattgggccaactgaagaaacactcttgctcctgcaattaaattcaacaaatatgtaataagcaccttcaaaatacgagttcctgtgctattggttggatagaaagatgaataacaaatgatccctgccctgtggatttcttgcaaatcactcaaaaaagcagggaaaagtgctctgtataccaagtggtatttcagagcctacatgaaatcc

SEQ ID NO: 7144 - DNA, 117 bp, Canis familiaris
  misc_feature (1)..(117): n = a or c or g or t
gtgtttcagncncagaaccgaagaacaggccnnnngactgacctccttnnnnnnnnncccnnnnannnnnnaggctgcatcgggagctagagccatttaacgtttcctctncncagg

SEQ ID NO: 7145 - DNA, 367 bp, Canis familiaris
acacacatacatattcagtgatagtcactgaaaagtttgtcttagtggaaaaaaaataccaacaacctttatgtctgtctgtggaaatggtcaaggacactgatacatccttgccaagaagagcatagagctcttctacacctgtttgatctacatgtgataatacagggaatatatgttgagacaataagccagttgcagagtaaatgcttgtatgagaagagcatgtcttgatattatatgtgtagataaagaagtctggaaggatacacactacaacctcacaccagttaccaccaggggttcagttatgtgaaatgtacattgtctagaatatgtatttttgtactatttggaaattttacac

SEQ ID NO: 7146 - DNA, 181 bp, Canis familiaris
  misc_feature (1)..(181): n = a or c or g or t
attgtttttannaaacaacttacagtttttggtcacaaattatttgcacataagaccattnctaaagtacaaattttttgtttaaaaggtacttaaaaaagtattagtgggaagaaaataattccttccctcccaaatactattgaagcaagagatatatttaattaaaaatatatactgc

SEQ ID NO: 7147 - DNA, 611 bp, Canis familiaris
  misc_feature (1)..(611): n = a or c or g or t
agcacaaggcatgctgattacannggtgtatccagactgctttgctnnnnnncagtgctttcaaatttttttcacgacattcttggnatagttcaagtttgaaaataantaagtnntggtgttctttaaggaatttctataaccaaattgatcttattttttatttcactttatcatagaataaatatgtatcattatggcagtgtatctctgtaattatcgatttaatcattgccacagtgtttccatatattttttttctaagtatttactatagctcttatggtggtggcctggtgatggggactgtctttcatttattgatacatgaccaaccagatggtattttcaagggaatttttagatacatccttttagttgggtagtagactaactaaagaagaactccatgacttgcatcgtgtaaatcatcttggtagatgagaactgttcctattgatgaagacattgtagcagaaatcattttattcgtcataatcaatgaatatgtgatttgctccacatcattagaaggaaaagtaagatttcagtcattgaaaatgtttttactgtannnnncatctaactaacacgtggtgcatattaaaata

SEQ ID NO: 7148 - DNA, 613 bp, Canis familiaris
  misc_feature (1)..(613): n = a or c or g or t
attcattccactcactcacccactngtaggcacgacttgcctttcaccagcnnctgctgacnntgctgtgtnntcagcttccctgtcccgggatacagcagtggataatgctgttgttttctgtctcccatgcatctagctcttactctaataaataaaaatgcaaaggaaattttacatttaaaaatggattttaagaggtggcaaaagtattctttccaatcagcctttcactggggacctaggaccaatatctatcaactcaatgtttttgtatctgaattgcttgtgtacatttcttttttattgtgttgaaataacaaaatcaactcgtctgatatggtgatggttttactgtggcaaaagcaaaggactgatcaccagctgtgccccttggagggaataggaaatggttgaagggaacggactgaattgggaactcatgtactagagttatcctgcggattttctaggcacagctctggtgaaacagtaatgtgagtccttaccagcattctgatttaatgtggtgacatgatatcaaaatatgcactcagatccacagaaggtgtttntaactatatttgaaannnnnnntgtgtgtatgtgtgtg

SEQ ID NO: 7149 - DNA, 655 bp, Canis familiaris
  misc_feature (1)..(655): n = a or c or g or t
gctcnagcgnngagccatcttcccaaactccagggaatgactactctgacgatacctgcctgggccaagagtaccagatcatcacccagatcaacagtgactacactcatctgctgcacacagtttctccagattatgagcttttggcaaccaaggatgagagagtctgctaaaaatgccctgctaagccagggtctgctgccataattgcctattcagtccctgtcttctgcatagctgccttctctgctacgtctctccctggataacctatcgtgtattccctgccaacactgaggtttctaagagtgactggctttgcttaaaaagttaccatatgcacttttaaacaagacttctgggtcaggccttaggcccttctgctatctcttcttctgctgcttctctttaaacaccagcaggaagttcccatagcactaagacatagtcaccatgcctccagatgtcactcaactttggcctcttgccaccagaagaccataaggaaaaaactttgccagctcaagggactagttatgtccaacatcacttccttttttttcagggccagatagcttttaagatttttatgtaacaggccagggttcagttttgctcctgaactgttagtctagtgctctgatattcttttagt

SEQ ID NO: 7150 - DNA, 605 bp, Canis familiaris
  misc_feature (1)..(605): n = a or c or g or t
gnnngagtaaaaaaaaaaaaaaaaaagagtaaacataatngacttttatatcttgagttttctcaatnatctnngagaannaaagaagaaattataatattnnnnngatgtgcttctcaaggtatagaagtactgaacattactgnacgtttatattataaatgggtgaaaagattttaaatgaaggtgagttttctatacttcacttcaactggttaagtgtctatgttagcacatgatgataaattatgtacttaagtgtaatacctagaataactactaaaaatcaatatgaagaaatccattcagaaacactaaagattgatcaaagggaattctaataaagtatttaagtgactcttgatacatacaacaacttgggtagatttcatgaacaatctgtagagagaaaaaaaatctcagaatgtggcagatttgatttgatttgatttatgtaacctttctgaaatggcataattacacagttagataacagattagtatttgggggggaataggaattttcgggcattaaagggtagcagagtgatgtttgtggtgacggaataactccctattgattgcagtggcagttacatgattct

SEQ ID NO: 7151 - DNA, 404 bp, Canis familiaris
  misc_feature (1)..(404): n = a or c or g or t
gcaccatgaccngngnnttnntcgnnaacccgcggcccacggtgaccctctacaagggcgacgtcaacatcacggnngactccaannnctggtacaactccaccagcggnnnctgcacgatcgtcatccccacctgcacgctcaaggacagcggcgagtacagcgtcctggtggagaacgagctgggcaaggaccgcagcagctgcgcgctcacggtctacgacaaagatgacaagtcaattctagcatcagtcactgaaagtctgcagaagtcaaagtaccttatgtgagctccggcccaggccaagcatcaggaggatattgtgagggcctatcctgttgtttctgggcctcttctgtgcgtcgccccagtgagggtgaccnnntttgctctctggtgcttg

SEQ ID NO: 7152 - DNA, 673 bp, Canis familiaris
  misc_feature (1)..(673): n = a or c or g or t
tcggtaatattttttaatcaagcaaaaatcaagannnacagnntatatatgaatatgnnngagtanntatatttcatacaagtaagaaatataatgaagctgatcaacttttcagaaatggcagatttgagatcagaatcaataattcttagtgtgtgactaattcattaggccctaatgaagttcctcatgaccctaatctgagctctgcaatctaaatcctgtttctttccctctctcccaaaagcaaagttccttgattacaattactgtgttagggggcctaagaatatggaaacatgtcttttaccttcattttgagctcagcaaaagtctgtttataaggatagctgtagaattacatttctcctttattagtaagagcagccatctatttactagttggcctaatagtttcacatgctattcatggcacagagttgtgggcagaagaagaaacaacaaaaggaagcccttctggtacattaagaatagtcatggttttcttaaaaggaactacaccattaacagtaacaaccaaaatcaaaacagaaagacacctaggaagagttctactcgagcttataatcatattcaagagctgtagaatactaaaagaaacagattttttatagtttgaggtttgttatttccattatttttcttccaagta

SEQ ID NO: 7153 - DNA, 623 bp, Canis familiaris
  misc_feature (1)..(623): n = a or c or g or t
cagctgcagacagacctgtcggtcatccctgtcatcnnnngggctcaggtcatccatgacaccttcgacctggnnagtgcccaaatcgtccctgtcactctggcgctgaacagcaccctcttcctgaaccaagagacagagtacatgccctgggaggccgccctgagcagcctgagctacttcaagctcatgttcgaccgctctgaggtctacggccccatgaaggtacaggaggtcatggcaggatccaaggaccacttgactcattgcctggaattgcatcattagggggttaacagaaacatggtctggggtggtgggacccttcagagaggcgagagggctgtgggatgaagggagcagggattgacaaactgaacaggttggggaggacaaagaaaggacccagacttctagcggggtttgttgttttggaaattagcactgtcaggagcacagaaaaagccactgagctgggagttggagggccccacttttaccagctgtatggctttggccaactctcatcagccccagtgaacccctctgtgaaatgagggaggtgcaggtgggaggtgcaggtattaacagctgtgagctnnnngtggcagcagggagcacat

SEQ ID NO: 7154 - DNA, 525 bp, Canis familiaris
  misc_feature (1)..(525): n = a or c or g or t
gcagagaccagacatattgcttttgnnnnnngagggcatgtaggattttggagaaagttaggggagtcatgggaaagaattattaaaattggaaacctgcaatcccaaagacagcaaaaacgatggacagacaatgcaatcaaaaccatgaagataacaggctcctgaaataacctggggatataggaccaggttgtcctctgtagggctgcataaatcactccccggagagagaacactgttgtttctgggtatgtggatagagacaagactggctagacaagcaaaggcaaagctggccattctcagcaccgtggcttttctcagtgggtcttcttgtttcttccccgagtagcgtttcccacacaggaagggcttatacatattagcttccttcctaggctttattgggggtacaaaataagtcctgtgtaagagatgatctctgtccattgggaccctgcaattgaaaaggggaaataagacatgcccaggaaagaagtaggaggttttatgcatataatg

SEQ ID NO: 7155 - DNA, 673 bp, Canis familiaris
  misc_feature (1)..(673): n = a or c or g or t
agaacaattaatgcagttttgcacaaatattttttacattctggtcattcaatttgtcattgtgatctttgctcttcgacaaaaatgatgagaagaagggtctgtaaacttttgtaatgctataaattctgtttcacttgtgaactgtttattttctgctgagaccattgcaaatttgagctttggcaggggggaggggattatnnncatgtatnnnngnnnnngtacagaacacaaaacttgtttctgtctgtnaattatttaatacannnnncatttaattaaatgttcagagaaaggtgtncnctaaagcaacaatcttaatgtttaaaaaaaattagtcattaaaagatcattgtgataattggtngatattttactttaatttcagtcattaactatgaaatgtatagctgtccttttctatcttaccattatttctaaatctagtggattgattttcagcattgtgcctgccagtatgcctacaagattatcttatataataagtgtccaaatgaacccaaattgtcagtcataattttgatcatgnntttattttttctttcttnnaaaaaaagaggttttgttttcacaattaggcttaacatactgtgttgtagattatccttcagtgaactattttaaatgttaaaattaggtgccacttaaa

SEQ ID NO: 7156 - DNA, 444 bp, Canis familiaris
  misc_feature (1)..(444): n = a or c or g or t
tgtgcccagggcagtgtttgtagatctggaacctacagtcattgatgacgtctacactggcacctaccaccagctcttttacnnnnngcgcctcaccacaggcaaagaagttgtttccccaaggcnntacaccatcggcagggagatcattggccctgtcttggactgaattcagaaactggctcaccagtgcacaggtctggttctgggttcacctccaaactccatactgatggaacatctctctgtcagttatggcaagaattctaagctgnngttctccatttacctggcccttcaagtttccacaattgttgtaattgagccctacaactgtccttactaccaacaccacnntagagcactttgactgtgtcttcatggtagacaacaaggccatctatgacatctgttgcagaaacctcgatattgggatccctgggt

SEQ ID NO: 7157 - DNA, 481 bp, Canis familiaris
  misc_feature (1)..(481): n = a or c or g or t
agagaggtgtacataatttatgcaggcaaatctaataccaatgtcattggttttgtnngatatatatatatatatatatgcttttacatatatatttttcaggcatatatatgtgtgtgtgtatatatatatatatatatatatgcttgaaaataaagatgtaatactttagtgttttttaattgggggggtggtttggggaggaaggaaggaatgtatattatggacttaacctaggttttaagttttaggctggcaaaagaaatgttatccattgggtttgacattgtctactttcttcaaacttgagaattacaccaggatggtgtttacattgttcctacattgtacctgtagctccccaagactgtagcttcagaggttggtctgacagaaaacataaacattgctcttgaaaatgctatacagtttatacaattgctttgataactttttgcatttgaatctgtgcttctatttt

SEQ ID NO: 7158 - DNA, 377 bp, Canis familiaris
  misc_feature (1)..(377): n = a or c or g or t
ccaaagtcttcagtgcgtcctnnnaccggtctctcagggtgtggagtatggacaacatgatctgcacgcagaccctactgcgtcaccagggcagtgtaactgcactggctgtgtcccggggccggctcttctcaggtgccgtggacagcactgtgaaggtttggacttgctgatggaatccaggccagtgttggcttcctctgggacctcacaggcctgtcccaagcaggctggccatgtgaggggcctcgagggagggtctctgcctggcccatggggacaggcaggcaggctcacttggccaggcagtgtcctccccgccctgtgcctggcgagcctccctttgcttggccttgtgatcgtcgctgccgggatag

SEQ ID NO: 7159 - DNA, 338 bp, Canis familiaris
  misc_feature (1)..(338): n = a or c or g or t
cctcccctnnacntctgtcccnnntagtcagaactccagcnntactaagcctcannnnatgannnnnaatgacctgcaaaccttctntgaggtacctgnnntgatagnnnnncnnnnntcctcccggcgagcaggtagccaagactgggtnnnncgtcctgtggatatagtttcctcnnnnnnccncaactatcgccagatgtcagtgcctcccaaaatcagctnnnagccctantgccctgggtcaggcacccnggtagggcatgtggtcttnnntgcccgccannnncagttcggggtgggcaggnnnaagtnnnnnnctctgnnncncaggnnnn

SEQ ID NO: 7160 - DNA, 445 bp, Canis familiaris
  misc_feature (1)..(445): n = a or c or g or t
tcccccggaagtcgctcgcgntctggacccaggacacgccggggtctgcctcccggccccaggcgcagagnnnnngagggacggaggcccctgaggacgatgctctttcagatgcagatttgtgatttagaggagatttcagtaaacnnnttatttccttcccagttaacaagtgaggaaaaaaacctttaaagaaaatcttgaatttatgtttggaaaccatatccggttttcagggttggggtttccccatttgttttcttggaattggcaataatcttggaaattcacnnnnnnnnncannnnnnttcatactgtgtcgcctaaagagtaagaattatctaaaaataagggagtagattatacagttaaaagattcagaaacacattcttatattaatttgcttattttcagnnnnnttggtgatctttaataattgaacat

SEQ ID NO: 7161 - DNA, 406 bp, Canis familiaris
  misc_feature (1)..(406): n = a or c or g or t
ccatcaatgaatngaatnnnnnaannngntgnnnnnnatggatgcagtcctaangacatttttcagaagctctcctcctgttgtagaaagcagtacagtatcttcagtgtcaaacagttagatannnnnnntctgnntttttttttttataactctataagagcagaatcaagcaggatttttctccccagtggataatgcaacagagaagacgcagttgcccaaacatgtaaaagaagttattttatgagaagttgattttttgtgtgacatctgcattgacttcagcattactgatggtactgctattcatgagtcatattaacattctctctgtgaaatcgtggtacagtcactgcccagaggtactgaggaaaaagctctatgggtttggcagatggcggtg

SEQ ID NO: 7162 - DNA, 403 bp, Canis familiaris
  misc_feature (1)..(403): n = a or c or g or t
gccntcggctgtcaggctcctgtggcaccactgaggacgcagggagatttgtcctcgcttcccacgttcaagtgcttcggagtaccatgtgctttgggnaagtgaatggggagcctgtctgttcttgagagtcagctccacagatgctgcagcagcaaacaggtggcctgcagtgaccagccttcgatgtgaaacgtggccggtctctccagaggcgagagacgccgtgctgaggaactaggtgacaccagctgaagaaatccacacaggatggatcctctgcaatgagaaaaagtatttaaccccttaggagaaaccttagcctttttcttaagatgtgattatggaccgtggaagcaggacattgtacatcagggattttcacccagaaggccctccctag

SEQ ID NO: 7163 - DNA, 375 bp, Canis familiaris
  misc_feature (1)..(375): n = a or c or g or t
gaaccaggacgccccagnnnnnnngaaggacccagnnctcaatgctgtggccgccaggcacgggcgaactccggcccaggtggnnnngcgcttccagctgcagcggggggtggtggccttggccaagagcttcaacgagaagagaatccgggagaacttccaggtgtttgatttccagttgacaccagaggacatggagactctgagcagcctcaacaaaaacattcgctacttttcagatactttatttgctactcatccggattatccatttaatgacgaggattaattgatttctttgactctggttgatgatcagcgaacagctcaaggatgagaaaggatctgacttagcccatgttacttagcctgaca

SEQ ID NO: 7164 - DNA, 632 bp, Canis familiaris
  misc_feature (1)..(632): n = a or c or g or t
gtgcttagcatgttatcctgctccaataagagctcttgtgagtggtagctgtgtcctggtcgnntagcccagcccccaggaatgtgaaggtattcagagatattcagattaatgaactgtttcagccaccatgacataagatctgtgtgctttggtgtgttttgtattgtgaaaagtctgagtaaaaagaagacccgactatgcccaccttctttttctgtctgttccctgaagttcctctgtattattctgcttgcaggcctctaggttctgtttgatgtttgtcttgaactcttaagtgttgtctgataaccagccccaattcccttcctagtccaacgaggtactcagaatcagaactgctctgatgagactttgaccctttctaaggatggaggctggtattcatattagtcttcaagtctgggcttcacgaggtcagaaatgaagggagggcttccttgttggacttagacctgtgttagccattagccacatggggtttttgagcattcgaaatgtggctagtccaaatcaagatgttctgtaaatgtaaaatactcactggattttgaagatttagtactaaaaaaagaatggaaactcagtaatttttatattgatcgcatgtt

SEQ ID NO: 7165 - DNA, 629 bp, Canis familiaris
  misc_feature (1)..(629): n = a or c or g or t
atggnnaaaaaaagagagattcnngctacattttaaaaaagacatgcttactaannnnnaaaaagacatttttcttcaccccactcccccatgcaagctatttttctcaagaacttcaacgannagggtaaagctgaggttctnngaaatcaggctggagttctcagtgctccttttctcaaaccgattctcctagctgggccttgtcagagaaacttcatgaaccgtaattgtgatttcaagaatcactacactgagagcccttaaaccactaatggagagaaatttgggccttttcatacatcctgctatttcctttcagatcattaaagttccttataggaatggcaaacagttgttttgattctggttgcaatggccctggaccaagggcgagaaagcattcctctgtttgcagcccggctagaaatacccagtcatacaagaaaggaagttttccccaacagcctcgttcagccgcctctgctggacctgattaattcaggagggcagcgtccaggaaaatgcttttcattccagctaagctctttctggctctgtctcttttccttcctcaattcaaggagtctgaagacgcactttctaaagcatcctagtctcttacgtag

SEQ ID NO: 7166 - DNA, 484 bp, Canis familiaris
  misc_feature (1)..(484): n = a or c or g or t
aggacaggcctcccagccatgttgcagcttggtgcannnaggtgacaatgcaacccagcncaggggctcccggtggggccatgtcctcgtcctacagctgcagtaggtgtggcagcaaggcctcgggagtctgccacctctgacaccaccctggcagccaggacccctgggtcactcttaggagaggacaccatgcagcagccctggtcctcgacctctgcgctgactcgggctcgcgtcaccggcagcccagctcaggtgggagtgaccccgacagaccaacccccacgcaggaccactgagccagcaggtgttggcaacactgccccttgccctcgggacacggacgccatggctctggtgacacctgcactcctgctggattgtggaacggaccagagggcgcctcgtgcagctgggggacgttgaccccgtggggagccagctggctgtttccttcaccctaaattcacatccttaacat

SEQ ID NO: 7167 - DNA, 537 bp, Canis familiaris
  misc_feature (1)..(537): n = a or c or g or t
aaaagtcaaggacttcagtgaatnngacttcaagccccagcagctcgtatcagatatctgcacaatctacttaaaccttggggacgannagaacttctgtgccacggtgcccaaggacggacgttcctattccccaactctctttgcacagacagtccgagtcctgaagaaaataaataagcccgggaatatgattgtggctttcagcaacttggcagagagaatcaagtctctagcagacctccagcaacaggaggaggaaacttatgcagatgcctgtgatgagttcctggatcccatcatgagcacactcatgtccgaccctgtggtgctgccatcctccagagtcactgtggatagatccaccattgccagacatttgctcagtgaccaaaccgacccctttaaccgtagtcccctcaccatggaccagatccggccaaacacagaactaaaagaaaaaatccaacgatggcttgcagagaggaaacaacaaaaggagcaacttgantaaatactgtgaaccaaacaaaccaa

SEQ ID NO: 7168 - DNA, 620 bp, Canis familiaris
  misc_feature (1)..(620): n = a or c or g or t
tctcatactaagatccttaacttnattagatctacaaagactcnannnnaaaaaaaggtcacatnnnnnnnnacatttcaacccacaacagagaatgcggtggctnnaacacatggccccaaattatttgagattccttccattaagggggagtggtctatggcttctctgtatgaatccagtgacctacccattgaagcggtctatggcttccctgtatgaatctagtgacctacccattgaagcggtctatggcttttctgtatgaatctagtgacctacccataattgctcattcctccctcttcccagcccctggtaaatctgtccactttccatttctatgaattggcctattgtagatgttctggctaatttcacctgacataaaggttcaaggttcatccatactgttatctgcatagaacttcattcctttttattactgtataatattccattgtgtgtatatgccacattttgtttatctatttgtttatctcttgatggacacttgggtcatctccacgttttggctattatgaataacactattatgaacattggcatatggatatatgtttgagtccatgttttcaagtatatacctatgagtggaa

SEQ ID NO: 7169 - DNA, 264 bp, Canis familiaris
  misc_feature (1)..(264): n = a or c or g or t
tatgnttanncctgtgtatcatatgtgattttgaaatgnnnnncttgaatagcactaatttttatttgtaatatttttctanaannnaatgagtagcattannnaaagaggttttanttngnnnncaatcatatgtgaccnnnnnnattctgtanntaatattttagtaaagccnnnagtagatacttctaagatcatgtatgaggggtggtgcatgttgggatnnaagttggannnnnnngcannnnnngtctagctctgttt

SEQ ID NO: 7170 - DNA, 390 bp, Canis familiaris
  misc_feature (1)..(390): n = a or c or g or t
tgcacgantagccattatgaagcacgagaagaagtgataagactggataaaaagtnnggcantctgatgaagctgctcagctnngaggatgagatggtggtgggcaatgccgccctctgcctggggaactgcatggaggtgccctatgctgcatcctccctgttgaagacggatgtcgtgcaggtgttgttaaagcatgccggtggcgatgcgcaggagacagccgtgcagctgaacgcggggatcgctctggggaagctgtgcacggccgaacccagatttgctgctcagctgcgggagctgcatggcatagagattctcaactccacgatgaagtacgtcgccgatccttaaaacacgtggcgtctgtgcacggtttcacaaacccag

SEQ ID NO: 7171 - DNA, 466 bp, Canis familiaris
  misc_feature (1)..(466): n = a or c or g or t
catatgcacccctgttgtttccttagggaannnagggttcagtagaggnnnnnnnaccatatnntgtgtatnnnnnggtttgtgcttttgagancagaccaaggtaggccaccccaattctccaaggtggttgannnnnattgtgtatatctttgggacagtactaccctcaccaatgcccccccccccaaatccttgatttaaaaaaatatatttttttttaacgacaggctcggttatgttcctatcccaagcctggattactgtatttattttaaaatattataatttccacattggcttcattctaatcctatccatcccatccctgtagggctgcagagcccctccctgtgaaaagatggatggacggatgtagattcagatttctttagggaggtgggaatttgctaaagctgaggatgagttctttcatgctcgttggcttcaacaaaaactggaaact

SEQ ID NO: 7172 - DNA, 631 bp, Canis familiaris
gatcagctatttcaagaaaactataaaatgaatacttctgtatcttctactgccagtaacccaatagtaaagacctccggtgttagagttggaccaccaaatactgctttacatcatagtaaaaaagttgatttgcaaaccactcagaaaagtgtaatgaagagcgtttgccttgacagacattcttctaatgaagaaagtgtcccagtgtttgagaaagctaaaaacacaactcagaaaatgaaacatagttctcagaagcataactcagcccaattcaagaaagatgatgccaacaagttgaataaccctaaaatatatattaaagaaactgaacagtgcatccaggcttataaagcagctggaaatgaagaatgctgtttcccagatgcagctaaaggttctctgagttctctacagtgtcataaggataaaggtgactctgctgcttctgtggatagtcctcttcctttatatcaacgattaaaactaaggttccaaaactcttgaagtgaaattaaaaatattttaatataacttactattttagtgccatcagcactagcagaagcagaggcaaagtctctacatttggcataaagatggaatgtggttctgtatatcatgagac

SEQ ID NO: 7173 - DNA, 253 bp, Canis familiaris
  misc_feature (1)..(253): n = a or c or g or t
aattcccgctttatgtcggcatagtggnggcccacctgatgcaaacacagatgaaaacctcatcgtctctatgannnnnnccctctgtatcagcaaccgccctcagaacnctgggggcctacctgtcnnnaaggcaactggtgctacggggaacagcaccatacctactgtgactggaccagatagtggtcccccattcctacagagcacacagaacccccccaagccacagnnnnnntggtgcaatggggga

SEQ ID NO: 7174 - DNA, 555 bp, Canis familiaris
  misc_feature (1)..(555): n = a or c or g or t
gaatgaaaggaacccttcactgtgtctcatggtcccacccccccatcctgtgtgaattcctttagannaagggcaggaaaacttctgactttctctttgttcttcaatgtgaaactaaggccgagtctttctaagacaaatacagtgtacttaatgtttgtatgcaaatctaattgagatgtttggcaagaaatcccctaactgatttccatccaaacctacttatagagcacaatattacgtgtcgtacaattccagtgagaactgtgaatatgtgtacctttttttagtatttgccctgggggaaaagatattgtattatcatatatgctttttttgcaataagggtttattctcagaacaccaagtaaatctatctctatataaaaaaatatatgtaatatatacatattcaaactatatacagagcctgttttaaaaaaattacagtattatttagaaaaattatctgttctatggaccaaatgtaaaatatttataaatgaagatgcattttaaatgtctataaatggtgtcataactagagcacgggcg

SEQ ID NO: 7175 - DNA, 544 bp, Canis familiaris
agattgacaaagaaaggaacaaatataataccacatggtcagtgccgacacgattaacgcatctgagaatgcctgactggatgtatactgcaagtcggaacctaattactgctgcttatcaaatttacagtatgaagtgtgcacataaaatttgacagtttgacaaatgtctaggaaattaatttacacctttatgtgttttttgatgtgcgcagaggaagaagaatgctctctgaaagttcacaagccctaaggagttggaaagcaaggcattgtgggatttccttctacagggtctaactttgggactaagagttggctttctgtaaagttactttttaatgagacttaacacaggaaatgatctacatcagataaatcccaactgacagactacaaaatacctgaccagtactccttaaaaaatgttaatatcatcaaaatcaaagcaagtctgagaaactatcacaatgtagaggagacctaatgactaagtgtaatgtggtatcctaaatggagtactgagacagaaaagggactttac

SEQ ID NO: 7176 - DNA, 501 bp, Canis familiaris
  misc_feature (1)..(501): n = a or c or g or t
tcccccattcnngagcattcccaatgcctcttccttgtgtatggggttcctcctagatctgaagtgcctcctagctctagttcctcattcttggttttctcccacattttgaagaagcacatctcccaggattgtcctaagagcacatacttgtccttctaaattctcttctgtaacatcaggaattgaaacgagcaaactacacattcctggccctctgccacctggcttcttacacggctctaccgttgggtagcattggccagatcgtaagataggaacaagagacaagtatctttcccctgtatcatgaaggtgtcttggacagctacagtaacagctgctggccgtctgaatcaaagtaatggaggctcccagtcatggcttgatggcactggtgctgttttaacagcaatagcagcagccataagaagtgccttattgacttcatagcaagaacaggatcccaggccctagtcagaagcaattgctgtttcctgg

SEQ ID NO: 7177 - DNA, 452 bp, Canis familiaris
  misc_feature (1)..(452): n = a or c or g or t
gcttacatcagtatgcantcctactcccagcacatagtgtttccatattcctataatagaagcaaaagcaaagaccatgaggaactgtccctagtggccagtgaagcagtccgggctattgaaaatactaataaaaataccagatatactcatggcagtggttcagaaagtttatatctagctcctggaggttcagatgactggatctatgacttgggcataaaatactcgtttacgattgaacttcgagatacaggcagatatggattcttgctgccagagcgtttcatcaaacccacttgtgcagaagctctcgcagctatctctgaaatagctgggcatgtcatcaggaatgtttaatgcccttgattctttcactcttcttccatattttgattctctggctcccacaacaccaaatcactgtaggtgctctaaaattttatcagtag

SEQ ID NO: 7178 - DNA, 437 bp, Canis familiaris
  misc_feature (1)..(437): n = a or c or g or t
acatggatttctnnatgatgaatagcgcaggcatgnngctttctcnnnnngtagttcatatccttagaataagttaagcacttatttgggtctcaagaagagtcccttttttttttccagcaagtnnnaatacatnnnnnaattctcattaattacagaaaaaagaagaatncgtaaaaactttactgaagaagaaataaattaccttttcaatggagttaagaaaatgggaaatcattggaatttaattttgtggtctttcccctttcagcaaggacggaaggctgtggatcttgnncnnnnntaccnnnnnnngaccaaacaccccaagtgtgtagctccttgattggaatacttgttagtttgaactcttaaaatacaatgccttgaggaaacacaatttnaaatattcttctaaactctcatgaaacagggaa

SEQ ID NO: 7179 - DNA, 653 bp, Canis familiaris
  misc_feature (1)..(653): n = a or c or g or t
atcnanntatagtaaatcaggtactgtgctatacttattgatgaancagccagctcacactggggaagaatgagcagnctgaggggactagctcctataagaaacaaaggtcagaaactagtatcttgagaaaatactttaatgggcaggtctgaggaaaaaggaatgtgaacagatggctaaggcctgggataagtagctgtttcatattcacatttatcagagtcctgtggccagaatgagatatggaagaggagtagggaaatagaatattctgtaattcatagcttgctgtgttagatgagaggttgattagggttctggtattgacggatcctactacaaaaaaatgtcctaacatttattaggaggagatggtatctcaattatgtggcctaagcagacatgaagatagaagaaacaccagtctaaagcagtgcctcaggatttgagatggttgtgtgttttttaaatgtgttttttaatatgagcgattactgtctttagtatatttatgtatagttgtgtgtaaaaagcactggttggggtatcagcagatctgaattctggttccagatgtcttgtgtttccatctccctttctgtaaagcagaataatgtttacaccttaatctgcctctcagggataccatg

SEQ ID NO: 7180 - DNA, 580 bp, Canis familiaris
  misc_feature (1)..(580): n = a or c or g or t
ttcagaattaaaannnatgctagattccaagtccttcaaatgtgtagaacaaaccaagacttggataactccagttcaataancagttatttagagactatgatacaaaatagcttgtgattctagatctcacttttgtattatcctgtcacaatgcaagaaaataatgaatgtaagtcactattaaagctgtgtcagtgaaagaagttcaaagaataacttattttaagctggattcctactatccagctctattccctttgaatacaggcaagttaattgtaaatgatcaagttttttggtttttttgcccttttgattttcatcttgctgagttcaggaattgagtgatcaaaatataatccttatataaataaccttggaacagcaatgtgatttaaaaattaaaaatacatatgacccattaaaacatgtcctcactttttcttactgctggcctcgtggttgtctttgctttcttcactgctgtctccattatgttgtggttgattactatcttgagcatcagatcctccatttagagtctttgaacctttaaaagggtaccaatggaaaaact

SEQ ID NO: 7181 - DNA, 435 bp, Canis familiaris
  misc_feature (1)..(435): n = a or c or g or t
aaagnnagctttgaaggaatgaaaatgagaagtactaaacaagaaccaaatngaaatagtaaagtaaacaaagcacaggaagatgatttgnngtgggtagaagagaatgnnnnnncttctgtgacagatgtagcacttccagcnnttctggattcagatgaggaacgaatgatcacacactttgaaaggtccaaaatggagtaaaaaatgagaacatacgcagttgaagatgggcagtatctgggaagagatcagcttctgtgtcaatcttctacactcctccatggaattagannaggcagtgaaacctgatctgttccttgacctttgtgcattggagccggtgagaagtgtcagaacaaggagaacatcttgctgaaaacaagttcataggatgagaaaaannnncaagtgttttatttacaacattgatgc

SEQ ID NO: 7182 - DNA, 518 bp, Canis familiaris
  misc_feature (1)..(518): n = a or c or g or t
attttataatttcaggctacttatgccatgcttgggatgttgtnngaannnaagaaaaatacacttaacatattnntacaccttcatctnnnaaataaacctgtggatgatttgatgaggggtaaacgaaaatattnnntgnnnacgcataccaaggatatacttgtggctaaagtgagttgataatgttgtgcaaaggatagttgtcaccaactcatttctttatggtccataatgaaataaacatcttgtatactgttaattctgtaaacagatgcatgttcaaaagatctatgatggtcttgtaatcttaatctaatatattttagatattttaattttttccctcttgggaaatacatttagtatagtgtagaaaatacttcatgacattttcatataaggttatataacttttnntacataaacatgaaatttgttgtagaaaattctttaaaccaaacattttaatctaggacttcaatttaatctgttcnnngaatctatttttatgtggc

SEQ ID NO: 7183 - DNA, 485 bp, Canis familiaris
  misc_feature (1)..(485): n = a or c or g or t
gtgtcatacacagattgccganncttgaatgtgtgctncgttctggctgagtctgcagnannaagagagcagccatcgcatgcacttctcnctgagttcccctacgtcctgtcaccccagcaaggatggccgtgaaaagtgcatgttaaaaaggcagggtagggaaacagaatggaccaaccatttctgcctggttgcccagattagcacttcattgctaaccagaatgggcgtgatcataatttgggggtgtggctgatgtgtccaccttttgtctctgcagaatgttcaggacttcttgaccagtgttatgttcacccatctcccagcacacgtgtgatcatctagggaggggatcggtagagcatacaaaacccgttctttggagaagggagatgctgttgctttaatattcgtggagtaatatcctaaaatatgaacctgagttttggcagagcatggctgggaactctgttgacgttttc

SEQ ID NO: 7184 - DNA, 538 bp, Canis familiaris
  misc_feature (1)..(538): n = a or c or g or t
cctttgcagannnnnntgcannacacactnngggggctgctggnnagcaagggcagcttcatggtgcccacgcagtacggctgggtcctggacgctgaggtagtgttngacccagatagccagttcctgcccccgagggacttcgtggccccccatcttgccccaccctccgggagccagccgttgcctcctggagccaagaggctggccttcctacgctgggagttccccaactacagcagccggagccgagacttgctggggcgcttcgtgctggcccggcgccatgtgctggccgctggcttcctggtggtggatgtcccgtactacgagtggctggaactcaagtctgagtggcagaaaggcgcctacctgaaggacaagataagaaaagcagtggcggaggagctggccaagtgacctgtcctgagccgtgaactgcgtttccccagggtggggccaggttcccccagaggcctggccatggccactcatggacacacgtccctgtggggcttgcccagagaggagtgctggc

SEQ ID NO: 7185 - DNA, 490 bp, Canis familiaris
  misc_feature (1)..(490): n = a or c or g or t
aaacgnnnnnnggcagagggacaagtaagtagactccctgctgaacaaggagcccagcatggggctccacccctggagccttagctggtcagacacctgactgagccacctaggcacccctgggtgacacctttctatacttaggcttctgtgtctcccttctctagataatgccttgactnnnaagcactctttccccttctcccttccttttggctccctgtgctggtccccaccactactgatgtgctagagtactaaaggtgacaaagacctactgatttctcttgaaccatcaatgatctgaattcccattttgccctttcagaaatgtggagaatgcccttcctgctttgtagttattcttaatccaagcgagtactcccccagtgctgcttagggatccaaatnnnnnttttgttttttnncagactttcttctttatccccttcccctaataaaatctgagtgacattcannnnnntgtatt

SEQ ID NO: 7186 - DNA, 447 bp, Canis familiaris
  misc_feature (1)..(447): n = a or c or g or t
tgccccacctttcnagcccctgcccccaccatttctcnnannnnctcccngaagttgttgtccnnnggcagagatatacttcaaggnnagaggattcacggtcangatgaatttggnntcctcttttcntcgtctctggccnnnagggtccatnngcagctgtttccnnntgatgttcntagctcttctccttccaacttgcactatctctcagttcacttcctcatgttctctgtaccttccgctttccctcagcgtgctgcttcctcccagctggggcaagtggtttgtctgtaagtcggccattgggcccaccttgctctcatccctgacttgttgaaaacttactctgcaggcctgtgaaggatacatgtagctccacttttgtatgaattgttcaaagcccagagcaattcattagaattggaaccatagggatccctggat

SEQ ID NO: 7187 - DNA, 395 bp, Canis familiaris
  misc_feature (1)..(395): n = a or c or g or t
tatcgannntttacccttcaatncttcatnanctggagncttttcaggnnnnnaagaaagaatacagaagatagataannnnnaaatagaaaagatttccagagtcaaaagtatcagggtcctttnnnannnttgaaggtacagtttatctgcctttcctcagttttaccattatcagtgctatggtggatanacagaatacttgttgacagatcatcccattttcagtttctcatttagcatgacatnnnctttcaggtcttgcttctttacccattgtaagaatctctggcttttagttgaaatgtttagtccatttatacttnnnnnnattattganntagttgagttnnnnnnnnccaacttgcttgtttttnnnttcccctttctgcttt

SEQ ID NO: 7188 - DNA, 654 bp, Canis familiaris
  misc_feature (1)..(654): n = a or c or g or t
agaggtttcagngcgtgatnnnccattggatcnttaattctagtgnngctaatcaaacaatggcgncttaataaaccattccacggctgatacgaacacacagagctgtgaaatcctagccacgaaaactgaatcagctaaaatattttaacttgtcattacgtattggaactttaaaaagcaaaatgtctacatttaatgtgattttcctaagactgcaaaaaaaaccaacctatataaactgttagaagaatgaaaactttttgttcccaaatttccttttattcataatgaaaatatgaactataagcacgttaaaaattcctattgttttttaaacaaaatggaatgttagatggaaacaaagtgacattttcaacccatcaaaatgctatattgaagcccttacgcattttgagagaggaggtcctccccatggccaccagagggattgttcgtaaggcaaaggatacttactgttatgggcatgtaagaggctattctgactcttccatatcattttatgaggttcctgggggacttcctttttttagaaagtaaggatatcactttctggttttccttcaaaagtacttgagcccatactatcatggttggggtggacagggaggcaggagaagccatttttctttg

SEQ ID NO: 7189 - DNA, 351 bp, Canis familiaris
  misc_feature (1)..(351): n = a or c or g or t
atgaccctgtacacccttacccnnntggtgctgctcatctatgaggccaagttctttgacccgggccaggtactgtacacgtatgagtcgccggcgggctatgggctcattgggctgcaggtggcggcttacgtgtggnnnnnctacgccgtgctcatctccttgcgccacttcccggagaagcagcctttttacgtgcccttctttgctgcctacaccctctggtgagacgtgctggggccccaacctgtccctgtctcctggggcctcccagaaatggctctccgtttctcagaccctcctcagtgaggctgacgggcttttgagtcaggcagctgtgccagggtctgc

SEQ ID NO: 7190 - DNA, 463 bp, Canis familiaris
  misc_feature (1)..(463): n = a or c or g or t
cctcccatatcataagaacggnnnttaaattcatcccactctgctgnnaagggctagtggtcgaggctaccagagagagcccagcagacagcagcgtnnnnacctctgcctccatagggtacccagnnngncgttcacnnannaggaaatggcactttttgcaaaatttgaaatttcttgggtaaccaatattagcttggcagctaaaatcaagatgttgccaaatacttattgtctttgcctaacgttggttacacagcccagttgcttttatttttaannnnnnntaatgtcctatctcaaaagaacaatcagtacattttctttctgcagaatcccgaatctcaaccatgtataactggactgtccaattttctttgtgctgtcttctcttatatataagtgagcagattatatgccgagtcccttgtctctagcaatttctgctaaaactttcaagtag

SEQ ID NO: 7191 - DNA, 374 bp, Canis familiaris
  misc_feature (1)..(374): n = a or c or g or t
gcagatgccagaccacccctgcactnnnggggcctgnntgggcccctgaacgctcaggcggggcctctagcctaccgcggctgcatgaggaacctggtgctgaaccggtcccccgtcacctggcctcgctctgtgggcgtccagggtncagtgggggccagcggctgcccctccaaccacgcagcagagcgcccaggggccctggctgggcatccactggaggnncgccccaggcaggccggctcccacctctcggggcctcctgcccccttcagctgaagtctgtgtctatttatctggactctagattctacaggtgatgagtcttctttctnnnnntggttttttnnnnnnggggtnnntaatatttnnta

SEQ ID NO: 7192 - DNA, 520 bp, Canis familiaris
  misc_feature (1)..(520): n = a or c or g or t
atgctcacacnnnccaggtccctggcaaagaacaattggattcctcaattttgtagacaccagaacaatgtggaaatacataaattaagcatcttatttcccttttgaacctccttacaaaagctgcctgtcttttctatagcactatatccattttgctgtttctgtaaatgcctgactaaatcttaggatatggattaacatagtagtttatgaaggacctatattgataaatggcatacttttttttaattgaaagacttgaagaattgaacacagaaatggtagtttttatttgatgcaaagctgagtacaagcatcataacagccctgaatctgttgcaagtgttcatgtgatttagtagccgcattaacctggctgggatgtagacaggtttatagatggtgaagcctcatggtagtgtgtggtccgcactgctagaaactgcaatgttatggcatcaaagtgcattgattcatcatatgtcatgattttcnnnnnntgatttgtaatctattc

SEQ ID NO: 7193 - DNA, 53 bp, Canis familiaris
  misc_feature (1)..(53): n = a or c or g or t
catgaaggccatgcctgtccctaaaggtggctttacctcttaangaacaagaa

SEQ ID NO: 7194 - DNA, 531 bp, Canis familiaris
  misc_feature (1)..(531): n = a or c or g or t
catnnaacattaacataaaanngggataaaagaacatttgtgaggaacaattactttttgaggttgatcttgtgtcttttcctaaaacctattctttgttgctgctaaaatagagaaaggggtggtggtggtggtagaggggcttatctttgtagacctttgtcctggtatttatttcattcaattacataaaagtttaactctacaaatatctgataatattgggaaccattgagggtagatcttgctccattttgagttgttccctaagagttccaattatgtccaatggagagacctaagaaagaatcgctagttacaaaagtactccaagtctcctggagaaggggaagttgaggcctgacgtaaaactctgaatgtgacaggttaaagccaaatggactcatatcattgggaataaagtaactgaaattttgaagtgattccctgataggaaatgattggagggtaaggagaaaggaaaaggagagtggtnnncagcaaaaatggccnnngcttggggcccatgtg

SEQ ID NO: 7195 - DNA, 552 bp, Canis familiaris
ttgcaagaaatgcaggcagttttgacttggaataaggtctttccttaagtccttaagagttgattggtatttgcagtatcccacacttgctttgagaaatgaaaagcgaatcatgagtatatattctgtccaagtgggaaatgttggagaactaagtgagatgtgaactactttcttgtggtggctctgggacttgacaagttaatgactgctctcctgttttccctcttagtacatccagcagtggtgattcgacaacgaaaatcataccggagaaaagatggtgtgtttctctattttgaggataatgcgggggtcatagtaaataataaaggtgaaatgaaaggtaagaaagaaatcaaagtgttgcctaggtcttcgagagcagttgacttattaaccttagggtctatctgagcttatctgtcacttcgttctttttttatgtaggttctgctattacaggaccagtcgcaaaggagtgtgcagacttgtggcccaggattgcttccaatgctggcagcattgcatgattctttggtgtatttgttt

SEQ ID NO: 7196 - DNA, 596 bp, Canis familiaris
  misc_feature (1)..(596): n = a or c or g or t
acaagccaaggaatgccagggattgctnnnaaacaccagaatctaggaagatgcaagaaaaggactttcttctataggtttcagagggactatgatcctgccaacaccttgatatcagatttctaggctttaagagtaagataataagtttccagtgttccaagccacccatttgcggtactttgctgtggcagccccacaaaactaaatacagatcccagaggaaggaggttattgaagagcattccttaggatccagaagacctgcttaggtatgagatctctgaagaaagagtctcttactaaggacttcatcaattcctaacaaggtgtcataaatcagaaaagcttggcacccgctctctgcaatatccagttaagcctaaaaatcctcccgaatgtcattttgtgagggatctaggctaagtctgcattgtctttatcaggacagagccttcttttcttcttagatatggcatgccctgtataggtaggcaaccagaggagaagagggagggcttattttaaaaatgagtttaatttattgttgcttaagtttgtcaaattgctcactagctttggccaaagaatatttt

SEQ ID NO: 7197 - DNA, 360 bp, Canis familiaris
  misc_feature (1)..(360): n = a or c or g or t
gtgaaaatggataatggganncctcactaaaatggagtcaaaagatttggcagggggacctctcagcctaccactgaacttcaattgcagacccaacaggaagagatgtncgttgtatgtagatactgccttactacccacaggaggaagagagccttacttcctccccttcctcccatcctcccagcagtcctactcacaagagactcacaactcaaccaatgagaagccactatacttccaacttccagtttactccaatggacattttgtttgtaacagctttctcaacttccccttttcctttacaaaagagcactcctctcctatgttctctgggcttgcctatggttttgctgt

SEQ ID NO: 7198 - DNA, 428 bp, Canis familiaris
  misc_feature (1)..(428): n = a or c or g or t
ccagagcatctcttgagtacccctccccatcccagatgctagtgcctcccactgcccccccaaattnnaccccacagaaagctgatggagccagccttcccctcctggggggctcttcctaaatatctgactggtgtgnaggctccagggagggccccgggtgggatggaccctggctgagcctcaagaaacgaggaagaggaggggggagggctcctggcggccagtgtccccacagctctcccggcacccagttcccacacctccctcccagctgcactttaacccagagggggagtggggtcctggggacagggcgggtgagtctgctcctttgtcccccggggcgccggcagctcccccagcccctgtcccgggggtgccccggcnnntcctcacggctgttnnnncaagagcttctggagctt

SEQ ID NO: 7199 - DNA, 544 bp, Canis familiaris
  misc_feature (1)..(544): n = a or c or g or t
gcttnnntgcacagtaccttnntataatttccctgtgactgctctggccatcgcccccaataccaacaaccttgtcatcgctcattctgaccagcaggtatttgagtacagtatcccagacaaacagtatacagagtnnngccggaccatccagaagcaggggtttcattacctttggctccaaagggacactcccatcacacatatcagttttcatcccaagagaccaatgcacatccttctccatgatgcctacatgttctgcatcattgacaagtcattgcctcttccaaatgacaaaaccttattctacaatccacttcctcccacgaacgaatcagatgttatcaggaggcgtaccgcccatgcctttaaaatttctaagatatataagcctttgctcttcatggatcttttggatgaaagaaccctggtnncagtagnnnnnnnnnnnngatgacatcatcgctcaacttccaccacccatcaaaaagaagaaatttgggacctaaaatagggcactgtctgtgtccttccttgaact

SEQ ID NO: 7200 - DNA, 598 bp, Canis familiaris
  misc_feature (1)..(598): n = a or c or g or t
cacatctgtggatgagaactacgagtnnnactccgaattccctggggacatggaattgctggagactctgcanctaggcttgactggccttcgaccccgacctgaagccgagccagagctagatgcgaaggttccagaggagggcagcggcctcccgaccactgcccaggctccgggtcctgaggcccgctgtgctgccctccgggaggagttcctggctttccgtcgccgccgagacgccactagggctcggttaccagtctatagacagcctgtccctcatccggaacaggccactctgctgtgaaagctgggtgaaggcacacagacctcgcagaggggggcccgacgagacctagctccagcctggaacaccgtctctgcccctttggtgccaggcacagcccctgatggtgggcttggggggggggcgtggtaggctagagatgtatgtgctggcccccagagcctggaggaacaggggttttagatctgccagtgtgtgtgtgtgcgcgcgctgcgcacgtgtgtggtgctgatggtggtggtgtttgtggtgtgggtgaagttttttacaggtgaataaagaaaatccgnn

SEQ ID NO: 7201 - DNA, 434 bp, Canis familiaris
  misc_feature (1)..(434): n = a or c or g or t
anggcactgctaacagggaaagactgtccccatgtncgggagaagggctcagggaaacagaacaaggatctctatgagttagncttctcagtcagctatgaccacggggannnnnnngcatacctcaacttcatcgccccatccaaacgggagttccacctgtggacagatgggctgagtgccctgctaggcagtcccatgggcagcgagcagactcggctggacctggaacagctgctgacaatggaaaccaaactgcggttgttnnngctggagaacgtgcccattcccgaacagccacctcccatccctccaccccccaccaatttcaacttttgctacgactgcagcatcacggaaccctgacagtgagattggctgtgggccacagctgctggcattggggaccatgaaggnnggagggtggaggagcc

SEQ ID NO: 7202 - DNA, 394 bp, Canis familiaris
  misc_feature (1)..(394): n = a or c or g or t
tgctctntcagtcctttggttttccagnngattgttgtnnnntnngnncnntgaaaggaaattataagnnnctttnnnatgttgtttttgtagaactggnnncaattgacttttgnntaggnnntgtttaaatccattacctgtnnntggcaacataaaaaggatttaaaaagataattcaaaaaaaaggtggatcatgtattaatcagtgaacagggatatacctggccaacagattgaaatgcaacacatgnnntttgtgtgtctcctcttaagggagggttggagggatgtttttttttctcatcttgtgtgtaattctctattgcctaggatattaaagtagagnnntnaagtgtgggtttctgtgtattgaggatctgtttggatttnn

SEQ ID NO: 7203 - DNA, 585 bp, Canis familiaris
agttccccaaaactgaatctgaaaatccagaaaaaaatacaatagatgcagaaaataaaattgaaagaaagaaaattgaaccaaatatttgctttgataagggcagacagtgttctggaaaagagaccattctttttaagctcgaaactatacaagaacttgaccggaaacatcaccaagacaatgatctctctgtgcaaatgttaaaagattttcttgaagatgatgttgacatgaatcagtattttttaccaccaaagtcattgctgcgatacgctcttttgctagacattgttaagcccacttgccgaaggtccacatgctttaccaaaggttatggaagctacgtagaagggacaggatctgtgttacagactacagaggatgtgcagattgaggatatctacaaatcccttaccaatttgtctcaagaggaaaagataacaaaattgttaatgcttaaacttcgatatttcactcctaaagaaatagcaaatctccttggatttccttcagagttcggatttcctgagaagataacagtgaagcagcgttatcggctacttggaaatagtctcaatgtgc

SEQ ID NO: 7204 - DNA, 668 bp, Canis familiaris
  misc_feature (1)..(668): n = a or c or g or t
taattcatttaatgagatgatgataannctgatatannnnnngntaatanncagtatcagcaaatttgttcatanngagattaaatnnnnnnnaatgatcagaattagnnactgtatnnataannnnnagnnataaagagnaaaaaannnnnnnaatgancntagntgttttttataagcctgaggntagttaactcttctattgataattatatttttgttactgtgcttctatatctgttggactgtttttgttgacattggtgttaataacacataattagtaggcattacaccttttttaaagctcatttggtaatgaagtttacacctatatgcataactgccatacactgaacttaaaattattttacatcaatgtggaattcttgactcagaaagctaatgtgtacatatctaaagagcaatgtttcccattatacaattagtaacttttactaattatacaagtattacctcaactatatatacactggggtcacagcttctctgagatgtatcagtattttgaaagtaaatcttaaacactatttttccattcgtattcctttagaatcttctgtagaatatgatagtgactcagtagttaatgatttaggttgttacagtgtttagacatgaaagtcaccttctttgtctcatcaaga

SEQ ID NO: 7205 - DNA, 483 bp, Canis familiaris
  misc_feature (1)..(474): n = a or c or g or t
atgtggttgctggtgtctgtatctcaatcactgtggnnnnnaatttctactccgtgataaacgaagagggtatcancttcccaccatctctctatatacccttcaagccagatagtcaggaaattggcagtgcccttctggtggcatgtctggctgccttcatgatgctgttaagtgggctgcttttcctctcctacaagcaccccctggccagacaaatacatcctgaaacttcagagacgtagaattcctgcttgccttggctttgcgaatccaacatgaccaagagtttatgagaagtattagcaaaaaaaaaagagaagtattagcagaatgttctattaaatatttccaaagattcaagaccatggcaaaggtagttttaggcaggaagtggccatcaatttccttcctttatcttctgtgtctttgttttactgacgcaccagttcattgattgaagaaatttcacttaaaaaaaaa

SEQ ID NO: 7206 - DNA, 198 bp, Canis familiaris
  misc_feature (1)..(198): n = a or c or g or t
agnaagccaacctgctcaacnnngtcatcnnnnnnnngttaacataaccgcccgnnnngccggcngnnncatctccctcctnnntctccnnnggccagctgccccgcggggannnnctctcnnnccccttnnnngcacacccagcagtccagtgccacgtctcctccgtagctctgggtnnntagatcnngnntggac

SEQ ID NO: 7207 - DNA, 544 bp, Canis familiaris
  misc_feature (1)..(544): n = a or c or g or t
ccagcaccgnnagctgacactagcccagctgtaccgaatcaggaccaccctgctgcttaactccacgctcactgcctcnnnggnctgagcagagggaggcccccaaggttgccactgaccaagagatggcagacagcatgcctcctggggcatcccggtcctggctccagctgctgcttgtgcctgtgggagccagagtgccgggcaggaaccctgatttgcactttgccagactggatggaagtggaggagcgtacagcagagctcctggcccaggctgcagtagttcctcaggatcctccaaaaggccacattcactaacctgtacaccccctcccaactccccaccccacagggtcccccgcttcttgaagtcaccagctcctctgggctgggctccggggtggtccttcccacctccaccctcatccggtcctggatgggatgtttgttcccctggccttccctccctcccagtcccactggccaccccaggcttgggttaggctctgtgtaaaattgcatatttattgagcttttgatt

SEQ ID NO: 7208 - DNA, 666 bp, Canis familiaris
  misc_feature (1)..(666): n = a or c or g or t
agcancaaatgatccnnagctgnctgatattntaattgctctnnngcacnnnngaaaagaactgcaangnctgagaaatatgaaaaannnnngnnncagcagaatgtgaaaaacctgctcatcattcagcttccaaaattccgaagtccagaagtttttcctccaagaaaaaaaattgcaaaaaaaaaaagaaagaaagaaagactaagtcctctcccatcactaagcaatactatttagtgggatgttttagttattgtgatgtggtgggtatgcaaattctgtttatcccacatcaccaaattagcatttcagtgagaatcttccagaaaacattcctacttcctcagtctttcacttaatgactttgcttggttagatgctagaagagaatggacgattttcaagtactttcaacatcgattgcaaatcttttaagggcccctgcttactgggataagttttgaagattaaattcttaaaatattaataccagaccaaagacacattttctgtctcccaaaagcgatttttttaagagtgaatcttgctctgcttcaagttaaaatactttttttttcttttaagtggctatggttgttacataatttcacaatgcaagccaaacaccaacccagtgaatattttttaaaaagttggagtttt

SEQ ID NO: 7209 - DNA, 490 bp, Canis familiaris
  misc_feature (1)..(490): n = a or c or g or t
aaaatcnnaaaaaaattgttnnnnntaaaaaacaaaaaaaaagttaaaaacaacatagtaaaagtaactatatctttaataatgttattacacaataaaaatgtaaaatgtgagaagtgtaaagcttaggaatccaattaaagttgctgatagttaaaaatagggtgttaaattttagggtattttatggttctcatggtaaccacagagagaaaaccttttaattacacaaaagaagatgacaagtcaaagtatactgatgacaggacatcaaaccacaaagacaacaggacaagaaacaaggaacaatggacctacaaaacaaacaaacacaaacagcaatattaaatccttactgattgttactttaaatgtcaatagattgggcagctccaatggcccagcagtttggcaccgccttcggcccggggtatgatcttggacacccgggattgagtcccacatcaggctccctgcatggagnnngctt

SEQ ID NO: 7210 - DNA, 593 bp, Canis familiaris
  misc_feature (1)..(593): n = a or c or g or t
gcatatgacacagttaagggcttattaccaaaaccaaaggaaaccccatttcttgtctcctttttcattgctcaagttgtgaccacatgttctggaattctctcttatccctttgacacagttagaagacgcatgatgatgcagagtggtgaggttgaacggcaatataaaggaactttagactgctttgtgaagatataccaacatgagggagtcaatgcattttttcgtggtgccttctccaatattcttcgtggtacagggggtgctttggtgttggtactgtatgataaaattaaagaatttcttaatattgatattagaggtagttcatcaggagattaaattaagaaatacatatatttaacttgttaaacatacaaattacatagctgccatttgtatacaatttgatagtgtgttattactgtcggtatttttttagaatgctaattctgcaataaaacagatgccttttcaaggattttaaatactaaaaatcagataaatgtgggtttcttcctacttagactcaagcttactttattgagccattttacttataagtannntatgttacttctattagttta

SEQ ID NO: 7211 - DNA, 548 bp, Canis familiaris
  misc_feature (1)..(548): n = a or c or g or t
ctgggtgtgatcctggatccggggatngagtcccacatcaggctccatacagggagcccgatgtgggacttgatcccaggatcccaggacgatgccctgggnngaaggcaggtgctaaaccgctgagccacccagggatccctatacgtgaaaactttaaacatcagttataagaacttgccgaacgcttactgtgtgccaggcacggctctaaaaatattatatatgtgctgtctaatccatgcaatcctcacctttgtgaggtagagactatttgttgttcacatgtctcagatgaataaattaaggcctaaagaaatgaactgacctcaagataatacagttgctggatggcagagctggaactagaagttccatctgtctctctaaaaagcctggaccattttggccttttgacttcagcatcacgaggggcaaatggttggcatccctaaaacctatgtatctgatttataataatgtgagggaggaggaggctaaggctctttcgtacagggactcagttaaatttgaatttcaaatgaaca

SEQ ID NO: 7212 - DNA, 542 bp, Canis familiaris
  misc_feature (1)..(542): n = a or c or g or t
cttcaccgccctcttccccccnncgtctgcagacccttcacaagtttacatgtagccacagaaatctctcgcgcgtgctctctcgacttactagataaatggacatcacgctcaacacatcagtccaaatccgcccctttgagaaaaagaaattaaggttaggggatcatgtaccggccgacgaatatggaactagaaacgacctgtgccacagagccatttgggtatttttgcctttaaatggaaggtctcttccctccagctgtgctgccttgctcctcggctgctctgggaaggtgggacccccagggcagatcctggggccgggaatgcacctgttgcccagcagcagccagtggctcactgcctcggctctggacgagtctgagacctgcggtagctctgacgcctctgagcagcaggtgtggggcattttcagagggtggcatggtcctcaagtgacttactggtattttacatcagcaaaataactcagttttacagattgcaacaaagataaaagctgtttctctttatgcatt

SEQ ID NO: 7213 - DNA, 486 bp, Canis familiaris
  misc_feature (1)..(486): n = a or c or g or t
gggtgatccacaccnnnnnnnncncnnnnnngttgnntnnnnnnngntnttccatttntagnannnnnncaggaagggattggataggnnnttgggacaggnnncnagagcnnnngttnnnggctcctgtcatgtnnnnnattggctccagccccaaacctcccagataccnnngntaattatgnnaaatggatggnnnagaaaaattctaatcccatgcnntgtgtnnntnntttcttaanacctccanagtcacctctnnnnttggccttnnnaaataatccnnncatactcactcaggacaaggtcnnnnnnnncgccctcncnnntgggtcttatcccaacctcnnntgctgtgnnnaatgtanntngtatgnnnncttcgatcccctgccaccgtgcttctgtgatgtaaatgagggactctgncttgggtgggcnnaaatatatncntgcatagtatttcttttttagtagaatnnngta

SEQ ID NO: 7214 - DNA, 672 bp, Canis familiaris
  misc_feature (1)..(672): n = a or c or g or t
agcatccacttgggaaaactnnatagnaaccagcagangagtccattatacttttctccagttgtagcaggggtgaaatcnnnnctctgtccatattttnncnnngncatgnnnnnncggnctaagatgttttgataaacacatngtcttctactctggttttatgctattttatgatctcaaaaaacactgtacatcctgatccagctttgaccttaacatgtcagtgtactgcagcatgctcatcggttaactactgattgtccaggccattagctagaacatccaatgtgctccatgattcgatcctcttcagttcatttcttcccacatctttgaacctctgtgccaacagcactgaactttgagtctatatgactttgttcaagttgagaccccttgtctggaatatgttcttgttcctttgctaggctagctcctactcctcttctaggatccccctcagggacacttcgtggggtgttttctgatttccctgatttccagctctggtttgtactaaatctctgtctctgagttcccataataccctgtgtaagtcttttatcattgcacttactctgtattatatgcttacctatttgtctacactgttagattatgaattccttaagaacagagaatgtgttttaagtatttgtgttcccagca

SEQ ID NO: 7215 - DNA, 556 bp, Canis familiaris
  misc_feature (1)..(556): n = a or c or g or t
ccacagagncaactcaagcccagcttgagnnnnagcgagagctcagttcctggacntaatcccaccatgtttttngnttacagtctnnnnnagcatagctccatctttgggcatagcccatcttgggatcaaagccattggccaatgacaacttgatgcattcatttggctgggatgtcctgagtaacacagtaatcaaattttaatgacttggataagccccgttttccttcccacccctccatggttctggacgatgcctaaaacttaaaggaaagaatacttaggatctgatattttctaagattgaacagctggcttagatctgttaaattgtagctttaaattaatacactctatacttcccctgtaaatcaaggaaaacaaaaatgtaccaaagaactggaaaggaggtttctgagttctcttaaattgtgcccaaagatttctaattctaattttgaaaaaggaaaggaaggatattggttgaaagtcactgagtatatacaccatgcacatttattagattctttggcataatatttgtgctttggat

SEQ ID NO: 7216 - DNA, 433 bp, Canis familiaris
  misc_feature (1)..(433): n = a or c or g or t
gccccaangcactaacagttgggggattcattgannaggagaaagatgaattacttcaacatttctcaactgcnnaccaagggtcaaaattcaaagaccgtcggctacaaatatcatggcacaaggccaaggtgccttctgtatccactgagactgaggaagaagaagtcaaggaggaggaaacagaaacctcagatttgtttttgcatgatgatgatgatgaagatgaagatgaatatgaatctcgttcatggcgaagatgaaatctgatgcgagctgtatagtttttaggaatattgtttagaagaacaactttttaaaattatttaaagaagtcaatgagccaaaaattttttttatttttcttnnnnncacagtaggtnnnagganagcaagnnnnnnannnnnncacannncnnnnntgttcatnnta

SEQ ID NO: 7217 - DNA, 538 bp, Canis familiaris
  misc_feature (1)..(538): n = a or c or g or t
tctcctgggtagtatnnnggtcggggcagcagcagnnagtccagcnnnnnnnncttcccctggcagctgactnnagnaacctggtttcaatataactcatnnnaaaggnnnnngccacagtcctnntaattggaaaaatattggttcccatgttttcctagagttatcccagcagctgtgcctctgnnngggannnggtgnnngaactggggtaattacagcctttccccaacaggaaattgtgnnattcgaaaaggaaagnnnggggaagacagagaacccagtggtctaccaagtggtgggcagctttccccagtgnctgccaaccgtgaggcttgnggcttggcactgggggcagggcctgccctggggctcctgtgatttttttcccttgatcctgctgggttgggacattcnnnanaccagctgtgggttaatatcagaagtatggcagatgtgcagnnngaatctttcttcagagagnnnngggtacttctccataaggcatcaatcagaatcactatcactgtcatgaatt

SEQ ID NO: 7218 - DNA, 596 bp, Canis familiaris
  misc_feature (1)..(596): n = a or c or g or t
gtannatagttccgatcatttatgacatggcttcaggtacaacccaacaggcagacattcccagacagcagaactcttctgttgctgctcccatgatggtcagcaacatnctgaagaggtttgcagagatgaacccaccacgacaaggtacatgaccagtagatgatattttattgcatatatgttataaaagtttttttgagagattcctcctccttccctctgctccctccttacctgcctcatccccaattctagtaatagagcactgattgctgtggccctcttaatgtctgcctgtcgctttcttcctttctcactggttcttcatttttgtccatgtctctgctgcctggacctcatttttgttagtgatttcactatcaggactgacccagttgctaatgccagaagcttgtatttatagcacacattgccacagagccctaggttaggatgatagactttttcatggctgtgaattcctgccctcccattgatacctgccactctgtatgtcaccagttgaaatgcatgttggtttctcatatttcatggttcaatcatgaatagaatattatcattcaaagttctgt

SEQ ID NO: 7219 - DNA, 530 bp, Canis familiaris
  misc_feature (1)..(530): n = a or c or g or t
actgtaagattttatattgccancngcnntaaatgagaattctgattgctctacagcctcatcagcattcaatattgtcaatattttggacttttaccattctaataggtgtgcagtgttatgtcattgttctttaatatgcatttcctgatgacatttgatgtggaacatcttttcatatgcttatttgcccattcctatatcttctttgaagtttctgttcagatctttgctcattttttgagtcgttttattattattgaactttaagagctctttgtatattttgaataatagttctttatcagctatgtcttttgcatgtatttttcccggtcaatggctatcttcttactttcttggcaatatcttttatagagcagaagttttaattttcctgaattattatttctttcatgtatcgtgcctttgatattgtatctaaaaagtcatcaccaaaccaaaagtcatctagattttcttttatgttatcttctaggagttttataattttgcattttatatttgga

SEQ ID NO: 7220 - DNA, 512 bp, Canis familiaris
  misc_feature (1)..(512): n = a or c or g or t
atatcctgtttccaatttntatatccaactcagtgtttaagcttattaattaatgactaagaannncttgcaactagaaancttttnnnaggccattaagctagacagnnncatgacttcaccaacttggagtaaaatggttaaggaaaaagaataatttgggttggtttttggcaggttttttttttttaacttttgtataagaagctactaaggtaaaatattaggctgttagaatatgtatagctataactcctctgattataatacttaggtnctagattatgcctattcttatttctttagccagtcatttcctgttcactgccaagaacaggattctctgctattgtgcaaatgtcctgttgtgtttacttttcactcttaatttttaaaactgtgattgtacccttgactgtcccagaatgttgttgctataaagctaaccatttgtgaacagggtatgtatgtgtatagttacaggtatggtgcccatgtgaccttgattataa

SEQ ID NO: 7221 - DNA, 455 bp, Canis familiaris
  misc_feature (1)..(455): n = a or c or g or t
caatggctnnnctgtctgtctcagcagcgagcgcttccgctgccccgaacccatcttccagccgcgtctgctaggccagaccaagccaggactgcctgcactggncttccaggcattgcagaaggtnnnngcaaggctacgcactcggctcgctgataccgtggtgctggccggtggctccacactcttccccggcttcactgagcgcctggaaatggagctggaggcacagtgccggaggcatggctatggggccctgaggccgcacctggtggccaagcctgggcgtggcacagcagtatggacaggcggctccatggtggcctccttgcgctccttccaatgccactggataacccgggccatgtaccaggagtatggctccaggctagtgcatgaagtgttcaactgagttatgctgtaccggagggtggggccccatgagcagctgcaga

SEQ ID NO: 7222 - DNA, 691 bp, Canis familiaris
  misc_feature (1)..(691): n = a or c or g or t
atgaactcaccatgaaatagtaattatgaaagtacagtgttctgtaattaagctnnatctnnnnnnnngnnnagnnnnnctgccacttactnnatccattgatttnnaacatggtcctcanngtgtcagactggtgctttagcatctatgccacatgcnttgataaaggtcataatgcccactgtcttagatgctaaaggtaattgtagtttatttgggacaagagtcaggaaaatgacagcaagacgcatgaaaagctgactttttactgagaactgtccattgacaagaggatgtctggagagacttaacacctcctttcacatctgcctctttaaagagagcctgccattccatcaaatggagcagcagagatggactagcgtcgaaggaggcgactagtatttcttctcaagttctcctttgcagagtacctgcctccaatgcagaggagccaagttctgcccctcctccttatctataatttgctgcttactgctggtggtgatgttagtatctgtgtgaactgaattctcatcaggacaaccacttcttgaactgtgatgatgaagataacattgtctctgttctttattccttcaatgaagttacctttgtgtcaaatgcaactttgttaagcccttaaaatatcacttcctcatatgtgagatgacacaatcactaatattct

SEQ ID NO: 7223 - DNA, 302 bp, Canis familiaris
  misc_feature (1)..(302): n = a or c or g or t
cttcctccaanagcattttcatgtaacttnnnnnnnnnaaannctccaagtccttttttactgtaggataaagnntaccnnncagtgtggcactnnnagctcannnnnnnngacccaaactctccttcnntgatgttccaaatgggctcttacactcagaccgganagcgcagtctcctgggtgtctnnnactggcattctcatttccacagcttctctcctaccatttccnnacctctgctctacccaccgaattcctattnnnnnngtcatgtgagctccanntccttcccttgaatttg

SEQ ID NO: 7224 - DNA, 665 bp, Canis familiaris
  misc_feature (1)..(665): n = a or c or g or t
gggntcaacacctnntctcccaccttcaccatccactctctttgcntaggttctcctggacattcccactcgtttgattttgcacacgaatgttagagtcaaccagttccactaagtaagttatcatgttgaaattataaactgatttaagaactcacctttatgatgtggtcttcctatccaggcacatttatatcttccttttgttcaagtctcctttgaatcatttaggagtaattttactcaagtgttccttaaagattgtccttaagacttttcacatttttggaaaaagttttgcctgagcatattatgtttcattttgttgttgtaagtggggccttcttttctaactggtgacttttgtctggatgtaggctactaacctgtgtgttaatgctatatcccattattttaccaaattctcttaagtctacactggtttatctattggttttcttgagtttcccagaaatacaaccacatatctgcaaacagacatggttttacctcccttctttcaaattcaggtttctcaaagtgattcatctcattgccttagctaatcttcttataccttactatgtcacaggagcaggagtggggcaattttgtcttgtccccaacttcagtgggaaaacaaatttccattaagatgttggctg

SEQ ID NO: 7225 - DNA, 561 bp, Canis familiaris
  misc_feature (1)..(561): n = a or c or g or t
atcatgcaaaaaannngcccctcctgaaactcctgtgaaagaaagactttttatcgtgtttaatcctcatcctttacctttagatgtattagaggatatattctgtcgttttggtaacctgattgaagtttaccttgtgtcaggaaaaaatgtggggtatgccaagtatgcagatagaataagcgccaatgatgccattactactttacatgggaagatcctaaatggagtcagacttaaagttatgctggcggattccccaagagaagaatctaacaaacgacagagaacttactgattcttgagcattttccctccagaaattcagtacctgcttgcatcatacttctgaaaacagtaactcaaggacacatggatcctgggaactgaagacaccctctgcctcctcagcgatcttagaagaatgaaatggctcagcattcgatgcccatctgctggacgttggatcagcatctgagcggactgtaaaagctgaaaacaacattacagcctgataattcccctgaagttcattttgtnnnnnngaaattgtagaggctg

SEQ ID NO: 7226 - DNA, 362 bp, Canis familiaris
  misc_feature (1)..(362): n = a or c or g or t
aaactgtaacctttgtttttatttattctattcagcaagttttaagggcatactactgtttgtncttacatttttgtttctcagnnnnnnnnngagatggccatttatttttagatggaaatgggatttaaacttcttgcatgtaaaatacgtgatttgcaaatcaaaattatttcctttgttttttgacaaatggaagtaaatttgcttgttctagtaaatcttaatttttcaggcttcctggataccttacttgtaactgtcagtgttgcactggtcaatatgtgggaacatattgttcgaccctgctacttacatttatttgaaagtgaacttgcggtgatgaggaatttatgagaaat

SEQ ID NO: 7227 - DNA, 559 bp, Canis familiaris
  misc_feature (1)..(559): n = a or c or g or t
aggaggcttgccacacgtgtcggggagcggaggggtgaagcaaaggtcgccagggaagagcctgcacgcgggtctgtnnnngtaagtnntgcgggggatctgtgcccaccttggcgagtggttttcaccgcgctcctatccgaggatcccgctcctgcacctgctcgaagtgtcgtgtctctgatgccgctgccctgcgatgcccttgcgtttctttgtacttcacactgtggacagtagaaacaggagccaaggggtgaatttaatttggaacagacctctgtcttggtggaaccgcctcgaacacagcaacctgcagcttcctgaggccgggcctcagccggggctctcacaggctccagaaacgaagtccagcctccacgcgtgtcagagcccacccagctgccaccaccagccacagtggtgtgggctcccgaggcagccggggagcgacgcttctctccctgatgtaatcaaactgagtgcacggatatcacttgattaacagctgcagtattaattnnnnnnttttggttgcttgnnnnacagcgagaatcat

SEQ ID NO: 7228 - DNA, 451 bp, Canis familiaris
  misc_feature (1)..(451): n = a or c or g or t
gattggccccctttccccattcacagataaaatgcgagcaagtnnaggttacttcacctagactggggttcctgagggcttcatgggacaaggattgcatgagctgaattttgaaggataagaagttagtcaagcagggaaggaagagatgcagagggaacatgagcaaaagtagagttacaaggaggaacagaattgcgtgttcaggaaattgccaataattcaagattattaaagcatgaaatacatggtacagaatgcctggagacagaaggaaaagaagaggtggaggctaagacgtggagaacacgatgtttaagagcttactccttggtggagtgttgactgagggcctctcagctgacaaagtgcctaccgcaggaatgggatggcttttctggcctgctgatgggactgtgactgtaacaacaggaaaggcaatgttatatta

SEQ ID NO: 7229 - DNA, 518 bp, Canis familiaris
  misc_feature (1)..(518): n = a or c or g or t
caaggaanngcgtttcctttctgtctgtcctctcacgggacagagaggatccggcagtcttgttatttgagtaacttcaaaccagtggtcaaagccatgaagaaatttctgaaggtggttagctcaaccaatggtgagctgaatgtcgatgaccccacgggagcccactccaatgcaccaatcacagctcacgccgaggtggaggtagtcgaggaagctaaatatgtgatgttgtttcataaaccctggcactggtcgcaaagctcagctgtgaaaatgaaacttgtagtatttttaaacatgaatgtcaatttcgagtgtatttgaaacggttcctccaggagagagatttgtacaccattaggaaactcctctgcagaggaagtagccttctttggagaaaatggaaaatgggtcttgatatgttatctcagagtagcccatttcctagggcaccatggaaaacacaaatgtgatctttaagtatacctcttccccaatttggggaagaaagaact

SEQ ID NO: 7230 - DNA, 585 bp, Canis familiaris
  misc_feature (1)..(585): n = a or c or g or t
gactccaagttttgaacaatgtcttgtgtctatgtttgggagacagcatagggatgcgtngacacatgcgttcctatctttggggacaaatgaaggagaggnnatggctcagtccttgtctctctggggctcacagagtctcatcttgggcccccgtttctccctgtgagtctcagtgaacgggaccaaggnaccagatcttggagccaagcctcttgacccatgcacctctgaagnagcccctcgctcgaaggctaggtcctggccttgccctctgatcctgatggcttcctccttcctccctctgactcctgggtgagctgtggactcagactcccagcagactcctttctgtctcagcctccccgaccccaaccccctcactgttctgtacccccatatagtcagggcccccgacatctccagaggaccttcatcacaagccatctcctctgtaggtggcccaggttctcatttatttttttaggtattttttttttccagaggggtgagcagagatcttggtttcaatgacggttggaaannnnnnnttccagagataggaagnctgggtggattttattt

SEQ ID NO: 7231 - DNA, 529 bp, Canis familiaris
  misc_feature (1)..(529): n = a or c or g or t
cccctggcannnnnngnnttttcctcntagctctccttcctccaggaattattggtggagaatatgatgaaagatnaacacttccctttgttggggaccccatcaattcactcattcccgggcctggggagacccccagccagttccctccactcagaccacgttttgatcctgttggcccgcttccgggacctcgccccaccttgccagggcggggtggcccgagtgacagatttcccctaaggcccagcaggggctggccaactgacagcaggccaccgttcatgtgattgatttgtaatctcacttctggagcttgtttggttttgatgtcatcttgttggggtgctgatctctagtgttttctgattgtgatggtgaggaatgcactcacagtggcctttcagtagatctgtttaaagctccaggggtggtagggcccagaggtcactgtatgaccaggttgaccttgggaatagctagctactgacctacaccacccccaccccccgccccgaattcccctctt

SEQ ID NO: 7232 - DNA, 597 bp, Canis familiaris
  misc_feature (1)..(597): n = a or c or g or t
cttacaaacaagagaccatgcagatccacagactgtgcnnatcanntcntcctgaccttnntccggtgtggccacctgcacttcacttcctgttgtgtttgtatcatctnnaggcttaagggatcctttaaaacttcctgtgacgtcttatatgtaaccgtgtcatgactatatctactgaggggaaatgtccacacacagagggaagtgcaacatgaaacaaccactgttctagctgccctccgtatctgtgtatgacatgcacagtaagtgaatgttttcttatggcttcaggtctacaacatttagtacatgtaaataaggaaaaagaattgatacctatggtatattaagttatagtatgtcatatttttttttttgctcttatttaatttgcctaatgcctcacatctgggtttaggcctcagtggggtaaacccctccatacaacctacttctgcaggtgtgtgtgccacacccggaaaagcacacagctacactgctgactgccgctcgactctccagtttaccctctttttctctttcattctgatttactgtgatgacttaataaagtagaaaaacagcacttatgtt

SEQ ID NO: 7233 - DNA, 513 bp, Canis familiaris
  misc_feature (1)..(513): n = a or c or g or t
cgtaggtatgcagggccgtgggcctgtgctgttctacacatgtgtgcatgtggctcttggcttcctgatgggcattaactcacagagatgcccttttctaaggattctgagcctcatggaagcacgcatgtttgcaaaaccttgcannnaccagcaccacctcccctagtcctggganagccagtgagaaggacacatcacccgtgcctctcgcagggattcctgccatatccttgctcctgccagctcaggccaactttgggatggtgtctcctaagcctctagttttaagcagaagaggtggcttggaaattcacttttgtgatcgtctgnggtccgccatgatgtgcaactgctagttcaggaagaaaagatagcttgtatggggcttgtcaggaaggacttagagggagcagcttagaacgtcctcccctctgcagccaagcaggcaatgcttctgtaaacacatcgctgccaggagcacagaactggtgccacaaaataaaggagcct

SEQ ID NO: 7234 - DNA, 399 bp, Canis familiaris
  misc_feature (1)..(399): n = a or c or g or t
tcnngaaaaaaaatttggggacgtagagctaaaggttccaggatgccattttctgtaagccatttgaaaaagaaacatttaaaaagacttacaccactgcttacttgaaaaaataaaaacagctgagatttaaaaaataacgttagtttatgctgtggagttcttgacaaaaggcttgcactgtatttcgtatttccatagaggtatgttcttttagaaatttgtagcatggtagctcagaaaatcccttcgctttttatgtttcgtcaggaaggaataaatactgcttcagacatttcccaaaggtacttgctttcatgttctttgcttccattaaaaatatttgttaccagtaaaaatgcaaaatgtttattgttgatcatttgaatgtcttttgtt

SEQ ID NO: 7235 - DNA, 443 bp, Canis familiaris
  misc_feature (1)..(443): n = a or c or g or t
tccgcnggatcagccaatgacttggggtcagggctgctcctgtccccaggctctgcgtcaggtggggcaggtgtagggaggtcacatgaccatcccagcctcagggcctgagcgtggggaggaagggaacgtgtgcttgctgatccacggagctggagctccacaatgaccctcccccaccatgaataattggaaacaaactacctctgaagctaatgatgtacacgttggcaaattgagtttaaattaaaaaaaagtgagcacaccaggaagatactattacgctcctcctgtgcggatggaggtaacagctgtaaagcacttagctccgagtaagggctcagtaccgcgggccactcgctgaaatctagatgccacgtcacgcatttaaaactagggttggggggcacctgggcggctcaggtgtgaagcatctgcctgca

SEQ ID NO: 7236 - DNA, 512 bp, Canis familiaris
  misc_feature (1)..(512): n = a or c or g or t
gtaagtgatacctacacttgaccaggggnntgactcgaagcacgctggactgactggacatcaaattttcagtgtgctgacaatgctggatgtattgaaaggttaaagttgtgcatctaaccacaaagcagctaaggcattactgctagcttggaagacctaaacgtcctatcctgtttaggaggtagcaccatccttattttaaactttttaaaatttaagaataagttgttgaaaatactccatagcctctatgtgggtacctattattcttactagttagcatattgataagtactttcttaaaatttacttaaatctcagtctaaaagggggaaattttgtcttttggcctgacacaaagtggtaaatatggagattaatactttaatgatgaattagccctgacagttcagatacctgtcaagtataacttccctgtcactactgctgctggtgccttccccagagttgctgtaacactggtcttgttcctgcttttctgaggggag

SEQ ID NO: 7237 - DNA, 515 bp, Canis familiaris
  misc_feature (1)..(515): n = a or c or g or t
tagcttttctatnnnatgtatatagaacatgtatattggaaaaaaaaaacatacttatacagagtaatttctgtaaacatgactttgtaattttgagaattacttccagatgctagtcaatattctttgggtatgtaannntatttaatgccaaaccacctttagcctnnntntcttannngtcttccttaacagtctgccttttattaatcttggactttttaatgaacattcacatttaggtagagtttgggaaactatgcttggttgggttttctttgaattctgttagtgacgtggagaagaaaaatccttcgggtcccaccttccagtctttttttacatggtttcacattgctcactgtggctggacacagatccatctgtctcatttatcagaaaggcctactcccccattnnncatcttcacccgaactctattctaaatgaaaagagttaaaatttctttgaagagtttggttttgagatgcatttacattcccattccttgtaaa

SEQ ID NO: 7238 - DNA, 389 bp, Canis familiaris
accgcccacccacatcttggccctgagcgtgtgtcgctgccatattttacacaagatcatgtcgtgggagccctgtttccccctcctgccctccaccctgacctgggtttgacatcttctataacaggcgtgtccgggcctgacagctgtgggcctggcggggagttgggggggatggggggagcagctgccaccccacccggtcccttggcgcctgtccccccctttgcctgtctccaatgggaaggcagtcctgactgggcggggcctccccttcaactaccaggccttggtcacaatgggcgtgacatgctgctttttttaattttatttttttacgagaagaaccagtgtcaatccacagaccctctgagaaaccaggccggccg

SEQ ID NO: 7239 - DNA, 482 bp, Canis familiaris
  misc_feature (1)..(473): n = a or c or g or t
tgcagcngcctccccctcaagctnnacagctcaggggtgatgatgggcctcacccgctgcctgcagaccccaggggagcccatctcacaggctnctgtgttgccaagttgaacatactcaacaaggcagaagtggggtgtggaggagagtctgaggtaaatctgcttccgaaaggatgtgtcttcaggagcacgtagtgggacaccctttcccttcctgcacagggagctgccgtcttggggttcacgcagcatcaagacctgcccatatccagactcaccttcccgcagggatcttgactttggatgacaaggctttatttgtaaatatgctcttaatatgcaactttgagaataaaatagaaacatcatgtattttaaaatataagatgaagtgtgacgcactgtatacaatttaatatatatttttaggattttgttatttaagaaaatggaatgtaatggtnnnnnacttttacaaaa

SEQ ID NO: 7240 - DNA, 495 bp, Canis familiaris
  misc_feature (1)..(495): n = a or c or g or t
tttgtgaaacaagatcaagtgtgcattgcccgtttaangacagcangaactatctgccttgaaacgttcaaagattttcctcagatgggtcgttttactttaagagatgagggtaagaccattgccattggaaaagttctgaaactggtcccagagaaagactaagcagttttcttgatggccctgcacaatactgtgaggattgactacaaaagttcatcaccttctcttactgcccattgacagacttctcttcatannnnnnnnnnaaaattcacagcaaaaatccatgttttgtcagctttctcatgttgagatttcagttatgtcactgttgaatttacccacgactttcctcctcctatgccattttgcttccttggacagaaccagtaatagctttgtaagtgatgtgggtgtaattgtctttaacaatgaaaaattaatatattttttaatttttcattttcccttaggataaaggacccttgttnn

SEQ ID NO: 7241 - DNA, 613 bp, Canis familiaris
  misc_feature (1)..(613): n = a or c or g or t
gactttgaatgaatccatgttacagttgtgtgtctgtatattggtcgagtaagaaaaatgaccattgaaatgttactataaaaaaatcagaataaattgggcactgtctgttgcaccactactgtatctttttgaaagaattaacagtattttcgtattgtaaaagttaaatctgatcacattttcacattcactagacctgcattttttttctttactatttgcatccnnnngtatttaatacaagtagattttgcatggcttgggcattcagagattaataggatgacgattcaatcttagtttctaaagccatgaaaagttgctttgagactgaacaattctgagttattatttataatgacacccaatgtccatgtttccctactgtaaaagaattgatcagtttcttcattaaaacagcaagaacctattaaatcttgtaaataccatgtttcttttagatttctgtgtatgctgtgaatcattattttgaggtgaaattgtacaaaggcattttaaaaggctttgcatgcatcgtacttccaaacagtacatattcggaaagtcaaagattcctgcaaaataaattaataaactaaaagcaaacnnn

SEQ ID NO: 7242 - DNA, 561 bp, Canis familiaris
  misc_feature (1)..(561): n = a or c or g or t
agcggtctatctgtatnnatgggattggggacctgcactggattcttcaaaaccatcacctgnnggccaacaagtttgacccaaaggtggatgacaatgttcttcagtgcttagaagagtacttacgttataaggccatctatgggactgaactctgagatatcccatcataatattgctacctgtgggacaggaacatatgcagacatgcccagggggtgctgggacagtagggtggggtggggctctaaaatctttgggatccccaagtcagggggctgctatgggggtgcgggtaagtagatctcctgccttattacttgctgtcctgggtgaacactgggtgtgcactcacctcactcctaatagctctcccactgatgttctcacagagtgagagtcagaatcaaaccagcgatttgggagagtaaggggagggtagtgtggcaggggaccctggatttcagttgaatgcttggtgtctgcttttctactctgtgtgaacgctggttctaataattctaggctttggtagtggggatggggtgggacttaagtgga

SEQ ID NO: 7243 - DNA, 546 bp, Canis familiaris
  misc_feature (1)..(546): n = a or c or g or t
taaatgtgaatcatatacatgcataaactctantggttattttgattaactctcctggtaantgttctctctccaattgtcaaaaataagactaattttcattaatctttgaagtacaagccacgatgtccctgtattatttctaccacataatgactccccaataacctattactattctcccatataaatcccaatctcttaatatcttgggctgcttatttcatgatcatttggtaaagcattcctttcctgtaaaccacaatgagtctgtctatagaagggcacccatgaatacaatgagtatgatgacttacagcatcatttggcagtattctctacaccctaaatcttccctaattcaggtaatatttaattttaaaaggaagtgtctttgttctaaaagggaacataagtatgaatgaatctcagctaatgaagtaggatcatccatctttgtgattcctttcccaaagaccatgatgaaagaccaagaaggaaaacctaccaacagcttccaaatgtcacgttgagactcatagataa

SEQ ID NO: 7244 - DNA, 541 bp, Canis familiaris
  misc_feature (1)..(541): n = a or c or g or t
acacactcagnnacccaatagtcatttttcctttaggttncgggagccctgtgacgaaagctgtcttctgactcagtgccctcttagacacaagttcccgagatcccacagttagtccgtgatgtcaccgaggttcccaaaacagaacagggtggccgccctgtgttgcatcataaatcaggtgtcgtcttgacctcttgacctaggagcgctgcccaggattgattccaaaccaaggaaaactcaagagaaagaaaatggaattaaagggatgaaaacagggcaggagagttagagtttccctggctgcctgctgggaaaatgtgtagaggcttcttgcttgtgatcctgtttgtgttccgggctgtaagatgcacggtctcggggatggtgggacttgccaccagctggcaggctcttccccggtgcttgatgggactctgggccaagcaggccctgctctctgtcggattctggctccctcccacccccacccttttctggtgatgttttgcgtgtggatagctcctttctctaagaa

SEQ ID NO: 7245 - DNA, 517 bp, Canis familiaris
  misc_feature (1)..(517): n = a or c or g or t
ccctacacctatagtagtaggtgactatggggggaatgttggtgacagaanntgtttgaaatgcagtgactagagagaaataaaactgtctttggcatttctttcttcctcaaattcaaaatgtacctgaggctgcctatctcatttctctttgtgcttaggattctcataaaaactgacttattcaacaaatgcttactgagcacctactgtatggtaggtactagggacacacaggtggctaaagcagacagggttcctacctttgttggctaataatgtagaccaacactgcccaatagaaatataatgtgggtcacatgtgtaatcttaaattttgtagcagccgcattaaaacaatagaaagaaacaggtggttaataatctatttagggacgcctgggtggctcagtggttgagcgtctgccttcagctcagggtgtgatcctggggtcctgggatcgagtctggcattgggctcccctcagggaaactgtttctccctctgcctatgtct

SEQ ID NO: 7246 - DNA, 526 bp, Canis familiaris
gctactcttcgtgcatgatcactgccatcgcgcgggtgtgtggctcatcgacttcggcaagaccacgcccctccccgacggccagaccctggaccaccggcggccctgggaggagggcaaccgcgaggacggctatttgctgggtctggacaatctcattagcatcctggccagcctggctgagagatgaggctgggccccggttctaacagatggacctgcggctgcgtccccaccatgcatgctggcggcagagactgaaaccccgcggtgcggggtggttcacacggttctgcagggccaggtgccaaccactatgggacgcactgcaaaagctgggggctgtcccccatacaagacccagatttctgagaaccaatggcactaattaacagggtgggggaggggtggctgggacaatgggctccttcctcagcccagctcttttgaggggggctgcgtatctctctagagaggccagataatgaactttatttcgcaggcactagatctattggtctaacct

SEQ ID NO: 7247 - DNA, 555 bp, Canis familiaris
  misc_feature (1)..(555): n = a or c or g or t
gnaatgtgtgtgtgtcatatatacacacatatacacatatatatgaattaggactcctctgcaccccgttttgttttcagattatgataacattatgctgatttagcattaaagaactcaagaaaaatgtagcagtgttgcaagaagttgactctgagacccagtgttctgaggtcagatgggtttggagtgtctcaatcagaaagatttcatggccctgtcaagagcatgaacattgacttctgaggtagaggggaaaccctccagagttcaatagtgggcattattagaacttaacagaactgtttggccccattaacagatactaaaatgactcgccttcatcatttggggtacaactattcattacccttctcaaagtaatgaagtattgtacattcagtctggtgtcagtgttgctctggtcttcttgcttgcaagccactttcccattgaacagctctgagacagacatgctgggatgcccacccttgttagtattcattttgtactgcccaagatagcattgaatttagactttaagtatttccttgt

SEQ ID NO: 7248 - DNA, 576 bp, Canis familiaris
  misc_feature (1)..(576): n = a or c or g or t
aatagcatttctttttagnnnnnngttcacattttcattagttgttcatatatgtttctcttccaattaaagcattatctgtttaccacatgtacaaaaactctttgaataatatgcattccnagttttcagccaagtcggggatgttagtgattgtacnnncccaaagcacttggataatcagggcccttcctttcatggttgccaacatcaggaaaaaatgacttgttttatttagaatcccttccattcagtaanngcaccaaacttactttagtgacaacattgacaattttggaatatatttactagtccattaggatttttctaaaatgaggattaaacgattagatattttccaatgtaattccgaattttccaanannagtgctataggaagccatggaaaatggcttgagtttgccatatcttatatgattttaaagaaccctcaaattatccaaggaactcttaaagagttttggtatagatataatattttggtttaattttagcttcattgatgttcagcatncaaagatttttgttttccacattttaccatcactagcagaa

SEQ ID NO: 7249 - DNA, 462 bp, Canis familiaris
  misc_feature (1)..(462): n = a or c or g or t
gccaatnngcaagcaaacagcaaaggtgtagtttatatttagagatgtggttccattaattctagaagtcctataatctggcattattnaaacacaaaatcccctctgacatttgccaaatccaaattaatcttaaaatctccaaggacctgagtcctttgctctgagcacaagaggattgctatgaaggttctggtggcagattgtgatggggagggtgggggtaggacagtgtgcctggctcactcactgtctctgtaggagagggactatcagccaccctctctcttcaccttttgtcatgaggaaattcagacgttaaagatgaatatcatgcattatctcaacatggttctatataaatctgacaatgcataatttaaaacgtgtttacacagatgcaaaggtagaagtaataatcaaggaattggagaagaaaacctttagcggggatccctgggt

SEQ ID NO: 7250 - DNA, 162 bp, Canis familiaris
  misc_feature (1)..(162): n = a or c or g or t
ggccctttggaccgagttnnncannnntgcccatgccgcccctcagcccctcccggcattggtctgcagtcctgccccgngagccgnnnnnngggtgttgggggacctctngnnncannnnnnnnnttctctcccatgggtgtgattttgccctaactggnn

SEQ ID NO: 7251 - DNA, 470 bp, Canis familiaris
  misc_feature (1)..(470): n = a or c or g or t
ccagaaatgtctcaaaagttaggatccacacccgcctggagcccaatgtggggccngaacccctacccctgagatcaagacctgagctgagatcaagcatcaggctgcttaactgactgagccaccgaggcgccccaaggtgcatttatattttttaatggggtataattccttatgtatttttttgcatattttcctactacacattgaacttgtatgtttttaaaattactgcatctagacaaatgtaaatgttattttccagctttctgatacctactattttaaatagatatttttgtcttagaaaaaaaagcaaaaacaaaacaaaaacaaaaacatatacattgatctgggtttaaaattaaataagcctttttcagtaaaagaagactggaaaaaagtagattgtttaagtgctaaaatattgagaaatttgaagttgttcactatttgtatttccaccgtta

SEQ ID NO: 7252 - DNA, 623 bp, Canis familiaris
  misc_feature (1)..(623): n = a or c or g or t
agggggctgcncattcncnctgggganncgccatngacannnnncaactgcgcnagctgctccccttgtttccctgtcccacttcacccctttgggggctgcttgagggtaggtgggcatgggtggtaggaggggtttttttacccagggctctggaaggacaccaaactgttctgcttgttaccttccctccatcttctcnntaactttcgcagtcccctccacctgctcctgtcctgccaggtctgccacccaccccacccctcttttccggctccctgcccctccagattgcctggtgatntattttgtttccttttgtgtttctttttctgttttgagtgtctttctttgcaggtttctgtagccggaagatctccgttccgctcccngcggctccagtgtaaattcccctaccccctggggaaatgcactaccttgttttggggggttttgggacttttttttttgtttttcagtttttttgttttgttttgttttcctttgcctttttttcccttttatttggagggaatgggaggaagtgggaacagggcggtgggaggtggattttgtttatttttttagctcatttccagggggtgggatttttttttaatatg

SEQ ID NO: 7253 - DNA, 620 bp, Canis familiaris
  misc_feature (1)..(620): n = a or c or g or t
caccgatctctgcctgctgcnnnnctccaccgaccgcgannacttctttgcagtctctgactnnnnnngccgctttcannagcgnntgcnnnngcgcnnagcccacctggcgctgcgnnaggnactgcgcacaccctactacagtgttgctcaagtgggcatccctgacctacgccacttcctctataagtcaaaaagctcaggactcttcaccagccctgagattgaggccccgtacacgagtgaagaggagcaggagcggctgctgggcctctaccagtacctgcacagccgagctcacaatgcctcccgcccactcaagaccatctactacacaggccccaatgagaacctcctggcctgggtaacaggtgcctttgagctctacatgtgctacagccccctggggaccaaggcatcggccgtcagtgccatccataagctgatgcgctggatccgcaaagaagaagaccgcctcttcatcctcacgcccctcacttattgatgggaaagtgtgtgggttcagccctcttagacacactgggcgatggaagccataggcacctctacatgggctggcctctcttgcccaggcggcaggcagggactgtgggttggtg

SEQ ID NO: 7254 - DNA, 714 bp, Canis familiaris
  misc_feature (1)..(714): n = a or c or g or t
gtgagatnngtacacaccnancatttccaggaccagnnnnnncatcccctccacgtcatcccacgnntccttcttgaaacctnntcacggatgggtgctctcagaccctacgcccctctgtccccttcctgggcctttgggggttccctctgttggctggnnctcctctatccgctccattctccccccactctcccctgactgtaccccgggacttgccttgtctttccgtctttcctgatgtgctaaaggtgagttgtcagcttttaaagaaatgtgtattgtgaaaaatttcagacctacaaagtgtagagtatgggggtcccatgtcctgtcactctgcctcactgagtattgacattttgccaatctcctttaattcattcccatttctccgcgccctgttctctcttgttccagaatttcaaagcaggtcacagaaatcgtttgacctgtaaatacagctggtgtctgatacgtacagactataaacttttacacaagcacaatgctattatttcaaagtcagtggtagctccttggtgccataagaaattgcaatccttgtccaggtttccccggtcatcttaaaaacatcacttccagttggtctgatctaatcgggattcataaggacacagtgccttggtttgaaacgtctctcttttaatctataaattttatcttcttcccctctgcatttatttttttccc

SEQ ID NO: 7255 - DNA, 526 bp, Canis familiaris
agacctctccagttctggtttcctgccaagttccccacctttctcccacaacccctcagattttatattttctatttctctgtgtatttatataaaaatatattaaatataaatatccccagggactagacaggaaccagggccctgagcctagggcacacattatgagtgagcttttctagtggctgcctcgccacccatccttccccagttcttaattttgaaccataaagggtaccggttctggaaggcatgcttttaagcagccataggacaaaatccagaaatgccaagtgcctgcttcgtagctttggaaaggtgccctcattgagtattctaggagtggctgggtcttctgggaccctcccatcaggctccttaaggtaacatcagccatttttagattggttctcttatcataccttcccactggccccatgtgagccaaggaactcactgcctgccctctatccttgcccagttctgcaggtggagattgataagtcaggtatccttttttgagata

SEQ ID NO: 7256 - DNA, 401 bp, Canis familiaris
  misc_feature (1)..(401): n = a or c or g or t
atataagaagggaaatgcctgacagacaccatgtaagttataagtgtctgtcttatctttactacacatattgtaacaaattcaatatcctagtcttcatttgtatgaatggtttgtattgtacatagtttaaccaagtgttatttgagctgcttattaatattaacttgtacttgtctctgcttgttattggttaaaaaagaaaaaaaaggatatgaggaatccattttatcaatgtagctgtgacctccattaaaaagacaaacctaatgtacaaagcatttattcagctcaagtattgttgaaagctatacatatacaacattacagtctgtctgtatttagatattttatttctggacaaatgaaatgtacataaaaataaaatgcttaaagnnngn

SEQ ID NO: 7257 - DNA, 525 bp, Canis familiaris
  misc_feature (1)..(525): n = a or c or g or t
cagcagtcagcacagngaaggcagccggagcagtggctccaanngtagcggcagtgaccggcnnaangagaaggacccgaaggcgggggactcgangtcgggcggcagcggcagcgagtcggaccacacaacccacagcagnntgcgggggcctcgggaaagggcacccagcgagcgctcgggtcctgccgccagcgagcatagccaccgcagccaccactcaatggccagcagcctgcgcagccaccacacgcacccgagctacggcccccctggcgtaccccctctctacggtcccccaatgctgatgatgcccccaccgcccgcggccatggggcccccaggagccccaccgggccgcgacctggcctccgtgccccccgaactgaccgccagcagacagtccttccgcatggccatgggaaaccccagtgagttctttgtggatgtgatgtgaacaggacccctcccctacttccgtcccacccctacannngggcggctgcgtccctctctccatccgtc

SEQ ID NO: 7258 - DNA, 365 bp, Canis familiaris
  misc_feature (1)..(365): n = a or c or g or t
tgtatttcnnngtctcaaggggccagntgtgttctttgtttttgtatcttttgttttgttttttgatcagagcttcactactgacctgtcctaggcagctatcttacagacgcatgaatgtaagaggaggaaggggtgggtgttgggatcacttggggatctttgacacttgaagaaaaaaatacacctgggagctgcgtttgcccatcccccaatgtgtgctgaggagttgagctgtgaggggatggggctgagtggggtgggggctggaacccctcccccccaaggagtgccatctgggtcttccatctagaactgtttacatgaagatactcgctgttcatgaatacacttgatgttcaagt

SEQ ID NO: 7259 - DNA, 374 bp, Canis familiaris
  misc_feature (1)..(374): n = a or c or g or t
aggagagaccaatgaattgcctcagattgccctgcttccagcaangccgcatcaggacgttttaaccaaccaacccgcagccctatcttcattaaaatctggaacaacgatccgtgtcattcactcgacgggtgggtactgggtgtctgctggggcacagtgctggatgtggaatccattatatttagacttctttcatcctaattccctagaaacctaagaatagaatttagaggacagaaggggcagggaatgttgcctatctaggctgtggtgagaaacgnnnnntnctgtgcagttgggctttctgagattacttgcacctgtgttaaagtttaaaagaggggcgcctgggtggctcagcggtggagcat

SEQ ID NO: 7260 - DNA, 640 bp, Canis familiaris
  misc_feature (1)..(640): n = a or c or g or t
cagcagagaccaccacagccatttgttccatgatcatgggaggagtgtttgagaaatttcctaaattgaaagtgtgttttgcacatnnaggtggtgccttccctttcacagttngaagaatctcccatggattcaacatgcgtccagatctgtgtgcccaggacaatccaatcaacccaaagaaataccttggttccttttacacagactccttggttcatgatcctctggcactcaagctcttaacagatgtcataggaaaggataaagtcattttgggaacagattacccctttccactaggagagctgaaacctgggaaattgatagagtccatagaagaatttgatgcagaaacaaaggataaactcaaagctggcaatgccctcacatttttgggccttgagagaaaacaattcgaatgaatgaatttactacaaaggcaaacattcaaaaagatattttatttttggttttaaatatgtatcactcatgcattaccaaaatcttattttgaactattttacccagaaatagactatccacaaatgttctaagttactcataacaaaaatgactcacagaatatgtcttcattctgnnnnncatagtatttcatnnnnnaatcaaaagtgacttt

SEQ ID NO: 7261 - DNA, 247 bp, Canis familiaris
  misc_feature (1)..(247): n = a or c or g or t
gggactgtgggcacagcgacaatggcctgtctgggtgtcaggtcccnnnnnnagggaccatgataacatgtacgnngttggggtcntgtgaggattaacatagcatgtggctcatgggaggcatctggtaactaccagctttttttttttttttttaactaccagcttttaagaagggattctccaggggcgcccaggtggctcagtggttgagcgnctgccttcagctcannntatgatcccaggg

SEQ ID NO: 7262 - DNA, 384 bp, Canis familiaris
  misc_feature (1)..(384): n = a or c or g or t
gtcatgagagggagactgcgtntctttcaaggaagggaaaggannagagggaaagagaagcaagacagaagttggactggtctcccctgtcactctcaggcactaactaattctctccnntaggantgggaagctcnnncannngcccaggagctttgatatttctaccaggtaaggcaaaacaacaggagaaaaaggacactgtggccagagactaagaaacagaaatagcaattcctaggataagggaaatataccatcatagttttttctaagctgaatgaggagtttttttttgttttggtcactacatttattcatgcatttactcttttatccattattttatttaaaatattacagggcagcccaggtggctcagca

SEQ ID NO: 7263 - DNA, 526 bp, Canis familiaris
  misc_feature (1)..(526): n = a or c or g or t
actctgaatttgttattcgnnagatttcagctgatactgaactaactngtaatttattgaaaaacgtgtgccgcccaggaaaccatcctgttaagaatatgcgtgctcctcagatgccactaaacgtataacataattctcgttgctcttttacaaatgtaatgccggttgctgattttgttatatcatgatgtgctctccgccctgtgtgcacacaaagtatctgctcagatgcagtgatcttcctctaaattcataaggagtgatatgtaatctagtatttaactagtattgttctgtattaaacaaatcattatttgtgctgatttctaaggaaaatattaatcattctgcatagaacttatcttcttatatgattaagtctctcacttagggaccagctgtctatcccctaaagttacagcccagtaggtgggactgacgctactagctcaggacttcacgttgagatcgatatttagctcaaagtatcattgctagaaatgagtaaaactgtaagggattc

SEQ ID NO: 7264 - DNA, 277 bp, Canis familiaris
cttcctgcctgcctaggcctctgtccccatctggtggtgctgagtcccctcgccgcctcagccagaacccccggtgtgatcggtgctccccgtccgaccggactcctcgggtctcggggtgggatgaagctgggcgtcgccctccaccgggagccccatggggaacccccaggcccctggctcccagccctgcccctgccagcccccccctaccagttcatctctgccatgcatctcactctgggtgtcttggtcttttattttttgtaagtgtcat

SEQ ID NO: 7265 - DNA, 555 bp, Canis familiaris
  misc_feature (1)..(555): n = a or c or g or t
tggggccaggtgctaagagagggtatgggattgnnagctgggccctnntaaactcaacctatttccctcctcacccctttacatttaaggctcttcagagttcaaactccaaattctgtattttcacttgattctcagttagttagtcttgtgaagcataagcagtggcatagagaatcacaaacggaaaaaaaacaaacaaacccataattattttcttgaccttgaatatgatttattggactagctccctctagaggtaatagctggtgtgattccctcttctggtgacactaggtgggcccggggctgctctgttaccaccctgtcactgagtcatactacccaaagctgactggttccaacataagcacctgagccaatctagtcaatctgttttttcttgtcaacaatttgaaatttgaaatggagagacccagagtatgagaggcactgtagccaagtcattaatggcagccaagaagcaacagcctccagctgctgctcttgtaattcccttagtgaccttggatccttctttcccatgnctgggct

SEQ ID NO: 7266 - DNA, 62 bp, Canis familiaris
  misc_feature (1)..(62): n = a or c or g or t
gacccgggatcnngtcccacgtcgggctccctgcatnnagnntgtttctccctctgcctgtg

SEQ ID NO: 7267 - DNA, 392 bp, Canis familiaris
  misc_feature (1)..(392): n = a or c or g or t
cagccagcgtngctggagggaagaccccaacagctatgcccaccgcggttcagacaaggtnnaccacagnngccacngcggctctnnngtgaactgcatgcccacnngnntcccgcccangnntcnnngcttcatgtcacgaggggctgaggcacatcagccgcagccaggggtggctgtgggcccaaaggggcagcgctgctggcggcctgggacccccccttcccgactggagctacgctacaggctgcatgtacctggaagcttccccgaaggtcagctgcctaaggccttgccccagacactgcagcgggaccctggcccacatatgccaggtgtgtgtgtcgggtgggggggcttcccntgttccaaagatgcccttggactccctc

SEQ ID NO: 7268 - DNA, 671 bp, Canis familiaris
  misc_feature (1)..(671): n = a or c or g or t
agaaatcactcactgtcacnncngcagtagnctattgaccaccaagacgattccanctcnnnnnnnnanggcccggctggggcccagcgggacggcannannaangagnnnngcccacgcttctcctcccaagtggctggtgtccaccgggctccctctcagcctcacactctgcgtccctctgggtgtcctcgtgcaggcccgtggcttccaacacctcctggacacaaaccatgcctcttctccacccctgagccccaaacccattccttctctgatctcttcctctagactttccttcatgtccccacccagctccccaaaaatgccaggttcgctcccaaatcacagaatgtgcacatacagttccctctgcctggaacacaagcctcccagatacccatcgcactcgttccttcacctttttaagtctagactcaaatatcacaggaggtcattcctggtcacccttagaaccaaagttccagccccactggcagccctccctgccccctccctgccccctccctgctcaagttctccgcagcacttacacagctgtacactccataacttactgtttatatattgtcttctcccgctgttagaattttggcttcacctgtgatggtgaagaggaagcgggcctgccccaccaagagctcctgagc

SEQ ID NO: 7269 - DNA, 359 bp, Canis familiaris
  misc_feature (1)..(359): n = a or c or g or t
acaacacctgctcggtgtgtgcagctcccctctcccaccagnnngacctggatcnnnnnctnnactccagtgacgannaaggccnccgcctatggcnnnnnnccgcccgaagaaaggaccgggagcaggagcagttactgcgcaggcagctgcaggaggccctgggcaagaccctctcttctgaacctatccccaagtgacctggatgagaagggctgttggcagaggacacacaggtggcgcccacctggggtccagtctctcaggattcccatgccccctggccccacagatgacctcagaaatcctctgctcccagttcaggagcccagcctctcagcttctaatctccctgctcc

SEQ ID NO: 7270 - DNA, 511 bp, Canis familiaris
  misc_feature (1)..(511): n = a or c or g or t
aagnnngtcacttgaaagtctaaaactccttgttttttgagtatctggtattaccaagcaaaacatcgtcctttgttcattaaacttttttttctatagaattaacaaattaggaagataagacgaatggaagcaatacttggatgttaaagtaagaagagttagctaatgtcatgattcaaagattaataaggattaagaaatttaaaaaaataaaagggtaatgaagctattgagttatactaaaacaaaaatgtggcagattcctgcatgttaatgtttccataagaggttccatcataaaagtcaactgtaaaattattttttaaatgtaatatatagaacacaaaatgaatttttagcaaactttaggaaattcttgttataaattacccagattttataaacaaatcccccctaacttgcattttgtttaaagtaataactttatatcatacaaataaatttcaagtatgaaaagtgcattattgcaataatacctctttgcaag

SEQ ID NO: 7271 - DNA, 651 bp, Canis familiaris
  misc_feature (1)..(651): n = a or c or g or t
agctacattgcntcacagccagatnnaangcannnnnngggtattnnnagtgcttctcatgtaagtnncaacatgagtacaccagtcttgcctgctccaacagcagccccaggaaatttgggaacagttcaaggaccaagttctggtaatacttcgtcatcaagtcacagcaaatcctctaatgctgctgtaaaattaacagaaagcaaagtaagtgttacagtngaagccagcgcagatagctcgaagacagacaagaaattacaaatccaagaaaaagcagcacaggaggtaaaattggccattaagccattttaccaaaataaagatatcaccaaggaagaatataaagagattgtgcggaaagcagtagataaagtttgtcatagtaagagtggagaagtaaattctactaaagtggcaaatctggttaaagcctatgtagacaaatacaaatattcacggaaaggaagccaaaagaaaactctggaagaacctgtgtctaccgaaaaaaacataggttgaaatggggagcagtataaaggacactatcaagatgtctgcaaagtgcaatttcaacatgtacctttaaatgaaaatcatacataactgtgattgaaatttggttttgataaaattattttttttaat

SEQ ID NO: 7272 - DNA, 617 bp, Canis familiaris
  misc_feature (1)..(617): n = a or c or g or t
cagntgacaaagtacttgnntctgaacaggataaaatgagccaagggtttcatcctnnnngagacccctctgacctaaaaaaaataaaaactgtggaagaaaatngagaagaagctgagcctgtacgtaatggtgctgagagtatttctctgggtgaangaatagatgctaattcaggctccactgatagttctggtgaaggggtgacattcccattcaaaccagattcctggaagcctgctgatacagaaggcaagaagcagtatgacagggagtttttgctggacttccagtacatgccagcctgtatacagaaaccagagggcctgcctcccatcagtgatgtggttcttgacaaaatcaaccaacccaaattgccaatgcgaactctggatcctcggattttgcctcgaggaccagactttactccagcctttgcagattttggaaggcaaacctctggtggaagaggtgtacctgtaagtgcaagtttcctataacctaattagctagaaaatgtcatagacttcatgacatcttgtgtccagtggcaagagagctgctttttttcattggttcctctaactaagaagaagtacaagagtgaagacttgtcc

SEQ ID NO: 7273 - DNA, 578 bp, Canis familiaris
  misc_feature (1)..(578): n = a or c or g or t
ccttcatcaattccctcaaacaccggctgctcgtgtacttgtggcgncgggcagagcaggatggtagtgcgatggccaagaggcgcttcttccagtattttgaccagctgcggcagctgcgcatgtggaagatgcagcttctggatgaaaaccatctgttcatcaaatacactagtgaagacgtggtaacccttcgagtcacagatccgtcacaggcatctttctttgtggtgtacaatatggtgacaacagaggtgattgccgtgtttgagaatacatcagatgagcttctagagctctttgagaacttctgtgacctcttccgtaatgcaaccctacacagtgaagtccagtttccctgctcagcttccagcaacaattttgcaaggcagatccagcgccggaggctggaggtttagtctctggagaaattgagccatataggcactggtttcacattcatgaggcacagctgaggcaaggatgggatttgtcatgctaaaaacaagaattaagtgaaagccaacaaactgaagaattgtatcctagtgcaacatattccattaactgtcttgtca

SEQ ID NO: 7274 - DNA, 541 bp, Canis familiaris
  misc_feature (1)..(541): n = a or c or g or t
actgggctcccctcccaagtcacagtccccatcagggtctgcagggcccacaggccagcgcttgggggnnnatgttnnagctggcccagacctcctccccagccggtcaccttggtcacctcacgtcccacgggcagaggggagccttctccggacagcacctgactggacacttcctgggttcaaatcttggctctgccggcccagtggctgcgtgaccccaggcaagggatttaaccccttggtgcctcagtgtccctgtccacaaaacggggacaatcctagtacctccttggagggtttttatgagaatctggcaagaaccacttgagcagggcttggggcatggggaggactttgtggtaaaaatctttaaagaaaacagggcgcccggggggctccgtcggtcacgcgtctgccttcggctcaggtcacgatcccagggtcctggggtcgagtcccgcatcggggctccccactcagtggggcgtctgcttctccctctacctctcacccctgcttgtgtctttcaagctcgctc

SEQ ID NO: 7275 - DNA, 330 bp, Canis familiaris
  misc_feature (1)..(330): n = a or c or g or t
caatgagattgccaannacattcgaaatcaaagactacatcgtnagcttcgaaaagctgaactggcaaaacttcagcagacnntgaaggcgcttaatgagaaggcngcattttatgaagaacaaattaattattatgacacctacataaagacttgtgtggacaacttaaaaagaagaaatgcacgaagatcaattaaactagatggaaaaggagaacccaaaggggcgaagagnnnnnngccggtgaggtacanagcagcaaagctgcangagaaaggagtnnncctggggatagatgannntcagaccaaccagtttaaaaatgttac

SEQ ID NO: 7276 - DNA, 444 bp, Canis familiaris
  misc_feature (1)..(444): n = a or c or g or t
cagaaaggctnnnttcnannntgcannaccttccnngaagatgaatannncnnnaatttcttccttagagatccttgaatctgaaacagaacctgaaaatacctccagtagtgagccctcccaagaatcctctcttatgttttctaccacatccagcatattctcctcngggctgctttcaaagaagaattagctacatcttgccttcttcttcctttttgtttctgtgcgtaagagtggtgatggtggatagtggtcaagaaaggagtgcagagggccattgaggctctcaggaggatcactctggtctagcattttccataaagaatgcannncnnaggtatgggcaaggnannngtggtcntnnngctggagctggttgtnnnnnnannnnncagggtttctcatcttaacccttcntnnnnctccctgctaaaggaatgg

SEQ ID NO: 7277 - DNA, 533 bp, Canis familiaris
  misc_feature (1)..(533): n = a or c or g or t
agaatgtgaatnatnngttctgcttgggtggtttaatttaatggnnctgaatatgaaagaaataaaaaggtgtttggattttctaaaaatgcagtgttgtttctggttagcagagttaatatttctaaccatattatttgtagctgaccccattctaggatttatttggtttggtttggttcaagttaaaagaggaaaggaatgaagtgaggtaaaccacttcaggtgctgcttgtgctagggtagatatgtttgtacacacagaagtttctacaggggtcaggttactttattcagatagcagatgtcagtacctatcctttgtatggaaacaagccaaacnnaatgaactctggaaaatctaaaatgaatgtacattttcttctgtgtagattaccgtggtccaaatggaaataccagtctgatcccaactttcttttcattgtatttatgctaaatattccttttgcattttcaggatttatgcctgtaagaaacttacacttgactctgtaaaataagtgtaaagaatt

SEQ ID NO: 7278 - DNA, 546 bp, Canis familiaris
  misc_feature (1)..(546): n = a or c or g or t
gggggatgtggtgctgcagagcnnncatgtganngagacactgancaagactgcnnncagcgctgannntgnnnnnaacatcaacatcnnncagggcaggtgagcatcacgtnngcagggggccctggcagggatggcattatcgacttcacgcnnngntcagaactcctcatcaccaaggccaagaacgggcacctggctgtggtggccccacggctgaactnnnggtgatgaaggcgcccactggaccccttcccaactcccaatgctttgcttctcccccttcccttcccacttaccaaagactcgagcttctagacagggacccagggataccttgaagccnaccgacaaattcctgccttttgctcacccctctcgtgagggagcagcgggggccagggagctgccccagatgtgggccaggccgggccacagcaataggaaagccggggccaaaggcagctatgccagccccactgccgatgccaaatatttgagagaagggaacttttgctgaggttttctctgagattttttgatgct

SEQ ID NO: 7279 - DNA, 510 bp, Canis familiaris
  misc_feature (1)..(510): n = a or c or g or t
aggtcannacggtgccccagagtggtcagtccccagcnntgcgggccccccgcctccatcacccagccgtttattacacactctgagagtgtctgcgatgccctgtctgacaaagacagccccggcccatgttccggtccggctgggtgagtgcagtaggctctgaatgcctagagtcttagttgcatcactacccatcgcccggggccctgttgcccaaactgagagggtgactcgggctcccctcagagcaactctgcattatgtcattttgtcatttgggaagtgcctggttttggaaatccgcttgctctggctctcctctcctcccttccccttcactacccttgtgctctgtctctggggtcagggtcagccgagcccccagttctcctgcttttcctccctggtactctttcctttcctctcggctctttctctgtctcctatctctgttgtctcccacacctctgccagaccatgtgtcgtgtggttcacctgcctgggttc

SEQ ID NO: 7280 - DNA, 124 bp, Canis familiaris
  misc_feature (1)..(124): n = a or c or g or t
agctgtcttccacctgtttcagnntggnnnngtgagatttgctccctgctttacagagataatacgggccttccttaacttctccacccctctccttccatcctcaacctatgaactgtacacc

SEQ ID NO: 7281 - DNA, 646 bp, Canis familiaris
  misc_feature (1)..(646): n = a or c or g or t
ttatgaacttcnnnacaagcaaagagctgtgannnnnncagtgagtaacaccncnctactgcctggctgtgtggcaaacggtggtcccagtggcccagagaccaacactgcttactgagtgttagcatttagttgcatcctacagacaaagcaaaggtgacccaagttttggaacagagcagaatgctcaggtgccagtgttaaaatgcaaacgtgaaagtgcagctggcaggagcagaggtctgggaggaaagagaaacagttgaagggaagccagggagcgtctcctcttggaaaggggaaagtatttgatggagcaggaaggacagtgttggcttattgctcaaatttatgcaagttatctaaaagaggagctctaactagtgctacaactacagcaggacattggagaggacttcagacttcagccacatcctcatccagcacagcaacaactccaccatgcaataaactgataaatcaagatataatggtggaagcctgctattctatgccagggaggtaagtgctggatgagcctggaatgtgggaagaggaaaggcaggaggttgctgcttttattgactgtgtttgtttttttttaattgactgtgtgttttaaaattaatttcaggacataaagaaa

SEQ ID NO: 7282 - DNA, 512 bp, Canis familiaris
  misc_feature (1)..(512): n = a or c or g or t
ctgaccccccaccaacactgactccaggnnnnnnngnnnagttnnatnncttcnagccnctgnnnctnnagcacctggcaccgccggcccaggccacgtctctgcnngcgnanntcttgctgccacccacgtcgaggcctaaggccacttagggcggccgagcctatgggcccaacatgaggggacacctatgcctgccctgctcctcagacgatggctgaaggctcccctgacacctcaagatcactctgctactttccagacttttcttacaaagcaaacacttttattttctatgcaaaggtgattccgagaatttatataatggcgggaaaggggcagcaggaagctcctggtgtggcatcgccctcgggctccctgcccaaccttctgctttccccaatgggacagttgggagagcagaggggggccaccccggcctcaactgtgcctgcccttcctgggtgcctggtgagctggtcccagggcctagcctgagcnnnnnnncatcc

SEQ ID NO: 7283 - DNA, 474 bp, Canis familiaris
  misc_feature (1)..(474): n = a or c or g or t
tgttactcatatgggcannngctgtccaaactggnnatnnngaggatcgcctgtaactacatcctgtccctggcgcggctggnngacctcgactacagtgccgaccacagcaacctcagcttctctgagtgtgtgcagcgctgcacccgcacnnngcaggcnnagggacgtgccaagaagcgcaaggaatgactggccccaggctagaccaaggatgctgctgcaggccctctctggtcaagcctgaggagaaggtgagctctccaaatccagccttgtcttcttctccaagatgccgccagatgctcagaccactgcctctcagggtggggcaggggcacacctgcctccctctcaccctcctgtcccccctcagccactctggtgactccgcactttgccctctgcctcgtagggaggggagagctaagcctcccccttgccccggggctgnnnnaattcattgccaaagat

SEQ ID NO: 7284 - DNA, 503 bp, Canis familiaris
  misc_feature (1)..(503): n = a or c or g or t
tcccaaatgtctctctcggccctgctgnttcctcacagtgcttcccgtccttctcattcctctgcaagaatgatttggactgatgcgtcctttctcacctgcacgtgcagaatggctcctttctctgcagacctggacatgcttgttgcagccctgctctaaggactaggaggaaaggactacttacttcagaaagtcccaatcccagcaagctgaatctgggtccattattttggctgaactcttgagaatttatggaagcctttaggaacatatcttgctttaaaaagaagttatcaagggactagcaatctccccctggctctgcctattcctggacctactcaaagatgtgcagagcagcttagcatttgcagctgagccgaattttgttttgttgttcagccgagtcccttcgacgataaggtgaggtgatagaccccccccactccttcggttatctcgcttttggagcaagttgcattaatttttttaagagtatc

SEQ ID NO: 7285 - DNA, 555 bp, Canis familiaris
  misc_feature (1)..(555): n = a or c or g or t
tctnncttcatccatcctcaaagccagcagcatagcattttccagtctcggaaagacctgcatttcgattttcttttatttttttaatcngctgcacaagcacaggatgaangaagtgtggcttgagagcggtgcctatngaaaaggctggaggctttcagtcatcgtcagttngaattgaaccagtaggaatggagtagctaccagaaaagacagtggttctcccccgccccttcttattttaggtgcgaaagggtgaaactggaaagcatgtttctctccctgtagccatctctctccccaggaggaatcagcctcccgttaacagcttacagtagagcctctgagaggtgttctatgcacataaaagcaaatacatactttaaacttaaaatccctcttttgtagtattcgaattgcagtatctatttcgatctaatactggattttacattccattccactgatctccttcttttaatatatttgaaaaagattgtagtttattgatcttttaaattacatttcaagtgaaagcaatannnntctgttggg

SEQ ID NO: 7286 - DNA, 502 bp, Canis familiaris
  misc_feature (1)..(502): n = a or c or g or t
ggatttcgaaagacattattgttatnncnngcgaggcttaaangcnnctgtcnnagctactacatgtttccaagatttttgcaacatatcgaagagaatattattagtgaaaacattttgaaagaaataaaattagagatattgttgcatctcacttctctgtctcaaacttttaaccatttctttccagaagagaaatttgaaacattaagagaaaattgctgggtaaaagatccatttgcttttcgaaacccagaatcagtaattgaattaaacttggtgcctgaagaagagagtgaattattgcagcttagttcgtcatatacattgaagagtgattatgaaacactaagtttatcagcattttggattaaggtaaaggaagactttcctctgctaagtagaaagagtgtcccactattattgccattcacaacaactagtttgtgtgagctagggttttcagtcttaacccagttaaaagcaaaggaaagaaatggat

SEQ ID NO: 7287 - DNA, 97 bp, Canis familiaris
  misc_feature (1)..(97): n = a or c or g or t
ggacggccctggatctccacctcaagtctcagactgcctgttctgtttgcttttccacgtttcatttttattttatcttggcnnntaaatttgtaga

SEQ ID NO: 7288 - DNA, 459 bp, Canis familiaris
  misc_feature (1)..(459): n = a or c or g or t
gtttgtaacagtannnattaaaattgnngtaggtcgtcannnaactggannncatccccaggaaaaaaaaaaaaatgcacttaaaattttgcatagaatttaaggagatgccatattaaaaaaaaaaaaaacctaacttgtaagagaaatctggaaaacaaattaaaatcttaccaaaaataaggtactacactaagccacaaatcctggttcatccgacacttgggaaaaaaaatctccttcaggatattcacaagccccatcaaaaacaattttctttaaaaacaccaacactttggcagctttcagattcaaaatcactaatgttgccaggaggataaggatgagtaaaaaggtcaaagtctagaagttattgaaggatttgtcctataaaagaagccctctcacagaaagctctgagaccacaggcagggtgatcattagaatctagtattcctc

SEQ ID NO: 7289 - DNA, 357 bp, Canis familiaris
  misc_feature (1)..(357): n = a or c or g or t
cttggtngagctcataatattttttgtagagtttttcctggctgtggaaaaactcaggctggtaagcattnctctgtttaaagtnnnnnaaggcaatttgaaataattcattcttcttacccaacttctaagtgctctttttctnnccaagncnaatataattgagggaaatgtcggggtgctggcttaagnnngcacactgacatctggatcatgttcaaagnnntattaacattgtnnnnaaaatgataggcnnctttgcctcacttacttgccaaaatnnncattnnnnngttaaggaaattttgaggtagncttaacagcattcttgtatttcattttagattgtaagctcga

SEQ ID NO: 7290 - DNA, 578 bp, Canis familiaris
  misc_feature (1)..(578): n = a or c or g or t
atgcttggtaaattctnnnaatgaatgcatcttgaagggcttgngtagaacgagatggagtatattnatcttcacatgccgatgtttcagaaccacatttctattatcattgctnnatttttcccctgtagttagcatatatacccacacattagctatgtcatgttctttaggtttaactaggaaatgggaggtagatttgtatattttcattttaattgtagtagtctaatattgagatcttttccttaagggttttacttcagaatgtatctgaagtggaatttatttctccgaaactcatatataactgcagataagctcagacaaattcactgaagaagagtaaacaaaggagatgaagtggctcatcaagaaaacttcaaagacagtttgaagggaaagttaggtaaaattattatttacagaccagctttttacctgaaaatagaagataccaattgaaaaactattggtaccaaaaaatgttatattattggcacaaaattattatgtagaaatagagtctgcatataagannnnccagttagaacatataatnnaagaaagatccactt

SEQ ID NO: 7291 - DNA, 618 bp, Canis familiaris
  misc_feature (1)..(618): n = a or c or g or t
agatccctttgcctcccattnnntaatgtcactgagnagctttggggagaagagagggatctgtaagataagcaaatgtccannnnaagagttagattgagatgtcagnnagtnactggtggttanngctgctgtggacaggattagcttcagaaaaagtgnncnacagacacagatgtgaagacagccagattctgattctgattgacacaanctaaactatgtgtagtcataagagccctctgctctaattctcaattgtangnaaactgcttgtaaaattgttccttccttaaccttccttcctatagcttagcatggagcaaatgaccagataacattttgagaaggtcagttcaatcctggaataaacctttttattggggcatatgtatttcccttgcaatgtctaccctattacttggcagagatacttaataaattattagttaacctttggattaggttttgactcatgatagacaaatttacatacttgatggatgaagaatatcttgggtaagcatcattttcttttcataatctttccttgaaaatcaatctccagttttgggtaggatgaacgttgnnntatgaaatcattgtaannnnacttca

SEQ ID NO: 7292 - DNA, 651 bp, Canis familiaris
  misc_feature (1)..(651): n = a or c or g or t
atcaatccaaaannnngtacaaaattgatcagcnncagtannnnncacgagaaaaaatgtgtgatanctaggtggcagaagaaagnaccaacctttaaacctgggaggctgtattcatgattgacaaaacttnnaagcaaccaagatgcctttcnttaattaaggaaatggacaaactgtgcaacatccatacagcagaatattatccagcaataaaaaaaaatgagctattaagccagggaaaagcatggaggaaactttcatgcatatggctaagtggaataatctggtttgaaaaaactgtatgattctggaaaaagcacaactatagaaacagtaaaaagatcagtgtttgcaagggaacaggggatgggggaaaaagggggaaggagagataaatagatggagtacgggggatttcagagtgatgaagctactctgcacggtcctgtgataggattatgcatctgtcaaaatccatagaacaatatatcagaaggtctgagccctgatgtaaacatggacattagtcaataattctcaatactggttcaccaatcaaccatagcaaatgtgccccactaagcaaagtatcaatgctagagggaactgtggggaaagagtgtgtgtggaaaatctctgtactttcag

SEQ ID NO: 7293 - DNA, 665 bp, Canis familiaris
  misc_feature (1)..(665): n = a or c or g or t
gantagtgccacttgtatttgaagagatttttgaaaagcaaaaaaatacagcccaaaatttgaggatggttaattactattgattttactccagaagtaaaccaagtgattttcagttgctagagagatgctctgttacatcagtaaacatgttttttgtttttgcatctgcagcgcaaatccagaaaaaccctgtgcatcatcatttttatcattgtcatcggagttgtaattcttggtctcatcatatggaaagtgaaaagctaaattataaaggagcacactattgcactacattctctaaattatgtaggaggattcctgtaatcatggtttttattattattattattattattttaaaagtacttcgtaaaggatggctcccaaaactttgttactttcattggagaggggagtttcctttagattcaatctgatattttctaacactgaaagttttcctcatatgacctctggcattacttccatgcttttcgatctagcaactgtgaggttttgttcacattgtatatgcctttcatttataatttatttaccctgttgacttagctcttggaatgagtaaatgtaaaggtgtgtgtgtgttccatgtgcatctgtctctgtcacagagtggcatgcacccagatttgtgttacttc

SEQ ID NO: 7294 - DNA, 547 bp, Canis familiaris
  misc_feature (1)..(547): n = a or c or g or t
ctnnaaggtganncnaaaggaacangagcaacctgaccacaacacctnnnnnngcgagcagcccccgtggcagcngccacccacccctcctggcaatgtcatccccgtggccaccctgccatggccaggcgaccaccagnnnnnnacnnnnnnacgccccnnnnnnctctttctcttcttcctttcctatgttctctcatttcctttctttcccttcctttttgctcgggagacttaaagcccccatgactctgtttccccgtccctcctgaatttaatttgcactaagtcgtttgcactggtttggagtcttggatctggccttgagttcccgagcgtgtgtgcaagcaagctgctgagtgcacctggcctcctgtggcccacagcgcccggcacccaccttccgtccatctctgtgtgggggtgcccgggtgcggctgagagcgtgaggccccacccccccttgcctagtctggaagctcctaacaccgagcagaccttgaagcattccattgtagcatgactcgctctgtgcccctccccacca

SEQ ID NO: 7295 - DNA, 629 bp, Canis familiaris
  misc_feature (1)..(629): n = a or c or g or t
acatagtgnntacattttctgtcagctcacactttcaccagnngtnnnactaatacaggtaggaaaaaaaagctcccttaacaatgtttttaactaatggtaatttttttttaagcttaccaatataagtatttttaaaggttgtatttttcaaagtcatacgatgattgttcttgttttcgctcatagaatagattgttgtgggataaagagtggtccctagcttctatttttccaattaagtagaacatgttcttgggattatactattaaatgttaattttctttaaaagaaagaagaaagatttctgtctgccaaagttttacgttaatactcagattggggtagaaaacaaaaaagtgctaggtttaacactaggatgactcaggttgtgttcctctaggtttaaaaagggttttcccacccttcttaggggggcactgactgttttaaacacagagacttgattggttgggtggttttgtattgattatcctgaaaaaaaaagctgttgggaagaaacgctggccttggtgtgaatgttagccccacccccagtgccagcatccacagggcgttttcctcaatcggtgttcagtatattgttttccnnnngaatgttattaat

SEQ ID NO: 7296 - DNA, 462 bp, Canis familiaris
  misc_feature (1)..(462): n = a or c or g or t
ttggacannngggtacggcgctgctggatgcagcagatactttggctgatcaaagaggcagccaggcattttgcaccaggaagaatcagtgatcacttttcagaagacttctatggaccataataaacatattacggaggaacagattttgctaagacgtaatctagttttataactcaatcatggatcaaccacatatggctaacttgcagtttaaagggatcccatcagtgaaaaaaaaaaaagatttttttttaactgactgcttttacttaagtttgagaaagtcctctcgtcaaaaggtttaaaccttcccgcctcgatcttaaaaagcatgtcaaacaatccacgtcagatgccataaacaagaactgcgagagaaaatggtacaatcttaaatgaatgggaattggaatcaaaagggtttgctgtccttcttagaatgttctaaaatgtcaaggc

SEQ ID NO: 7297 - DNA, 165 bp, Canis familiaris
  misc_feature (1)..(165): n = a or c or g or t
aatacacgtaagtacntgcaaatacatgtaaatattgatatacggggtgtctgtgtgtggtcgcaaggnctgtaagcaggtgggtgnnnnnnccctgnngnngtcgggtcaaatgtgaacacgtgctcttcgtaactgcgtcactgtgnnnnnntcacgactgct

SEQ ID NO: 7298 - DNA, 478 bp, Canis familiaris
  misc_feature (1)..(478): n = a or c or g or t
cttcgccgacgggctggnngtgggcgccgccttcgcgtnntcctggaagaccgggctggccacgtcgctggccgtgttctgccacgagctgccacacgagctaggggacttcgcggccctgctgcacgcggggctgtcggtgcgccgggcgttgctgctgaacttggcctcggcgctgactgccttcgccggcctctacgtggcgctcgctgtcgacgtcggcgaggacagcgaggcctggatcctggcggtggccaccggcctcttcctctacgtggcgctctgcgacatgctcccggccatgctgcacgtgcgggaccggcggccctggctcctcttcctgctgcacaacatgggcctgctgggcggctggaccgtcctgctgctgctgtcgctgtatgaggacaacatcaccctctgatggcccccgccccactctccggcccttgatgctgcctgctgaccctggcctatctca

SEQ ID NO: 7299 - DNA, 570 bp, Canis familiaris
actgattgttttaaaagactataaagaaaacagttagtgaaatacttaacttatgaaaattaggtgcttatatgggtagcactgtatccatgactcagagagcagttcttctcctggactcaggcaagctgtctcatgtcattatttatctacttaaattaactgtcagttaatacttcactctgctttgccacttaatcttgggaaagaaaccagactctaccagcaagattagtataaatcccagtgaataaataatatacgtagaaaaaatagaagctacaagtctactctacatgatatttcataattaacatacattttctaagcaagcatgaacttctcctgagagtcaaagacttaaaggctatcaagtcaaggtgttcctaaaagagattatgattatccaagtaagtacaaggtctctctttcttgtaaaaaaattaataataggagtgaaagacgggaattgctattgttttctgggtattttaaggaatattattggagccacattacaggaaatgtttttgtactatcctaagccaaatcattgtaagatcattttac

SEQ ID NO: 7300 - DNA, 321 bp, Canis familiaris
  misc_feature (1)..(321): n = a or c or g or t
tnnngattcagcaaagaggacaaggagctccagcccgagaaccagtgatcagcagnnnggagcannnnnagctgatgctgnnnnatcagagaagacaagnggagctcaagaaattggaagaaaatgacgatgactcctgtnnnnnttcnccgtgggcaganaacanngctttgaaaagacattnnnnnnnagtnnnngacatcannnnnngncnnnnntgaagttcnnnnnnnnnngacgctgtcnnaaatnnnannnnnnnnnncatttgagcnnnntaatannnnnttaaaaaaataataataatagtaatggtagtaa

SEQ ID NO: 7301 - DNA, 612 bp, Canis familiaris
  misc_feature (1)..(612): n = a or c or g or t
gacaacagaacagctccagtttacaatttttgctgcacatggaatttcaagtaattgggtatcaaattacgaaaaatactacttgatatgttccctgtctcacaatggaaaggatctttttaaacctattcaatcaaagaaggttggcacttataagaatttcttctatcttattaaatgggatgaactaattatttttcccatccagatatcacaattgccattagaatcacttcttcaccttactctttttggaattttaaatcagagcagtggaagttcccctgattctaataagcagagaaaagggccagaagctttgggcaaagtctctttacctctttttgactttaaacgagcacaagcagagggagcagcaggcagagggtgcaggagaagggagaaggaccctgggatcatgacctgagccgaaggcagatgcacaaccaactgagccacccaggggcccctctatctggcctttcaactattttaattatgttttaagtagtagtatgagactatcaagtgtctatctaaatgggaagaaaaaaattaattgaataagctccagatatgtttcatatnnncatggtaacattttggcaagtg

SEQ ID NO: 7302 - DNA, 563 bp, Canis familiaris
  misc_feature (1)..(563): n = a or c or g or t
ctcttcgtgttcctnnnagtgctcatctgcctngtnacctcctccctcannntctttttcctgttcccccggtccatcgccgtgcagcctgcaggcctcaactcctccacagtggcctttgnnnatactgatatccacctcaacataacgaatatcttaaacatctccaatagcaactactaccccatcactgtgactcagctgaccatcgaggttctacacctgtcccttgtggtagggcaggtctccaacagcctccttctccacatcagccctttggctagtgnnnnnnnnnntttatgcagtgaccaacaagatcaaggatgaaaatacatacaaaatctgttcctggatgaaaatcaaagtccaccatgtgcttttgcacatccagggcaccctgacctgttcctacctgagccattcagagcagctagtcttccagagttatgaatatgtggactgccgggggaactcatcggtgccccacttgctgctggcccctcacccaccatgacctgtctannnttcccaaactccaggnnnntgccagcctggactgtata

SEQ ID NO: 7303 - DNA, 618 bp, Canis familiaris
  misc_feature (1)..(618): n = a or c or g or t
atantgtccaaattcatggcaaaatatgattttaagtgtnaccacnngtcagagattccagaggagcaggaaggagcagaggattcagaaggaagtggaatagaggagcaagaggtagaggcaaatgagaatgtggaggtgcctgcaggaaaagaggagaaggaaatagagatcctgtcagacgacctgacagacagagcagaggatcatgagttttcagaagatgaagaaccagaggatatggctgaggaacttgatgaagatctggaaagcaagaagaatgttccagcagatgtggccagtgacaactcccttaaaaaggnnnagacaaccaaacaagaaaaacgagctatttgtgaatacaatgaaaatccaaaaggaaacatgcattatcatgcaaagagcagttcttcagaagtcctgaatgatagtgaatcaacaccaaataaagatgtgaaaaaatcaaagaagatggaaaagactcttgctaaatcctggatctttcatgataaaatatcatcaatggaggccctttgtgacgttgaagcttctatctaaaataccatcggttacatcaaaggaggaattgcagtggggctatcttttccaggatcccag

SEQ ID NO: 7304 - DNA, 476 bp, Canis familiaris
  misc_feature (1)..(476): n = a or c or g or t
ctgctcacaggcttgatnnacacnnnnnctccaccagagcgncaagtgccaggagaaactgctgcacaaaactctgtnngaccacccagaaggggccacccaggggcacagggctgacagcccaagtggggattcaccagctggagagtaggcaagggcactccaggcagaggagatacagactgtggcccaggagcacacaggctctgcggccaagccctgggacaggactgtggctttgaagaagagaaagatcattgccaaagaatggcagggtgccaaaggtcacgctatccaggtcccaagcctgagtcactcatgacactccaagaagtgacgtctgcccctcgctgctgctctccgtgcaatgaaaagtagctcgtcctggtgcgagcgcaggtgggagatcactgatgagacctcacgctcatcagagccgccaggaaacaaactgctcaagtacttctcaagcagtg

SEQ ID NO: 7305 - DNA, 401 bp, Canis familiaris
  misc_feature (1)..(401): n = a or c or g or t
aatagtatttgagaaaaagantnntgagannnnnnaagtaatttatttgacttgatactcttttnannnngnnnnnnnnnannnnnntaaaagaaatgaacannncattaattttagcctacaatttttttttgtttataacagtcatttttgtggggggtatgttttagggcatcattcagaagatagtggacagtcacaaagtaaagcacgtggcctgctatggatttcgcctcagtcacntgcggtcagaggaggttcactggctccatttggatatgggtgtctccaatgtgagggagaagtatgaacttgcacacccaccagaggagtggaagtaagattacatacctactttggtgtgactcacccttgatttgtnnngcatantaaatcacaca

SEQ ID NO: 7306 - DNA, 642 bp, Canis familiaris
  misc_feature (1)..(642): n = a or c or g or t
tgggggactgctctcctttccatgcntgtnntctctgtcgctcttgctatcaaaagaaaattcttggatattgaattcacagtcaggaaaaaattatataattcctgnggtggggggtgatttacctcaattttgtacagattgtaggagtttggggttaagtgctatagtgtcatctcttctccaatgaaatatactcttagtaggtgtacataggaaccctaaatatattttaaaagctggcaacctagccagttttagtctttagtttataaaaatttcaaattgatggatttaatcagttgaaataagtgaggaatggataaaaacttgagtttcagaagttctataatttagtgatttgctatacttcaagttgatcagatgctcccttattttcatggtcatctgactaactggcctatttccatgaagttctgactagcaccaggtggacctgccaggatggtcacagcacactgtttccaggctcagcctgtgtatacagctacttatatatagtgactgtctgaccaataagctggtaacctaaaaacattcttcaattgtcttagacctcctgccattcctaatatttgttttgtagtaattgctttatttccatgtgataaataactattg

SEQ ID NO: 7307 - DNA, 547 bp, Canis familiaris
  misc_feature (1)..(547): n = a or c or g or t
tgtaaactcagcgcagtggggtttttctggatctaaacaaactgatcataaaagttcatnnnangagattcttnnaaaaaagcaaagaatagncaggaagaacctggaaagggnaggtgaggggggcccgggcgctgggccacgcgagccccggccagacgcggcggcggcctgctgacacgtacaggcagacggccggtcactgcgctcacggacgcgggccgggcgatccccgcggcgcgcccgcggtgggggccgtcctccgtagccggggagtgggccggactcctgcggaggattcatcgttcagccacaataaaagacagaacacgtactggatcgaaatgtttatcacattcaacatttttcgaaaatgttttgacttgagacagaacaggcgcggtcgccaggctgggcctggctgagcctcgcgggtcacgggtctcctgggcgacagcgtttggggggggacacaggtgacggtcgcacaacactgtgaacataccgaaagccactggactgtacactagctcttacacactttacg

SEQ ID NO: 7308 - DNA, 530 bp, Canis familiaris
  misc_feature (1)..(530): n = a or c or g or t
tccataaaagaaaaacaaaacaaacagaaaaaccagagccctggagaaatgctgttactttttattttnacacccatcagatttaaggaaaagactttttagctgtgatattgattggttggttggaaagaatgaaggtttttagttttaggtccagacactagtgttgaaaataaaggtgatagccagtgtncttctgtcttccatagttgtaagaactatgagagcctcccacgtaatccatcaactcaactctctttttttgtcttgatgttgacacacaagtttatacagagtggatgaccaaactagctcagaagaggacagcaagaattaaagcaggtgattcttcccttgtgggagagctctctcagtgcgaacatgccttctgtgggcggaaatcaggaatccaccagctgttaatggagagtgccttgctttcatttcagacagcagagttttccaaagtttctctgctcttctaacagcattgctctttagtgtgtgttaacctgtggtttgaaagaaat

SEQ ID NO: 7309 - DNA, 124 bp, Canis familiaris
  misc_feature (1)..(124): n = a or c or g or t
gtnctaannagtagatgttgtcgtcatcaaataataantgtataatcaccccttttaatattggggaaaaatgaaaattcattaattactgctttgtgttatgtgagtttactaacagataact

SEQ ID NO: 7310 - DNA, 530 bp, Canis familiaris
  misc_feature (1)..(530): n = a or c or g or t
tgtcgnggcgcagcacaggngnntgttcctcgttcaggtggctcnnnagtgccgcctggggaacgggcacgatgggtggcatactgtttgtgccagggacggagtgagatctnnagnnngcggcgccggcctggtggcttgtgcaagactgnnacgcgcggccccatctcccgtgctcacgtctgtgcacgaaggaggcggccagcatgccgacagtgtcctcggctctgctccccttttgtgttgatgctgacctgtgactcacgcttgtggtctctgccacgtatcagtggctcgtctgctgtggccgcgacagtggagacccgctcctttgtcctgccctctgcttgcacctccgtcagcgtcctgccccgggagaggcctccggcggcccgcgaaggccagcccccgctccctgggcccggcaccagggtctccacataggggcctcactgagtcccctgggaacccaagtcgccgccgctgctcctgcacggctccgtagctgnnnnnacatgcgtcaggctcct

SEQ ID NO: 7311 - DNA, 440 bp, Canis familiaris
  misc_feature (1)..(440): n = a or c or g or t
annacccgaatgattcatgaaaagcnntactactatgagaagtnnnnncctgtgcccatcctccacagcnnnnnngnnnnnnnngatgatgtctgtatgagctgttggctgtnnnnccagtccagctggggccacgtgtggacagccaggaagacctgaccttcctctgggatatgtttggtgagaaaagcctgcattcactggtaaaggacggctctccacttggcgtgtgccattgggagtgtagatatggtgaagatcctggtactttctcaatgccagctaaacctccgtgatggagaaaacaggacagctctcgtgaaggctgtacaatgccaagaagaggcatgtgtagatattcttctcagaaaaggtgctgatgtaaatactaaggatttcaaggacaacaccgctctccattatgcggcctatgagggaaa

SEQ ID NO: 7312 - DNA, 710 bp, Canis familiaris
  misc_feature (1)..(710): n = a or c or g or t
attccagtgtgattgattcagatgaaaaatggctctgncgacagtgtgtttnnnnnncnncaacaaagagnggtggtgcgcntaagaaannaccaaatgnnnnnnnnnnncnngtcatgnngcagacattacnntatagtgnnnnnnnncntgaatggnatgcaggtcataaaaccaatgtccagcaatgttannnnnnnngtggaggccctggagactggtatttaaagatgctacaatgctgcaaatgtaagcagtggtttcatgaggcttgtgtgcaatgccttcaaaagccaatgctatttggagacaggttttatacgtttatttgctctgtctgcagtnctggaccagaatacctcaaacgtctaccattacagtgggtagatatagcacacctatgcctttacaacctaagtgttattcacaagaagaaatactttgattctgaacttgaacttatgacatacattaatgaaaactgggatagattacatcctggagagctggcagacacaccaaaatctgnaagatatgagcatgttctggaggcattaaatgattacaagaccatgtttatgtctgggaaagaaataaagaagaagaagcatttgtttgggttgcgaattcgtgttcctcctgtgccaccaaatgtggctttcaaagcagagaaagaacctgaaggaacatcccatgaatttaannnnaaa

SEQ ID NO: 7313 - DNA, 254 bp, Canis familiaris
  misc_feature (1)..(254): n = a or c or g or t
tacggggacataagcaggnntgaaagggtagnnannnaggtccacactgctggtggcgnccgggaatctgacagggccnnagcgagtctgtacccagagctcacnngcctctccttcacagctcccttccctcacnnngcacccaatctgaaatgggcttctactggaatacaaagtcttcacagggctttggtctcccagggtagtggtttccnnnntgttttgattatgaacatttatgtttaaattacaca

SEQ ID NO: 7314 - DNA, 546 bp, Canis familiaris
  misc_feature (1)..(546): n = a or c or g or t
cctttctataaactttttcacgtcgtctgaatgttaggagtttgttggacagttaggtagtcagggctggagtcctcaacaagagaacatagagtcaggacagctaagacaaaacagtactgatgtcctgtttcgcagcttaagcaagactgcactaccattttgttctgcagcctttgtagaaatgacttctgcaaaatgttgtaaaataaaacaaagcatttgtcattatcatgagctgaggcagttaagacctaagtccccagatgtcagccccaaaagaccatcagcatgtagctattaacctaataggtagacaaatgtctgatttacatgccttagtacaccccggttgtttaagatagtactccaaaagagttcataaaaacctctagacttagaaactccagtggcaatcctcttgggtcccctccctcttcaggaactttggactattgctcattctttatccagtctatctattccttcttccaagcagcatgaccaagacctgcagcactaaaggaaannnaatcctgaaacaaa

SEQ ID NO: 7315 - DNA, 549 bp, Canis familiaris
  misc_feature (1)..(549): n = a or c or g or t
ttttcttttgactatgagcaatgaagttacnttttaaaaaatgcacgtgtgcaaatcttnnanncctctcgttttatgggtaagagatttgttcaggtcccaggctgtaaaactgtcctgaagcttaatgtcagagatctaaagaatgcatttatttttttctgtcttgcttcagaaatgtaaaacccatttttaaaattacacatgcgttgtagatttggattctgtaacagcaattactcagctaaattagagtaccacggtctaccaagtagaaatccgccaccagtacaacagacctacatgcctttcccctgactttctaagtttgtttcacacacatctaggttcatttgactttgctttgcttcctggactctgctaatccataattctggttttgttagtatcagaatagaagcgtcaatatccaataaagacatttcactgtgctatgtgcttccaccatcaaatcctatgacccagagtagaatgtaaaacccgagttcccacgtaacatgtaactctgattttctgtttagatttata

SEQ ID NO: 7316 - DNA, 591 bp, Canis familiaris
  misc_feature (1)..(591): n = a or c or g or t
atttcaagatagtatcngcagaacatcnngcgtcacacaggtnacaatcccacgannnnnnnnnngggggcaactattnaaacttccccaggggatgtgcaccagccttgagagccaccaccagtcatgacaatgtggggccactgagggtnctgcacctctgagctcccagggcagtaacgcgcctctgcgtgcctgggttgcccggagcacaaatatttgtcaaaggaatgaatatatgaacggatggagggaaatgaagcttgaactagaaagccgggaaggatctttttcccacttgctttaaaaaatcaaatatattaaatattaatactatattattaacaagtcaatataataagtcaataattgttttgtataaaaaataaaatattcatagtttaatattaatatactaaaacacattcaacatgcccatagtgcacaggccttaagtgttcagcttgaaaagtttttacacatgctaacaatcacttgactcccatccctccagacggttctcttgcgccctatcccagctaatactataccccacctcaccctgggtcaccaataaaaagtgaataaaat

SEQ ID NO: 7317 - DNA, 602 bp, Canis familiaris
  misc_feature (1)..(602): n = a or c or g or t
ttttcccatagnnnnnncaggtagatnnnnnnangagnncttnnagnnnnnnnnattgtgcacagttnnnnacannnnnngctccactacacnnagcaannaagaaagtattaaagctcacttcacccttccgtatgtttctcaaaagcctgtgtaaacatgtcnnaaaaaatgtcgttgaaagcagtgtaaatagttgaaaatataaatttctattacagtttaagaaaaccttatgaatcatcactagtcactgttaatatctatttgtattcttatacctttttcaatatatttgaacaaatatatagtttctggcactatttttgtactaggataaaggagttgctatgtatattatgtttagcttttaagtcattttaaataattgtgaatgttgatttcttgtcgttcctctcctccactatgagaaccatttcagatgactcttctattaaaaaatcactttaaaggaacacattcccacctatgatccccataaaatcaagagatggtcagggtggtctgttgtgcaaactcttcacctgtcagttgtttactcattttgctatgctttgtaaaaataaaaggaagannnacnn

SEQ ID NO: 7318 - DNA, 374 bp, Canis familiaris
  misc_feature (1)..(374): n = a or c or g or t
aagttgaacaacgtgttnnntgcccaggcagttcacgcagagccctggcactggcccgggccagcccattccangcctcccagctccgcacaccacatatgggnncatttnnncaacanngtcaggnnntgcattctgttgtgaaattnnnnngttgttttctctttaagtgttcctgcaaatnnnnnnnnggggattcaaaactttctcttcatttatgcctctcttgtactcattccttctccatgtgtgtacccggctgtgtcacagagccatcaaagaaacaaaacagggatttgcttcttgcctgtgttcaatgatattcagagatgaccatnnnnagattttacctacannnnnntattttgctctat

SEQ ID NO: 7319 - DNA, 536 bp, Canis familiaris
ccccaccccaccccagaaggccagtactcacaggggtggtgggggcttagaaagagtcggaccgcctgtctttccttccccggccccctctcattttgaatgtagagagcccggtcggtactttcctcttgctgtgggatgaggcgaggacaggattcccccacccctggcacggccacttgtaatgcccagccgagccctgtcatcccttcagggtgacgatcccattgctgactcccctcctgcggggggaggcgctatgcccgtgtaaggtggcttagctttgctttgtaagtggccagcctggcctccacgtctcagcacaagaacgctgcctttgcacggaatgagcgtcgagctttgttcagacaacgtgaatgtatttgggagggatgggagtgcgggttgattccaagcacatgccttttctgagtgagtgtgtgctgggagggctagagtggatgcagagcgcggtttatttttgtactgatgttggtaagagactgtatagcatctatttatttagatgatttatc

SEQ ID NO: 7320 - DNA, 488 bp, Canis familiaris
  misc_feature (1)..(488): n = a or c or g or t
atttgtacatatgtgcttttnnnaataattctgccattattgactnnacaattttgaatgtcagaaagattaatatatgttaaaatatttatgtttagtgaaagtattcataatggagaaaaggaacatacgaattttagctttgtatcttgcaagttttgcagtcagaaatttctggaactagcttttgcttttgatgataacactttgtgtttgtaatcacattcttaaaactatctacacacacacatacataggaagctccatattcctgttgctttaagcagtaaagccttccatttaaataagttgacatgcataaggtaacaaagcttctttgatttccttttcctttgtaatttaatagatcgttgactagtgcttgggcactgtataaatcagtgttatctgctcttgaagccattttttaaagaagttttttggcaatgaacagttcaatttatcacgtgcgtgtatttctgaagcag

SEQ ID NO: 7321 - DNA, 630 bp, Canis familiaris
  misc_feature (1)..(630): n = a or c or g or t
tannctggatgctgagattgagatatgggatgataccagcaatgatatcattgtnntggnnaagaagatgtgtatgattatgatnnagatgacagacttcacaaggggcaaaggaccactaaagcataccactgatgtgatctatgcagctaaaatgatatcagaatcaggatcaaggatggatgtccttgctcggcagattgcaaaccagtgcccagatccatcatgcaagcaagatttgttggcctatctggaacagattaagttttactctcaccaactgaagatctgcagtcaagttaaagctgagatacagaacctaggaggagaactcatcatgtcagccttggatagcgtcacctccctgattcaagcagccaaaaatttaatgaatgctgtggtgcaaacagtgaaaatgtcttacattgcctcaaccaagatcatccgaattcagagtcctgctgggccccggcacccagttgtgatgtggagaatgaaggctcctgcaaaaaaacccttgattaaaagagagaagccagaggaaacttgtgcagctgtcagacgaggctcagcaaagaaaaaaatccnnncagtgcaagttatgnnnnnntttagaggaagacatgtcta

SEQ ID NO: 7322 - DNA, 511 bp, Canis familiaris
  misc_feature (1)..(511): n = a or c or g or t
gtgatgggcatcttaagatgcaannnnncatgaagaagagttcacaaccgggtacgccgcgagaggaccagctctttggagatgaaatgcagcacatgttaagtcatgggttcaagtcaaacatgctctaacggacacatagtggaaccaaaggcatagtttagcagcaggtcttccggaaaacaagcaaccaactcaagcaaaaccctgacttgctaagacagaaggtgggagtgggagcagctttgacaagccctgtggcaaatactgtggctattgccattcacagatgaggaaaccgagaccccaggttggtctgtcacccctcggagtcacacatgtggcagggagaagaacccacagatgctgtttgaacgatgtggctacaatctcacagtctccagcctcagctgcatccttcatatttcctagatacgcccaatgacctctttagcttctctttccctgtaacagatgacatctccctccctcctagcaaatgatctgatct

SEQ ID NO: 7323 - DNA, 371 bp, Canis familiaris
  misc_feature (1)..(371): n = a or c or g or t
tgttaattcaggaccatactcactgtgtggtgagtgttgagggannnnnggctaaagggcaaacnnggnnatgttnnnnnntcctgttactcttctaaagagataaaagtggcatactgtgtgttcatatagcaaggtctgtttttaataccaaatactatgtagcctgtttctactaatatgattcttggtgacgcatatgtagagacttagagaatttgttagaatccttgtcgtgtattaggcgttaacgcttgcaatggtgtgtccctcccctcccccttttgtcttcaaaaaaattactttgcaagattttgaaatttccctgattccctttgatgttccttttagtgggtagaagagaaggttgg

SEQ ID NO: 7324 - DNA, 575 bp, Canis familiaris
  misc_feature (1)..(575): n = a or c or g or t
gctaaaaaacaaaagtngagttaaacttgggggtaggattgtgaatatcttttgggtgaaatnnnnntaatgtgagaataaaattaaagggaaagttcttcatgagataaanagaaaaagaggcaaaagattaggagggggtcatatgaatgagaacatgtcctaaaatccnnnnnnngctctaggcccagccattcctacctgcccgtcctttggcaggtcattttaccattctgtgactcaggttcctcacctacagagggaaaaacgaataactcctaccnanctcacaggagtgttgtgagggccaaatgaacagatgaatgtaaaaataaaaatgctttcagatgtggaaggcactgttttatganagtaacggggaagaagaccctgtggcaagttagtgctgatgtgtgccaggtccaacagcctgctgatgatgcaagagacatttaaggaaggatgaggaacagaaagtggcgttgcttgtagaggtgatacagtggtgggattaanactctgnctcctgaagatgatgatgtaaatgaggtgctgtgtatgccaacttcccanca

SEQ ID NO: 7325 - DNA, 546 bp, Canis familiaris
  misc_feature (1)..(546): n = a or c or g or t
aaaccatnnncttttctaaaaaccggtagttttctaacacagnnnttgtgcaaatataatctgaattcggaatacatacctagtgtgaccaagagccttattagcacatttctgggatcatttaccagatgttaacactttgatgatggaccttttttttttaacttcttttactttttactagatttactcacccttttgcggtgggaacattgagaaaggcattggaatatgggaaaaacaatcctggcgcaccatgcctgctggtgtgtcattgcttgtcacggagctaacttccatgtggtggaaaagtcatggtaatgaatgcgaatgtgcccatccttggtcatctgttgatgcttgcctccggctgttgaccagttttatatccgttcagcaaattcatttccgcattagtcctcgccagtgtgtatgggtctattctgtgaactctccgtcaaactggttgtaacatcttactggatccctcaccagttaattgagttgaataaaatccttgacatcagttctcattatgtatgagag

SEQ ID NO: 7326 - DNA, 602 bp, Canis familiaris
  misc_feature (1)..(602): n = a or c or g or t
cccgncggttcccactgatgacagcattaagatcgannagaggganngcatcactgtctattccctgcaatttggtggntatgccaagnnngctgactacgtagctcatgnngcccagctccgtactgccctagagggcacggccacttgccggagtgacatctacttctgcactgggtatgaccctcccatgaagccctacggacgtcgcaatgaggtctggctggtgaaagcatgagtaacgcgctgagttagaacttcccggacgggtgtttctgtgtttccacttcctcaggggagaaggagggagcacagcttccaactgtatctctagcttaatccaactttccttcaaagccatgtactgccaattttctgaaacatgtgtattttgtccatgctctttctctcccggtgggaaataattcagccaagataggcagcatccttcgaactgactgagacatttctgtggtagatgagaaaaaatccagcaaacattctctcagctctctgggtccctcagaactgatctttaaaaattattgaacctgtgtttttgttgttgagggagggaaatgcgatttgtgcatgatccttcc

SEQ ID NO: 7327 - DNA, 490 bp, Canis familiaris
  misc_feature (1)..(490): n = a or c or g or t
ctaagtgagagcttcaagagcaaagagtttgtgtccagtgatgagagttcttccggagagnnnaagagcaaaaagaagagaaggcggagtgaggactctgaagaagaggagctggccagcaccccccccagctcagaagactcggcatcaggatctgatgagtagagaggaagaaaattctctctccttgggcttgccctgtcacaacctgcagtctctccacccgtgttttggtaccagtttctcatgaaatgcagcccttggattttgtgccatcttgacaagctctcctggtgacacgcacttcaccggggcagcaggggaggtgtcctcctctcnnntgcttctcaaggatggctcttgataacttggggagagattgggtgggnnagtgcagtgcagggtggaatcctgagcctgctcctgcgaccttagggatacggctgctgcttctcctgttcaggttgctgcagcaggggtcaggtgaggg

SEQ ID NO: 7328 - DNA, 511 bp, Canis familiaris
  misc_feature (1)..(511): n = a or c or g or t
gtgaagtaaaagctttaattcgtgccttgttccagaacacagaaagangagcagctgnccttgctaagattaaatagctgtatcttcntaagaaagccatgncttgactgtgtggattcccctcttggcataattatcccttaaagacttcttggaatcatctgctagtttcggtgaaccggtttatcatggaagtttgatttcacctaagaacgccttaccttctggcttgtatgaggctttgttgaagaactggatgttaagatgagctgtcaagcaaaacaccccaatttgttgtttttctggccatcatcccttgataagaaagtatagggtagcactatttcatgttgctctgggccttctgggaactgactccattgcagatggaggccctggcctcagatcgacaaattcagggaatcccaagagattggggcaggtggagaacttgtgagcagatgggagatnnnnnttgggggataggggannngtatttgtccttgctgga

SEQ ID NO: 7329 - DNA, 422 bp, Canis familiaris
  misc_feature (1)..(422): n = a or c or g or t
atggccacccagcgnnnnncnngcctgccccaccnnngcagccccaggnagcagaagacagaatgaagagannnngcatctaaaatggnnagcctccatccacccacttcagggaggaactngactcgnngggggcaggtgccaagatttgccccccagtggccctggnnngggcctggcctctgcagagccttttgggggaagggggtactcatgtggatgcctatgtggaccctgggccnnngcaaaatgtcctgactgccctcagggcatttgcctccatctttgccccaggtnnngggttccccatcctcctgattttaccctcttcaagcctggggttgtttatccnnnagcccttagggannnnnntatgggnnttggtngannncccctttnnnaaacctccccctagntnnnng

SEQ ID NO: 7330 - DNA, 303 bp, Canis familiaris
  misc_feature (1)..(303): n = a or c or g or t
tcatagnncttatccagaagttgtattctaaaatgacagagatagttttataaaatctaaaatatttactctacaaataatactaatttacattcaatttgtatatgtgcatatgtaggtatgtttgtttggggcgtgtgtggggggcaggagagagagaaagagagagaattaagagcatctgatttgaatgtgagtgaatcactgccattaaagatagtttaaaaatttgcaaagtagggagccctgggccaaagagatgatctacctcatcgtaaacatacattataatcatgtgctgtg

SEQ ID NO: 7331 - DNA, 548 bp, Canis familiaris
  misc_feature (1)..(548): n = a or c or g or t
tctttggtaggnnnnngaattagggcngnaagcccattgntttacctaannnagannaacttgttatnnnacacttccgtgttgganncagttaatttggtgtnngatatggtgattgggtcatggactaagangaggttcaccttannnaaaggannnctnnnnnangcaaaactaccatccctttgtaagtaccaantnnnnaaatggcctgcnnntgtgttacctgacaccccaggtgatgacccaggcnnggtcgccgtgaatgaanccaggctgcaggaccttnnnnncgccagtggggctccagggnnnngnnnagccaagccngactgcaaagagtaggaatacccgaccctcnnngtcannntggcctggctctgctttccagataacgtgaccgggcttgcagaccctaanannngaatctgtgtcctnnnnnataacaagcangaataggaacagctnncccagcaacagacatcaggtgcctggcagctccnngcacccattgtatgctcccctcccccagcctccnnncgttttag

SEQ ID NO: 7332 - DNA, 601 bp, Canis familiaris
  misc_feature (1)..(601): n = a or c or g or t
catgagtgcccctttncttggtnngacccagctgcccntnnnctgctgcctcaccttctttcnnagtgagctgtgggcttgggaccctcaaacattccttccctccacctgtatctcctctttcccctctccccaatgaaggttttaggaggtaggaaaatgtgaccaaaatgggggtgctatttggctttcattccctgcctttgaagaactaatgttacctaaaacttgttcccctcccttctaactgtaaatatataaatacgtcaggttaaagggaaaaggttttcagggctcttctcttctcccttgccccataacctacctccaccctgccccagtagccagccagggcagcttctctgcctggggtgcaggtgggggggatttctgagtactgagagtcctcatctaccctcttcgtcctcggtcctcggccgcagtggggactctgtccagtgccaggggaggaacaacatggttaatttttttctaaccttgccacttgagggaagtgagggttgggggaagggcaggctttatgggagactgtccctccttcactccatgttctgggtgaggcaggnnntaaggggtgggg

SEQ ID NO: 7333 - DNA, 609 bp, Canis familiaris
  misc_feature (1)..(609): n = a or c or g or t
aggnnctcagaccaagagctgcctaccccagctcagtagtnnnnnatcaattcccccagatccctngctgaccannagccaacagaccacaaaccctcaaacacagcaggacactgagaaattcagtccacggaacagagcacttaccagtagccctcagactgnnaaccatctgaacccacgtggccctgggcatgtgagtaacccagacactggatggaccaagaagcctcacaccaccagtgctcctccggagcccagaataaggcaatggggttcaggggacactgggtttgctgatgcctccaagtcatgagccttgcatcccacttcatcattgtgaaaaggaggcacctaaacaggggaatcagcatgtgccttggacctgaagaccaacctcacatctcagctgtactcacttaggcccctggtaagtgggctgcccttgtgatttggacttggggttacacatcccagacagggctaggccaagcaggcccctggatcgcaggttcaccatgtgccactggatccttgactaccagcatttctcagcactagggcaagctggcctctgcttaggaagaattcatgagattgagaaaactc

SEQ ID NO: 7334 - DNA, 600 bp, Canis familiaris
  misc_feature (1)..(600): n = a or c or g or t
ccccccaccannnaaacatttaatcctttttgggtttnnctcctgttgttgcaaacttagtgttagaacatttgattctcacaagagcaataaatagatttctttctttatggttagttcccagaaatgaacgctatgataatgagacggttcagtttgcctggagatgtggacagagctcgacaatatgtattgcagagtgatggtgtgcagcaaacaacctacctcgcgcagcggtactgccatgaagcaatcagagaaatcagtaaacttcgaccatccgctgaaagagatgccctcatacagctttcagaaattgtactcacaagagataaatgacaactctttctgttatttctggcagctattttaccagactgtgcctaaagaattttgtgaaatacactttgcttcatgtgcaataaccaaaaatcatttcaaaaaaccatttcaaccttattgatgggcaattttttttttattggcaaagtttttcagaaaactttttaaatgtaattaaaccacccgaatttgtcactctagtcctgtaaattctcatcgaggtatcttgatggttatatgtggtattgtttacactgt

SEQ ID NO: 7335 - DNA, 616 bp, Canis familiaris
  misc_feature (1)..(616): n = a or c or g or t
gctaacattccttcccaacctgtatgcatatttcttccaactgttacttctcattttgagggaatgcatttgtccttgttcccagccaacatgtgaggaagtctttgggctcctgtagcataggtggtaaagacagaaatagcagagggcagcagacactagtggaagtgtgacccaaactcatgtctctggttcaacatgcattctttcaagaaagcgcccatgatcgaaatggccaaatccctccctgtcaccattcttctcctcaaaggtctttgggctgaaacagggcctctgtcaccctccagtccctgcaggagcctcccttgcctcctctcctaggccccagtggccaagtaaagagagtttttattgtatgatttggaccccaaggaacccatgtttatggtttcaaatgtatgtactaagatcatactaatgttgtccgaagcaaagatatatgtaaatatctcgttcctccagagtgaacaaacgccattaagctaatttcattttcatattcagtgttttataaaatacaagtaagctctttctcagcaccaatatttttgtactgtgacaaaatgatttttattgcaataaactctcttccnnn

SEQ ID NO: 7336 - DNA, 643 bp, Canis familiaris
  misc_feature (1)..(643): n = a or c or g or t
gaacaaaagaataaggnngggcttgtcagcacaaacaaacttnnagtnggactctctggagtttatactgagacccctgaaaagagcacatcagccaacagggctgatacttctgaggggtacactgaaatacaatgagagtttagaaaaaaatctgaaactagaccaggtgttgcagccaaagtgattaacagaaagggcgagcagacaggagagagcagcttctttttctctcctccactcttctaatgttcctctaaagttccctatagcagaacttaacaaggggcccactgggtgggagaaatgtggttctcacatttccagttccaggatacaaggaatgtaggagggtgggtttggagctgaaccgccatagttttattatcaactgctcttggatcatctgcctacttgttggacaacacttacacttacccctatgggcctcttccactcagtaatctccaacttatgtccttgtatgcagtatagtgagcactagtaatatcccaggttgaacacctggtagaaaaggagttgactctgaggatcctactgaaaagacctgtaaagctgtaactgccagaggcttctgaggccagaaactgtcatcaactattttctttgcttacaagagcag

SEQ ID NO: 7337 - DNA, 649 bp, Canis familiaris
  misc_feature (1)..(649): n = a or c or g or t
cttcaaaagagtggggnttttcctttttatgcagacaactnnnnnnagcagcactgtatgctgtcttgatgcattaanngntnctggtaannatgncgtgtcctatacatcacttaacagatcattgctgtgtcagtttgtgatgcggnctgcttattcctgtngctgtcccaacatgctttttctcttttcctggtgagtcagcctcatgacaaaccatggaataaaaatatttattgcaactaattttgggtttggtaaaatcancgtatcannagcaattttgggaaacactgcttgacaagccnncttcagaaacctagggctaattatgttttggaatcacaactttcagattttagaaaactataacaggagatacattttactcagacttccgcaagagtctatggtagcccccattctcaaatacgctgtttctatggaatgtatgaatcgcaccactacatgtgatgactgaagactatgaagagcctaaggtcaggtcagttttgtcaccaaatttagggagaaactgttttcagagcttttttggatatgagaattacaagcaaagaattgtgactcttcttaaacgtagatgtattttattgtagcatcctttgtaattggatatttaactagttca

SEQ ID NO: 7338 - DNA, 592 bp, Canis familiaris
  misc_feature (1)..(592): n = a or c or g or t
cgtcggggagnancgagcacaggtcagcgtnnaggttttggtagagtaccctttttttgtgtttggacagggctggtcatcttgctgtccagagagaaccagccagctcttcgacctgccgtgctccaagctctccgttggggacgtctgcatctcgctgaccctcaagaacctgaggaacggctctgttaagaagggcccgcccgtggatcccgccagcgtcctgctgaagcactcaaagagcgacggcctggcaggcagcagacacaggtacgccgagcaggagaacggcatcaaccagggaagtgcccagatgctggccgagaatggcgaactcaagtttccagaaaaaataggattgcctgcagcgcccttgctcaccaaaatagaacccagcaagcccgcagcaacgaggaagaggaggtggtcggccccggagacccgcaaactggagaagtcggaagacgagccacctttgactcttcctaagccttctctaattcctcaggaggttaagatttgcattgaaggccggtctaacgtaggcaagtagaggcagcgcggggaaaggaaactcggctcccccttctca

SEQ ID NO: 7339 - DNA, 496 bp, Canis familiaris
gggccatgggtcactgtgctttgtgctgcatccacccattttccatgtctcggggagcccaggaagggcatcatgcccaggtggaagggagcgctggctgcatgatctaatgcgcctggcctgagactttaggggattatttatttatttattgttgattagtcttattgattgatcgtttctccctaactccagagcccaaatctggcctgaccggagtagattgtgtgtgtatttcacgggtcgtagaatcgaagatggcctgggcttgggaggtttcttgctggaaccggaagggtaaacaaggaaagggccttggtgtccgcccctttgtgtctacaccagccctgaaccgaagctggctaggtcgaggtgggggctgtgtaccccggggacgcttccccatcactctctcctcagccctggcttccctgttcttcctccagctgcaccagagcaatgtcttgctcccctgtgccatgttccacagtcgcca

SEQ ID NO: 7340 - DNA, 586 bp, Canis familiaris
  misc_feature (1)..(586): n = a or c or g or t
ccccttcaccccgtcagcncctgcccnggcagggtgtcccctcagtattagctgccatatgttccctgtcctccagacaacaggaggannagccccacggggctttttgccaaacaggggagagagaggggccgcttccccgagtgtttcgagccaggcacttcggaggggtcagctgggtacccagagtcacgaggctggatgtgggggtggcagcctctacacacattctggttaatcccttcccatctcacctgctctttggaggaaagaatcgctgagtcctacagcatcgacccagtcctcagggccttcgtcgggaccctggggcgctgccgtgccatcggaccccgagacccaggcctccttacccctgttcctcaccctgggataggacgtgtggtatttcctgtggtaaaaggctgaggcggttcaggagtctgccagtatccatgtcccaatgtacatatgtcctccccatgcccacccccaaccttggcccctggcagaccctgggcagagtgggtgagcctgccacccacgcctttgccccagctacctnnnccaagggctcctcgagacccac

SEQ ID NO: 7341 - DNA, 527 bp, Canis familiaris
  misc_feature (1)..(527): n = a or c or g or t
atctcaaaaacntactccccagatnnctgacatctccagnnnnnnngtcataangcagaagcaagagtatgtagctgggaaactcattattcccccactcacccagggaagttgtcttcaactttcacccacagtggtgaataggtccatggagtttgtcatctccaacaggttggtaggaactgttagaagtgctgtttgaagttgtagattctgagtccactgtttaactcaataagaaagagatttctaaccaattatcagtgtcagccattgactctccatgggggcataccctttatactcttgctacccatcactgccttgcttcagcctccattgttttcaggaaggaaggaaaggcatgcctgcaaatgtctaactcagctccaactctgaagaggatgtagggttggataggaagtaagcagcttttaagattataccattgtgagtttgcctgctttgtggggtctgtctacttttgcatctctcccctatgggacagatcattgaaaagtgtagtc

SEQ ID NO: 7342 - DNA, 637 bp, Canis familiaris
  misc_feature (1)..(637): n = a or c or g or t
acntttgagagcatngatgatcaggaagaaatggaagaagcagcagaaatggaaattgacaaaattctctnngnnatcacagcaggggnnnnnggcaaagcacntagtaaagtgaccgacgnncttccagagcccgaaccctcaggagcgatggctgcatcagaagatgaggannaggaagaggctctnnaggccatgcagtcccgtctggctacacttcgcagctaggggctgccttgctgggctgtcgggctctttcacagccggcctacccagagtagccggcctacactcctctgaagcaaccaccattttatgtatctcttgcactacacctctcagtgaggcactgcattctgagaaggttctctgctagtatctcttcactctttgcagaggttttgggatctcaacaggattgtccttgagaggtggggttataaatgcatcattttcaggggtataaatagaagaatcttttgaggggggagggcaaaggaatctgtcttctcgcagtgcatcattttcaggaatataaacagaagtatcttttggaggaaagggcgcaagaatgttttctcccaaggcacttctgaggatagagttgattacctgaatgttgaggactacatttttt

SEQ ID NO: 7343 - DNA, 340 bp, Canis familiaris
  misc_feature (1)..(340): n = a or c or g or t
cccacgcccccgctgcccacaggtngatgcggtgccgggaccccggngccgctcgcctggcacgtgcgccctgcccccggggccgggcacgaccgcagggatctgaggtgggcaccagccggggaagggatcccgggccgggctcccacctgcgagcttaaagctgatgcgcttcccacgtctcgagtcttccatgtagcagctttaattaacccacgtgtgtgtcacgtccgatcccgagacagccgagtggaccctagaaaggcttcccccatgccaccccgacgtcggtcggaggggtgggaccgggtgagggtgggggtccggcggggacattctt

SEQ ID NO: 7344 - DNA, 279 bp, Canis familiaris
  misc_feature (1)..(279): n = a or c or g or t
gaccnnnaccttgggaatcagnngtgnnnntcgttgtcaaaatgatgtgggtctccanatcgccccgccatctgagagggctgagccattatgtgggacagttctgcatccagaaggacttttatttatttttttaaagatgtattnnnnntagagagagaatgtgcagnnngaaggggcagagggagaagagagagaactttcannnnnnnncnnnnnnnnnacagagcccaacacagggctcagtcttagaactcttgagatcggggatccctgggt

SEQ ID NO: 7345 - DNA, 490 bp, Canis familiaris
  misc_feature (1)..(490): n = a or c or g or t
ctcatgnncnagttcctgacctacttccctgggcnnagagtcagtgcagannntnnnnncaagcatgagtacttccgagagacgcccctccccatcgacnngtcgatgttccccacgtggcccgccaagagtgagcagcaaagggtgaagcgtggcacgagcccacggccgccggaaggaggcctaggctacagccagctgggcgacgacgacctgaaggagacgggtttccacctcacgaccacaaaccagggggcctcagccgcgggccctggcttcagcctcaagttctgaggttctgtacggagcccaccccagccccatgggggccgctcaggaacactcggcgggggtcggtgctggaggcagcatgcaggtccagacccaagccctgctttgtgtgtactcagctgccacaggctgggacggccctggatctccacctcaagtctcagactgcctgttctgnnnnnntttccacgtttcattt

SEQ ID NO: 7346 - DNA, 627 bp, Canis familiaris
  misc_feature (1)..(627): n = a or c or g or t
aancctacctttcataaacctaaacgtaagaatactggtgggtcttttttattatttataaagtaacatcaccttcagatgcccaaaatgagggtggtagcctgtgcgttgtgtnnagaatagatgcctcccaacctgcctcctgcctctgacgtcagatcattagggagttagatgctagtaaggtcacaagtatgttacctgaacatacaactgtcaaaacattctccactgttatgaatgtctaccatcagcattgttgaagtacatgatttgtgctcattgattgttaactgcgtagctttaacgcgtgctggaaagttgacaataggagcattttgtgaaattgtttacacggtgccacgcatcgagacgtgtttccttttagtatgtgtgcttacacgggggtcgtgaaacccttttcttgattttaaactgagccttctttttaatctattcctaaaaaagacatgtacataagctctcggagtctgtgtaatgacttggtaagccttgccggacaagtggtttgttcacgcacaaaccaaaaccttcttcacccagtgcaatatgtttgtttactgcttgtgtctttttatgactgttttgctttttagaaaattggta

SEQ ID NO: 7347 - DNA, 570 bp, Canis familiaris
  misc_feature (1)..(570): n = a or c or g or t
acccctnntcntccttgtgctccttnnagcatatttttagnttttctacattgtcntaaccccatgatatcattcaaattgtatcctaggcttaaaatgcctgcttaaatgaacattcttgtatttttaaaattcctactgcattctgaatatttatgtctctccaaacttatgtgttccaatgctgacctccgttatgataacagtaagagggggggcctcgggaggtgcttaggtcaggagggtggagcccttgggaatggggtcagtgccctgaagagaggccccaccgagctccctggctccttctgcctggtgaagacacagcatttgcaggctgcagccacaagagggctctcgccagaacctgaccacctctgaaccctgtgcttggacttccagcatcctgaactgagacagataaatccttgttcatgagccgcccaaatggatgacgacaattcccggtgacaaatcctctgaaaatttgtcagaacagaacaatgattaatttttctaggctctggtgtnnnntggttttttattcannnnnttggcatttgaaaaaca

SEQ ID NO: 7348 - DNA, 634 bp, Canis familiaris
  misc_feature (1)..(634): n = a or c or g or t
ctttacctttacctgaaatcgnnnccttggtgnntacagtcaaagaagnnaaatctgctcaagaaactcctgaaagctctctggctnnaagtcctgatactgaatctccagtgttagtgaatgactatgaagcagaatctggtaacataagtcaaaaatctgatgaagaagactttgtgaaagttgaagatttaccacttaaactgacaatatactcagaggcagatctaaggaagaaaatggtagaagagcaagagaaaaaccatttatctggtgaaatactatgtgaaatgcagaccgaagaattagctgggaattctcagacactaaaagaacctgaaacagtgggagcccaaagcgtatgagaggtcttcagaagctcatctaactcgctttacatagtcaatgcatatatgaacttggcactaaataaacatctgttttgatctgtataaagatgtaaattagtttgacactgcattcttgataggtgtgctaatttctgcccgtggcagtttaaaacatcagaaactgaattctggacagattccagccttgatacactctggggttttcttctttctttccttttttnnnaaatttttctgtcgannnttttttccccttcctttgt

SEQ ID NO: 7349 - DNA, 541 bp, Canis familiaris
  misc_feature (1)..(541): n = a or c or g or t
gcnnnacgnnngcacccagggcccgctgtnngtccacgccatccaggagtggtgccggcagaagtgnnnnnccgagctgggcaacctggnncagaggctgaaggtgctgatggcagagaaggagcagctccagcagcagctccagcggcgccggcccatctcctgcacctgctgcgtcctgtgagggtccaggcggcgggcgggcggaggccagctccacctggagggggcgctcccccgatggcctcccactggccgtccgtgcgggggcctcgagccgagcagatccgggtccgtggagctgagaaatggctcttcgcacggaactccagcaaccatgcttccagaaagcgctgctaaaaacggccggagccaccctggggccgagctctaaggacggccctgcttcctcggaggctcgtgcctcggatgcagcagcgagacgcaccagaaggaatgtgcactgggaaagcctggggagggcccactcggtcacatggctccggggccaacaggccactccgcagcccccaccgcggcc

SEQ ID NO: 7350 - DNA, 576 bp, Canis familiaris
  misc_feature (1)..(576): n = a or c or g or t
tgctcctctctgtctnganngctgccctgctgctgggcatnnngagnntcgtggtnnagtccaattacttcnnaccaaaagaggacctgtgaagacactgccagcctcccagcctccactcctaaagggcannagcccaccacctccactccccttggagggaatcagccagccctttagctcccatcccgaaggctcagccttccacaccctgaagcccaatgtccccaaggtcccggggtcagacggcctctggggacccaggcacccacagggggaacattcccctgccccgccgccccagccctctacgaatcagatgggagcagtcactgattccaggaaaatatctacagaaggaaagaatcccctccaggcaccacccctcccacaccccctcctgcctattctcggaagcgggggctggctgccccagaagctactcttggggctcttatgactgattgggaatccgggaataagtgcctggaagccgccctccctctagagttgagaccacatcagtcagcctgctagcaggctatccctccannnnacattgtgaagccttggcct

SEQ ID NO: 7351 - DNA, 495 bp, Canis familiaris
  misc_feature (1)..(495): n = a or c or g or t
tgtggtactccacattcccgatagaccctgggaccctnnacaccatgttaacacgtattctcatggtgagnnaggtacacgaagaacttgccaaagccaaatcagaagactctgatgttgaattatcagattaaagtggaagtggggttcctattttcatacacatgggtatgcaccaaactgtgaatgcatccagctttggaaaacgatgtacaagtacaagtcctcttgacttgattataagataatggaaaacagatgactcgtgaaccacagtgtggatgtacaaatgaaaactgaaggaaagaatacgaactgagaaatgttgttctttggcagtgatatagttcttagacatcttcagaatgactaaccaatttctctgagtggtgcataatcttattttgtttgggaataacaaattgtggaatatttttaaggannactgttgnnnnanctctaccatngaaaccttagaccttagagaggtagctt

SEQ ID NO: 7352 - DNA, 527 bp, Canis familiaris
aaattctctggagttgtattttgaatatcaactgggatttgtttatgattgctctgaaaggacttcaaacatacataaaacttgactacattttggcttaataagacaggtgatttgacttttaggaaattatttgctgccccaactattgacaacagtatacactgattaccaagctataaatactatataattatgcctatttcactggtacaggcagtaaatatcatactccatagaaaagaagggtcagaagttcatggaaggtttatgaagttcatggaaacctagttagccgtggagtttattttattttttgttttaaatatgcttgttaattggaatttgactcagctttctttatgagcctatgtttatattgagaatttgttcttcaaaatgattagcctcttgcacctagtttattctaggcttattctgttgtggcctagaaaacatatttggctcaggttgtgatcccgtggtactgggatcaagtcccacatcaggctccctgcagggaacct

SEQ ID NO: 7353 - DNA, 170 bp, Canis familiaris
  misc_feature (1)..(170): n = a or c or g or t
gcttcccacctccccggtgcacgaccaccgnncaccgccgcccttgatccccttgtncgagaattcgttttgttaattttattattgttggtcacctggcctttgctcctttaggcaaccactcatttccccatgtgtagctggggatgtatgnnnnnntgtcactcctt

SEQ ID NO: 7354 - DNA, 540 bp, Canis familiaris
  misc_feature (1)..(540): n = a or c or g or t
tgggtgtactcccatgacggtgtgtccctcnacgagctgctggccacagagctgactanngnnntcaaaatcaaactnnacttatcttctctggnctattctggaaaaggcacttgaggcccagctttgttccaaagaccttaaaagctaaaaagccaagaccccagcttcatcctgcagctgagtatctgtttttttccattcctgcttttgaggacagttgtggcatgtgacggctctgtgaaaagagtgtgttgcctcccactgtcccccaaatttggatttttaatttctatagtttcggggggagggggtctttgtgtttttgttttgttttgttttgtttttttgtttttaggatttgttgtctggtttctttcttcccaggatatctcttctttttctcatgcccatatatgcatacatttatatataaccttacaacaaagaaaaataagaaggaaaaatgacttgatttcactattcctactttaaaggatttaactgcctaaannnntgtgaagagcggctggccccacc

SEQ ID NO: 7355 - DNA, 650 bp, Canis familiaris
  misc_feature (1)..(650): n = a or c or g or t
gataaagagagtgtgnngcttctcactgnnnngacaatttctcatgagtctggtgagcactctgcacaannaaaaagcaagaactgacaacttgatgaatcctccccacacctgggccataaatatgcttaatcttcagcttctgtgctccaggaataggaagggagaaaactttgtggactcaatcctgacttccagatctgctttccaggctgtgccagtcgcctgtcccaatagtgatgtccagatggcatgcaataatttcatagaatccaaaggaagcctgggcctctcctgtcttttgagatgtgaacacattaccacattaccacattttataggaacaatcttaggagatcgagttttaggaaggacatttgtgagcagttaacctgacagctcaggcaggtgggttcatgatgacatgaccttcctttgagtttaaagtttccaaagtcgacagttcctatccatggagacttctctgttttctcagtgtccttatattacctgatgtttgtatttattgttttgtactatgttaatgcagggataatttgcaagtgtcttattaaatattaggtagaaatcatgccatgcccctttgtacataaagatattttattcatattttcatgtgttacttttaa

SEQ ID NO: 7356 - DNA, 637 bp, Canis familiaris
  misc_feature (1)..(628): n = a or c or g or t
gtgtgcntcaaaactcnnnaaaggcttcctttccatgtgtggccaaggtagnnaagacctccttgctttctnnagggctaggtgctgttnnnggcggatcttaataacccagagctagctggtcttacagaaaccacagccaagggtttgtcactggctcagcaggtctcaccgccagtcccagcccagctgagggacaagatggtttctctgaggagctcaaggagcatgcgatctctcaaacagggcacctaccatgctcctccaaaggcagctgatctatggagaattgtgagggaactgaatacagtgtctggaggttgggatttttccttcagtgttccttgtctagcaagaaagatgggggagtttcacctcttgaagatacccctgcccccccaggagcaccctgcccatccttagagctaatgagtcatatgaggaagaggcttcttcaagacagagcaatgcaatacttgtaacttttgtaaatagccccatctttcagagtgctgtcctttctacatttgatatgcttgtatttctgtaggatgtatatagtttaggggattttgtttgtttgtttcattttgttttttagaacagtcgacatgtcttttnnnnnttgcttgaaaaa

SEQ ID NO: 7357 - DNA, 483 bp, Canis familiaris
  misc_feature (1)..(483): n = a or c or g or t
anaagtgcaattttttttaaagggttttctcctgcatcgcagatcctgtagatatatatttatatttatacatatatatttatgaaataantcttattatccacaaaatatatttctgaatagcctaaaagnnaagatattttaaatctgatgcttaaccattaatttggccattctttttatttataaattcaaattgtttttttaattgtatataattttaaaaatctcgtatgtgcttcagtatgtccttattaagttctaataacaactaaaactaattttaacaattgctgatacagatttggtttgcttgggtgtgctttgaaaaaccatttttgaatacctaaatacctggtttcagtttcgttgatcattctgaccaaagcaacaggaggtataatggatatggcattataaaaattgttaatatgtagaaaaatagtaatatttatagcatcaataaatatttttaagtggtac

SEQ ID NO: 7358 - DNA, 574 bp, Canis familiaris
  misc_feature (1)..(574): n = a or c or g or t
tcaaatcannatntgtcaactataccggacaaacatttccaattttccgtaaatacttgatccaagatttaatttcattatgcacttttcaatttcctattttgggtttagttttattttgtcaatggtagtgacatattgaacatgggcaccaactaatttgtttttttagttctaccagaaaacctcagcagatactttgatttgctgctttagttgtaataattcagtttttatatgtagtttcaagaacttagttctgtttgacttttttatattaatgttttcagttctcactttgaggcacatttacatcaatgctttgttactctcacatgctgaaagcaagatgtgttcctgatagtgaagagcaacataactgcctgctgcctttcacagctgtaacagatcaggttgacttaaatccaggatcatgtgtgcacgtaacttgtggcccacaagatttcagtgactactcagtaatcgttctttttgattgtaaaagagaactgggagggcatccttaagtagaccaggtaatcgctgctctnnnnnnntcaaggctgctgtttat

SEQ ID NO: 7359 - DNA, 515 bp, Canis familiaris
  misc_feature (1)..(515): n = a or c or g or t
ctgcagcggtcactccccaagattgagcggagtgcctccgaaccctccttgnnnngcacccaggctgatgagttgcccgcctgcctactcagcgcagcccgccttgtgccttaggccctgcccccagtcaccagggaaccagtctcagcctgccatgccaaggagccctgcccaccaatcagtgttctgtctctgcnnnnnnactgcctcaggatcccccatacccatnnnnggagnnngaggtatccccatgtgcttttccagttcctctggannnnnnnnnnccccaaagaccgagacccctgcttcctccataatttggtttcctcttggctttggggataacttctaaatctgggagctcctctatctccaagctgggctttgtggcagggattccactcagaacctctctggaatttgtgcctgatgtgccttccactggattttggggtccccagcnnnncgtgtggatttggggggtcccctctgtgtcttccctaccattcaaggac

SEQ ID NO: 7360 - DNA, 577 bp, Canis familiaris
  misc_feature (1)..(568): n = a or c or g or t
catcacagacnngagtccatatttgtgctctcatatcaagtgtnaacatctatcaactactcancagatagcactnnnannngttatgtacatggctgtctcttctacaagnntagcttgaaggacagaaatgcaaaggagatgcctggggggtgctggagaggccatcaggaagccaagtgagattcaagcaagcaagcttgtgccttgagagggtgggcctggatttcagttgcacagctgcctccaggaactccagacttgaactgaagcttcggctcttcctggcttctggactagacctacacatcagtttttctgggactccagctagccaactgcagatcttgagacttattagcttctatgattggttgaaagagaccaagatgagaaccaggaccttgagaggtccatgggtggatagcccttatccgagcaagcaatgagaagctggtgattcaggctaattcaacacagcctcagtgggattgctcttctagaagtctgagagcaaaagaagtgcttacagtatattttagctaaaagatcaaaatgcannctggatgcactaaaa

SEQ ID NO: 7361 - DNA, 553 bp, Canis familiaris
  misc_feature (1)..(553): n = a or c or g or t
atcatcatcatnnntcgttgatnagnaaacatnnnncattgagctnnagagtnnnnagagtgttaacatgagatgacgtcatggtttctcccaagtngaggaaaagtatagaaaagatgccagcaaaaatggtaaggaagctagaaagtaaatttactgcataatgtataatagnctatatattattttaagctaaatttgaagaaagtagaatgtcatctaacgtatacaggtctctgaaaatactgtagaataagcccaggaaacaatcagcacaggctttaactcaaattgtcggagtgtgacatagagtcttttttttattaagtgtcaacagaaggttaagaatcagggggttttagtaatttattcaatgccacttcttgccattattttgaaattgttaaaatgggtaagagttcagaaagcaaacctgatggcttcactgggggagatggagccacactgtgctctgggtgggattgcctctgcacgagaacattacattttctctcaaaggcaaaatgcttgtagattttgcctctttactttn

SEQ ID NO: 7362 - DNA, 600 bp, Canis familiaris
  misc_feature (1)..(600): n = a or c or g or t
aaaagactcaatnnntaaataagaaaaatatattaaggnantnntaagaaaaacgcaaacagtannnaaatgaaaaaatgcattacttcatcaaaaagacacattttcactcatcaaataagcaaaaatcagaaactgattcaacattggctagggcaggagacaccctcttacaaagctgggcaccccataacccttggggaaaagtccttaagcttaaaacaatcaaataggcaacactacagcatggaaaagaacatagtagtctcnaagcccaccctttaacccaagctccaaagcgttcaatgcaatatttcatatttaaaaaaattctaatagggaacagatatacatcaaatatccatatacactcatacattcaactactagaggaagacatttgttataagacagtattacagacaggactcctagccactgaaaaccaaattaaaaatataaaaaaaaaaaaaaagccaaaccaaaatattaacaaaaatggtcaaggtactgagatatgaacaatagtttcctcttgtatgtaactgcacaaggacaatttacttttagagtaagggaaaaaaccctaccaacataatg

SEQ ID NO: 7363 - DNA, 546 bp, Canis familiaris
  misc_feature (1)..(546): n = a or c or g or t
tacccacaggnngaacatttaccctttcatgaggcccaagctctgnntggncntctcaatctgcttactgtctnngcgtaaactctttgtcccttccattaattttgactctaagcttagtgacatccagaatctttcctttctcaaggcccaactctagntctgaaaggcagtggctctcataatgtaggctcccctctggacgaaagtctgcatgatcgttgtctgtgctatggacttaacagaagcccacacagcagctaaaggccaagctagggactctatataaatgtcattacccccaagagcggtgcatccaggaagtttggatagtggggcagggagtgaggtaagagggaattccacccacacacagcataagagaaaaacattaccataccccacacagttaaaaagggggtgccctgaagcagtaaggaaagaagagattagtcaatcaaaggtgctggacagatcactaagctgtttggaaaagcaaatccacttcattgttcacttcgagtcatnnnnnaacatggagttcag

SEQ ID NO: 7364 - DNA, 620 bp, Canis familiaris
cccatcgggcagcttctttgctgctctttttttaagattttatttttaagtaatctctacacccaacatggggctcaaacgcaccaccccgagatcaagagtcgcatgctgtactgactgagccagccaggcgccccttttctgctgctttttattccattatggctccatttggtgaagcctcagatttgcttcctgcaaccagacactttgcctgagagcccaagttggcctctgctcattttgggacaaaacgaactggctccagccttccctggaattctcatcaggaggggtcagccatgcatttgactccgttttgcggtgtggcattcaactcgaaggtctcctctggggtcccctcctgcagggcactggaaggggctgatggtctctgcatttgctgtgaattgtggaggtgggaccgggaggcgtgagtggggctttgggggcaccgtcccgtgtgtctgcaccatgggttccttctacaacagcaacctgccgctctgctgtgactcgctgtctgtctgtagctggttccacgttgctcttgctccagggcgactgtgtcctcactgctgagcgcccactgtctacctggtcagcaccaccaaaccatc

SEQ ID NO: 7365 - DNA, 601 bp, Canis familiaris
  misc_feature (1)..(601): n = a or c or g or t
gcatccggtgcgtgacgcanntggcatgcaccactcactaaacnnnnnncacattttgtgggcatcaccatcatcatctgaagaaacttnggtctgtcacccatnnggcaggtcactttctgtagaaacaagcttggtgtttaggattccttgaacttttcttcctggagtcttcttcaaactctgtctacccctattcaagtttgtttttatttttttctcccaacttctggtttttactttttacatcatgaatcaatcaatccttggggctgtcaatgtcatcttagacgtcttaagagaatcattttaatggatggtgtggttttgtatttttattttaaaaacaggaaatggtcattattttcctcctttgaaccaagcttatttctcaattgtgttgcccacgttaagtctacttgtcttgcacacttgtcattctgtgtcccccatcggcactgttctgttccctctaggaaatcacagggctgctcctctcttcactatgacctgggcagcacttcagattcctcactgggctgagttcatgaattagggggcaggagctggaagcagcccaagagacactggatttcctggc

SEQ ID NO: 7366 - DNA, 466 bp, Canis familiaris
  misc_feature (1)..(466): n = a or c or g or t
gttcacacntgncttctcctcattcacacctgnctttctcaccattnnggctggaaggacagatttccatttttccccccagaaaatcactatcatttttttaataagaaaaatactcctaaaattagctcttccagattttagaccccattatccccatgccctgatccaagaaaaactgtggaaaacaaaggccaaacttctccacaccttacgacagcctatatgtggtctgacctgcaccatttctggcacccactgaaagacctctgtctttcaagtgtctgtcttacccctccaagttgggtagatagtgcagactacagaaatatggatttttgcccagcacttctacatctccaaagtcttaaaatggttggtcggtcccccttggggacaattgtcagttacaagtctcagagttgggaatggaagaaagcagagggagtctagtttcattcatttt

SEQ ID NO: 7367 - DNA, 567 bp, Canis familiaris
  misc_feature (1)..(567): n = a or c or g or t
gaggcatgtgangagtgcctcaaaatcatctggggnagttgttaaatgcacattnntgggctacacctcagtngattcttatgcatacaaagattgtnnaactgttgccttagacacagaaagaaagagcagaacatgagcannagnnnnagaaggaggaagacagagnnnntcaagcagactccacagcgaccatggtgcccaatgcgagtcatgatcccacaaccctgatatcataacccaagccaaaaccaagagtcagacatctgactgtgccacccatatgcccctctggacattctttctaaatctgccataggcaacttttcccagcatttgggggtatcattagagatctatctttggctgtctccttacctaccactctacatagcaaagacatcacagactggcagtccacaaggctgattttaattgtcagaactctacacctgttacaataaatattctcccccaccaactccactattggaatgtttgatttgccaacacttaagttagggaattccatattaaaatcttcatttctggggatccctgggtggt

SEQ ID NO: 7368 - DNA, 408 bp, Canis familiaris
  misc_feature (1)..(408): n = a or c or g or t
agataacaaatagtgnnnactatctcaaccctccaaagtttacagagtgttgggactcatttgtgctttctgtggggtagatggatataattgggcagctaaatttcagtcccatgtgcctcctaaataaaagaaataactaggttataagttgacttgcagacacaaagtagcagactattctgaatatttgtttttggggagttttgtgtgtgtgtgtgtgtgtgtgtgtgtgttttaataaacaggtgaaatttcccaaccaggcacatgccattcaattttgtcaatcagttgtataaagcagcagaactgaaaggggggcagggggaatgactgttgtatattctaaatggctttgcatggtctcatttgagataattggtgtaagaatcttgactttttttt

SEQ ID NO: 7369 - DNA, 169 bp, Canis familiaris
aggatctgaactttttttttttttcaccaaagtatgtgtggaatcaatgtctgcacatttaaaaaaaatatagaatgtagcttctttactcctggctatgagtgtcatccttctaacacttggagctgaaatttgtaaaaactccttaatgagttggaaatgattatga

SEQ ID NO: 7370 - DNA, 167 bp, Canis familiaris
ctacctatactctacatgctgttcaggcccagttagcccctgaccctcctccaaagggtctgagggtataggtgtggatatggatttagttagagaatcccaacaatgaagtgagcctttggggtgcacccagcctcagcctgaggctgagcaccgtctgtgtggct

SEQ ID NO: 7371 - DNA, 613 bp, Canis familiaris
  misc_feature (1)..(613): n = a or c or g or t
tcttgttacctgtngatcaagaannnaagaaaaaagaaaaaacttcttnactaagaaccacatgttcatcagataccttgaaccgccagccagcactgttcagtgcatgtcaaccactgcagagtctgaggctcatttccattgaaaaaacaacaacgacaacaacaacaaaaaaaccaacaaaactcagaaacctttcccttttgtcaatgtaacagggcattagccagactcatgtctaatgttataagcttctagccaagatggccttgctgcgacttccctgaagtcagtcttatcagaggaaataaatgaaagacagaatgattaacatatatagtgtataaaagtatagaagagtaatctcttccctgtggctttatttggtggtgttactgttgtttattctttgtttatatgggagatttcaaagtaaaacctatttaataataccatttatctaactgctgattttctgctgcttgatcttatgaagcgcaagacctgtcattagtaatttcctttttgtatttaatttgctatgtttgcacgtacattacatttgttttgatgtctatttttgtttaacagattcagtcaaaaggtaatggta

SEQ ID NO: 7372 - DNA, 450 bp, Canis familiaris
  misc_feature (1)..(450): n = a or c or g or t
agggacatcattcctgtattatagtgtatgtaaatgnaccctgtaaatgttaanttccatnnnntatgggatggggactcaaatttcagaaaagctaccaagtcttgagtgctttgtagcctgagttgcatgnnnnngacttgaactgctcccaggagccgtgcagacctttcattccctaacagtcctttttacattggattttaaacaaagtggctctgagttatgtcattccctatatggcactttaaagcaagaaaagacacgctttcattctgaaatacgtattatagttttggcactcccattcatatttttgcatatttttaaaagtactttaaaggaaaaagcaatttccctttaaaaatgtgatagcccggtaccatgtggtgttgcctcctccaaacactgtaagttaaactctacatagattaaatcggacaacaaaac

SEQ ID NO: 7373 - DNA, 135 bp, Canis familiaris
  misc_feature (1)..(135): n = a or c or g or t
gagagagagataagagagttgtgatctcctctcacatgtagggagggaaattgtcaagatgtattggccagggacacctgggtcnntcagcggttgagcgtctgcctnnggttcaaggtatgatcccagtcccag

SEQ ID NO: 7374 - DNA, 571 bp, Canis familiaris
  misc_feature (1)..(571): n = a or c or g or t
ctgtatgagtncncngnnnctgnctcctctccnnngcaccccgcctnnnggctnnatggcttaaatcctggaaactctctgactatacggccagtaaatgtgtaaaggttccctgggtgttaaaacatggtggtggtgtcctggtctccccctctggttccaagccagtggcaacttgacaagaatcctacttcttgagttaacgggtgtgcagtaaagggctaactgcaggcttgggatgttcaacggcacattccgagagcatgggtccctgactggctcctgggaggcagcctctaagtgcttggcatatcctgcctgataagagtattttggtttacctgagggccttgggccagaaggtatcagcttgacctctggaggggctggagacaaaggcctgcctatgtgaccgacaccagggcaccaaggcttgggtaagccaccctggttgatagtcctccttgtatattgtcacatgctgttgcatggggaattaacattgtccttgtgactctgtggggaaggagacttggggtctcttagcctgtttcctatgtgcctttttcta

SEQ ID NO: 7375 - DNA, 509 bp, Canis familiaris
  misc_feature (1)..(509): n = a or c or g or t
gcgngagctggggactccatgacctgggcagcaccgttctcctggagtcgggtgggggccaggatcgtgtctgctcttccactgctttgcanngcgcttcttnnagatcttctgatggaggggaggggttgtctagacacgttctgggtcaagttgtgagagccagagcccctttctgagttgtcaagcggatgctccgctggacacgtgctcttgccccgggagacgcgctgaggccgcaccctcctgatgcaggacaaatatcaaccaaacagccccaggccccacaccccgaagtccatgaccccttagatgtattttnnnnncaagtcctcgaaagcaagagaggcctgggggcagtgtagagcctcggggtggtttctggagtctgaagtacaaatgagatggcgcagttaccctgattttgccctccctgtgccctcccggggggctgccagccctgcctctgcccgnnnnntttctgtgatgcgtgngnntgccctgtttat

SEQ ID NO: 7376 - DNA, 197 bp, Canis familiaris
  misc_feature (1)..(197): n = a or c or g or t
gggctgcggagntnnnnacccgggggtcagtccccgtggacagtcctggcggccganntgcaggatcccgagggcttactcagaggaaagatgatcaaggggcctgatgagttcactcgagttcacatcctgggagttgagctcagggagaggactccatgcaccagaaacctctcagagcgttgccatcgttagct

SEQ ID NO: 7377 - DNA, 581 bp, Canis familiaris
  misc_feature (1)..(581): n = a or c or g or t
ttggnctcagctctacaaaatgagntccannnnnnagttttttaaggtcttttctaattttcacatgtcatgacaagattctttttgacagtttgaagggataatgtgctttgaagtgagttttggtaaggtgatatttttgggcatctttcttcttatctcttacagtgttcttacaattttttgaatatcatgaggacctcatgtctgttttgattccttcctccttcactgatgctaaataatccaattgatatcaaactgtcaacctaccaaaaaagatattgtggcttgtgggtattgctgtcttgtttttgatatgttcttgtattgactgcccattggcctgaaaatactcatcataagcctaaaaaaaaaaaatcatttttctttcccaccaactgttttatctgcttgttgtaagaatcaaatgaaataatgtatgtgaaagcaccttgtaaactgtaacctatcaatgtaaaatgttaaggtgtgttgttatttcattaattacttcttctttgtttagaatggaatttcctatgcactactgtagctaggaaatgctgaaaacaactgtg

SEQ ID NO: 7378 - DNA, 577 bp, Canis familiaris
  misc_feature (1)..(577): n = a or c or g or t
actttacatgtaatacagtggnactaaattcatatctttcaataattactctgaatgtacatnnacacaatattccaagcaaaagacacagggcatcagaatggataaaaaaataagactactttccatgctgtttacaagagactcatttagacccaaagacacctgggttgcccaagtagctaatgttcttccagcacaaggaagtctttgtgacttcacttttctaagactaatttctgtggaaggaaccaaccaaagcagctatacagaaaaaaaaatatgatgacaaaatataccaagtttctcatcaaacctggagaagttgaaaaggagtttggggagaagaaataaaagcccatgagacactggagaaaagttaattaagagcacttcataaacataacccaaagcagatattctgtaaaacgtgatgttttagaatcaagtcaaatcagcacttcaggcaaaaatgatacttcttttgtggctttatgagacagaatcctaaaggtcacacataccttcaaatatctttaaaagtgcagtcatttctcacaagtagttggtctgaagt

SEQ ID NO: 7379 - DNA, 554 bp, Canis familiaris
  misc_feature (1)..(554): n = a or c or g or t
ccccannangcagtggcccaccctcgcccggcccccaagagntnnnnctgggggggaggtccctcgactccagcctttgcatggccaacgaggaggacagctatatgcgctccatgaccagcctgctgggcggaggcgaggggtccatcagctccctggcagacgtcctcgtgtggtctgagaccaccgtgggcatggcctcggccctgctggcctccggccacagctcggtgacagacctgctgcacagcccggggcccagcctgcgctccgtctccagtatcctggggagcaccttctcctctgggctgatggcggggaccagcctggccctgcgctctgtcacccacctgctggagagggtggagcagaggaccctagagggcgtccgctcggccgtgcgctacctgaccagccacctcgttccccaccaggcccatgccagcccaaactccggctagaccccaataagggagccctccaggggccggcttggcagcctctgagagcccagggccccgcatgcctgctcccctgcccgcccctgcactggc

SEQ ID NO: 7380 - DNA, 611 bp, Canis familiaris
  misc_feature (1)..(611): n = a or c or g or t
aagtgcctgtgcagnnnccacccccgcccctctccctgccgcgcgctgagtgcccctgtgtctcggccccctcgcttgccaactggagaaagggtgcctacgtctttcctctgctgcatttataaacgagaaagtccattttaaacagtatttgccacctctcccccttgtctctgagagggagtggaagtggaccggcatgctccaggggccttcccaggcactggaagagtgtccctggccgagggcaggctggaaggattgtcatgacccccccgcacttgtcctctaccctggaagccattagaatccaccaggcgtgcagatggatcacccttgcctgagcttgatgagcagcccttggtctccgattcaaaggactgagagaccaaacacctctgtcttccccctccccaagcctctgccagcctctggctgcacggccaggccctgcttcatggcaggcctaccagagcttggcccgagggcccatgccacctctggctccctgacaagctggatgtaacttgtgtcttctggccccttcaggagcccaggtgttgtgaggaatgaattggtcactgcatcctgtatcggttttggttccgaga

SEQ ID NO: 7381 - DNA, 410 bp, Canis familiaris
  misc_feature (1)..(410): n = a or c or g or t
tcccccccccccccaacatcagctatagaanntttcaagagaaaatattagtgttannnnngcagctaccatctaggaagaattcctggacatgggagcagnnnnnattcccggttccnnnnggctnnnantttgggcncnnnngtccctnnnnnnggccaannntactcnnnttatccaccctgctcttnnnanaactgctcagnnnaatttctaccagcttccaggaancnnncacctcctttnnnaatcagcattagaaggaaagaaatgactagaaagaaaatnnntgctatgcatnnnnnnctaacattaaggatgagtattgaanataaattagtttctcctggagaannnctgnnntatattttgtggtagnnnnnnnttgtgtnnnnnnngagttttgtaaa

SEQ ID NO: 7382 - DNA, 540 bp, Canis familiaris
  misc_feature (1)..(540): n = a or c or g or t
attcagaaggtgtgtgaagttgttgatnnantcatctatgttgcaaatgctgaagctcataaaagacatgaatggcaagatgaattttctcgtattatggcaatgacagatccagcttttgnatcttcannaagacctatgctggttttatcttgcatttctcaagcaaatgtaaaaagaatgccctgtttttatttggctcatgagctgcgtctaaatcatctaaaccacccatggatggtccaggatacagaggctgaaactctaactggttttttgaatggcattcagtggattcttgaagaagtagaatctaagcatacaagatgatcctccttttagaccttggaaattgaaaccccttgaaacttgttactaaggtcatgatttgaatattttgctgagtcagctaattttgtcctgcctttttgcaggtgggctttatattgggacagctgtagctgctgtgttttttatataatttttactttttaccttaaatcaattacaagaacaatgtttcagcatnnnnnccccaaa

SEQ ID NO: 7383 - DNA, 502 bp, Canis familiaris
  misc_feature (1)..(502): n = a or c or g or t
agcttgagggnctgtttgaggacatcnnnnnnnctatgtatgacagtgaactttggccaccagcctccgagggcctcaaacctggccctgaggatgggcctggcaannnnnnggctctggaactggatgaggctgagctggactacctcctggacgtgttggtgggcacacaggcactggagcggccaccgggtccagggcgctgatccccacaactgggatggtggtctggtgtccaaactgagcctggtggctggaccaactctccttggaaagacacagctggcttccttagagcagagagagggcctttggagagacagaatccagtcctgagcaacttcacctctgtcctcttgtctaggactaatgaggggagtctgggattggcccttgggatgggatcacagggcctggtggctggaatgtgatttggaccgggccctgtactggactgaatccccaggggttatagcctgggatactctttccctgatgtggg

SEQ ID NO: 7384 - DNA, 531 bp, Canis familiaris
cagaaaaggcatatacaactttcactgagcagccagaacagaatgttaccacaaacgtcaacatatgtgagctctgtacctgcaaagatgagacgctatcgtgtactggtttcagcccaaagcagaggctccgcagagtgcctgtgccagagcccaacacggacaacaccttcaccatcttggttacaacgcagtttggtggatcatgaactattaacactggagattttcaggtagattttccactagcttttcagaatattgaagcaatctgagtccatggagtttgattctgggagtctaatgtggtggtgttaagatgggatgtgctgaaacccgcctggtgaagaatgctggcttgggagccggaagaaatgaacttgagtcctagattttccacttactaattgggtcagtttgtcaagttttctcacaatctgagactggatttcctcatttggaagaagttttgtaagaatcagatgacttgatatacaggcatggcattgcaaactgaagagtgccatctaa

SEQ ID NO: 7385 - DNA, 62 bp, Canis familiaris
  misc_feature (1)..(62): n = a or c or g or t
acttcgacccacagtactttgaatttgagnnnnaggcntaagaagcttggatctccatcagg

SEQ ID NO: 7386 - DNA, 615 bp, Canis familiaris
  misc_feature (1)..(615): n = a or c or g or t
ganncaaaaatgccantnnaangagaacacaagtcactgtccaagagggttgcatcctcacagtaaaagacgggncgttgtaaatgttaaatgcatcatcctgccggggaatggtgctggcactgaggcatcatgcagtgtagcggggtgggaagaacattggactgggacttgagagatgttttaagtcctcactcttcttgccctgtgaccttgacagggagtgaccttgatggggcgtgtgctcccagagcccaagattgcctggaataaatgaggaccatggtgcaaggtccttcctttccagctctgacatgctatcattctttgattttattatatactcatatttttgttcattgctttaaggactaaccctactcaagaatatttagctagcttaaaaagaaaaaaaaattatttaataaacaaatatgtggccaaatgcaatgctgaggagacaatcatcgtatatctttataatttttcccccctgcttcggagcgtcatttgacaaaggcaagaggcttattccgttgtgcttcggctttcgagtatgtttgattgctttgatttgtcatggggaagagacnnnnntgtgcagctacctccatg

SEQ ID NO: 7387 - DNA, 327 bp, Canis familiaris
  misc_feature (1)..(327): n = a or c or g or t
ggcattcnnnncaggaaannnnntgtgtgnnnnnnnnnnnnnggcnnncnnnnngctnnncntnnnnnnnnccgccatnnnnnagnnnnnnaannnnnngtctctcgnnnaccccaaggatattgacntnagtcnnngcanaatcgggtnnnccaagatccccccccatnnnnnacnctgtgnnnttccccgctcgggctgaagacccccgggccccaggcnntttggtgcaaacctggagtnnnnntgcttccgcatatcnnnnnntgcctcnannnngaccctccctgcanagtctggtggaggcactcagggtttcacagggna

SEQ ID NO: 7388 - DNA, 652 bp, Canis familiaris
  misc_feature (1)..(652): n = a or c or g or t
ggctcatagcttcagagccactgtggtttgtgagtgttcactgcggtgtctgtcccntggcncactcnntcgactctccagcgtcacgacccgtgggattgacctgtgggatcccggcctggctcatcccctctgtgtcctggagcaaagccagtcccccgacctaaaactccattttagtcttgggaaggagagtttttgctcagagctggggcgggggacggatttatgactgggcctctggcctctgggctctggcccccggcttccccacatgcacttcccctgcctcgggccttcctcctctgtgcctcagccttacatccaggcagtaggtctgggctctttccctccctaggccgctgagagaggtgcctttcttgagaaaacctttgggatttggatttccccgggaagatggaggctggaacacccactcttgggtctaatctttccccttgacccaaaacttcccacaaaaatgtctcaaaaaatccttcctgagacttcagccttccgtcccacccactacctgccagttctccaagactgaggtggggcgagtaacggggcatattggagggggcatttttgggtgggagaggtctggagtccgcagagagccaccttcacatccnnnnnngtgcaaaga

SEQ ID NO: 7389 - DNA, 636 bp, Canis familiaris
  misc_feature (1)..(636): n = a or c or g or t
cagctacagcnnnaacacggaccaggatgaggaccaggaccccatgnaggccaccgatgaggaaatgtcaaacttggtaaattatgtccttaaaaagttgagagaggaccaagtccagatggncgactatgcgttaaatcagcaggggcctctattgtggaagccgggacctcagaaagttacaaaaataataaagcaaaactttactggcatgggattgggttcttaacttatgagatgcctccagatattatcctccagccggacgtccaccctgggaagtgctgggccttcccaggttcccagggtcacgccctgatcaagcttgccaggaagatcgtgccaaccgccgttaccatggagcacatctcagagaaggtgtctccctcagggaacatctccagcgcacccaaggaattttctgtctatgtgagaggcactcgaaatccgtgttcagagtgggttgtgctaggagggggttggttaggaatcacacgctgagatgtcacctgaaccatgtggctaaccatgtttgtcactctgagaaggttatttccttccagaacctcagctttgtcatctacaaagagagagggttggaccagataatttctcttactcttttttttttttact

SEQ ID NO: 7390 - DNA, 542 bp, Canis familiaris
  misc_feature (1)..(542): n = a or c or g or t
ccttcttnnagtcattannnaaacttgacgctggaacagtaaccaaatgtaattttgctggtgatggaaagacaggggcatcctggacagacagcatcatggcccagaagtcttcggagggagccatggcagagacccgagagcagggagacggggcagaggatgaggagtgggacgactgaagtgagtgggagtgaagtgcctctggtcccaccagcactgctgagagtctcttccatccacatctactctagagctcaagggagcagtctgccaaaccttacctggttcttcctacagctgcaatggaataacctttgaataagtgctgctaaaatcaaacctaagaccatgacatgagcagtagtgccatgctttggctcatggaggggccctcccttggtgtgagtctagatctagacatttccatggtggcccttgccctgaataacagccttgtttctagaggtaggaagtggatgagtcctccaggtccccacctctcagactctacaaggccacattttgataacagctttgtt

SEQ ID NO: 7391 - DNA, 440 bp, Canis familiaris
  misc_feature (1)..(431): n = a or c or g or t
ccttnctggggcacaacatcctgnnnnnnngccttcctgggacagatgcagagtgtgggnnnctcctggggctgagccaggggcatcactgaagtctccattcctgcttggctgtctggcccagcttcagcaagggcctggctgtgtgctcagggacctgcttccccctgtggggcaggaggaagaagaggaccaagaggggatggggctgtcctgtggtcacatggggttgctatggggcacagaggcctaacccactacctgactgagctctgtgtgggctcagaagccgctttcacccattcaggggaagctgtgagtcccactgccctctccttccacctttccagcagtttctctgacctctctgcttcagctgtgcctgaagtagcatgcccnncctgtggcagggctnnctcacccttacctgacctctaaaa

SEQ ID NO: 7392 - DNA, 648 bp, Canis familiaris
  misc_feature (1)..(648): n = a or c or g or t
cgccntgcnnagcanctgctacagannagggatcacttccatggttggcaaannnnntgtnnacaggtcagnntgcgngatccttaccttgtcatagataggctccccaacgcagcagactccgagacgaagatttggatcatgatggcttcccacaacaaataccaacactcctcctaattctggaaagctggtgggcccagctgcagccccttnnnagcagatacctccatgtgcaccttgccacctggctgcccacttgtgtcagtgctgccgctgggaaggacggtctgatgggttcttatatactcatctcatcataaggttgctggaagagggcacctcatccaggcctcctgttcggtctctgttgctgatggttgtacactcagcagaagcagaagctatgtggccttggtgagggagacccaaggtcattgggctgatgtagagcctccagtcccactgccatgctgctctgtttgtgtgcgccttgtctgagcacagtgctgatggagtctagctaaagcagccagaagtttattctgtcaaacatgaaacactgccaatagacccataaattcaggggaaaaaaacctacctgcattgaaaatttgttgcttttgaagatgagtgattgattacaag

SEQ ID NO: 7393 - DNA, 569 bp, Canis familiaris
  misc_feature (1)..(569): n = a or c or g or t
gtcncaggatcccaggccctctccaaggccatcctcatcagcagcgctgcctataccagaggcagcatgagaatggggggaatggggccccctgccttgcctcttctctctggttctcctgggttcccagccactctctccttgtccatgtcctccacagccatgtcccagcccttagccttcttccccagtctcagcactcactggtctgtcctccctgtcacaccttgtctgaaagggccctccaagaaagcctgcagatgtccacagagcccaatggcccagaatcccctcacaggacacccctggcccgggcccccccaagctttgaggaacagcttcgcctggccctggagttgtcttcgagggagcaggaggagcaggaacgacgggggcagcaggaggaggaagacttacagaggatcctgcaactctcgctcacggagcactgagcacccagcacccagctctgggagggcggtctatgctgctcccccatgtgcttttgtaacttatttatttataaactgtctgctgccaagcttggggcctggagccctggaggtggg

SEQ ID NO: 7394 - DNA, 664 bp, Canis familiaris
  misc_feature (1)..(664): n = a or c or g or t
tgtgcaatggtgtaaacagtctgtctgtatatttnnntagntgagagttttgctctttggnngtgactttgtgagggggtttattaacagaccagagtcctggctttccctgtctttgctgtacttcgggaaccacagttgaccctgttttgttttacatgtagcaaggtctgtgccctgtgtctgctgtattgtggacagacaggtggcccacgcaaggaattgtatttataaccactctgactccaacgccgtctttagaaccattggaagtcattttggaagctttagttcctaaaagatttaagttaaaaaccgtttctttgaaggtcagtttgtgtcgctccaggtggctaatgaccacgtagccgtgctgggtcgggtggggaaagctgccttctccaggcatgtaacgcgcgagcaaatctcaaccccgaccgtatgaatgctgagactttaagaaaatacattttatcccaaggttatgatggtaatctgacgcagtgcctgtaaataaatcggcgtttatgaccagaagaaaaataatctggtcttggacttttatttttatatggaaaagttgtaaagactcaggccaactaagtccgcccacaaagaaaaaacaattgccttatctctccgggatcgccatgagaagtccntg

SEQ ID NO: 7395 - DNA, 502 bp, Canis familiaris
  misc_feature (1)..(502): n = a or c or g or t
gagtatttgcnncgacaggtcttcaatgccccaaagccanngtngacccagctctcagggagnaagttacagaactgggcntcgggccccgccccggccagccacctcgctgctgctggaaccgcgcagcctgctggtgctccgaggcaccgcctacacgcgcctcctccacggcatcgcagctgcccgcgtagacgcgctggacgccacctccctgccacccaacgccgccgcctgcccgtcagcgcggcccggagccagcctggtccgtggcacgcgcgtctcgctgaccatccgccgcgtgccccgcgtgctgcgcaccggcctcctgctcagcaagtgatgccaggtggactcattctggggctctccgcctcctgatatctgcgaccctgtgaccttggaaccctggggcagaggcggctcccctctcccccattcccagggttatatattttcccagtaactttgtgggaactacaggaagaggtcccnnnnnaan

SEQ ID NO: 7396 - DNA, 721 bp, Canis familiaris
  misc_feature (1)..(721): n = a or c or g or t
atctactgnncaatcagaaaagaagaaaatttaatccagatttttagaagtacaggtgcatgancagttgtcagttaaatatncagtttnatgtctccatgcaaacattcaaagtgcttctatcaggacagagtaaaataccaagatnnnctgaaaacttcaaaaaggtttagntcttttacttcagtgtttaataagcagatgtatttatgcatggttatatcattttgttaacatgtacagtttcttaatttggtcttcgaatatgctgttataatttaaagtgtctatttatgatgacagtacatgtgttctgcttgaatttactaaattctactactgggttataattaaaccatgtagtaatattactctatgtttggatatgctcatttaatttctacaggagaatttttaaattatttcacatagtcatccatgtaagcatagcataactcaacaggcttgattcaacctatatcaccctatatataccatgagcttttatttttaaagacatttaggagagtttttcagttgctttatcaaaaactactgcttcttttatattatgatttaatatagaatataaacttgatcaaaaatgcacaaaaaaatcactttgtatatgtacttgagtttcactgcattgtatattttttcatttggtacacaaagaaatgtattcttcataggtctattcttttaacatgtgaactat

SEQ ID NO: 7397 - DNA, 437 bp, Canis familiaris
  misc_feature (1)..(437): n = a or c or g or t
cttacaaagatatgattatccccagtcttggcagtgacccaaagagatatacaattaatgaatctggacttttgaattttatnnnnnatttgggaaaatccactggagggatccaaccagaaaagtattattccatttgaaagggcccaggggcccttcctgtttattgttggcatggatgataataactggaagagtagcttctatgctcagatagcctctgaacggttacaagccaatgggaaagacagacccgagataatctgctacaaaggnactggtcattgtattgaaccaccttattttcctgtatgtagagcttctgtacatgcagtgttaggccaacccatatgccatggaggtgagccagagtttcagtcaagggcacaggtcgatgcttggcagcgaattcaaactttcttccataaacatctcaa

SEQ ID NO: 7398 - DNA, 156 bp, Canis familiaris
  misc_feature (1)..(156): n = a or c or g or t
actcagcaatttgtgccatatttttnaaactatttgactttgttagttnnnaagtaacttgtaanatttaattaatnnnncgattaatggtccatcagaaagttctatttttctgcttggaagtcttcattaaaaaaagaaaattnnnnnatgttt

SEQ ID NO: 7399 - DNA, 562 bp, Canis familiaris
  misc_feature (1)..(562): n = a or c or g or t
ccagaggtggctgatggggactgatggagggaggtanntgctgccactgcagtgtnnnagcagccttgccagggacttgcctggtcccaggggtgggaagtacccactcctgggtttgcagcgccttcctcggaggaggcccctcttccctctgagtccgatcacgtaaagaactctgctggactcctggacctggccctgtctcggagtcggctatggctgcctttggacttagggagattttccaagagcgccatccccttctcacccccgtgcacccccccccccacccgcccgtgtgtagacctaccaagtttaaacagaagggcagggcccacagtgtggcggcgaggctcaggctgtctatgctcagtgacagcagtcactcccagaggtggcgcctctccccctctaagatggacgtgtcgatccgacccccagccgttgggctggagcatcccatgggtttgaccccaggtgtgctggtctttctgagaacaatcggggggctacgagtcgcacttggtgcatgaaaccctgggccacctgaccgctgcacaac

SEQ ID NO: 7400 - DNA, 525 bp, Canis familiaris
  misc_feature (1)..(525): n = a or c or g or t
tccagatgtcagagcgtagcatnnngagccgcctgaccaaccgagctggcgaccccaccatccagcagggcgctttcggcaactcccagatgtacaacaacaactttgggcccaacttccggggccctggaccgggagggattgtcaactacaaccagatgcccctggggccctatgtgaccgatatctagctgtccgcgcgatttccctctgttgcagtgctcatttccagctgagccatgccttccgggccacctgcccgacccccacaggagagaaaagctcccacctttttaggagccatgccaccttgggacagaaagggaaactgagtcatgccaccacatgggggacgaggcccagcctggctgggctggagcccggaagtgccacctcatcatatcgcaagtgttccacccagcgtcacacccacaccacactgggacgtgccccttggccacctttgccagacaacttcttagaggagatttcatttatttgtacatcttttgcactttcttattg

SEQ ID NO: 7401 - DNA, 284 bp, Canis familiaris
  misc_feature (1)..(284): n = a or c or g or t
taggngaaataaaaaagatagatataaataaangaagatagaaacagnagtgccagggtggctcagatgcttaannnnngagccacccagggatccctagaataggcaaatctatagagataagaaagtagagtggtggtcnnntagggctgggatggttagagggctgacggctaaaaggtacacaatttctttttggggtgatgaaaagtnnnnnaactgatggtggcaatggttgtacaattctgtgaatatactaaaaaccatgaaatggtgtgctttaa

SEQ ID NO: 7402 - DNA, 425 bp, Canis familiaris
  misc_feature (1)..(425): n = a or c or g or t
tgtgtgtcancaggaaggcccccctggtggcttctgacagcagtgaggacaagacggctggtgccttggaagctgtcagtatgggtcccagccgggaggcccccccgctgcccacgtcagcccccaggttcgagcccgcgccccccgcgcctgcggaaaccccccacgccccagctgtggccgcgccccccgaggccacccccgctgccctggccagcgcccccgggatgaccgcagcggggcccccggcggccgtcaccactgtggccccagccacgtgcacagcagctgttctggggacagggacgaaggataggaagatggactccccgccacccgcaggagccgccttgaacggccccgtgtgacgctgctgccacccagccacggcgcgcccttaatcgaggaaactacctggtgatgca

SEQ ID NO: 7403 - DNA, 674 bp, Canis familiaris
  misc_feature (1)..(674): n = a or c or g or t
atgatatnngactgccnacatagtatacaaagctctattttaaaatttaacttnnattnnaaatannanngcatttctagtgctacaggcatcaaggtatnnaaaaggcatcgaaatttggtgcatagcaactctggatcatagaggcttttannnntgaagnnagcaaagcaacccccaaagggtcttgcaaaaacccatgtgaggcagctaccccaggggcaagagggtagaggcaagtccggccagctgtctggagcttcctgtcaggggccgcctctcacaacccctccaaaggcagctgtaggctaccaactacaggccctgaagcaaatctcactatccacactctgacacaaaacttaaagaaaatatgaaaacacccagctccaagagggactagagtgatttgttgaaggatatacatttttctctaactagttttagggggaaaattaaatcatcatggtttgaagagggcataaaaataaaaagaccatacttcatcccgtaggaggtgaacatttctacctggctgactagaggtggtggccagtgacccggctccctctgcccaggcctcagctgacctcaatagagtcctggtatctaggactcattatcccctggagtaacatcaagcctttgaccagctcagcacactgtcgcacata

SEQ ID NO: 7404 - DNA, 455 bp, Canis familiaris
  misc_feature (1)..(455): n = a or c or g or t
catctgctgcaaaaagancatnntgannnnntctcaccactcccgcctgcccttgctcagtgtgcttcaaccacacgngnnnctcctgtctcannacacttgcacagcctggtgcctctgncngggctnctctcccccgacatggccacacagcctgcaggtnnctggtcnaatgtcacctcttcctaataccctccctgttcccctcatatgaaggagctaattgttcctctgctcaggcactttttacctccctgagcctgctttatttttctcttcctttagctcctgtccccacctgacatatgtggccgctgctagtttctggctgccgcatacacccagccagggggcactgtttgctgtatagaagtacagtaggcactagagtgccccctccatgtgtgcagggtacgacccgtgcttgttgcgtccttgctggagctccaacaata

SEQ ID NO: 7405 - DNA, 576 bp, Canis familiaris
  misc_feature (1)..(576): n = a or c or g or t
ggcttggggtttatggggtaccctnnatgtgatcctgactgnnctggggtagaacaggaccctctccctcaaacttttgctcattttatacatggtagttttgctgagnnntcagnctnnagcacctgaacctgatgagtccctttcaatgggattctagatcatctctactaccagagccctgatcctaccccacgtaggagtcatcagaactgactagagagtgcaagggaagcctcaggcttggccttgagctctgtctgcagctcggttttccaaaaccagggggctgaggtggggaatactatgccctagggcttctgggaggagctagctgggagtgctacttcagcagttttctctttgcaacaggtattgctcagttggggaagaggtgggacggtgggacatgagagagccaatggggcagggtggttactgatgcccagccaactattaaactaattaaaacaatttaaactgttaagaaaatttttgtggttttattatatcatgagccattgaaacatccgaacaaatcaatatctgggcggtcaatatctgggcggtgaggca

SEQ ID NO: 7406 - DNA, 579 bp, Canis familiaris
  misc_feature (1)..(579): n = a or c or g or t
agtgggtttactgctgctccatctcccccgactgcagcatgctgtgctctgcagctnnagagaagtcggtgtttctatnnagcatgcgatcctacacattaatccggaagctagagggccaccaaagcagtgttgtgtcttgtgacttctcccctgactccgccttgcttgtcaccgcttcttatgataccaatgtgatcatgtgggacccctatactggcgagaggctgaggttactccaccacacgcaacttgacccccccatggatgacagcgacgtccacattagctccctgagatctgtgtgcttctctcctgaaggcttgtacctcgccacagtggcagatgacagactcctcaggatctgggccctggaactgaaaactccaattgcatttgctcctatgaccaatggtctttgctgcacattttttccacatggtggagttattgccacagggacaagggatggccacgtccagttctggacagctcctcgggtcctgtcctcactgaagcacttatgccgaaaagcccttcgaagtttcctgaccacctaccaagtgctagcactgccga

SEQ ID NO: 7407 - DNA, 559 bp, Canis familiaris
  misc_feature (1)..(559): n = a or c or g or t
ctctcgcccgcaatnnagaggggacatacatnnnagaaatnnnnncaatgangagatgataaaggtagcagangngnnnnnagaaatgaaaagagtacggaacaaactgatggtcatgcattngaaggcaagacggaancgtccttatcctatttaatgtattcggctttaattctgttttgcctgatacaagtattgccacctgaacgttgcattttctcgtatacctttccccatctcatttttaacttttcgtgtggctttantttaggtatttcacttgtaactggcataaaattgggttttccccacccacaagctgcaagtctccctttttcaatcatgagtctcacccatttgcatgaaaagatgtacattatatattgtgaagtgaaaaaaacaattttcaaaannntatatgttgcatctcatttnngtnaaaaatgtatatttatatattaatatgcaaagaaaaaagtatatacttaaatggcttaacagtggctatctgtgcggtaataggtgttttggtttgttttttcattttttcttcatcaga

SEQ ID NO: 7408 - DNA, 574 bp, Canis familiaris
  misc_feature (1)..(574): n = a or c or g or t
actgctgataatagctgaaatnnaaacacatgtttgtttttctgttgtttttttgttgttttgtttttaattagccatttgacaaattcatctttggnagctgagtaaaaggggagatttctaaacctagagcactctttggccagtgcctgtagtctctttcctggctgtgttttagagaaagcgatttgagccacaggcctgcctcctgttctcgttctcacgaagctgccttgattgtggcctcccagccacaaatgctacaccacaggccttctgtgggctgccggccttcaggacagaggcctacctcagtctgccacaattgtgcatggacttagcttcccttggagggctcacaggtcttggggactcaacctgggctttaaaagtacaaagagcacctctggctacccagggagctgcagttcttgctgattctctctgcccttccttcctgccctgtttcagccatcatggagccctgtctgatttggggggtagatttctgtaaagaaggtagaaagtcagttttctataatctgtgaagttgtgaaaaagccactatcatggt

SEQ ID NO: 7409 - DNA, 491 bp, Canis familiaris
  misc_feature (1)..(491): n = a or c or g or t
cccccctctggnctgggcggcttcatcttcttctacgtggtcctcatgctgctgctctatgtcgtctacactcggctcctgggttcctaggacctgaagtcaccctttctccccgcccccttgccctatttctatttataagactcctgtgccactcctgtccctaccagtggtgccttcagcccctaccaaagacactagtgaacccccctcccctcacaaacactgaccttagaggccccagtctggtgccccaagaccccaggccccagcctctggccaccctcctgtagcccgttctgagcccctcacctctcaatcctgatggtgccttcattccctccaggccctgccctgccctctgttccttcaggagggtagatctcaaccttcctcctcgtgctgttccccgcaccgtccccccccactgttacggggagctaaattatctatattttgtagagagaagtttatatttgtaggggatgtag

SEQ ID NO: 7410 - DNA, 596 bp, Canis familiaris
  misc_feature (1)..(596): n = a or c or g or t
taaggaagaatgggagaagaggtatagagnagntngccatgattttacagagagggaaatgggatcctaggggaggttacttggcaaaagtcacaaacaggagaatggcaaagttgggacttgaatcggcttctggactccagaacctgggtccttaaccatgacatcattcttccttagggaaatatggattttggatgtggagacagtgggcagacactggaaaccctttttcttccattcactttgaatagtttggcctcagatattagcagaatggcaacagtgctgcccaactcagagtctcgtggggtggctctgggcacttctctgtgggctgggggcgtgggatggcgccacagccacccttctgtcctcccagggagaaggcccaggagttgtcggactggatccaccagctggagtctgagaagtttgacctgatggagaagctgaagcagcagaagtatgagatcaacgtgctgtacaaccgcatcagccatgcccagaagttccggaagggggcagggaagggccgagttggaggtcgctggaagtgaggcccgggagccaggagccagagcctgagccagagc

SEQ ID NO: 7411 - DNA, 503 bp, Canis familiaris
  misc_feature (1)..(503): n = a or c or g or t
ttagggtattnnatccccgctagcaacagagcnnggtgttttnnntgcttttgtttcttgttagctggtgggagggcttggctgaaggttttgggggcagttggaactgcccccaaggagaaggccaggagccaaaggcacctcaagaatctcacctggttctccaccttctccccagcaagtcctattctcctgacaggtgcctctgggagtctttgtacgcttcccatccccctcctttccaggtcctcagtggagggggtggggatggctgctcttgtccataggctccgggtctccagggaggttaggagctgcccagagtccatctcctggccagacccagctggtgggatgagggtttggcccctattctggtgcaggtttacaagctctataaaggtacagtgcctactcctggccccccttctccacccacccccccgataaaaagcacaagatggggtcaggctgcctccagagttgggtggggacagagacat

SEQ ID NO: 7412 - DNA, 616 bp, Canis familiaris
  misc_feature (1)..(616): n = a or c or g or t
gctccgcangnctgaggatgactgggacagagtcntngctgtcnnnntcnagggcatcttnnnagtcactcaggctgcagcccaagccctggtgtccagtggttgccgtgggtccatcatcaacatcagtagcatcgtagggaaggtagggaacgtgggacagacaaactatgcagcatccaaggctggagtgattggcctgacccagactgcagctcgggagcttggacggttggtcagacacccctgggggtacagagggatttgctgagacacgggatccgctgtaactctgtcctcccagggttcattacaacacccatgacacagaaagtgccacagaaagtgctggacaaggtgattggaatgattccgatgggacatttgggggatcctgaggatgtcgcagatgcggtcacattcttggcgtctgaagacagtggatacatcacaggcgcctcagtggaagtcactggaggtcttttcatgtaactgcctcacggaccctggactctgctcactcccccaccactccaaccggcctcctgctgatgaggactctgagttcccaggctacaaaaggcgcagcagtgtatggctctggaatgctgaatat

SEQ ID NO: 7413 - DNA, 475 bp, Canis familiaris
  misc_feature (1)..(475): n = a or c or g or t
tggcactttgaaggggtccccgtgctccccagcttgtcagcacagccannagcagccccccagccttctcgcctagtaaagctgagtaggggctccggnnnacatgccgggtcagtcactgccctgcgtccccctgccgcctctctgccctgaccatactctgaccgccccccccacccgccgtcttcctgacataccacaaggactggttctgctcccagtcagcctccttccctcggagaatgtcaggtcccagctgcgtgtgcccgccccggcctgttccatgctctgccctgaccccgacggagccctcacctccaaatccagacacagggcgccctcttgacccagtggcagccaggctgctccacagggcctcacccagtgnnncaaggatcccccctcctcggtatctgcccctaatgacttcccgtccacggaccccactctgcttcctggcagcggcccggctgga

SEQ ID NO: 7414 - DNA, 587 bp, Canis familiaris
  misc_feature (1)..(587): n = a or c or g or t
tcccaaccacaccgcaggggctggtgacctggtngacacagggcttccccaaatccagtggtgnnnagtgggtnctgctcccgaagcaatcagctttgacccccgtgcagcctccgagcagaacccctggagcagcacagtccccacaacagcggccccacacggagaaccctgcgtgccttgccacccagcgaggccctgtttgtttgtctccagccatcaaaggcactcctgtctcctcttcacgccctgcccaggcagcgtgtggatgccaggcctgacggccagcccagtgactggctgccggagcacgcagccctctctgggcaccgcggcaccaggcgccaccagtgtgagtcacttgggctgggggtggggggatggctgatggggactcctgccagaggccacattcagatctggtggacacacaggcctcaggctgacttgcccgctccacctggctgggctgggtgtccccaagtgtccccaccgtgactgcccagcaaggagttcgccccaggggacccggcgccctgctgcagagagctgtcccnnnnnngttctagaatgacaatgcnnnnnnc

SEQ ID NO: 7415 - DNA, 448 bp, Canis familiaris
  misc_feature (1)..(448): n = a or c or g or t
ctgcangaaaatnntagtttttcatttcagtcatataannacactgccatttcccacgagaagagccaagaggaggaaagaatggctgttggacttcttaaagccatgtaccaggagttggtgaccttcagagatgtggctgtagacttctcccaagaggagtgggattgtctaaattcttctcaaaggcatctgtacagtaatgtgatgttggagaattatagaatcttggtgtccttaggactctgcttttctaagccaagtgtgatattattgttggaacaagggaaagagccctggatggtgaagagagagctggcaaaaggcttgtgctcaggtattctggaccctatctaatgtccagttgacagctagaatcaactgccagacgtgtgaacatgtgagtctnnnnnnattccannnnnngccannnnnnnnnnnnncccat

SEQ ID NO: 7416 - DNA, 538 bp, Canis familiaris
  misc_feature (1)..(538): n = a or c or g or t
tgggcgtgaacgctatgagatgttcaggaanctgaatgaagcctnnnngctgaannntgcccagagtggaaaggagccagggggaagcagggctcactccaggtgagtgacctgggccggcttgcagccccacccccttgccttcatatgttnnanngccacaggattccattctactcctaccttcaaggtggaagggaactgatcccctcatggttggtcccaccctgggcaaacctgcttctaccatacccccagttggatcctgtactcccttttctgcctcgggaggtccccaaaccccttaagggacaagcatgggtgtttgtcatctccagcaacccctagtgccaagtggggtctccaatagggacctgataaccgtgtgggaaaatactggacacagcaggattgggccagacccccagccctgccaaggatgagcagatccgtgtggccttgcatctccccttctggggctcggtttccttgttcatcagatggggtgaggggagaggaagcgaacacacagaagttc

SEQ ID NO: 7417 - DNA, 572 bp, Canis familiaris
  misc_feature (1)..(572): n = a or c or g or t
acataaatgtccctgctgtgtccctgaatgtgtaataagcaagtataataaatattttannnatagttttgttataaatataacttatgagaaaaaaatttgataggaataatactgtatattgctaatttttaactatccctactggcaaaccttatgattcatagactttcctcatatacagtattcagtgcacagaaatcttatgattggttcaagtacagtaagttcagtgatttccaactaaaattctcacatctgagtcagtgtttctagttcttttggctgtatgttcttagtatcagggtttcttatgcccttcattcatctttggggtttgagagcactgtttttgggaaaaagttcagaaatatattaggaaagaatgaaaccgttaaaagttttacttgcagagatactgtaggtgctaatactggatttaaatctttcagatttagtttcttttatggatcttttattcagtaaatcccatcggtctgtgtaatattttaattgtataaaactcctttgttactttatagcctgtaataatgtgtctgtctgccttttaa

SEQ ID NO: 7418 - DNA, 590 bp, Canis familiaris
  misc_feature (1)..(590): n = a or c or g or t
caagaaaaannnaatggaaaaaaaaatgactttgagacctgtaatgggaatgaaagaagcctaccatattcccagtagattaaagaatttaaatgcatttgaagtagaaagaaaaaaaggaataatcaaatagtaactgcttgaacatttttcaaattaaaaaaaatcccttctcagaacattttgtattaagttggttccaaaaaatgtgccttacagtgtttccaagtggtgaaaacattatcctccttggttcactagtagggaattgaaatacaaagaaagttaaagagcctaaaagaggctaaactcagatattttaaatctcaaatgagcaccacatcaaacagatgtgtatgtcttccgaaaggcacattttcctttgtaggagggattggagttccaagggaaatttccgtttatttttcagtagattacacacataaatgctagccacatttgaaaactttttttttttttttcaaattcacttcttttcagtacatattatcattaaaagaaaatttcttcactgttcttactttaaagcaccactggtaattaggaaacaaagctgggaattgatgttt

SEQ ID NO: 7419 - DNA, 537 bp, Canis familiaris
  misc_feature (1)..(537): n = a or c or g or t
caccacattttcctagtaatagaggagacatttctaaaattgtacccagaactgnctacaccaagagcaaagattcgactgccaatcacactttgacttgcgccaaaatactacctaccagctgtttgtcaaagnnnnnnccattcactgcaaggttgaactcctcaatgggccctggacgaactgttgtcattaaaggagaagtgaataaaactgccaaaggctttaatgttgacctagtatcaggaaaatcaaaggatattgctcttcacttgaacccacgcctgaatattanagcatttgtaagaaactcttttcttcacgagtcctggggagaagaagagagaaatattacctgtttcccatttagtcctgggatgtactttgagatgatcatttattgtgatgttagagaattcaaggttgcggtaaatggtgtacacagcctggagtacaaacacagatttaaagagcttagcaatattgacacgctggaaattgatggagatattcatttactggaagtaannagctggt

SEQ ID NO: 7420 - DNA, 596 bp, Canis familiaris
  misc_feature (1)..(596): n = a or c or g or t
ggagggacagacacttcgnnactcaatgcttaagtatccagntagtcaccagcccaggatctttgggggggtcttggagagtgatacaagaagtgaatcctccaaaccagcaccagactggggctcccagagaccttttggtctgtttgatgatatgtggcctgtgaccccccgttctagagccagagaagacaatgatcttgattcgcaggtttcccaggaaggcctcggcccagttctgcagccccagcccaaatcctatttcaagagtgtcacggtgactaagatcactaagccagatgggacagtagaggagcgccggactgtggtggatagtgagggccggacagagaccacagtaacccatcaagaagcagatggcagtcctagagatgatccagaatcaccaacacctccagccctggatgatgcctattccatcctggatttatttctaggacgttggttccggtcccggtagccttgttaaccctcagaggccttcagatcctttccacccttcgctcactgtcagtgggcttagcttctcctgccacctcagggtcttgggtgtatggaacagtgagttgggggta

SEQ ID NO: 7421 - DNA, 477 bp, Canis familiaris
  misc_feature (1)..(477): n = a or c or g or t
taccactcgacaggctctgaccaggaccctgtgnnnaacagannnngcagtnnngtgtggggcagcagcccgtttcagctcacagcgtccctggatgaagacattattgacctgaagtaaacagggtccagatcgaatttgccatctttaattttcttatggaggtttatactcttgaaccagttctgacagcatttctcaacactgtggctttcagcccactcgtgatctactggaccaaaccttccgcacacctggccggtttgggtctctccaatgtccggtgcatctttcttgacctttgtttctttctgttcaggaaccatcagtccccttgtaataaaggtggtagatttcattgaggttttagattgaaactttgaataaatcaaaaatgttcattcttatgtactgcaaccttctcttatattttatatacttagatggaaaaattattttttcattacagttttgatt

SEQ ID NO: 7422 - DNA, 279 bp, Canis familiaris
  misc_feature (1)..(279): n = a or c or g or t
tggggctgtccagatttggtggtggnggtggggcagaagaagtgttatacantctatggtgattgactnattggaaattnaccatcatggaaacagaaatttagggaaggaattctaaatatgttctgggaaggctcccattcatggagttggtttggcagataaatgacttccaggaatgccnaccagaattatatagcaagatgtggatggttgatagactcttttcctgttactgtaacctgatggtgattggagactnnnnncccagagctgggg

SEQ ID NO: 7423 - DNA, 722 bp, Canis familiaris
  misc_feature (1)..(722): n = a or c or g or t
gagagaaagaagacagaaagatataaaaaagagtcagatcgnatnagcaaaaactgggaaaagaaattctacattctcaagaatagctttcatgtccttaaaaatgagatgtttactaggcacacattatttcgtcagtttgcagtacttgctgatacatccttcaattatattaaattgaagcctttattcgtgcagtctaaattgaactcgatgacaggttctacatcttctggaagtgatcatacacctttgatagataaggacctggatgcagtcagtgatcagacattttccccctctttatcaaaagggaggttgtcaggaacactggaagaggagcctttggagaagtcatcgatactccagataaccccagaggacgatatcgatgctcctgagtagtgggccagggcactgggtggtgcagaacgggaccacagagcgggccctccccatcctgtcctaaggcctgcctccctaacaagggatactacctccaaggcgtttctaacatagctgttctgttcccctggatgatgtagactcacttgagacccacgcttgaagtgagaatacatgagcccaccggtgagcacctctctctccaagcccttcaggcaggtgctcactcttgctggatgagccggacacacggactcccaggggctgccaaatccatggtgctttcctgggctctgcagcacgccccaaaagcctta

SEQ ID NO: 7424 - DNA, 573 bp, Canis familiaris
  misc_feature (1)..(573): n = a or c or g or t
ggatcaannntgaaaaaattcctnnaggaatctgtgtcaatgagccctgaagaacgagccagatanntagagaactatnacgctattcgagtcactcatgagaccagtgcccatgaaggtcagactgagtcctcttcgccatcctcatcacagcctcattcnancnnntgcagaacgaaggcctcatcattgtgtcaccatgcatccctgccctgggtcaaacgtaaccatgtaggccctgcaaaggctacnagtccatctctccgtcttcgtcgctggcgacctcttcttgcgcctaccatctatgggtctccattctgttgcaccaagtatagatgaaaaagtagatcttcattttattgcattagttcatgtagatgggcatctctatgaattagatggacggaaaccatttccaattaaccatggggaaactagtgatgaaactttattagaggatgccatagaagtttgcaagaagtttatggaacgtgacnnngatgaattgaggttcaatgcaattgctctatctgcagcatagcttgtcagtaaatggaaannncaaatactgta

SEQ ID NO: 7425 - DNA, 573 bp, Canis familiaris
  misc_feature (1)..(573): n = a or c or g or t
tgagaatgttgagacttaagaatgcttctatgntnntggtngaaattaaaatgttgcangcttcagaaanncaatgtagcagcagctcaaaacannaaacacaggagttaccatatgatccagcaatcccactcctaggtatgtacgcaagaaaaataaaaacacatgtccacacagacttgtacttgaatatgcataacagtgttattcataatagcaaaaaatgaagacaacctaaatgttatcaacagatgaatggataaaaaaactactatgaacaattcattcgtaacaatggaatattattcaaccataagaagaaacaaaatactgatacatattacaacaaggatgaacctcaaaaacgtggagtgaaacaagccggacacataaaacctcatatgatatgatcctatttatatgaaatgtccagaataggcaaatctatagacagattagtggttgcctagagctgagggtggaaatgggttgtgactgaaaatgggcatgagatttctttttcaagtgatggaaatgttctaaaactagattatggtgatggttgcacagctt

SEQ ID NO: 7426 - DNA, 630 bp, Canis familiaris
  misc_feature (1)..(630): n = a or c or g or t
cactctcaggggccaatgnagctgctctcagaccctgaccaagggattgaggtgancggncagtatgagacagagaaggcccagttctcatggatcgaggtgaccctcaagaacctccagctgcaggtccgcgcctcccctgagcacgtggtagtgactcagaaccgaagaaactctgcctacaagtggaaggaaacgctgttctccatgatgcctggcctcaatatgaccatggacaagacggggctcctgctgctcagcagcgcagacaaagtgaccgttggtctgctaccctgggacggccctggagaggggctccggctccttctgcgggacaccgaccgattctccagccacgtcaatgggacccttggccagttttaccaggatgtgctctgggggcccccaacagaggccgatgacagcaagcgaacactgagggttcagggccgtgactactctgccaccagattggtcaagctggattaccaagaaggatccccaggaacagagatttcctgctggtctgtggagctgtagttatgtgggaggggttaagcccaccccccatgccacatgactatgaccagagggccgcccgtggggcctgggctgggacagggagcaata

SEQ ID NO: 7427 - DNA, 671 bp, Canis familiaris
  misc_feature (1)..(671): n = a or c or g or t
ggnctatanctacgagnancgggaacagttccagaagctcatccagctgctgctctcaccgtgaggcnannaggctcccagcaacccccnnnncatcccacccccccagcccttgatnnagaggatgggcaatgtcccaccagcgcaccagcagacagagctgggcctaggtggctctgcctctgccaaccagatggggcctcagagggtgctgggcttcctgcctgaggctggtcctgaaggcctacccccactgtccctaccttctggcaccctttgtcattctgggcttagagatcctagagccccactcggaccctctccctgactgccaaggacaactgacccttgggcccctagccctgttggtttaaacactaagggggtcttcccggccccctggatgggtaccacggccccttccaccctctgccctctctcctggggcgacggcagttggagaaacaggctgttgcccacccatcagcagcctaggctcctggagtggaggcgctatctgactctgcccctcaacacacacccagccacctgcaccccttggagctgccccaccctgcgagtctcctcagctctcaaaggtcactcctgtgacttcagttctttccaacaggaagtggtgggtgaggggggctgggctccaggggccaccc

SEQ ID NO: 7428 - DNA, 526 bp, Canis familiaris
ctctcaaaaccgttaagtttaccttcctaacatctcttgattcaagccacacccactagtcatcaatttacacctggattattgtgacagcctccttctcctctgttccacagccagagttgtctaaaatgtatagttgatcaagtcacttcctggcctacaaccttccatggctccctactgcccgcaggataaagtccagaccccttagcatggcttgcaagacttgtgatgtctggttcccgctcacctctctggcctcatcacttgccaccttgcatcccatgtcccagcctcctgtattccacgatgccactttgattcccctttcttccgctcaccttgggaccttctctgtcacttctctacttaaaatttcacttcctctgagctctgtcccctctccctgcagcacaccacacagatcgctctaggcttacttacctgcttcctggtctatctccccactagactgtacgctccttgagggcagggactgtccttcagtttttgtatcaacaatgcc

SEQ ID NO: 7429 - DNA, 592 bp, Canis familiaris
  misc_feature (1)..(592): n = a or c or g or t
atgttttatatttcacnnaaaaattattctctctctagctcatgaatatggttgatatttccttcataaatgcgnnatagttttgtgtctcacattgaggtttcatcctacttnnaaatgatttcagcatgtggtatgaggtaatttttttgtgtctttatatggttaatctgttgcagcactgtttattgaaaagaccttctattccctactgctttgaagtgccttctccagctatatattgagtgttgatatgtacagacatctctttctggactatttattttgttttatgggtcttcccctgtgccaatatacactctcttcattactctatcttgaaaagaagttttgatatatagtactccaggtcctttcaccttgttattcttcaagagcttgtggcttttcttggttctttgctctttcatatccgttttagaaacagcttgtgaatttcctcctaaagactaagcaaaccaaacacaatgagattttaattggagttgcaatgactctataggccatatggggagaatttacatcattatactgggccttctagtccatgaacatgatatattctcttctt

SEQ ID NO: 7430 - DNA, 627 bp, Canis familiaris
  misc_feature (1)..(627): n = a or c or g or t
ccaactggctctaaaactaaatattacaaagagatagggaatgcgcagtattgcagagtggaattggtcagttcggggtttgaatatttctatgtgactttgaattcctgacttaaccctaagcctcagaaactccatcagtagaacagagattttatagctgcctcccacggttgactctgcctggaacgaagtcaacagacaacaaaagttagctgctgcaaagggatgataaggaacttcttttactttcggggattgggtggcttttatttttttctctgcagcactggggtgggaaatccagtcttactaattctattccagacccatcttccttcctccctgaagggctgagcagacaggcagagtgagtgggcaaatctaccccttcttcctggaatctgcttccttcaccaccaccccttatctgcccagttccctgataacaccctcagtaattgggctgtttggctgcaaatcccaagggagtgaagcttgggacttcccctctgccctcaatccccagagctgtgtgatgtacggtgggtgtgtgagatgcacaaagacaggaccatggctccagggccacttctgcttttagaatactggnnnnnnntttattaa

SEQ ID NO: 7431 - DNA, 419 bp, Canis familiaris
  misc_feature (1)..(419): n = a or c or g or t
cagctgtgacacctgtgggcactctaannggtgtgcccaagagtgcaaactcntgctngacagaatccccccaagttgggagnnaagagactcgacaataacatcggaaggttccaaaggggagtgtccatttctggatgtccacctgtggcnnnctgggcattgatgggactcttgtcagactctccttcacacacttccttcanngtgtcngctgtgtttnnnttgtttccttgacacctggtnnnnnnnnnnnangnnnnnaccttttctgtgcaaggnnnnacccttttaaagagcagatcacttctgtcacagttcctgtggtcatgtgaggcagtttgattaggttcacagactgggtctctcacaacaccaaaatatccagatgtaaactccaaaannnnnacaaaaagaaa

SEQ ID NO: 7432 - DNA, 552 bp, Canis familiaris
ccaaatacagagacagactgatactggtgtccaagtcactagaatttcttgatggaaaagaaattagaaacatggaaagacaattcctaataaattggaaagcatccaaagatgccaagaaaatcagcaagaaaaggaatagtcaaactgaagatgcaagtaactcacacataagtaagcaggctgtcattcattagttgaccacttctaacagaggaatattctcaacaacaacaacaacaacaacaacaacaaaaatgccaagaaataagaggtatttgttaagatttttgatttaagatttttttaacttatttatagttcctaggaaattttacctgtaatgttcacatatgaaaatggtagctactatcaacaaaagctgtgtttggttcatattgagtttgcatcagctatgaaaacagagacatgagggtgggagaaaatatataattttttatctggcaaagtgcatgatattaattatgcaaatggtgaaacaacaaattgtgaaacctaagtcactagtatatttgtttagcagtgcaaaaa

SEQ ID NO: 7433 - DNA, 554 bp, Canis familiaris
  misc_feature (1)..(554): n = a or c or g or t
aagtctaaactgagctagcagccccngcaccctcccttgtccccattccgcttctcgctctggacagacnnacacgggccctgttcagccccccacgctcttgtcccgggctccatggactgccccagtcaacgagactgccggaaacccagttgggccggatgggtgggcgaaagggtgcggtctggggcgagcggacgctccgaggaactggactatctgtctcgcacagnnncgccgcagcggtgggaaggaaaggcaggtgtaaatgatgtattggtttacagggtatatttttgataccttcaatgaattaattcagatgttttacgcaaggaaggactttacccagtattattgctgctgtgctttcgatctctgcttatcgttcaagagacgtgtgcaggccaccaggcagtgagcccatcggccacaggcctgggggggcggggctgcggctcgtgagcaccctgcgccctccctccttcccttccttgggcagaataaacttgatgggtattctgtgaccgccacctgcgcacggcggtggcgtt

SEQ ID NO: 7434 - DNA, 654 bp, Canis familiaris
  misc_feature (1)..(654): n = a or c or g or t
atcgannnagacattgtcatcagagtaangcctatcaggcctataggcatcttctctggttatgtnnacagtcctgagaagacagcagccagcattcgaggggatttttggatacttggagatcgggcaatcaaggatcaagatggctatttccggttcataggccggtcagatgatatcattaactccagtgggtatcggattgggccctcagaggtggagaatgcactgatggagcatcctgctgtaattgagacagctgtaatcagcagcccagaccctgtccgaaaagaggtggtgaaggcatttgtagttctggccccacagtttctgttccacaacctggaccagctcaccaaggagctacagcagcatgtgaagtcagtaacagccccatacaagtacccaaggaaggtggagtttgtttctgagctgcccaagactaacacagggaaaatccagcggaagaagcttcgagacaaagagtggaagacatccaggcaagctgaggcccagtgagacctacatgggcatccctttgggccctnnnnttcttacttccatttccctttggactttctgttttcctctagggatagaagattccttatgacaagacaacttatttctgtctttccctggaaagcacaaaat

SEQ ID NO: 7435 - DNA, 325 bp, Canis familiaris
  misc_feature (1)..(325): n = a or c or g or t
tcccccctttttccncntgttccttgtccagggaaatccanggaaactagnnnnnccagtgaactncnnnnnnnntnnnnnnnngaatgtcccatagacataaaagcatgcatagggtttgcgttcagctgacagcacccgggagggcagccttgggtagaggggttgggaggctcagtccnnggcccctcaacaccagattcctctttttcatcttattcaaagtcctgcctgttctcgctgaaacttccatgtctcccnnnngtcnnngccctaaactggggcaagcaaggccacagctccccagtttccccatccaaannng

SEQ ID NO: 7436 - DNA, 573 bp, Canis familiaris
  misc_feature (1)..(573): n = a or c or g or t
gnnatgtcnctcttcttcctctccntgcttgagaagcactgctccaagatttcccagacgccacagttgtggtgacacttgaatgggncnggatgaggccgtgtggtccacttcttcgtcctctgctcatcttagaatttcggtttccactggtcagtttttagagagaaacgaatttgtccctgtggattagaatgagaggtgggaggctttagaaaccacctgagtacaaagtgatctaaatagctggtctgcagcagtctttcttggagtgcttgatgtggaacccagcttacctgagaggtaaggtgaggtggaggagaccggtgtggtcacaagtgttggcgagacgcttcatttggctctgttgtgtcccagatgtgttttggccacggctctatatgaaacacctgttaacccagtatgacagcactttataacatactagttgataatgccagtctctgattttctagccaacaatccatcatggacgaaaaagcaaagacccatttccaaactcagatgttcttccaatctaactaatgtctggttttcttaaactgtgtggga

SEQ ID NO: 7437 - DNA, 479 bp, Canis familiaris
  misc_feature (1)..(479): n = a or c or g or t
gagccccgggccagacagcnnnggccnnggcnncntccgtccagganngnccttccctcgggnggcnngctccgcgtgtcacgacgccctcgccccaccggnacgcggggccccttcccgcggcagagcgccagcaagctcttccgcccgcccgaggccaccgggacccgcgcgccggagcgtctgcccgccatccccgagaccgggctgtgcctcgaggaccgccaggccaggaaggagcccagggtcctggtgtgcaggaaaaccgtggaccggagctgcccgatggtggcgctctcggtgcagagcacggctgaaagcagattcggcttccgcttcctgccctgcccgccggtcaccgcgggccctaacgtacgggtgtagcgggtgcggggggtgcgaggcacggaggttgggtgcccggaccgaggggcggcgctgggggagagtcgtgggaggcaggccgtgccagctgcatc

SEQ ID NO: 7438 - DNA, 603 bp, Canis familiaris
  misc_feature (1)..(603): n = a or c or g or t
gttcaagaccatnnnnnnnngactttngnnaaaacacccagnngtggaattgctggataatgtgatagttctatttttaatgttctggnnaagctttggtgccaccaggtgcaccagcattttgtctttcacatgccagttccacgtgtgatgtttgtggtgttaacgtcttcttacatatcacattcatttttttatagagattttctctaaagtaagtcttgattccagttgcatcaaatgtgactttgagaaaaagattttaaatgattgaatgtcaataataatagccaaatattttaaagaaaaactaatgtgttaaaaaaaaataaaaccctagacattagaaagctttgtcagggacaatgcaggacaaagtaaattggaaaagctgttgctgaggtgagaggcaggaggagtgggagtgtggggggcagagccagggggccactcaactgtggtacgggcactggggccgtgcgagtcagacttgctgaaggtgtggggcatcttgttaatgttttatgtgtgttatatagtgattacaccttccaagcaataagcaagtgcacggtgatgtcaacgtgggtggttcttctacct

SEQ ID NO: 7439 - DNA, 131 bp, Canis familiaris
  misc_feature (1)..(131): n = a or c or g or t
gtgtgtgatgttaannngcttcaatggtattttggtctgtgttgctttagggtgaattcgtgataaatgtaattcagtgctagcctgtgatttataaatactgtaaatttgtgtagataagagattaagtt

SEQ ID NO: 7440 - DNA, 604 bp, Canis familiaris
  misc_feature (1)..(604): n = a or c or g or t
ctagagctgggtnnnnnnaggtctgnnacagnngctagaagctttgctaaannncatcagatgaggggattttgcaggacaacaggtgagaaccaggcagaagtcgcaaagtagcagcagctctgttacgtggaccgtgttctgctttttaatcctaggcttattcagctcatatgtcggaaattcttacttttgctgatggccaacaaatgtggtaagggaacccaggctattaaaacggctacattgccgccgagaaacgtgccagtgcaggccctgaatcagcctccctctgatgggacagggtatctctcgcttgcttgcttgtcgtacctctcactagacttgcgttttagagttgctcagagactgccagagtgatcgtgattctgctttcaggtaaagaccgcccgcggcactgctgagtgatccgtgaacctctcgacaggtggcgttggcccattctgtttcctaattgcagtgtctgaaaccgttcaccagtgtcccatgtgtacagtaaggccgcatgctaacacgctcttgttcggttctgtgtatctgtaaacagcagtgtgttctctgatggtcacctgccggggcacct

SEQ ID NO: 7441 - DNA, 596 bp, Canis familiaris
  misc_feature (1)..(596): n = a or c or g or t
actgattttagaggaggagaaggatgcttcagatgagttnnatgagcctgccagagaagggcntgcaattgcaggcagcccttccacccctgacacagaggttgctttccagcctcgcccaacctatgcctccagacctcacctggcaggcttgggattggttctgggtggtaaattgaggcagaagaagctaatgaattaaaaaactgaccctcacctcctaaaaccctaaaggccctatcaatgtgtccccatcaatactaccgcagtgcctgagaatggaaacattgtaattctcagttacatctgatcaaacataatgtgaaaatacccaagtatgaaatttataaaaggtttcctgccttgttatcagaagggaaaagagcagaatttccttcctgttgaggtcctattcacatctattttgagtgtgtgacaagcagtaactacatagatctgtagcatgaaagattgattacagtgcttggtgaaaaagtttttttaaaaaatcatattatatgttccatttgatatattagaataacaaggacaacaaaaggttggcatttctctataactgacatttttacatcctc

SEQ ID NO: 7442 - DNA, 367 bp, Canis familiaris
  misc_feature (1)..(367): n = a or c or g or t
ctctcaaggccccagagcccccagcccacctccaccggcctccccaccccctggtgctactctgcctgnnagtccagnntcacccctanngtccctggatgctccagnagcccttcctccacaggcaggtcacgtgggccacccacaggggcaggggaatgctcggggatcccacaactggcccctcttccagcagagtgccccaaaggcnntgcattctcctgccacatcttgctttgtgggtttccttctcttgcccagtcaaaataggtnnnnctcatgtgcctttcctactcaggacctgttccaggtggcgcctgggccaaggctggtcttcagacctgctcccgntnnnnnnctcaaactc

SEQ ID NO: 7443 - DNA, 720 bp, Canis familiaris
  misc_feature (1)..(720): n = a or c or g or t
agtgtcatgcnntccatcagatccactccaaaaatggatttnnngccaaaatgattaagtgttcnnnaaaantaannagttgaaaaannagatattctttctcataaaactgtgactaggcatacactgtagtttttgaaaattatgcaaaagcagctaattgtaacttattccaagtgcatttttcttatttatatcttaaaatatctatgtagcactgctacagaaatctttttaagtttccgtttcaaagcacaatgactaataataccaaagactattttgaaatgtccagatgtagggaaagagatgtttacagtatgatgaaaataattttctaagtaaagtgatatgtgtgtgttttgtaccttaaagatacgcatagctacattcgcacactcacaatttaaaatatttcttctagctttttggggggagggagaaagatttgatattgtatttttttaactacatagaagtggatcaatgaaggtcaagcattggcctttgtgtacaaaccaggaaacttttatagatctagaatttattatataaaaaaatgcaggtaaacttatttgccttttgtttacttatctgtcataggtttccttaaacataaaattaaatgaataaggagaatatttttaacacttcaatatcttggcaaattttaaaatannnnnnagtctgaagcccacnnnacttgaagcacttaaatct

SEQ ID NO: 7444 - DNA, 673 bp, Canis familiaris
gattttataaaagaatttttgtgggtggggggggatagtaaacttcctgagccacttgggtccttcaggagtttctcttcagacaagttttttctctttttaatatataactaatatatatgaatatataaatataactaatgtatgtgagaatggggttggctggctgaggctttggggttggccaggaaaggccagagcatccccttgggccagcactccttccacccctcatcccagggcaggtgcttggaagccaggtgggggtgatcctgtagtcacgaggtgtctgctggctgcctctcagaggtcacgccttctggaatcacaaggaccccccagggtccactccagggagtcccacggcgggggctccagcgcccggtggagcaccctgtggctggaggtgtggaggcctggccatcacgagctctccccatccggactcctcagcggccctgcggctccttgtctgtcccggtgcctcctgtcaccagccggatgagcggggctggtgcagaactaaagagcctgcttgggtcaaaggctccggctctgcctggcgggggttctgattctccacggccaccctgcctctcccactgcgtcccgcccgcatggatgaccagagtggagagcttgcctttggattgagttcccaaatcaatcatct

SEQ ID NO: 7445 - DNA, 493 bp, Canis familiaris
  misc_feature (1)..(493): n = a or c or g or t
tcactgaccgccttccccaagcnnagtgacaacagccgcccaccctccctggatnnagaagagacccttctcccaagcaccttggcacactctgacctctgtcgcccccccaccctcggtggggctgtggctgaaggagactgcagaagctccgtcccctcctccgtttgcacatgatgtcctgcattggatccgcttttgtattttctaaccatccccaaagggggcctggaaggggagacagtggttggcccggctgggcatgctgaccctgagcggacagccccagcccactcttggctatgagatgcactgcccagtttcccttggccaatctgctggcgtggggtaaactgaggcccagagtattagggaaggaggaaggaaggagaagcacccccttcctcttttctttcccctttggttcatggggaggatttgtctttcttgtctgtaagcccttttaccctggtcctgtactgtccagtgaagg

SEQ ID NO: 7446 - DNA, 692 bp, Canis familiaris
  misc_feature (1)..(692): n = a or c or g or t
cctgaanncnaggatgtcagtgcantcgtcgctgatcagaaggtnnagtatannnngggtgagnagtcagaagcccntggccaaaggatgctctnntccgannagctgaacagacagtnggagaagctgctgaaggagggcagcagtaaccagcgggtgtttgactggatagaggccaacctgagtgagcagcaggtagcatccaacacactagttcgagccctcatgacaactgtctgctattctgcaattatctttgagacgcccctccgagtggatgttgcggtgctgaaagctcgagcgaaactgctacagaaatacctgtgtgatgagcagaaggagctgcaggcactctatgccctccaggcccttgtagtgaccttagaacagcctgccaacctgcttcggatgttctttgatgcgctgtatgacgaggatgtggtgaaagaggatgccttctacagctgggagagtagcaaggaccctgctgagcaacagggcaagggcgtggcccttaaatctgtcacagccttcttcaagtggcttcgtgaggcggaggaggaggagtctgaccacaactgagggcgggtggggccggggacttggagccccatggacactcggatggcccggccagccgcccggactgcagggggggcggcagcagcggcggcggtggcagtgggtgcctg

SEQ ID NO: 7447 - DNA, 557 bp, Canis familiaris
  misc_feature (1)..(557): n = a or c or g or t
gcgtgatggctccaagannagcaggtgtgtctcctctgcttgattaaaaatcggttctaaacaaaacagactcaaatacagaccaaactgctggttgctgggggtggggggtgactgaacaggtgacggggcttcaagcatggacttcagttataaaatgcgtagctcggtgatggaaagtactgtggggagtgcagcccatgatcgtgcgccgcgtggaaggtgacaggtgcgggggcgcgagcagcgtacgtggtgggcgagtcggtgccttgtacacctggcccgggccaaccctgggtcagccgtgcttcgataaagtccagttctccgtcttgggagagaacattaaagacgcctgaattcaaattattcttggttgtcgggcccagattttgttttatgctgggaggctgttgctggagccgtatcaggacttcggtatcggccacgacgccaactccacaccttccctctgaggaattccctgactaaaaatccttaattcgcagtgggaattcctctctgggaaagtactttttcttcctggacaccgt

SEQ ID NO: 7448 - DNA, 369 bp, Canis familiaris
  misc_feature (1)..(369): n = a or c or g or t
gggacacctggtggcnngagcccttgctggccgggcttcccagggnnccgaacgctgccccccggctcctggctnnnnntccccgtcacactgccacgcctaacgccggcctcgccagaagnncgggcacgactgcgnnnnngcttactttggctacttgcactgaacaccgtgtggcgtccaagggnnnccacggcccccgcaggtcgcagcctcctggatgnnagccccgagccctgggtctcccgggtgtcccttcacatcccgaggcccctggtgnnnggccccagcactgacgccacccggctgcagggccatggagcaggtgtgggaggccccccgcccgcacattcgcccgcacgttcaccc

SEQ ID NO: 7449 - DNA, 420 bp, Canis familiaris
  misc_feature (1)..(420): n = a or c or g or t
aggagaagaacttgatnctcagagtaatataccnnaaaactaattgagtggaattagagttccacttttaccttattcattgttgattggtgatttnnnnnnngttactttnnagtagggagagaaatgaaagaatttcttgattaattaatcacccagaccaattgtgagatcggaaggattcataaagtaagcattttacagttcttttcctccttgtatttggaggaatgaaaggagggtttcctttcagcgcaccaatctcgtcggttttttaatcaacattcctgttattgtgaacaagattcctttagggcacagaatcacaaatggttacctgaatctcattcttgtttttcacagtagtattaagttttccttactccaattatgaatatactgaaatgtcatgtatgttga

SEQ ID NO: 7450 - DNA, 419 bp, Canis familiaris
  misc_feature (1)..(419): n = a or c or g or t
cggggggcctggctgccccgtgtcgccggcttgcggtnnagggtngatgtggccatctccaccagtgccctggcccgctccctgcagccgagcgtcctgatgcagctgcagctgtcggatgggtcagcctaccgcttcgaggtgcccgccgccaagttccaggagctgcggtacagcgtggcgctggtgctgaaggagatggccgacctggagaagaagtgtgagctcaaactgcaggactgaccgggcttgcagccccaccgcagtcacgtgggaggagccggcccttcctggaggcgtcctcagtgagatgtaagaatctcatcatgtcctactcggttcagttgaggaggttgtattttccctttttattggaaataaagcaacaacaaaaaaagtgtcctgggggatccctgggt

SEQ ID NO: 7451 - DNA, 583 bp, Canis familiaris
  misc_feature (1)..(583): n = a or c or g or t
gcatnnnnnnnnnnnnaggnngcaagtgntnnaagagnnnnncctnnnaccccagccagnnnnnngctaccttttcctgagcgacaacaagttnnccgcggtnncggncggtgccttccgaggtctgcagcagctggacatgcttgacctctccaacaactcgctcaccagcgtgcccaaggggctctggacatccctggggcagcccacccgggacatggaggacggctttgacatctctggtaacccctggatctgtgatcacaacctggacgacctctatcggtggcttgtggccaataaagacaagatgttctccaggaacgacacccgctgcgctcggcccgaagccttgaagggccagacgctcctagaagcagccgagtcacactgaggcctggggctgcggtggggagacgggcctggcaggacgctgcatgctccttggcaaatcattcaccttcagctttccggagctgccggggctggcttggctcacgcttcctaaaacacaccgtgggctctctggcctccttgtaccctcttccnanaatctttccctgggnnnncntggctggcttag

SEQ ID NO: 7452 - DNA, 540 bp, Canis familiaris
  misc_feature (1)..(540): n = a or c or g or t
ttgccaacacgcctgactacttacagctgtcctttgagcnnnngcttngtnacnagtgcacaaagcattcactnnacctactgggccccagtgcttcaatatttgaatctgtatccatatatctgctcacagaataaaacacactgccctagtttttgtggatcgccctcagtttgcttccttgatcttttggcacatgaaagactattcggcccgcccttaaaaagacatatttgaattaattattttcaataataataagtaaaatcctcttggtagcaattgacatcacattagaatttgagtgaggctttggcatttctgctttctcttctctttcaaataattgcacatttctcttgctctgatataaactggatgcgtaatgtctttcctttgagtcattgagtatcattaatatcaagttgtgtagcagagnnnaaaaaaaaaacttgtgatacagtgagtctnnnacaatattacctcagctagaagaggtgtttgtctgtgtgtgnnnaagttgtttttgtccagnnnnnt

SEQ ID NO: 7453 - DNA, 553 bp, Canis familiaris
  misc_feature (1)..(553): n = a or c or g or t
ttagtattttcatcanatcattcttnntacaacacaggnnnggggnaggctaaaaatagctcnntgagtcacatgatggttccaaatgcnnaggctcccagcaaaggtacaagtgcgactccttgtttcctaggaaatgagagtcattgtgatgcctgacgccgggccgctgccaaagccggggctgcttgcaaaggcacattgtttcctgtgacatccctgcgtgcctgcgacaggcagaaggcaggggcacggggtggggggtagtagagccccagaactggctgagccctggcctggtgccctcagaccggagccagaagcttcccgtgccttcaggagtaggagcccccaaggcaagtgcttcatcacacctggaccccccttccatggggagctggcagggaattgctttgccagcaggagagctgggttttctctgctacctacattccctgcccctcactcccctggtcaacaactcgcaactaaaggtgtcttattgtttggtgggggcgggggacacctagctggttctgtcccaagagcacgt

SEQ ID NO: 7454 - DNA, 597 bp, Canis familiaris
  misc_feature (1)..(597): n = a or c or g or t
tcaaactgaagaagagcaaaaagaacagccacagcttttgnngtaacgtgaaaagaacagcctctggatgcttcttcatctctctccaaacctccaacaggtgttcctgttctctgcttaaaataaagatcacaggcagcaagttcacacagtatcattatccttattctcctctaccttagaggggcattcttcacaacaataagtcatgccgaactgctgtatttttacagctactttaacctgtgagaatttaaaagtttttaacactaactgaacagtgcacatgttagggatgatcaaggaagcatttgattatagctgatgttacaaggacacaccaagtctatttttaatgcaccaatcttgtttatagcaaaattttttttccagtattttaatagaattattttataggggatacttgaaaccagtatttaagctttaaattacagtaatactggcatagaaaaaagtagcagatgtttactatatggaattttctgtaatatatttatatactttttcatgaaaatggagttatcagatacatttgtaacttcattatgtttgttatacatcatctcactttgtaaa

SEQ ID NO: 7455 - DNA, 677 bp, Canis familiaris
  misc_feature (1)..(677): n = a or c or g or t
atcaagaaaatnnngctgctattacagatcnnnnagntgtccctttattgtccaaactagcaaatacaaataatgataaactgaggcgtcatctagcagaagctatttcacgttgctgtatgtggggcagaaatagagtggcctttggcgagtacaaagcagtggctccattagtgcgttatctgaaatcaaatgatgccaacgtacatcgagcaacagttcaagccttgtaccagctctcagaagatgcagataactgcatcaccattcacgagaatggtgcggtaaagctactgctgggtatgattgggtcttctgaccaggacctccaggaagccgcagctggatgtatatccaacatacgcagactggctcttgctatagacaaggcaagatacacttgaaatgtgcacagacgttacaaactaccaaattttacatgacagggaacatgtcagtcccatggccaagaagcctagatcaggaagcatgttgagcaaatgttttacagacagataaatgtctgaatgaaaacacaggaattaaaaatgcaaaggatactcttcatccaaaaattgcatagatatttttgttctatttaatattttggggatatgccatgtaatgaaatgtaaagctaataaaattgtgatacttttgtttgtgatgattttaat

SEQ ID NO: 7456 - DNA, 515 bp, Canis familiaris
gctgtatgagaaagagacactgcagtatttccagaccctcaaggctgtggacccgatgcgggcagcgtacctggatgacctgcgcagcaagttcctgctagagaatagcttgctcaagatggagtacgccgaggtgcgcgtgctgcacctcggtcacaaggatctgacggtactctgtcatctggaacagctgctcttggtcactcatctggacctgtcacataatcgtctccgagccctgccccctgccctggctgccctgcgctgccttgaggtcctgcaggccaatgataatgccatagagtccctggacggtgtcactaacctgccccggctgcaggagctctcgctgtgtaacaaccgcctccagcagcgcatggtgctccagcctcttgcctcctgccccaggctggtcctcctcaacctgcagggcaaccccctgtgccaagcagtgggcacctctgagtacctggctgagctcttgcctttggttaacagcatccttgtctaggaga

SEQ ID NO: 7457 - DNA, 504 bp, Canis familiaris
ctcctccaccccacctcctgattgtaggcgaccgggggtaggggtttcagccacctctccttccctcctctttcccctcccccccacgtggccctggcacccacccctcctgccatcccattttcttaggcactgtgggagttgaggtggtccgggatggacagaacagggcgaaatagggagcgagggttacctgcacctctccagatccctggtcctagtctcctgtgtttcccctacactctctgccacaccctacgttcccacggcccggaagaaggccctgaggcgccaggctggagataacagtgtcctgtccctcggcaggatgctgccactcctgccgctgccacctagcctccagcacttcccccttatctccctggaggacctctcttgacccttggcctaaaacgagacaggaggcgggaggggggggcaggctatggagagagaggggtagaggtgggtgggcatggggggcaccctctgtgctggtttttt

SEQ ID NO: 7458 - DNA, 611 bp, Canis familiaris
  misc_feature (1)..(611): n = a or c or g or t
gatatcacnngtaccagcnntgctgccangagcccatcggcccaactnntggagcaagtggctcagctcaagtcnnnnagcgacaccatcgagaagctcaaggatgaggtncttaannagactgtatctcagcgccctnnagccacagtccccaccgactttgccaccttcccctcatcagctttccttagggccaaggaggagcagcaagatgacactgtctacatgggcaaagtgaccttctcgtgtgcagctggccttggacagcgacaccggctggtgctgacccaggagcagctgcaccagcttcatggtcgcctcatctcctaagtgctcatcccacccacttctaccctcagccctgctggtgccactctgcctgctgcacagccctgtcagctagtccccatggtagagctgtgtgtgaacagctgttcttgccctgttcagctttgcctccacctgtcatgccctgtccctgccccattcacttgggttcccctgtttccattccttggcctccagaatttgctgttcagctgctccctccttcctggggggcctcagggcatgtggggggtaggctgagacccaccaccaaaggttcagtg

SEQ ID NO: 7459 - DNA, 575 bp, Canis familiaris
  misc_feature (1)..(575): n = a or c or g or t
ctcatccaccagcngagccggcgnnncagccagagccccttccgccnnagccacgggcaggtgcagcgggtggncttccaccccgtgcggcccttcctgctcgtggcttcgcagcgcagcgtccgtgtctaccacctgctgcgccaggagctcaccaagaagctgagacccaactgcaagtgggtgtccagcctggcggtgcaccctgcaggggacaacatcatctgcggcagctacgacagcaagcttgtgtggtttgacctggacctctcctgtgagccctacagggtgctgcggcatcaccggaaggccctcagggccgtggccttccacacccggtacccactcttcgcctctggctcggatgacgggagtgtcatcgtctgccacgggatggtgtataacgacctgctgcagaacccgctgctggtgcctgtgaaggtgctgcgggggcacacgctgacccgagacctgggggtcctggatgtggccttccaccccacccagccctggatcttctcctccggggccgatggcaccgtgcgcctcttcacctagagccgggccgcctccac

SEQ ID NO: 7460 - DNA, 159 bp, Canis familiaris
  misc_feature (1)..(159): n = a or c or g or t
tnataaaacccatggcttnnnacaaatgtaaattcgctgacagaaagaagtaataaggaaagttttattcatttttgtcttgtaaatgacattaatttctattttttttaaaagattttatttattcatgagacacnnnnnntttgaaaataaaacaca

SEQ ID NO: 7461 - DNA, 661 bp, Canis familiaris
  misc_feature (1)..(661): n = a or c or g or t
cgacaacagtgtcaaaatccaagcnctgaacacacttaaagcttnnnnnggcatcagaaaattcaggcttaaaatgcangaacactccatcaaggtactnnaactgatctccaccatctgggattcnnagctgcacattgcaggcctcagacttctcaacagcctctcactgcccgactatgtacatccacagctgcgacgggtgatgcctgccttgatggagatcctgcagtcagactatatcctggcacaggtgcaagctatacgattgctgagctacttggcacagaaaaacgaccttctctatgatattctcaactgccaggtgcattccaacttcctgaacctgtttcagaccacacagccagggagtctgctgttcgaggtactggtgtttgctgagcggctaagtgagggccggaattcaccccactaccgtgctgtgaagtggcattacaatgaacaatctctgcatgaagctctttttggggatgagtcacgactggcagaccggctgcttgccctggtcatccaccctgaggaggaggttcagatccaggcctgcaaggtcatagtcagcctgcagtgctcccaggatgtgggagtccggccctcctcctgccggcccagtcattcctacttcaatagcggggaataaagt

SEQ ID NO: 7462 - DNA, 355 bp, Canis familiaris
gggcactgcgcggacgcggagcgcggcgggctgtggctccgcccctcggcagagtcggcgccaccatggaggagtaccacaggcactgcgacgaggttggcttcaatgctgatgaagctcacaatattgtgaaggagtgtatagatggggtcttgggtggtgaagattataaccagaacaacatcaaccaatggactgcaagcatagtggaacaatccttaacacatttggttaagttgggaaaagcttataaatatattgtgacctgtgcagtggtccagaggagtgcctatggctttcacacagccagctcatgtttttgggacaccacatctgatggaacctgtaccgtaag

SEQ ID NO: 7463 - DNA, 520 bp, Canis familiaris
  misc_feature (1)..(520): n = a or c or g or t
ccccaccnncgactacctggtganctcccacatccacctgcacgtcnntgagggcgccacccccaannntggcccaagtgccggctgcaccattgtcacggccctgctctccctggccatggaccggccagtacggcccaacctggccatgacgggcgaggtctccctcacgggcaagatcctgccggtgggtggcatcaaggagaagaccatcgcagcaaagcgtgcgggagtgacgtgcatcgtgctgccagccgagaacaagaaggacttctacgacctggcggccttcatcaccgagggcctggaggtccacttcgtggagcactaccgcgagatcttcagcatcgccttccccgaggagcccgcggaggccctggccgtggagcggtgacggcagcccgggctccgctggcacgggcggccgggtggggccacagggcgccgggccggagctctgggcagctgcgccgccaggaggctcaggagaggcccgcgcgcaaggacttggcttaatcac

SEQ ID NO: 7464 - DNA, 488 bp, Canis familiaris
  misc_feature (1)..(488): n = a or c or g or t
ctgtgggctttggtggnnactttgatggtgtctccaggctccccttggggcttgaagacgtgtccaagtacccagacctggtggctgagctactcagnnnnnagtngacagaagcggaggtcaggggtgtcctggccaacaacctgctccgggttttcgaggcagtggaacgggtgagtgatcacacacaaactcccgaggaggagcccatctccctggacaagctgcaggattcctgcaggaccaactatggctactcagaggcccccagcttccaccaccagccaagggtcctgctggcctccctcaccaccgtcctcctcggcctgtgtctcctatgatgctctggggtccggacctcctgggctcctacagctctggggatactgtggccctcagtgcagagagattccaggatgctgctccccatgcacaaagcctgggctctcctgagcaggtacctgggctcacctgaggcagtagggcgt

SEQ ID NO: 7465 - DNA, 471 bp, Canis familiaris
  misc_feature (1)..(471): n = a or c or g or t
tanntagcaacacacttaaattcttttgaagacaattttctgattgtnaaacttcataaatgannagctttattccttatgtctaaaaggattacatgaagtatatataaaaggaattactgtaaactttgccattaacaacttgcatcattaaattgcaaataagagtatattgttttctatctttaactcaaataaagcttataataaacaaatgttacctaaattttatttccagaagtaaaaacgaatacatgtatctgatatattccaacattattagtagtattgattctgcatttactttgtttgttgccatcatgcatttaggagatataagttaaaaagacaataattttacctatgatttcttagacactccttgggcagtaaaaaaattctcccttcagcatattttgcatcttacaagcccatccagaaggattactttaactgaaatgtgattgaaat

SEQ ID NO: 7466 - DNA, 536 bp, Canis familiaris
  misc_feature (1)..(536): n = a or c or g or t
gttaaatttaatatgnnacatancatatatgtatatatagatatataattttaaggtnaaaatattcaatctaaaaaactaccagtttggntcttatttaagtttttgggttattactgcatatggcacaatgtttaacatttacaggatcatctctgggaggaagtagattaagatatttaaaaatagagataatttactgaagcgtctctgacaatcttactagacagcaagcaatatgtaatactgaacaagtatttctttactcagaaacggaacgtggacattttagtacatatagattatttaacttgagttcagcctttttgtgaattttttgaacgtgcagacaattctttggattatattaagtaaggtatacaatatgcatggtttcttaaatttacttttaaaatctaaaaaaaaaatgtctatgaagaatctcaaatgcatagataatatgttaagttctcttggaggtgaaaaaactccaaatannnnaaaacaaaaaaccnnnnagagaatgtagaatttat

SEQ ID NO: 7467 - DNA, 615 bp, Canis familiaris
  misc_feature (1)..(615): n = a or c or g or t
caatctataaaaannaaaagccgactggttccatatttctccctggaggtccccttggggaagttgngctggtatttacaaggtcaggttaaagcagannnacgatggaaaatactggcnaggtcccaaaagacagtcccaggccataggaatggcgtgatgcagttggaatgagtgatgaatcaagaaattttccttgcaactcatcttaaggatagacagcctgtgtctcttgctgtgcctcgtgctaatgtcttcctttattgaagcttgctgatgcatttgtacatagtctatatataggtatagatatattatatatacaaatataaaacatctcactacatccactccaaaagttacactgggtgttgagggaaaaaccatcatttctcagtgttttgagttgattcaccaaaggcaaattatggaatgttcttactgctttttgtgcacttggaggagaaaactcagctacttatgcactttctgggttttctgtgctgcagggtggttggagggggtggtggggagaacaacttcgatggtcctctgtgacccagctgctgtgatgtgtctgctttggggagcaggctgtgttttctttgcagtttg

SEQ ID NO: 7468 - DNA, 614 bp, Canis familiaris
  misc_feature (1)..(614): n = a or c or g or t
aaccccaaatganatcntgagagattctgtgtagaagaaagtatannannaggtnnnagcaaagtgtgcagaggctgcggcacagtatcttccaggtcaatgggctgcacatanncggttatcctggccctccctgccaggaaatgtgctctgcaacatcctctcaacaaaaacataatagggacaagtttgaaaaacagcaattgaaagtcagtgtgttcttgtaaaaatgaatacatccgtagggttttaacacttccattacttgaataattctgtgggccttctgagtttaatggccattttttttttccaatttactttccttcctcatgctgtttctcccagtgctgcctttttttttttatttcatagatgatatttaaattgttacgttacctatgtataacctccgttgaacgcagttttcttatcgatgttatcaccgttaacacttgacatgggtttttttttctccttttcctggaagatttgtcatttctctactttatacacagtatttatgtacataatgttgtcatttccttacagtgttttgttgttgatgtcgtagggtctttttgatttaatctttttaagaaagagtaaagctg

SEQ ID NO: 7469 - DNA, 187 bp, Canis familiaris
ggggggggggggggcttcctgccctgtgccaggtgtaaccaatcccctcctgtaatcaggaaaccaaatgtcaccttcccagagaaactttatttttcacaaagccgaagtgcaaaacatagatgaccatttttaataagcacaatcaaatttttaaccacagaatgtctacaagaattatagcttt

SEQ ID NO: 7470 - DNA, 530 bp, Canis familiaris
  misc_feature (1)..(530): n = a or c or g or t
gttccattggannagtcaagtatgtggttcattctcagaaccaagggaaatcctgctttcacctgttacctatttgctgaccnnctggtgctctcggaggggggcccacttgggtctaaggttaggccctgatgcttgcctggttcttaagttgcaggtgtcttgtttcctccctgagaaattcagggctgagggttcagggagcatttcctttgcctggaagttgtcaccgtgatgttgttgtgtgctgtgtctttctctgtttctgtccatcccattgctggtgaccctgtaaaagtggcctttgggaaagattaaaaggaaatgctggtgctggctctcagtccaggcaggtctctgcccacctcagggctgggtgtgggggtgcccccactcagccaggagggggcagctttcctgtcctagggacctgttgtgtattttgatctcctgtgtatgcaaatgtatgaatttaccattgtaagtggggtgaggggaaggtgtctgaccttggtgttcaaaacaactgt

SEQ ID NO: 7471 - DNA, 470 bp, Canis familiaris
  misc_feature (1)..(470): n = a or c or g or t
aggactgcagatctgacgtgtgaagcagtattaccagatcnnaaggcaactccaggacgctgaggggccttccggcttctccaggaacaagacccagggcaggcagaaggcgacactggcaaggctgagtgggatctgctccctgacactttttaaaggccaatcaatgcaatgtttttcttttgtttgtttgtttttggagtaagccatcacaacacaggttctataccatatttttagtaacatttgaggatattgtaggtacactttactataacattttgtagtttaaagagctttattaatgcaataaattaactttgtacacatttttatatatataaaaaaaacctagcaagggatttcagaatgttgtaggcctcattagagcttggtctccaaaaacctgtttgaaaaaggcaacatgttcttcacaatgttctcctataaaggaaatacagatttcatca

SEQ ID NO: 7472 - DNA, 421 bp, Canis familiaris
  misc_feature (1)..(421): n = a or c or g or t
aagatgtctctgaacgnncagcgtggnnagtgctggtgcgtgaaccccaacactnnnnnnctgatccagnnagcccccaccatccggggggaccccgagtgtcacctcttctacaacgagcagcannaggctcgtggggtacacagccagcggatgcagtaaaaccacagccagccggtgccgggcaccccctgcccccaccccctctccaaacactggcagagggaggagagccttgcgtggtgggtggggagggttttccaggagtgttgacacgtgtatttatatttggaaagagaccagcaccgagctcggcacagccccgccttccccctccccggcgccctcgccttctcctatccctgctggggagggagggtgcttnnnngggtggagttggggtnnnngttggggagggggg

SEQ ID NO: 7473 - DNA, 419 bp, Canis familiaris
  misc_feature (1)..(419): n = a or c or g or t
gnggaagaggatgaggttatgnctaagacgactccttgagttggtccttcagataagaaccatcatggtgagagaatagacacttgcactaggggtcagaatacactatggatgaaattcttcacatgttttaaatggaacgaatttgtttaatataataaagtttgctacttatctgtacgtaggttgctaaaaaggattttcttaactcagattttaagccaaataaccatttaacactagtacatgttaaatggggtatttttctgtatttgtatgtttcactatcataagggaactaaggataatgttcattgagaatattttgaaaaataatcagttgactcaaattttatttcttggtcttttgctgtttaaatgatgattttgaaagattacannnntactgttggtattgt

SEQ ID NO: 7474 - DNA, 591 bp, Canis familiaris
  misc_feature (1)..(591): n = a or c or g or t
cacacagtnntactnnnacaccaaccccactcgggctcagggatactctggcctttccgtgaaagtcgtgaactctaccaccgggccaggcgagcacntgcggaatgccctgtggcacacaggaaacacccctggccaggtgcgcactctgtggcatgaccctcgacacataggctggaaagatttcactgcctacagatggcgtctcagccaccggcccaagacgggtttcattcgcgtggtgatgtatgaagggaagaaaatcatggctgattcaggacccatctatgacaaaacttatgctggtggtaggctagggttgttcgtcttctctcaagaaatggtgttcttctctgannnnaaatacgaatgcagagattcctaatcaaactgttgatcaaaagactgatcctaaccaatgctggtgttgcaccttctggaaccacgggcttaagaaaacccccaggatcactcctccctgccttttctctgcttgcatatcattgtggacacctagaatacgggacttgcctcgagaccatgcnnnnntccaaatcagactnnnnnngtagcctctgaacgcgaagagaa

SEQ ID NO: 7475 - DNA, 437 bp, Canis familiaris
  misc_feature (1)..(437): n = a or c or g or t
agaccttgtctccatttccattagagaatgctgcttgcatgtgtttgagaagatcttctaaatggaatgcttgttgcactgttagccgggcgaggggctgccactagaccagaggaccacactcagtgggccaatcatgtccttcaccactgtgccttagaatcacccagagagaaccttccagggcagaggggaaagcagatcccaggcctcatgcaggcctcaggttctttgggtggggcagcctgtctgggcccttcctcagaaccctcctctccattctcatcctcttcctccacgagtgtnnntctcagagctcttcgattgtgacgccatgctggtcatcatcaatcataactaacaggctcacccttgcctgtcgacctcaccgcccaacatgaagaactgtgacgcaaatnnntacggaaagagcttag

SEQ ID NO: 7476 - DNA, 511 bp, Canis familiaris
  misc_feature (1)..(511): n = a or c or g or t
cttccagagtgagacatgggnntgnngagttttcctgctgacctcagnnactnnngccactgctctctggggggggggggggcacaccatcacctcccaacttgtcccctgtgcaaccttgcactccagtcagcctggggtcctctactcagccctgacacaccactgcccattcaccacccgaccctgcccctgtccagggttccagcctacctctcgcctttcccactggccccaacttgggtcctggtcagggtagtccctgggttccccccctgcacaggacagtggctgagaaaggacccgggagcctggggagccttaggaggtgggacggggtcttgaggagtgccacacgccaccgctctttgccttaggagaccgcaggttcccagtcaccctgtgccacatctgtgtgccctgccacaaagtgcatggcttgggctcaggctggaggtcagcaaggaccagagccccagggggaggaggcccccagccagcacaggctctc

SEQ ID NO: 7477 - DNA, 498 bp, Canis familiaris
  misc_feature (1)..(498): n = a or c or g or t
antagtcgagatgcattatattcttgaactgttttgtattgatgagtaaacatttttatgattgctaaaaatgagaataagcaaataggaaatttcaaatactaagtgtttttttattgtgattagtacaaattttaaatcgtgattttgcttaaattccaaggctggatttcatttgacaaaccatgattttcagtccccctttaaattccttgctattcagaactgtttatcatcattggttttgggttttttgtatgcaagcttttatgacagcaatataatttgcttcatttagtttgggctcttatttaaaagccatttatactaaattttggattttgttataaaacttccaatttgtattgtgaactaattttcaagatttgccctcatagtatttatcttaatgaatttcacatatcattctcttgtnnngccagtactaccacaataatgctatcacggtgccaaggaattgtgactgtaattcttcta

SEQ ID NO: 7478 - DNA, 382 bp, Canis familiaris
  misc_feature (1)..(382): n = a or c or g or t
gctnnctgagaggtnncaggggnnnnnccccgcacagcacctgcagcagcaggcgcttgccccgtcgtccctcagacaggnnctgggnctatcgtccgcccaccctcctggaattgcccggagccccatggtctgtgggatgcgtgcttccgacgtccgtgacacctgggccagtccgccgtgctgcaggtcacatgggcccgctgtgcctcctgggtggccagactcgatttctcccgtcgtactcgccctgtgtggcctgggacctgtgggccaaaagggcagctgcatgcacgccggctctcggacaggctcagagatgaccatctggccatccatcttccgttgcgctaacaccccttctcccctcagtcaatatgtc

SEQ ID NO: 7479 - DNA, 505 bp, Canis familiaris
  misc_feature (1)..(505): n = a or c or g or t
cccagnngcggtgagctnnacctggggcagattgagaacaattgaccccaggcaggtgggttgggtatccggnnnnntcccagcacatggacagaagcagggctgtgcataactttaaacattaggtctcattttgatctagtcttccctaaagatgtgttttggatttttatggcttttatgcttttagagagagctgctccattttgaatgaatnnntagaagggcnnnnnatggaatggaggcccatgggctgatcccaatgtgggtttgtgggtttgtgttccttttgtaaaatgcctgccgggcagagtccaggagannngggtgggaggnnngggcggcggggnnnggacaggggattcaggtgggtggnnnaggaggtccaggtagagggtccaggcaagggggtccagatggcagnnngggtgaggtgtctggcccctccagtngnctctgtcctccatgtgtgcctgcctccttctgtctgccctttgggggcggt

SEQ ID NO: 7480 - DNA, 640 bp, Canis familiaris
  misc_feature (1)..(640): n = a or c or g or t
gtttgataattagttatncttcagtgaatatttctgtgtatagtaaaaatgaagcattgaaaagactaggaaaaatgcatcaaatattagttctgcaggttatagaattatattttcatataattaaaaatttgttatgaacatcttactttccattaacaaatttgtaatacatgacaagtggctgggagagtagcttcagttaaaattgtgcggtgtagtttgaatatttgaagaacagaaaaccctctttttaaaattagaaataagtcatacttcaataacattttcttcagtactcagttaatattaaggggaagtttttgtcatggaatggctctgggatgtgatattgattggtagaattgaaaaatgtagcatcataaagaagtcacaaccagtttctggaatttttcctctgtaacttcctatacaggtatcttctaaatgttggttctttccctcagcccctttaaaattgttatctgtgcacttctctatatattcttttgtttcccaagcttcgtttattgattctgtcaaattcccaaatataacttcttccattagatttagaatattcacactgatcatgtccagagtacttactgatatattttgtcaatgaccactgttctgt

SEQ ID NO: 7481 - DNA, 597 bp, Canis familiaris
  misc_feature (1)..(597): n = a or c or g or t
gtcaaagcacagctgattgaagaatgggcaaactctgtgaagaaacaaaaagtggaagtgtacctgcccaggttcacagtggagcaggaaattgatttaaaggaggttttgaaggctcttggaataactgaagttttcatcaaaaatgcaaatttgacagctttgtctgataacaaggagattttcctttccaaagcaattcacaagtccttcatcgaggttaatgaagaaggctcagaagctgctgcaacctcaggaatgattgcaattagtaggatggctgtgctgtatcctcaagttattgtggaccatccatttttctttcttatcaggaacaggagaacaggtacagtcctattcatgggacgagtcatgcatcctgaaacaatgaacacaagtggacatgattttgaggaactttaaatcatttcgtatgcaaaagagtaaccacacactatgtttgcaactggtatatttaagatttgtgttttacactatatcttatgataatatttaaaaatagttccagataaaacaatgtatgtaaattataagccaacctgtcaaggaatgttatcagtatnnnnnnggtaatag

SEQ ID NO: 7482 - DNA, 563 bp, Canis familiaris
  misc_feature (1)..(563): n = a or c or g or t
agagaagattgcagagcnnnntactagcactcaggaaataattaaaagctgggccaatgcaatgaaggaaatcatttctgactaccaccagcagttcagatataaactacaggattttttagaccaactctctgattactatgaaaaattcattactgagtccaaaagattgattgacctgtccattcaaaattaccacatgtttctgagatatatcactgaattactgaaagagctacaatcggccacagtcaataacatgatcccctacataaaagtttctccaggagaatttactatcaccttataattcttatagcaatttcatttattcttctgttccaattaaactttcatacagtaggagaaaattcaaactgtatgtattgataaaaccatacactgagccagccttatggcaagcagctaactataggcagaagcatgtatgaactggatctgcactaaagctggaataagatctctaaaggtctctcaactctgggaaataacttttttttttttttgcaagttaaagaaaatcaggatctgagttcttttac

SEQ ID NO: 7483 - DNA, 664 bp, Canis familiaris
  misc_feature (1)..(664): n = a or c or g or t
cactgtgcagnnagcaggctcngnctctcgactactggcttgccaaggcagagtnctattacaataagaggatagtngatatgatgaaagaacaagacacaggccatgaaaagaaattggagggaaggatgacccaaaacctagagaaactgaagcggtattactcggttcctgaccgggagttgaagcacatagagaggcacatacaccgcgtggggcaggtcagagagctcaagaacaaagcaggccggcacctaccacggcctagtgaaacaaagttcccgaggatcctgccagaagagcgtggtgtcctgggcacacagaggaggaagcaggtaagcgagcgggagcagatacagatcaaagatcaccagcagcgcatgctccagggaagagaggtcctggagcagaggctccaggaaggagtcctgagacaaggccggagccagaggcccacacgtgaccggtgtgcaagagccgagaaagaaaccaaagagtttgaaagtgttaccgtataccctctcttccaaccatgcagtcagagtcggattaaagtgaacattctcatggaaaagaatagagaggaagccattaccattataaaaccacatcaaagaaaattcttnnnnntgccgccctttctgcgaagccaaataggaaaaat

SEQ ID NO: 7484 - DNA, 514 bp, Canis familiaris
  misc_feature (1)..(514): n = a or c or g or t
ctaccgggaccccacacanntgctcccgaagaaaggtttcctngatgcccgaangagcaggnntattgggaagaannaaatgattcagaggtctaaacgaatttatgagcagcttccagaagtgcagagaaagagagaagaggaaaagaggagattggaatataagtcataccggctgcgagctcagctattcaagaagaaagtgaccaatcaactcttggggagaaaagttccctggaactgataaaagattattttcctcagaatcttggaattatattttatcaacctgaagaagcacaatccttacttttatgagtctggtttaataaaacttaactcgttgtccatgtgtaatttagaagtagtaacctgaagagtctgagaccgattggtgattaagattattaatggtttggtagcagtactttctccacagtggccctgcccacaggaatgtttgtcacaatgatatcatttctgaactnnnnnnncaaataagtccctttttgta

SEQ ID NO: 7485 - DNA, 536 bp, Canis familiaris
  misc_feature (1)..(536): n = a or c or g or t
tgagcttgactgtnntnnnnnagtcaggggcaaatgggcatagggtgactctggcttaagagcacatgaggcctgtgcaggggggcgaagggtgcactgccacgacagctgctgctgtgcctgaggagtcatccatccctttacctgcagcatgtccctctcctttctttttgtcctccctggctggtnnaggctgcatacaaatgccgccacctccctgaaacccgcctacaggggctagagtcagcctctttcctgagggcaaagttattagttgctcatgcaaagtnnnntaaccagagctgtagtcctgtgacccagagcacccggacacagggctacgtacttccaggacaatggacagaggctgtgccagggagcagggctgtcctttccagcatcacggcagtctgtcacgctgcattttcaacagcacaatcgtcagcccctcccagtnnnntgcactgtccaaagatggctgccactgggcnnctgcaagggaggccgggctgagcagaggtgggatcttagcagca

SEQ ID NO: 7486 - DNA, 512 bp, Canis familiaris
  misc_feature (1)..(512): n = a or c or g or t
tgtcttgcccaacntggctcgtcccccaggctcttcagactnnngnnncnnnnntgctgaccccacagaatgtccagaccctccgctccannntgggtgttagaatctccagcagagccccactcagcccaaggtcagatgagacgcatctggtntctgctgtaggaagggggcacagcatcctgtgctcatgtgtgtgctggagacgatcccgcgtgcggcctgtgtccccgcgcccctcggggcacagctcctgtccacagtgctcacctttttgtcaaatctttgtttttagtaaccaggacgcccttcttccttttttaaaatgatctttgtagttgatttgtctgaactgtggctattgtgcattctctgaataatcacttgtgaaaattgtcgctgctcgaagctatttcctttactctcgttgagcgactgttggtttgggtcctggtgtgactccaagagcagattggaaagagcccaagcacagacttggtgctaccggnnnt

SEQ ID NO: 7487 - DNA, 341 bp, Canis familiaris
  misc_feature (1)..(341): n = a or c or g or t
aggtcatangatattctgatacccctaganatcttgatgcattgatttcctagtcattaccccccttatctgggaagagataannnnntgccagacttcaagtgtttgatttaccatgaaaaattgggaaagggcagttatgccatttcttatatttttgttcccagttggcccatcttgctttcctcctctcttaggatcggaatgcggggtngnnagctgatgnnnngcatcgnnaaaaccatgatgcagagtnnnggcacatttggcacattcatggccatcgggatgggcatccgatgctaatctgggcagtggttgcccatacacctaccctttcc

SEQ ID NO: 7488 - DNA, 564 bp, Canis familiaris
  misc_feature (1)..(564): n = a or c or g or t
cggtgcnnnacgacagcagccccacannnnngcagnnngccacannaccacctgnnntctctcnagnnncngagaaccagaacnggaatggactgagtgccccacnnnnncctggtggtggnccacacccacctcacgtaccctcgcacccccccagcacccgaattacccgaagccagcccaaccacacacctgccggccctcctggcccctccagcaaccctgtcagtaacggcaaagaaacccggaggagcagcaagagatagcaagacgttcttcgtcccttcccaccacccaccataacccaggtgtctcctggagaacacagcctcctactaggctgctggcttttggggggtggggtggggtggctgggtaggtagcagtattttagtcactaaatttcattgcaggggtagggagctgaggcctttagccaccctaagcccatactccctgccttgcccagctgaagctgcctatcccctgggattgaaggccctttgcctgccctccttccttttagaaaccacagtcacagtctgtttccaatgtgtgtgatgt

SEQ ID NO: 7489 - DNA, 555 bp, Canis familiaris
  misc_feature (1)..(555): n = a or c or g or t
aaccagattccntactagtacttaatcagataataacaaacatgattcttgcactactttttagggaaaggcgggaggggctgggcctagcaacaaaatctggccttgccagacattacaaagccaagcagcaaagcagcagctgccagcttccagtcattttctgcagttggacccttccctattgtcttatgcctgtagagccacgtgaagacaagtgacactgtcacactcacagaggttaggagggtttgggtccactacctgctgatgacctttctagggtctgtcttcttgtataacgaaacagatgttaatgtcccttatgcatttaacagattcataatatttgctctaacatgtaccctcattttcagggctgcaccaccctcatgcacccagggcagttcttgtcccaggatttccgagccttttccttttaagaatgacaggttaaatgaagttaagcccaactcaggaaccttttaggcctgacactgggaaagatactgccccataacagcagagtgctcaagctcatggtaactgttactt

SEQ ID NO: 7490 - DNA, 540 bp, Canis familiaris
  misc_feature (1)..(540): n = a or c or g or t
tcatggcttccaccagctacnngnnctcccangtnncagaaatgttcaaccagggcagagcctttgccacagttcgcctgcctttctgtggccacaagaacatctgctcactggccacaattcagaagattccccgactactggtgggagcttccgacgggtacttgtacatgtataacctggacccccaggaaggaggcgagtgtaccctgatgaaacagcacaagttggatggaagcatggagacaaccaatgaaatcttagactcagcctctcacgactgccccttagtgactcagacctacaacacagctgtcgccacaggtactcatgtgccttcatctccgaccagacttgcctacggagacgagctgggggccgtgggcggcgcatgtctggaagaggaggccagcgctctgcggctggaggaggacagcgagcatcctcctatgattcttcggacggactgaacttgacctgtgaactctgacccccggagcagagaacactggcttgatggaggactttgtgttatgctgc

SEQ ID NO: 7491 - DNA, 620 bp, Canis familiaris
  misc_feature (1)..(620): n = a or c or g or t
caggaccctttcttngatatgcacatgatggtgtccaggccggnncagtgggtaaaaccaatggctgtagcannagncaatcaatacacctttcatcttgaggcaaccgaaaacccaggggctttgattaaagacattcgggagaatgggatgaaggttggtcttgccatcaaaccaggaactacagttgagtatttggcaccatgggctaatcagatagatatggccttggttatgacagtggaacctgggtttggagggcagaaattcatggaagatatgatgccgaaggtgcattggttgagaacgcagtttccatctttggacatagaagttgatggtggagtaggtcctgacaccatccataagtgtgcagaggcaggagctaacatgattgtgtctggcagtgccattatgaggagcgatgaccccagatctgtgatcaacctgttaagaaatgtttgctcagaagctgctcagaaacgttctcttgatcgatgaaaccacaaggagtccagtgtttatgcttatgaaatctttttactggaagacaagaatatagactaccaaacctatcacggttgaagcagtgctattttcctgagcagctgttcattcca

SEQ ID NO: 7492 - DNA, 585 bp, Canis familiaris
  misc_feature (1)..(585): n = a or c or g or t
gctgnccatgacatcacggtnnnntaccctcacaatattcctcagacagagannnnnntcctnntcnnagacttccccaannagatccacttccacgtgcgcaggtacccagtagatgccctccccacatccgcagagganntccagctctggtgccacagacggtgggaggaaaaggaagagaggctgcgctccttctatcaaggggagaagaattttcactttaccggacagactgtaattccaccttgcaagactgaactcagggtcctggtggtcaaattgctctccataatttactggaccctattcagccctgcaatgtgcctcctcatatatctctacagtcttgttcggtggtattttatcatcaccattgttctctttgtgctgcaagaaagaatatttggtggactggagatcattgaacttgcatgttaccggttttttcacaaacagccgcatttaaatgcgaagaaaaatgagtgagatcatgaggttcacagtgtgatagccaaggggatattttggaaatgtgtttgagcctttgtaaacggagacgcatttttgcatgactatgtcaaa

SEQ ID NO: 7493 - DNA, 563 bp, Canis familiaris
  misc_feature (1)..(563): n = a or c or g or t
tacattaaatgaggtagcaatgatntaatgagacaaatttgatcaacttgtagaggttaatttctccttgtcatagctttatattagncagtttcttgaaaggggctggttcactnnaggtcacctcccagcagagaattaaacaccttttaaaaaatattaattccttcagattttgaaggtgataattagtaacctgctccaaagaaataaatgatgacctggccatttttaagtcattgtatggctcaccaaaagttcacatttataccttgagctttttaataatcagaatttaattaggattgaattgtaaaaaaatgaaggtggcatagccagtccccattattaaagtatattcctgacaatgttactgattttttaaaaaaccttccagtatgtagaagtcacaatgatttgttgaactggcgtgttaagtcactgatttaggcagcagtannaagagaatattattaagagtgaagaaatatttcagtctggaatattgaaaccagcctttgttgaattccattcataaatgctgcccattttcccctccatac

SEQ ID NO: 7494 - DNA, 618 bp, Canis familiaris
  misc_feature (1)..(618): n = a or c or g or t
tcccangcagctgagacatcggcatcntgggnnctgcagaggcatgtactaagngnnnncnnnnngatgccattcctgcccatgtgggccatgatccttatcaggatggatggtccttgcttctaccctgtatggagtggcctctcgtacctgacggttgagttctgttgttctaagccaggcattgaatggggctcctgcctttctgctggaccacaggtggtcacagctgcagcctgggcccagcaggctaccagcttgttaacccagagccctcccccctctgcctgccaggggcttggttctcaccacccaccctgttgacctctgttttcagaagtgtgtgtaaattattcactgctgagaatcattgtcttttgtataaatgtttgttcagaaaaggaaagcacagtctgaacagttgaaaggttcaccgtccagccagagtaaaacacactgtccccccagcctcagcttgtaggatgtgcgggctccatgtgtttccagatccttccactgtggtaagacaggctaatggagaaaacttaggaatggtttcctttttgttttccttcataatttactaaaataaagcatctataactgtctgatctaaga

SEQ ID NO: 7495 - DNA, 509 bp, Canis familiaris
actgcatgatcccaagaccctgagatcgctgaccccagccaaagtcaagagttggccacccaactgactgatcccaggaccccgagatcgctgaccccagccgaagtcaagagttggccacccaactgactgatcccaggaccccgagattgctgaccccagctgaagtcaagagttggccacccaactgactgatcccaggaccccgagatcgctgaccccagccgaagtcaagagttggccacccaactgactgatcccaagaccctgagatcgctgaccccagccgaagtcaagagttggccacccaactgcatgatcccaagaccccgagatcgctgaccccacccgaagtcaagagttgccacccaactgaatgatcccacaaccctgagatcatggaccccagccaaagtcaagagttgggcaccaaactgatcctaggacctcgagaacactgacctcagcccaagtcaggagttggctgccccactgactgagccccccag

SEQ ID NO: 7496 - DNA, 611 bp, Canis familiaris
  misc_feature (1)..(611): n = a or c or g or t
cggcnngtggtgcacacacgtgtccagcccgggcacgtttcntgtnnannagcnggcgcgtnnacnnggctgnnnnnncacccactgctgggctgcacaagtggctactgtgcgcgggccctggggacacagccacgaagacggaccctggtgccccacgccccgggtggccagagccgttgccctccccaggccggcaggctcctcacggcaaccccacgaggggggcagtgccagggtggtgaatgtccccacttacgcacgagcaaacaggtgcagggagaccaggagcttggccccactggtcccgagtccaggcctcaggcctgcccctgcaccccgcaccacctggacgcccacggctatgccagaacgcgacccgcccgcccccaggaatgggccccggtagggctgctgcgagggcccgggtctgacggctctggccaggccctgcacctgggcctgccccccacagcccccgccccacgggctgctcaccccactaaccagctctcctctcttttgactttcagaccagttgttaaattgtccgcctccgccaagggccccctgggtgtgtaatgtccaggcccccaccctgactctgtccc

SEQ ID NO: 7497 - DNA, 529 bp, Canis familiaris
  misc_feature (1)..(529): n = a or c or g or t
gtaccaaagtcnnnggctcagataaagccaaagctaaaattgcttgtnnngctgggattgtattcatactgtcagggttatgttcaatgactggctgttccctgtatgcaaacaaaatcacaacggagttctttgatcctctctatgttgagcagaagtatgaattaggagctgctttgtttattggatgggcaggagcttcactctgcataattggtggtgtcatattctgcttttcaatatctgacaacaacaaaccccccaggatgggatatgcatacaatggtgccacatccgttctgtcttctcggacaaagtatcctggtgcagaaggagattttaaaaccacaaacccttcaaaacagtttgataaaaatgcttatgtctgaaaagagcactgctgcaagctgtcttataaaagtgaactgttcacacaatgatcccctcaaagccctcctctaatccgcactcaaactatttttaaaatannnnnttggagaattttcnnnnngtatggctgtaaatgttc

SEQ ID NO: 7498 - DNA, 712 bp, Canis familiaris
  misc_feature (1)..(712): n = a or c or g or t
agtctcttgtaaactctatggtnctgggtttgngcannattttcccctagaataccacagaataactgtcaagttccccacctcattctggggctagggtgggtgaccagccctgatttgtgcctctcgtttggggacaggatcctttccctttcttgctttggggcttcttgagagttcagagtacccactatagtttggctcttaaggtatagctttctgtatttgctgggttttgtttggggcccctggaccctgtgctttctggtttctcttgcctcatttagggagcatctcacaacacaattgtttatatctggtggttggactagccacaggccgcctctagatctggaaccaggccaagccagggctttgtaagggtaagaggaacactgagcaattcaggggccagctactgtgagtttgttgctaagctttgagctgtcagagaaacatcttgaacctcaatcttgggtctgaatgagactctttaagtgtttttacaattttgtgtcttatttatggaatgatgtatcccttccattcagagcagccccacccagccatcctctcagcctctgggctcgttcctgcctcctaaaagcagagctgtctggttggtctccaccctgtgttgggagcccagccaccatgctcacgggtatttttcctcaaagtttataagcagttatttatatgaatccttgtt

SEQ ID NO: 7499 - DNA, 452 bp, Canis familiaris
  misc_feature (1)..(452): n = a or c or g or t
caggtctccaggnnnaaagcagtctcctgcatcagctttccggtcctcttcctctttgaggaagaagactcacncngcggagaaagaactcccaccctggcgatccnnngataagcacccaactgatatcattcgcttcaattatctggacaactgtgaccccattgagcaaatctggcaagggaggaggaaaagacatgaaatgaacccagatttcagtcgacagtcacgtgataagaaaaataaattgcaggacagannnaggctaagaaaagcgcagtnactgatatccctaagnncagaacccagcgcccctctacaagttcccactcatcttgcttggtctcctcattggtgggcagggctcccagccaccgaagcnncaacganaatcctcatgcagcatcttcagaggcacnnnggacttcaggctttacccagctaggctcctg

SEQ ID NO: 7500 - DNA, 534 bp, Canis familiaris
  misc_feature (1)..(534): n = a or c or g or t
aaaaaaaaaacacacacacacacaactaaaatgtggctctctaggattgnnnacacagatttagatcttctagagaaaatgtagaaagtaatagtcatgatcggtaaatgtgcctctggctgcaacatgatcactataaggtgaaacccaggcttcttacgttctcaaaggccctgaaggccctggaacttgcccacctttttggccttgtctcctaactgctcttccattcctggaacgttccactcttaagtacatttgtaactgtcagaacatgccttgctcctttgtgctccggtgccactcactgcacacattaatttcctcctgacccacgagcaaaactcttacccatccatgaaaccctaaggtgccatcacttggtctatgaaatctcaactggccgatctcccaccaccatgtcaagccccatcaccccctcatcagtctgtcaccacccctcaattattgtatttacattgctttgtaattacttgcccacacatgtatctacacttttgataatttatgtat

SEQ ID NO: 7501 - DNA, 531 bp, Canis familiaris
  misc_feature (1)..(531): n = a or c or g or t
tctggaaatngagacttagctctatttgangtcttgcactatctttattacagcagaaaatatacaacatgagtggatttcagtaaaatattcagtacaaattcacattcctaaataattaagcatgaggaagttcatagccatcttattgcacttgattcctgataacaagaataactcatttaagtcaacctttacaagtatgtctcccgttataaaagtaataatttcaaacttctgaaatgcacacacaaacacataaataaaatagtagtaattgcagtttcctaaccaccatttcaagtgaaattgcaaatttggcatatttccttcctgccgtactgttttccttgtacctgattttgtttaacaatggtgttatcctatgctttgttcttaatctaaagtataaatttccctgttacttcatgatatatacaatatatatatttttcgtatgtatacatatatacaatatacaattcctgttgtgtaatttttcatcaaggtgttaaatcactatacatgtcc

SEQ ID NO: 7502 - DNA, 568 bp, Canis familiaris
cacgagcagagaggtgtcggtaacgctacacgtttgagacgcaccagagaattcagcatgcttctagtgagtttttcttagtgtatataaggccctttatgtgcataattaatatacgatcccctgacacgctcttcacatgagagggtgtgagatgggtagtgacgggaggtcctgtacgcaggagtcacccctgaaccacgagggcccagacggggctcgcctcgcaccggttcacctgtcgggcccatgagtgacgtcacgagtaggtgctgacgccagtgcgagctggctgtggtgccacggggaccctcagctgtgccctgttgtcctcgcttctgtcggcggctctgcgctcctgcgccgcccctgactggggacctgcttcggcaggagtggctttgccgcctccctgcggtctctgtgtcttcagcaagcacactaaattaagccattttgagataatgaacattaaatataatttgatttttctttctctcctttggatctcgccattgtgttttctgcaatgtaatagtttacatagtttattcttttaatgttttct

SEQ ID NO: 7503 - DNA, 629 bp, Canis familiaris
  misc_feature (1)..(629): n = a or c or g or t
gggttgagtctgnncttgagnaagacgcatnnnnnnctgagnnngncntccccaggactgtaggtaccatccagcattgccttcacctgacctcagtatatactcatttcctgccccagcatggnngcccagaggtcaccacaatgcccttgggtcttggaacaacggtggattacatcttcttctcagctgagtcctgcgagaatgggaacagaactgatcgcaggctgtatcaagatgggactctcaagcttctgggccgtctctccctcctctctgaagagattctctgggctgccaatggcctacccaatcccttctgctcttcagaccacctctgcctgctggccagctttgggatggaagtcaccgccccatgatggggcttccaggggaagagagcttctcttccagaagagctcactggatcagagactgtggaaataccctatgcttctggaaactgagatccaaggaacttacgtcccttccccatttcccttttcccacggttagattttctccaggcctgtccacgttctctgcctgtggtccctgccccgccccaacctcttcctaatcctgtgccacatactcagtggccttgggagaggcagaaggggggttcc

SEQ ID NO: 7504 - DNA, 582 bp, Canis familiaris
  misc_feature (1)..(582): n = a or c or g or t
ctgtgggttacatgctgacttgtgttannanaactatttaaggctnnagtcttnngcctctaaaaatagactgnnaagggccacagttacagtcacgcccttttgttattatgtctcagccagtgtcacagaatcggtttcctcctgttgagtattatttaaattaaaacttttaaatgtgctgcaaagcacatttcatagtattcatagtattcagttcgccttgtaagttacataaaatgtcacttttttcccccttagaactacagtatttagtgtctctgagtcctcctgaaataatcctgtaggttcccgatggtcttaatttaaataggtgctttgattttacaggtttttaaaatagttttattgtactcccatttatgttgcatttgtttgaagagttcttgagggctgtattacctttccacagagtgagatgccgtacacagtgtttcagaacagagggtcttgatgtggctgacgttttaaatatcctttacgtacgagaattatctcttttatgctgtcctatgactttgttgtgattaaggtgaacgagacactatattagtatatttg

SEQ ID NO: 7505 - DNA, 544 bp, Canis familiaris
  misc_feature (1)..(544): n = a or c or g or t
tagggcnnatagtgtgtgggcgtcccctcttccctccgttgggagtgttcnnnncccacatcctggcagagatgacttgtctttaccatccaaatctccattcaaatgtcattcctactcccacccctcagagaggtctttcttaattactttagcaaagtagcctccgtcctctagtacctcctagcccaggccaaagggggacgctgggcctgtgctgtagagggtgccactttggtcatcctccagacattttcctctccatgaagcagggaggccaaggagccaagggggtgtgcatactcagagcctgtgtctcctcttctagaccatgccctagttacctggggccttgcagttcttcccctggagggcctcaaacccattcccagagtctgtgggcctctgcctcaggtctcctgtcccatgggtggtctcggctgccagtttgcacattctaatcttgagggagaccacagagaagctatttgcaggaagctatttgcatgaatcttggacataagggccaaggtatcaannnnnn

SEQ ID NO: 7506 - DNA, 440 bp, Canis familiaris
  misc_feature (1)..(440): n = a or c or g or t
acttccgcgtgtgtcccacacntgggcccttgcnagcagcgaggtgatngcnnacgggtgtccccggtttggtttctaatcagtgtnaaacggtttgagactctcctgtgtgtccgtgtttggtttgcgtgcgagagtgagcacacccgtgtgtgcatgcngcgtttccccgttttctcccctccctccgacaagccgttcatagcaaatgtaagaaataccttgccacacctgcccgcctcctctgcaggagaaacagagtaacccggcatcctccccatcccctggctgtgtatttatatagatggaaatatcctttctattttgtatcgtcgtgcctataacctctgccaccttgtnnnaccctgacctgcgctacttcccctggatatgaatgtattgtacaccgacgccggcccatcctgtacagctgctttgtt

SEQ ID NO: 7507 - DNA, 517 bp, Canis familiaris
  misc_feature (1)..(517): n = a or c or g or t
atatgtgagatgacacaatcactaatnnnntggtcatttgaacagttgagatagtaaaagtgtttaacaaactgggatgatttttccatatntgccaaaatccctgtaaactttgtgttatcaactaagtgtataatactgtcattaatttattttgattttctgtaccatttcaaaacattatataaagagggaaccaagactattttcttcagggcagtgggtttaggagttcgtaaaatgttttatatagcgtatatgccagcatgcctttaatttctttatttccttcctagatttgtcactgggtcagcagctatggaaatagaacttgcgagccctctgctggctgtagaccaaagtagcataaataggatctggttttgtatagtggctggcaaccattgcatatgatattaaaaccaacaaaggtacagtctggaaagtctaagtgactttcctgataacaactctgaggaatcacggggctttgtctgatccnnnnagatgtcatggt

SEQ ID NO: 7508 - DNA, 524 bp, Canis familiaris
  misc_feature (1)..(524): n = a or c or g or t
cccacccccacgtcccacccggcaggtggcattttgcccgggttattgggacnannatggggtgctcctgaggagnnnnnagagagatctcagctagggggagaggtctctgggttgggagggaggaggagtattatcagagcaggggtgacctcctggtgtcagatgccttcaggaggcagtgaccagcctgtgaggcgctggggaggaaaggggagagaggggctgtgaacccagaggacctgggccctggtgggggtggggagaagggggagctctggggggggtgaggtctgggccccagatctatgtgaaacatttttctgtgtcactgtgggaaagccttcccagaagtctcgctgcgtgtagctctgcgtgtgttcctgtgttaacgcgtgtgttgagagcccggcagcagggcatgcatgactcttggcaacttgtgttaccttggagccacgtgtttttattgctgactttaaatatttattccacggcagacagagacatttggtgtcttttta

SEQ ID NO: 7509 - DNA, 523 bp, Canis familiaris
  misc_feature (1)..(523): n = a or c or g or t
tgcagagcaacagccagcnnnncnaggnnntcannngcagcaccccaagcagcgactggccccntgcacacctgcccgaccagggtgcacttgtgccgccacttgccagcctcagtgcttcctctgccacaagccccgaaactgagggccccagggagacccaggcagaggcagcctcccttctgggtgactatcaggatcccttctggagccttctccatcaccctagccttttgaagaatacctggctttccaagagctctgacccactggactcgggggctcagggcctggaaagagcacacacggccccactgcacccactgcaagttgctgcctcgccggcctcggagctgcccctggagcacggacagaaagatttcaccggctggatggcagtcagtgacaaggacaagaggaccgtgctgcaggtgtttgacccactggcaaaaacatgagggggatgcttggaaagccactctcgtgcagaacgtgtgccttctgccctcaggcatctctcgcc

SEQ ID NO: 7510 - DNA, 535 bp, Canis familiaris
  misc_feature (1)..(535): n = a or c or g or t
tctagcatagtggctcgtacataataagatctgaataaatgattttngaatgactagatgaatgagtgagaagccaataaacttgtgataggttatcntaanctgagaaaatcaggaacaggataatctaagaagaatggatttaagaatggtatggaatattaaatttagaaatatttcaaattggtgttctgtaatagggattcatcaaaatatgaatgaaaatatgtggtttagcacagaagttaggcaacaagatttagtagctccctgtttgttcacgatgagtacctgacttgtgtgttccttatctctttcatacatttctatagaagcataaaacaattaaaattcaacatatgctgacaaagtagtatgtgttcccatgctaggtgagaaaaatgcatttagaaatgctttgaggggcacctgggtggctcagtggttgagcgtctgccttcggggcagggtgtgatcccggggtcctaggatccagtcccatatcgggctcctcgcagggagtctgcttctccct

SEQ ID NO: 7511 - DNA, 187 bp, Canis familiaris
  misc_feature (1)..(187): n = a or c or g or t
gtgtgactnnnnttttttttttttaaacagtgttttcagtgtatcatagatntgtttcctttttggcctnctgcaaagtccccagatgaaaatttgccaatccttnctgctttctatttttatgaagacaatcaaagctggcctgagaaacacaatttgtgactttttttaaacggtcaatgatgtc

SEQ ID NO: 7512 - DNA, 581 bp, Canis familiaris
  misc_feature (1)..(581): n = a or c or g or t
aggctataagcagctagggtaagcttaaaagggtggggagtagggtactccccaagctcttggtaacatttaaggtgtcgtggtaggaagaggtctgtctgtactaggggccccatcccaaacaggtgcctaactctaagggccctgatcctcagctacccccttggactctttcagctctttctcagatggtttcctttctggctcatttcctagggggtgcggccttcaggggtggtaggctggggaagagacggcttttagacccagcaggccctgctgtattatgtatatattttttcaaggtctgttttttaactgaaaagctttgggcttgattcctagccccgttctgtgggggcactggctgatttcagttccttgtaacccggctgctgagaggggctactgtggaggctgatccccagatgggctcctaggggagggagctggaaggaagatgaggcccaaggctacctgtggtccttgggcaccagccccagcccagacaaccaggttttgttttgcgctctcctgtcacaaatgctgcactattggttctgaattttttatcnnnnnna

SEQ ID NO: 7513 - DNA, 496 bp, Canis familiaris
  misc_feature (1)..(496): n = a or c or g or t
cccctcgccgagaaaggcatcnnagcaaaagcccaagacgtcaccgcagcagatctcgagatagacggcacagatcccgctccaagtccccaggtcatcatcgtagtcacagacacaggagtcactcaaagtctcctgaaagatctaagaaaagccacaagaagagccggagagggaatgaataatggactcagtttggtattagatcagatggccacctgtggatctaaaggcatctgtctttgtggaaggattaagatcttactccccaggcagctatgagaatattttagctctttgtaaccaatttctctctttttttttttttttacttaagtgaaagaggtgctgagttttgtatctctctttgaattgtaatccatttgaggaatagtgcttcccaagggctgcttttgacccctttgtgcaaccaatcttgactgtactcaaatttannnnnngtagaaaggatttnnnnnntggagaggatgagtga

SEQ ID NO: 7514 - DNA, 630 bp, Canis familiaris
  misc_feature (1)..(630): n = a or c or g or t
acaacgatganctcatccacttctccaacnctgagaactgcaannngctgcagctggagaagcataagggcgagatcctgggcgtggtggtggtngagtcaggctggggttccatcctgcccacggtgatcctggcgaacatgatgaatggcggcccggcggcccgctcagggaagctgagcattggggaccagatcatgtccatcaacggcaccagcctggtggggctgcccctcgccacctgccagggcatcatcaagggtctgaagaaccagactcaggtgaagctcaacatcgtcagctgtccacctgtcaccacagtcctcatcaagcggcccgacctcaagtaccaactgggcttcagcgtacagaacgggatcatctgcagcctcatgcgagggggcatcgcagagcgaggaggcgtccgagtcggccaccgcatcattgagatcaacgggcagagtgtggtggccacagcccatgagaagatagtgcaggctctttctaactccgttggagaggccttgaagaatacactgtgacttaagaagccttaccatgcagtaactaaagctttaggattactgtattcaaggagtgacctgtgttgcatgcagccgaccttaggaa

SEQ ID NO: 7515 - DNA, 183 bp, Canis familiaris
  misc_feature (1)..(183): n = a or c or g or t
tttcccccccccccccccccagattatagatggcaacgccgtggttggtgtactaccacgttcttacaacaacccaggagagagatgttggcagtggagactagggttttgacaatacaggtagaaagaagttcggagatgtaagaggtatttggggagtaatgattaacaannnntggtgag

SEQ ID NO: 7516 - DNA, 630 bp, Canis familiaris
  misc_feature (1)..(630): n = a or c or g or t
tggaatgctcctggcccannctgagggtctatntcctcagccctggctcnnnagcnntccggccctccctcctgaggcctgctaatactcaaagccttggctccccactgaggtattttaatgcttgtcctttgacctcccctgccctgcagcctctttgcagctttgacatttagatcctcagctgtctcagtggtgattagtctttcttcctgagaaagcacagtaatcctggactgatcaaagtatctccctggtcttaagaaaaatactaacattgcaaccactgaagtaatcttaacttctttactcagactttgtggcatatgggtttggggaattttctttgtgcctctcagccccattcggaaagcagctcttggctgtgtgaatttttcaattcggagcccctggggggtgggggggagcaaacaaaaagtgtggatgaaggtcaaactttgtcggtttctgagaaaactagaagcccgctgttcatcacatgggttttattcttatctcacccacgtctgnnnnaaggatggcccaactcctgccaccgagagaactgctttgccacttaactgcaatcctttgttgctcaccacaggtgatggaaacaaacactaattt

SEQ ID NO: 7517 - DNA, 624 bp, Canis familiaris
gctgctgaggcctgtggatagtaggcccagtatgaaaatccctatccagctaatctttctttctctgatcctattttctcttacttttcttgtaataaattcagtcacatatatgtaagaaggcctgcatacatagaagcagtcgcatagttaacaatggactctgtcttttattacatgaaaaagaaagtaagtcagaaagtagtctaagagtagaatggtagttgccaagcactggccgggagtggggcatgggtagttagtgtttaatgggtacagaattttagttggggaagctgtacaagttccagagacagatgatggtgatagttgcacaacactgtgaatatgcttaatgccactgaactgtacattaaatggttacaatggcaaatttcctatatatttagctataataaaaatttattggggagggacaaaaagggggaggaggggaaaaatttattaaatagtctaagagaggtgaggaacttttctaaaatgtagtgaaatatatctaccatttcctacccaattcttatgaaacccaaagcaggaaattattggaaaagcatctgttactctttactgaactgtaccccctctaccaactgttagataaaa

SEQ ID NO: 7518 - DNA, 611 bp, Canis familiaris
  misc_feature (1)..(611): n = a or c or g or t
ctccccaacgctcctgcttcctttccgcttgggctngnngcangccccaaatccgatcccacacccctcctnngnnnntcttcctggatcccctcagtttcactctacccatggactgaggctcttggctttccagctcatcctattcatgggccaatcagctctgcccaggaggatgggtcacatggtggggagttgcctcagaccttcctggctgtggctgcccacatgactggcctcctggtggtggagccctcctgggagggcttggggatgaggcaagacctgtcatggctggtcacttgagtactgttgctactgcttgctggacttggcagatgttcaaagtcgccatttctctgaaggaggctttcatggcttcctcagaaatattctcctgggacaaactggccttccatccacagggcaaggcttcccatctggttgcaaaagtttcttttgttgatcttggttgtctagagactggatgggagcctgcgcaggactcacaatggctccatgccagctgcctcctgcttgacccaatctggtccagagtaaacacatgcatcctgggatcgagcctgcttctcctccctctgctggccgct

SEQ ID NO: 7519 - DNA, 340 bp, Canis familiaris
  misc_feature (1)..(340): n = a or c or g or t
actccccaggcccaagtcttccagaggcttggtcaaagggtgggaaggaggcaggaaggaccaaaggggtgatatggagaagagggaaggtaaaccgtgagaattaagttcctgccgcctgggtaggccccacaaggcctggcctgggagtgtatggaaacacaaataatcctcagtgtaaaatgtcttgtgtatttctctgtgaattcatgggtctggagtagagggcccaaagcttgtaaatatggggatagtnngggtcagacccatcccctccccccctacacccatttcgcttccaagaccatttgtagtgagcgagtggatgctgtgctacgcg

SEQ ID NO: 7520 - DNA, 557 bp, Canis familiaris
  misc_feature (1)..(557): n = a or c or g or t
cagnagagccagagacgcgagtccgaacagcngtccaccgcggaccgcaagcacacggtgcagcagccccacgcagtcacctccgcgactctctaagcaggcgcacccgagcttctcaggatgctgccggtgacctcagtcaggatagcgggcccgccccctcatcgtggccacgtgccgagatgagacctcccttcgacgccccactcccaaagaacctgccttgccttccgaggaaagcccacccctcgagctggggcctaccctttgcagctctgttcccgcccactgaagcctgagctgcccccacccctgcagtgtgacnncgccccctcccgtggggtttcggcactcagcctgcccggtgtccggacctagctagggccattccttgggtgcctaacctagccctctcaggccacgccccgaaggtgccttcctcgctttctgagggcgagtcctgccccaggagatccagtcacacccccggtgggacactatgcgtgcnntccagcatttaangnnnnnnnncnccnnnnnngnnncggcctctcccc

SEQ ID NO: 7521 - DNA, 656 bp, Canis familiaris
  misc_feature (1)..(656): n = a or c or g or t
tccattcagctgnnnnggtcccgnntnggccgggtgatgtgctcnnnnnnnnactgcctgctcctgatgaaggactatgtgctnnctgtggatgcttatcactcagttatccagtactacccagagcaggagccacagctgctgagcggcatcggccggatcttcctccagattggagacataaaaacagctgagaagtattttcaagacgtggagaaagtaacacagaaattggatggactacaaggcaggataatggttttaatgaacagagctttccttcaccttggtcagaataactttgcagaagcccacagattcttcacagaaatcctcaagattgacccaacaaatgcggtggccaacaacaacgccgccgtgtgccttctctacctgggcaaactcaaggactccctccggcagctggaggccatggtccagcaggacccccagcattacctgcacgagagcgtgctcttcaacctgaccaccatgtatgagctggagtcctcccgcagcatgcagaagaagcagtccctgctccaggcggtcgccggcaaagaaggggacagcttcaacacacagtgcctcaagctggcgtagggcactcgccttcggagccaccagggcctnnnnnaaccatgtacactggacct

SEQ ID NO: 7522 - DNA, 587 bp, Canis familiaris
  misc_feature (1)..(587): n = a or c or g or t
ggagaagaaggcgcccacaccccaggaaaagaagcgtangaaagacagcagcgacgagtcggacagctcnnaggagagcgacattgacagcgaggcgtcctcggccctcttcatggcgaagaagaagacaccccccaagcgggagcggaggccgtcgggaggcagctctcggggcaacagccggccgggcagcccgagcgcggagagtggcagcacgtcctccaccctgcgggccgccgccaacaagctggagcagggcaagcggaccaatgagacgccggtggccaagcgtctgcggctggacccggggccccagagcctgtcggggaagtcaacccctcagccccagtcggggaagtcgacccccagcagcggagacgtgcaggtgacggaggacgcggtgcgccgctacctgacgcggaagcccatgaccaccaaggacctgctgaagaagttccagaccaagaagacggggctgagcagcgagcagaccgtgaacgtgctcgcgcagatcctcaagcggctcaaccccgagcgcaagatgatcagcgacannntgcacttctccctcaaggagtgacgggcgg

SEQ ID NO: 7523 - DNA, 556 bp, Canis familiaris
  misc_feature (1)..(556): n = a or c or g or t
cacacccatttcctattcnnnnngnccatgattgctggcatttgtatnntaaacttcggctctttagagancttcagtctgggaaggagcaattgcgtgtccctctactgtgctttcccgtgccccaggacacgtgattaggagccagatggaaagagcaggggggcagctggacacaagtaagggtatcttttttactgatgggatgaccgcttaggcttgggggtacacacctgagcccagtacacagtgcagcagggagccagggctgttcctaagaacctgactccttccaggggaatgtggtgggttcagaaacctaatcagaaatgtgtcactggccttttcaaaaggcccccaagctgccttccagacacagtgtcctttcctcaatccattttgatcatctcatattctcatctctagccttgatctcagccttggagctccctgggacagccatggagcttgccagagttggtgaataatgacacctggtggatgttacattctcagaaacttctagccaacctaggttgcaaacagtagggaagga

SEQ ID NO: 7524 - DNA, 713 bp, Canis familiaris
  misc_feature (1)..(713): n = a or c or g or t
agatcacaaagtcgtcnggactagacatcactcagaagggctgctgaggctagcactgctgctgnctgggtttccttgtcatttcctgctctcagggacaagagggcccccgggtaaagtgagtcggtgctcctgcacctgctctcctgcatggggaccagtgctggacttttgtcccagcacagagatgaggaagacgaggagacaggacagcagtgggcatgtgccccgcgggctcggctggctggagaggcaggcaggctgcctccttgacgccttagctcggaaccgctgtgaggtgagctaaggccgatgtcctccatgccaggccagctgcccctgaaggaccttgcgggcacgcagtcagccaagttaactattctggttgctagtgtttttatcctctttcttcattgtttctccaaaagtggctgcttagtgatgaaaactggccacacagtggggccctccggagtgggggcctgggcttggtgtgtccccgaggtgtgtcccggcagtgcctttgggagctggccgcgaagcccggcgcacaggtgggaaagcggcccgcagggcccagctagtcagcaggcccgcctcgggcccctccctcccctgattcgcagtggcaacagcccccagggcctctctctctcttttagtatctcatgtcagatacatgcttgaattccttctccgcgnnnnnnncagag

SEQ ID NO: 7525 - DNA, 530 bp, Canis familiaris
  misc_feature (1)..(530): n = a or c or g or t
cgccgcaggacagcgtcatcgccacctacgaggagcacgaggacagcgtgtatgccgtggannngtcctccgccgacccctggctgtttgcctccctgagttacgacgggaggctcgtcatcaacagggtgccccgggcgctcaagtatcacatactgctctaggcccgtcctgatgcacctcctggcaggtccctgaacacgtgcagctctttggaggtcgctttccagcgggtccctgtggggagaaccaggtcgcctgcctctcaggcgggcgggtgggcgttaacaccagggcgctcctgccgactgcacagcccaccctgtgcaacgtcacccctcccggaggcgggcaccgtcctcacctgtgccgggcgtgagccgcccttcccggcgtccacgtcttcctggcttcggctttctctaatctgtttaagggtgttgggagtttcattagaaagaaaaaaatctttgtttatataacattaactcatttttctcttgagnnnnnnaataaaacaagcaagnnnn

SEQ ID NO: 7526 - DNA, 209 bp, Canis familiaris
tgtgagcccgatggacgtggccatttatatttgggaaatgctcgatacaccggggactgcctgtatttggaaggttcattaactcagcatcctgttctcaacctctaagctgcattttggaatccttggtccgtattttcattaagccttaaaacgttttttaatgtgcatttggtgccaacttttttctagagctgtatcaaaaacga

SEQ ID NO: 7527 - DNA, 580 bp, Canis familiaris
  misc_feature (1)..(580): n = a or c or g or t
ctcnnnggtgaagggcgagcaggnnnctgccacgggtnctagtcgagattgcccaaactcagggcaggcctctccatgtgcttctgagcagagccccagtccccagtcgccccagaataactgctcagggaaatctgcagaccccaaaaatgtagctgctttaaagaaccggcagatgaagcatatttcagctgagcagaaaaggcgcttcaacatcaagatgggctttgacaccctcaacagtttgatttctaataattccaagctgaccagccatgccatcacactgcagaagaccgtggaatacatcaccaagctgcagcaggaacggagccagatgcaggaggaagcccggcggctgcgggaggagattgaggagctcaacgccactatcatctcctgccagcagttgctccctgccacgggagtccctgtcacccggcaccagtttgatcacatgagagacatgtttgatgagtatgtgaagagccggaccctacagaattggaagttctggatcgtatctttgggttctctttgcttctcccacccctcaagctgtgcactgaaacaacagaca

SEQ ID NO: 7528 - DNA, 694 bp, Canis familiaris
  misc_feature (1)..(694): n = a or c or g or t
tctgatttactttgnngagctnnncaatcaaactctgagtntctccttctcagtggaacaagacatccaagttgacaatttaaaaccagctactgtaaaagcctatgactattatgagacagaggaatttactattgaagagtacagggatccctgcagtgctgaatctggacacagaactgtttaaaaatggaaactgtggaccttatcaaatgaccttctccagttgcaaaggactcatcaggagagaagatagtgagagaaacaagggacaggaattggatatataaaaaatttatatgttgaataaattcatgacatatacacttctaccttttcctttgtttttttaatcaatgtgatatttcccttctgaaacatgtatctatttccctcagtatttttaaaaacactataaaagctatatgaaaaactggctcaaaacactacagattaatcaaaatggaattccaaaatgtgttcaagtaacccacaggaagataggcaaaatataacaatctttccaaatactggaaacaatcaaaatgtgccctaatatgtgaatggtgatactagtggtacattcatgccatggaatatgactcaacaataaaaagaaacaagctgttgatctacacaactatttgaatggatctcaaaaatattatgcctggtgaaaataaagccannnnnn

SEQ ID NO: 7529 - DNA, 435 bp, Canis familiaris
  misc_feature (1)..(435): n = a or c or g or t
cgatgcacgctnnnnccacgcctngagcgtgtgtacatgatgtgnnnnnngcattcannctgtccccccannncgnnnnncagagganangatgggtggcccccggctcccttctccccctgcccctgccngntgtgcagccgtgtgcgttggcgtgtgtttccgtgtnnnnggcgtgtcacgtgatgtnnnnntgtntgctgacatgagcccttgccccttctgtttctccgttggnnnntagngnnctttccttttcctccnngaggggacnnnnnnnnnggggcctggctgggggcccannnnnaggcctccctctcctnnnngccctcagagtcccatttctctctattggtnnnnnnnnnnnnnnngnnnnnnnnnnannnnnattctgccccccccaccccaccctgcatgtcctgtccncagagcccc

SEQ ID NO: 7530 - DNA, 607 bp, Canis familiaris
  misc_feature (1)..(607): n = a or c or g or t
ggtcagtttctaccaggtcctgttgcannnagtggccaagacaaatgataatgagccacccaaggcaaagaatcgcccatggatcttcaacaagatcttgggcaccaccgtcaagctgatggagctgaagcctaacacgagttactgtctcaccgtccgtgcagctaacacagctggggtggggaagtggtgcaagccctacaaatttgcaaccgtggccactgacttgaacagcttccctgagaacaaccccatccagattactgtgcagcgcaaggaaccccagaggaaaacggtgtccatcgggctagaggatatgcggaagctcgaagatctggaatacctatttccctactaaagcgggcccaaggaagtcccttacctaccttcagcttcagcccagggctctcaggaacagaattgtgaaatggaccaccagcactatgccagggaattgctgatcaccccgcccagggcctggtgcagtggtccccaaactccacttctgggttggggctgaggctagacaggagccccattcacctggagacgccacaggccaggccaggtctgccactgcccacagctgctaggcatccccctcccc

SEQ ID NO: 7531 - DNA, 665 bp, Canis familiaris
  misc_feature (1)..(665): n = a or c or g or t
gctcnaagaagaaagaaaagaannnccttccctcgnnantttccctcagttttcgatgnnaggaaaatttggaacatttttgttgttgttgttgttgttgttgttgatgttaatagcataatggtgggagggggtacgtaagtgggggataagaaaaatgtcatgaatgatttttccagtcctgccatatgtaacacttgactctgttacctaaattttatagttagatcatatccaatctacttattaaactgtgttctatttaccagtgggattttctgcagttgttttgcatttcactgtaaggataatagagttcctgtcctctgctctcagaggatggccctttaatgtagcctgagacagtcctgtgatttgaaggtgagctgtgaggatgggactaattgacatgcatcagtttacaaagacggttttatcatctgagaatgcgccatctttttctccggataattatttattacatctagctcggttcctacattttgttgggtctcgacattggctcaagaatgctgttaatatttattctgtattgataaaagtctgtcttgccactatgagtaaatcccccccattaatattttcttctctagcatagcactgtcatttttttttgtgaaaatggttatctgttttatttatta

SEQ ID NO: 7532 - DNA, 633 bp, Canis familiaris
  misc_feature (1)..(633): n = a or c or g or t
ccatgatgtagcgcagcaggtgnaccccanntgcacttgccatgtnnagggctgaatgttctctgaccttccgnnaagctggcagctcttcagggctgcgtctcattttcttttgtgggtgctgcttctgatgagggctttcagtgagtgggggcaagtggctgggaagacggcttgtctcagaggacagtgttgcatctggagagcagaattgatgccggcctttcccggcacaacttgccactgtggtgtttatcccaggcctcaaccacagcatgatggacagcaccactccacctcttactcgcgttggcagccaagagcccaggatatggctggtgatgctgctacccactggactgtccctttctgggaagacccaagcaccctggccaaggttgctccttgagctgggcacctggcatcaccaagaggggtaaggcacacctcggctctccgcaagtccctgactgaccatcctggaccttgtacttctggagtcactgtggctaacccctctccaccgtcaccccagcagcctccagtgaccccaggtcctggctggtgtccccacagtgcccgctccctacctctctgtctttgctcggcctgcccctggcatggcgctggtca

SEQ ID NO: 7533 - DNA, 703 bp, Canis familiaris
  misc_feature (1)..(703): n = a or c or g or t
acagcaagagaaagactctgacnnaaacaatctataagaactactatcgaatccagctgaggccagagcacttcagntnctacctgacatccnnagaggtgggcttctccagctatgagcttgtggctacaccccacaacacttccagaggcttccagcgttctgtgtacctgttccacaaggcccgttcccccagccactgagtggccccctgaacagaaaagtgtgaagaagttgcccactgctcttaaggacctgggggaaaaggaaagtatctcaaagtctttccttttggctccaaaaattgtttcctttcatggatctgcaaagaaagcttttcctacgttgctgccccagcctcctccctacacctctggcatctaagcagcaagcccagctgtgctggagttaccgacatcttcctctctcccccagctcactgggctggatggcatggactgtttgctgacctctgttctcctagggtatgggaggtgggcggtatcaagttctctggcctcttcctcctgctctccaaaggagattcccctttctcctcagcccttgtccctggctgttgttgcaatggaccacagatagatggactgagggttaagtgaaggggaagtttggcagggaggcatgcaggtactgtgaaaatccttccctctgctcacctccattgggagagggggttgggttt

SEQ ID NO: 7534 - DNA, 651 bp, Canis familiaris
  misc_feature (1)..(651): n = a or c or g or t
atcgcgtcgaccccacgcgggtgaatgagtntggcatgagnnncgaggccccgacnnnnnnnncccctgtggnngaggccccaacagcagcaggggcnctcccacccccacccgccccagcccctgccacaaccaccgccgcagccgccagggannaggcctccacgcccctgcccgccaagcccacccagggggccagctctgccaccgagccccaggaagcccctccaaagccagcagaggacaagaaaagggattagccgcccctggtcctcctcttccgctccggctcctggtgaccaccacccctgctgccccggcccccttgcctccccttcctgtcgctctttccctggacagatggggccagggcggcaggaggtccccctcggggcagagcccagtatgtgttgtgggggccggggcaggccagggcacgttgtttgtggaggcgccgtctgtccgtatgttcctctgtgtttctagccatctcgccctgccagcccaacactattgggaatcatggtgaagccgatgtggcgctgccggggtggggggccaggcgggggagcggctggggcccctctgtgggatgcccacggccatccattatcttgtcccttgtcccccagccacgcccctcctcccaga

SEQ ID NO: 7535 - DNA, 612 bp, Canis familiaris
  misc_feature (1)..(612): n = a or c or g or t
anncangccgaagaaaagatagaagctgtagatgaaaccaaanntaannaangtgccnggcangatgagggtaaaggagaagaacgtgaggnnnaccaagaacatgnntgaactttaagaaatggctttccacgtccccaccctccccnnncctgaaccctgtctctccccaccctctnnncaactccactctgaaggttcccttcctgtcctgctcacatccgtgagtctgtcctctcctacccactagccctctttctctctgtgtggcaaacatttaaaaaaaaaaaaaaagcaggaaagatcccaagtcaaacagtgtggcttaaacattttttgtttcttggtgttgttatggcgagtttttggtaatgatgatccaatcattttgggaaattcttgcactgtatccaagttttttgatctggtgcgtgtggccctgtgggagtccactttcctctctatctctctctgttccaagtgtgtgtgcaatgttccgttcatctgaggagtccaaaatatcgagtgaattcaaaaccatttttcttttcctccttttaatgtgatggaatgaacaaaaaggaaaaaaaatcaaaaacccagtttgttttg

SEQ ID NO: 7536 - DNA, 634 bp, Canis familiaris
  misc_feature (1)..(634): n = a or c or g or t
gtgctccccccacctggcaccgaccttgtgnncttacgggaaggtgcaggcagtcctgtgcaggtgcctggccctgctgcaacttccacagaagccctgttgcaggtgaagcaagagaaggcggatgcccaggaagactggacaccgggcacagccatcctgacttctcctgtattgctgtctggctgccccagcaaggcagtagacccaggcctgccacctgtgaagcaagagccactggaccctgaggaggacaaggaggaagagaacaaggatgattccgcctccgactcggccccagaggaggaggcaggaggggctggcacacccgtgatcacggagattttcagcctgggtggaacccgcctccgggacacagcagtctggttgccaaggctacgtaaactcttagcagtaaatgaaaatgagtattttaccgaactgcaattgaaagaagaagcattataggagaaaaaaaagacaaaatgagaattattaaaagagattattaaaaagaaaaaagagacattattttgtggctgaaaagctgaaccagcaattcaggaaacggaatccaaatgtagaagcgtaccgcatacaaaatccgaagtgggtggattacaaatgattgagg

SEQ ID NO: 7537 - DNA, 655 bp, Canis familiaris
  misc_feature (1)..(655): n = a or c or g or t
actgctgngccncctgggctgcccaaatcctggcatttttaagcactatgcatattcctgccatatctagtccacgtcctagaggtagtcttttccattaattattcactttgtgcagtcagagtaaggacaagatagagatgatctagaaaagccagccagccaatccatttgctattttctgtggtctttagattacagtaaaggctcagagaagtcctagagtagagtaagcactcaatttcccaattcctttttccatggaacttttttaaagctatcatatacagtattgtaggacagaattctacaggtgatctgtttgaaaaatgcaactaattggctaagagcaccagttgtagagtcctggattgtgtttgaatcacagctctacctcctactagtaactttaggcaggttaccatctcccagattttctcatccctaaagactcatccccttcataagactgtgaggactaatgaaacaatgtaaagcttctggcatctgataagtgttctgtagtgagtaaacagaagctannctcttaatatnnntctccaccataaggctctcacctaatcaggcctcatcatttatatatctataaatatatagatatatatcattgatctcatcaaaaccgtattctttg

SEQ ID NO: 7538 - DNA, 473 bp, Canis familiaris
  misc_feature (1)..(473): n = a or c or g or t
tcagccnnnatgcagtnnngcagaggaaggacatcctttttcaaatctgctatggaatgtatggttttatggatctagtgtgcataggtctcattgtccacgaaggagctgcagtttacagagtatttaagcgctggcgagctgttaacttacanngggatgtattaaattatgataaagcnnnagacatcgaagaaagtagccggggagagtcttccacaagcaggactttatggttgccattnnnggctctacggaacaggaacttggtccacccaacccagttgacctccccgaggtttcagtgtggctatgtgttattgcatctgttcaatcggatgaggccccgtgaagatttgtcagaagaagatagctcaggggaggttgtgatgagagtgacttctgtgtgacaannnnnntaaggcggcttggtgtagaccaccctgcacatgttggaatgtaattgcaatgaa

SEQ ID NO: 7539 - DNA, 456 bp, Canis familiaris
  misc_feature (1)..(456): n = a or c or g or t
cgggggcgctgagtcgggggcagagcagctgccgggcaccgctgccccaggagcccgggtcgggaaggccacaggtgggcgagaaggtccgagtaggtgctggacggcgtgggagaagctgggccggaggctgcaggaaggaagcgcgcacggagttgccaggagcaaaccaaagtgaaggaagaggatgggagctgccttgggggcgccccttgtgggggtggggggccccacaaatgctgctaggggtggggtggggggctgcgtagccagtnnnnnactttcttttaaagtggggcacaagggagaggacttagggtgaggagagtgctcttccaggcccctgtctgtctgtctgtctgtggtgggcttctgtttctcagaggtgaggctggcggcatcgcaagtcattaccttctcctcccaggcctcctgctgtatctgggggacctacct

SEQ ID NO: 7540 - DNA, 113 bp, Canis familiaris
  misc_feature (1)..(113): n = a or c or g or t
acctcatactcactgcttcctctttctccttggcctgagggtggtttccaaggggaggggggtgaggtaggctgtgggtcccntgcagggagcaagccccaagatgccctagg

SEQ ID NO: 7541 - DNA, 617 bp, Canis familiaris
  misc_feature (1)..(617): n = a or c or g or t
gaactttnnacactccggatctgtatccgtcataacacatttgcacttggttagctccatgcaagagttctgcccctaaaccagctataaagaagaaagacaaanntctggnctaggaagcaccatctttttgaaatgcaatagtttttccttttggaaatatgtttataccaatagttttgtgctctaattgttattagaacgtttcttatgaacatgtatattgcagtatattcggcccccaatatttttttttgtcattcacgcagaaggtactaatgtaaactcacgtggcctttaaaaaccttacttcccgacaaacgggagcgccgtgcactcctaggccacgccaggtgtgcggggaggtgtggaggggaaacacaagaaagataggcgcttattttagaaaccaaaagtctgtataataatcacaatgtttgtctggttttacagttcaagactcagatgaaatcagacacaaagaatgtctttaaaatatatatctcctctcctgggagacatttaagctcacggttcacggagtgtaatggcctgccttttcttccatgtgtggtaagcagtacaaactgggtttccgccttatgctcctgcctttg

SEQ ID NO: 7542 - DNA, 626 bp, Canis familiaris
  misc_feature (1)..(626): n = a or c or g or t
tcatcttccaccaagcactgcaaaactgtgaacccgtgatagggctggtacccatnntcagaggnnnncatttttatcaggtcnctgtgccacttgctgatcggcgtcgtcgcttcnnnnccatgnngtngatgattaaggagtgcagggagaagaagcaccggcggatgctgatgccagagaagttgtcacacgagctgctggaggcttttcacaaccagggccctgtgatcaagaagaagcatgacatgcacaagatggctgaggccaaccgtgccctggctcactaccgctggtggtagaggtgctccactgcaagaaataatgggagccactatcccagtgaaaatcacctgctggctaagtagttcctttttaagggcaggccagcctaagggtggaataatgtatttatgcctgttagtcctttgtttggggggctggacgtgcctttcctgctctatctcctcacaaagaggagacatcaatctggatttcccccaggaacttagggcctatccagcttctctctcaattcagggtagaacttggaatgataggaaaggaagcagttttaatattagaaacgatttattagaaaattctcgccctgaactggtgtagca

SEQ ID NO: 7543 - DNA, 613 bp, Canis familiaris
  misc_feature (1)..(613): n = a or c or g or t
tngaagacctacttgaatgggggcagggtatgtgcttttatctaaaaagagagctgatgttaaaactcctttggtaaggtgaacgttgtcacataccttctcataagggatagtatattttgggttgcagtcaaacttgattgtgctcagactggtgaaaatagcagatacaggcttttgtattttaaataagatacagtttttatttgaattcagctgtctactttattactttacataagagtaattttagattttttccccccatcaagtttcttcctgttttttttttttaaatgctgtaacttgcccccccaatctttgtctctggaattttactctttaaattttgaagttaactagcattttcaagcctttatacccttgtcttttatattaagtttctcttattattctttaggtaagaatgattgatgttggctgatactggagtacttactccaagtggataagctattagtctcaagacgacatcacacatcgtgagccaagaaggaaagccacgacttgttaggctgaggaagtgtctaggatcaggtgaactgtgtccagaaaaccagtgaggaagaggacaaagaggnnngagcaaccc

SEQ ID NO: 7544 - DNA, 486 bp, Canis familiaris
  misc_feature (1)..(486): n = a or c or g or t
ccatgcctgcaaagacaaagttgaacctgtnnacgaggttcacatcttcttcaaggatgggctggtgactctgagcctagagaagggcgtgtgggtgaatggtctccctgtgactctcccagctgagttatcggcatctgtgtccatacgtaagaatcccgatggctccgtgagtgttattcagaaggcaggggtccaggtgtggcttggcaccaacgggcagctggctgtgatggtcaatgatgaccatgctggaaagctgtgtggggtctgcggaaactttgacaaggcccagaccaatgatgggcatgactccagaagatgacaacaggagagctgaagagtgcaggacttctccccatgtcacagctgatcaatcatctcctgggaatgaggacttcgggacctgaccctcctggagattccaataattggagggtgcacagtgtccctgtgtgcccctacactgttctacccctttgatga

SEQ ID NO: 7545 - DNA, 636 bp, Canis familiaris
  misc_feature (1)..(636): n = a or c or g or t
gccagtattggnnnnnnngcatgctgcggcacgagntnnncactcactnnnnnnnngnnnngnncaacgcgnnnnnnnnntnnnacagcgnnnnnnnnnnnnnnnagtacgggnnnngnnnngcgaaccccaccgannagggcttggnnagnctgcacagcgtgctcttccgcaagcagccctttctgtggcgcgccgccctgctgtactacaccatccaccgtgcctcgcgcatgtccttccgccagctcttccaggacctggcgcgctacgtgcaggacgcggacgtgcgctgggagtactgcgtgcgtgccaagcgcggccagacagacacctcgctgcccggctgcttcagcaaggatcaggtgtacctggatggcatcgtgcgcattttgcggcaccgccagaccatcgacttcccgttgctgacctcactgggcaaggtgtcctatgaggatgtagaccatctgcggccccatggggtgctggacaatacccgggtgccccacttcatgcaggacttggcgcgctaccggcagcagctggaacacatcatggccaccaaccggctggatgaagcagaactgggccgcttgctgcctgactgatgctggtggatggctccaggcagaggcc

SEQ ID NO: 7546 - DNA, 620 bp, Canis familiaris
ggggggtgtgtgtgtgtgatcatgatcacatggctagaaagatcctccctgctgtgttcttgggctgcagggatgaccagtagactcctgaaggcaggctctctcagctgatggaggcataggctagaaacaagagcccgtggcgggcaagcattaggaagaaaccgttggtgtcaaacactggctaatcgattatgcaacctaatcctggtatctgtttcctttattttccatacattctaagctctgatgactgactttttagagcgaggtttcttggtgagacctctcctgtgtgccgagacaacatggggtcaggtgtgcttgctgcagtgaacccacacacgtctttgttctatttccactgagttatttgtgaattttctgtttaggggtttgggggacagtgtgtttgcgtttactcttctaagattgcgtctagcagcccctgtttttgcattggggtaactgctgtttgatttaattgcagtatttgtacgattgctctaataaagtttggtttgtttttacagtcatgcgcagggacagccgttgctatctgtgctgtgaccactgtaaaaagttttataggagactgaaagtcttgatattgtgaagca

SEQ ID NO: 7547 - DNA, 579 bp, Canis familiaris
  misc_feature (1)..(579): n = a or c or g or t
tctgggctcgccattgnctttcgnnagggcccatccatcgtctcatccagcatttccaaaacttttccctcnnnagccacagaggcttttaatacacagggaaatctcatttggagtgccagtacgagaagcctttaaatgaaacaatcgttttactagcttacatctagtaaattaaagtggacacactcactccgtgtaaattcagtaatggccacacagcacaggaggggtgatgtctggattgggaaccccatctgggttcaaataaagcatgtcccagcctccgtggctgccagtggtccttggcaatggcaagatggaagaagacccctgtgtaaagctatggtttgcttgtgtgtgatggtcacagtgacgtctggatgcgcgtgtcgctcctacacccggctggcgctgcaggaagccatcctgggtcctgcaagaacctcccgggctccggcggctggaagggaagccttgacagtggagatgatgtgtctcccccgtcacccaatctccgccagcagcaccagcacgctggctttggatgcaaggacataaagcaagagatnnnaccnn

SEQ ID NO: 7548 - DNA, 686 bp, Canis familiaris
  misc_feature (1)..(686): n = a or c or g or t
gtgtgnngctgagctaccttgtcatatgtgttgattcttgaaaactnnnacacgtatttgcattgggggtcagcncttcacgctgacgcancagnnttctagcagatgtacaggaaagtgctttcaatcggtggactgtcttattttttcaaatttttaaactttgcttctccaaacacaagtactaggttggccaattataatatctatttggtgctagtaaattctcaaactagatttataaatgcactgtaatatttacacaacttagaaaccaaattacaagtattcagttcaaatacttcattaatttcaatcaaccaaagttagttcagtagcttatctcagttatgagtataatacattacatgtaaattaagtgtgtgtatactgtaatcgtgctattttttatcattgaaacatgtataaactagaataataatgcccttaatgtgagggtttgtaatggtgcttattaagaccaaagacttgttaaatgtatacaccaagtggtaaggaaatttctgtgactggcccacacgtgcatggaggtctgagaggaccaagaaccagcctcagcagccagaggatcaccagtgcatccttcatcacacctgtgcaatatgccaagattaccctcggtcattcctatcaacaaggggtccatgtcataaatgtcacaataa

SEQ ID NO: 7549 - DNA, 597 bp, Canis familiaris
  misc_feature (1)..(597): n = a or c or g or t
gacagctgagcaagccctacagcaccccttctttgagcgttgtgaaggcagccaaccctnnaacctcaccccccgccagcggttccgggtggcagtgtggactgtgcttgctgctggacgagtggccttaagcacccagcgtgtccggccactgaccaagagtgcactgttgagggacccttatgcgctgcggccagtgcggcgcctcattgacagttgtgccttccggctctatgggcactgggtgaagaagggtgagcaacagaaccgagccgcgctcttccagcaccagccccctgggccttttcccatcatgggccctgaagaggagggggactcagctgctatctctgaggaggacgccatgctggcactgggctagtgcttcagccctggggaacaccagaatgcagtactctccgggaggaggatttttatcattccagcccttctgggctttggccacaggcccgcctgcctggcaaggcccaccactgctcatactaccataaagaccagccctgtacacctgtccccaccagccagggttttgggatcagagttgagttggaaggcagccactcgcaacagcatgcc

SEQ ID NO: 7550 - DNA, 638 bp, Canis familiaris
  misc_feature (1)..(638): n = a or c or g or t
cattatgaatgcatcaaannttttgacctgtnnnnngaagcagaagtgacatgtttaaatgggacctggacaaacccacctcaatgtggagaatctaaaggaaaatgtgggcctcctccacctattgacaatggagacattacttcattcccattatcagcatatgctccagaatcaacagtagagtacaaatgccagtccttgtatgcacttcagggaaacaggattgtaagatgcagaaatggacagtggacaaaaccaccaaaatgcttagatgcctgtgttgtatcagaagacatcatgagaagaaataacatacgatttcgatggtcttctgagacaaaactgtattctcaaacaagggatactgttgagtttgaatgtatccctggatatcattcaaagacaaacaatcaagtattccgagcagtctgtcatgaagggaaaatgacatatcctgtttgtgtataggttatggttaagatgcagttttataattaaagtatatacatttactgagaatttttattatcagtccaattctcagtttattttgtcaagtattgtgtaactcatttatattcataaatcagaatttgtattaaatatgatgtggatgatgtaattataatcagagg

SEQ ID NO: 7551 - DNA, 606 bp, Canis familiaris
  misc_feature (1)..(606): n = a or c or g or t
ggtgttacccagagacggggtgaccagcccaccgnnngctggtctccctccagtcagagagaactggatcccagagagaactggatcctggctcctttgctgaaggcactagtgagccccacacggtatagaaaccaggctcagtgtggtgtgttagtgcagcctgaattccccaaaaagtgatgaggtttgggtcacagtgaagatctaggacaggggccgcgctcaccctgctgccgctcacatgcataccccaggcctgggcggtggaggccagtagcctcagcccccagtgtgccgccagcagaagccactgcattgtgcccaaacccctggcggttcggggatccagttctgaccatggagcttctggaaaaacttgggactttgtggcattgcaaccttctgttcctcctccctgactggacaagtgacgccgccacaggccgtggtaagaatggcagggtcagaggacaggccagctgccatcccagccctccacgggccgcccaggacttcctggagttgttcgtcaggtttatgtttcttagagctgagtgtcttctgacctgtcgcccatagggtcagttatgaaggctgggttca

SEQ ID NO: 7552 - DNA, 567 bp, Canis familiaris
  misc_feature (1)..(567): n = a or c or g or t
tacagaactgagatncgcatggcgaggatggngagaaaagccnncaacnnctacgtgcctgcagaacccaagttggcatttgtcatcaggatcagaggtatcaatggtgtgagcccaaaggttcgaaaggtgttgcagcttcttcgccttcgccagatcttcaatggcacctttgttaagctcaacaaggcttcagttaacatgctaaggattgtggaaccgtatatagcatgggggtacccaaacctgaagtcagtgaatgaattgatctacaagcgtggttatggcaagatcaacaagaagcgaattgccctgacagataacacattgattgctcggtctcttggtaaatatggcatcatctgcatggaggatctgattcacgagatctataccgttggaaaacgtttcaaagaagccaacaactttttatggcccttcaaattatcttctccacgtggcggaatgaagaaaaagaccacccattttgtagaaggtggagatgctggcaacagggaagaccagatcaataggcttattagaaggatgaactaaggtatctaccat

SEQ ID NO: 7553 - DNA, 380 bp, Canis familiaris
  misc_feature (1)..(380): n = a or c or g or t
ccatccctgacgggcgtcctgacctctctctctccctcccggggctggccgctggactccggacaaccccctccaataaaggggccagtcttcactggcagcggctggtacttggctctcggcctggggtggcagctctgctggcggctgggttcactcccacttcatcctggctgaaggcagtgctgagctttggaatgtcgccagcgaacacccaggctggttacccgggtttgggcagaccagcagcgctctccagagcggcctggcctgctttgggggatccaagtggtgttacatgtccatttcatgctttgggggctcccggccccacaaaacacttttagcagagccttgattaaaaggaaacctgnagannn

SEQ ID NO: 7554 - DNA, 629 bp, Canis familiaris
  misc_feature (1)..(629): n = a or c or g or t
gaatgtcagtcagtagtgatnnnncattgggtgctnnnncagaannnnnnnntacttgatcgnnaattccatacnnnnngntaagcaagctaatttaaaataagactatgtgatttccaagcctgtttgtaaagattctttgantagcccagaactgtcctggactgaagattttctagactcaagaagactgtttttctaaactaatctcatctggatctataaggacgagataaacaatgtccagagaaatttgttttttaacaaataggtttccaatattcccccaaatattaaaacattcactgtgttgatagttactcattctccatatattctgtgaagagaacaacctaatttttggtatgctaggataggtatgtcatctcccgatagatatttcttgatttgtttttcagagtagatttagaattatctgtgtaatgggggtcatatgtttttatttaaattactaaacaaattcaacacatttagagtaacctgcttttgttttcattttgtggtaacttgcagtaaattctgtagaaaaattaaagctgctatttggtcattatatggtacgtgccttacatctcttttacatggttcctaatggttaatttctaaga

SEQ ID NO: 7555 - DNA, 630 bp, Canis familiaris
  misc_feature (1)..(630): n = a or c or g or t
atcgaaagcacccccatgtccattgctggcgatgccaccccactcctggatgagatggatcggtagggggnntgctcctaggactctagnnacctctgaggctgggagaggcccagccgcccactgcctcactccctgcccctccttttctgtccataaagtgacgtgaattgacgttctctttggtggtcagcctggatgggtgacaagctggatggccttgggaatttgagctcagtgtacgctaggtgacaattcttccactccaggccctcaccgaccacctatcctgggaccaggctgggaggggagtgtggcagggaggaagaagagaaagacgagaatgagagtggaacagttttgtattctactccctacaagccatttttgagcttctgccctcatctgactctgggctgtgaccccggggcaccaagctcagcacatgagtctcccccaactcttgtggggagaggaatgctatttattcagtttggggcaggagggagaagagggaaagtatttctgaccctgatgccgacagctctggtggctagcaaagcaaaattgcaggggacaaaggggagcagtgctaacctgcccagcccccacntggccgccttcacccac

SEQ ID NO: 7556 - DNA, 625 bp, Canis familiaris
  misc_feature (1)..(625): n = a or c or g or t
ttgagacttnctacaatactacagtngaggaaatgccaatgaatgtggctgaccttatttaattcctgggatgagatagttttgaatgcagtgctcgctgttgctgaataggcgatcacaacgtgcattgtgcttctttctttgggaatatttgaattttgtctcaatgctcataacggatcagaaatacagattttgatagcaaagcgactttagtcgtgagctcttgtgaggaaaggcattggctttatcctctttagagttagactgttggggttgggtgtaaaagatggggtctgtaaaatctttctttcttagaaatttatttcctagttctgtagaaatggttgtattagatgttctctatcatttaataatatacttgtggactaaaagatataagtgctgtataaaatcngccaattatgttaaactagcatacctgcctttattgtgtttgtcattagcctgaatagaaaggcctttaaaattgatttttttttttttagaaagcatttgaatgcattttgtttggtattgtatttattcaataaagtatttaattagtgctaagtgtgaactggaccctgttgctaagccccagcaagcaatcatatcttagata

SEQ ID NO: 7557 - DNA, 584 bp, Canis familiaris
  misc_feature (1)..(584): n = a or c or g or t
aataatgagttctccagcgctagtgatgtgtgggnnttcggagtgacgctgtgnnagctcatgactctgggccagacgccctatgtggacattgatccctttgagatggctgcatacctgaaggatggttaccgaatagcccaaccaatcaactgtcctgatgagctatttgctgtgatggcttgttgctgggccttagatccggaggagaggcccaagttccagcagctggtacagtgtctcacggagttccacgcagccctgggggcctatgtctgattttactctcacagtcccatggcatcaggagtacggtgcctgtcggggctcacttggaaccagtcatggatgcttcgtacgtcatgcaacaccagcagaagcacattaagtcttccagaagaccgtgccttaggaatgctttagaatctgagctttcttttaaagacagacttaataatgtggaatattttctagatatcatttttattaggttgaactgaaaaagtttttgtaaattttttggccccaaattttttaaaacatagttactttggactaggggtacattcttacaaaataaataa

SEQ ID NO: 7558 - DNA, 651 bp, Canis familiaris
  misc_feature (1)..(651): n = a or c or g or t
atgctatcattttcagcaacttaagaaataaatcacttaaagttacattgaaatttttcctgnngcnttaanctttcaaattttgtaattaattggacaatttaaatatatgtagagagtttaaattggacaatttaaaagcagccatatcagaatccatatccctagttacagtcacataaatgcaagtttatttgcaagatccttgaaaggaaaattttaatcaccaacaacaacctccccacccagagggcaaaactagacaagttttggtgtactttaattaggtaagcaaaacttagttaaatggatatttaaaggttccttctagtgaaccattccttttcaagaagttgaaaacccttgtgctgtattgactaaaaggtcatgattcatggagcgtctaagacttcgttcatgggaacctgatcataaccaggtggttagaaatgtttgcaatttagcacctgctggagtaaatgggtggacagacttctataatccaaatttttgacctgcatgttttttcttcaccccaactcattcctaacatgtaggctcaatcttctcagtatttgaactactggttcagcagaaaccaggaaaaacgataactttgtagtcagaatgttatccaactgtatattgttt

SEQ ID NO: 7559 - DNA, 682 bp, Canis familiaris
  misc_feature (1)..(682): n = a or c or g or t
tttgaagacgtggtggcactgttcctgcaaagcatccagctgtgccaggacagagtcccactggtaaacaacgcctaccggggactggccagacttgcaaagatgtcagagctggcagccttgcacgtggtagcagcagagggcagtagcggcctcaacctcatcaaggagacctatgagctccacaaggatgacnnnnanntnnnngagaatgtgtgcatgctgctggcccacctggcttcctacaaggagatcctgnntgagctggtgtccaatgggatccagccnnnggtnnaggagatcaaggagcgcttcacctccagcctggagctggtttcatacgcagagacggtgctcctcagcctagaggccaacacgccaccaggctccgcgggaggagagtcaggcctgccgtgaggcnncaggccccccgaagcctcccaccccctgccccttctctcctgtcctttctttccttgtacatccctggagctgcccagtgaatggttttccttagggttggggggggaacgtcacttcacttttcttggggatgaggcccaaggctggagcctggtggggctctgcgggcttggattggcaggcgccacacaggccttggccctggcccgctcagggaggcagctggacacagtgggcctttggggccatcctaaatgag

SEQ ID NO: 7560 - DNA, 592 bp, Canis familiaris
  misc_feature (1)..(592): n = a or c or g or t
cannnngtggnctgcgnngaggcgnnagtcacactcatctcccccttcgtgggtcgcatcctcgactggcacgtggccaacacggacaagaagtcctacgagcccctggaggaccccggagtgaaaagcgtcaccaagatctacaactactacaagaagtttgactacaagaccatcgtcatgggcgcctccttccgcaacacgggcgagatcaaagcgctggcaggctgcgactttctcaccatctcgcccaagctgctgggggagctgctcaaggaccacagccagctgacccccgtgctgtcggccaaggcggcccaggccagcgccctggagaagattcacctggatgaaaaggccttccgctggctgcacaacgaggaccagatggccgtggagaaactgtcggatggcatccgcaagtttgcggccgacgccgtgaagctcgagcgcatgctgatggaccgcatgttcagtgcagagaacggaaaatagcgccgtggccgagcgggactgcggacctgtgtggaattggggctgcgcgcacgcgccttgtgagaattctgcattttctaccaatcggggcagggat

SEQ ID NO: 7561 - DNA, 661 bp, Canis familiaris
  misc_feature (1)..(661): n = a or c or g or t
acctataccaacctcaaccgcctcatcagtcagattgtgtcctccatcactgcctctctccgctttgatggggcccttaatgtnnacctcactgagttccagaccaacctggtgccctacccnngcatccacttcccactggtcacttatgcacccatcatatctgctgagaaagcctatcatgaacaactctccgtggctgagataaccagctcctgctttgagcccaacagccagatggtgaagtgtgacccaagacatgggaagtacatggcctgctgcatgctctaccggggggatgtggtgcctaaggatgtgaatgtcgctattgccgccatcaagaccaagaggactattcaatttgtagattggtgtcctacaggcttcaaggtgggcatcaactatcagccccccactgtggtaccaggaggggacctggccaaagtccagagggctgtttgcatgctcagcaacaccacagcaattgcagaggcctgggcccgcctggaccacaagtttgatctcatgtatgccaagcgggcctttgtgcattggtatgttggagagggaatggaagaaggagaattttctgaggccagggaggacctggctgcactggagaaggattatgaagaagtggggactgattcatttgaagaag

SEQ ID NO: 7562 - DNA, 635 bp, Canis familiaris
  misc_feature (1)..(635): n = a or c or g or t
ggagtgcccagtgatgctgcagaggtacnnagaatacggcaagacctacctggaccgacaagaacccccctccgtgtccatcaccagccatgggaccccggaaggaattcagacactcaagtgctgggtctctggcttctacccacaagaaattgatctgcactggattcaggcggatgatacacaggagactaagtcggggggagcccttcttcccagtngaaacaacacttaccaggcctgggtggtgatgtcagcttcccctcaggacttagcctccttctcctactcctgcctcgtgaagcacagcagcctgtcccagcccctcactgtgctgtgggacaagaggcagggagcagtgagggcggaaggctctgaggacactcaggtgcagtagccacccttcctgtgagacctaagaagatgagctctagaaattgctgttgcattaccagtgaggccagggatcaggtggtggattcagagctggaagacttgagtgccagccactgagatgactcacttccaaactgcttttggaagcaactgcaaaaccccatcatctaatctgtcgaatcaaatcaacagtaatcaccttgcctagcacataatgtagaaaggtattttaaaantga

SEQ ID NO: 7563 - DNA, 646 bp, Canis familiaris
  misc_feature (1)..(646): n = a or c or g or t
aaacacctatgcaactccaannngnctgatgcctgcttcaccaggattagtgactcgtttcacatggtatgttgttttcttccaagcctgtataatgcacagtccttctgcagatataagagctagttttgccagtgatcttcagtggagttaaaatgtttatggtaattgtaaccttttaaatgagttatgtgaaaagagcatctcatttttaatatacccagatattttttccttgcctttgtgcattttccaggatttaattttcttaatttgttctttcctttcaattacagtgaagtataatagccgacctaataagtagatcccatttggcccctttaacacactatcatctgcagtatcataaaaagtcatctagaaagtcaaggggggaaatcaagaggcaggaattgggacagcaagaaggacagaaactcttcccttctcagtccacttcacaataaccattttctgacactgaagttttatatagacaacagtaagaaaactttgctttcctgagttatcaaatataaaagcttttgctttgaatttggaaaagatatggatgacttgactgcctggatggttacatttgctttccgtgaaatgctcagaaaatgtcaggacattccttctctaa

SEQ ID NO: 7564 - DNA, 648 bp, Canis familiaris
  misc_feature (1)..(648): n = a or c or g or t
acccatgagcagagtgaactagnnnnnaggtnntgngatggctntncttctctgtgaagcttctccttggaggagattgcattctggcaaggaatgcagtctgaaggaagaaatacagacaagccaccggacagcctggcagactgcagcgggacttccctgggagcacggtgggatgctcaacagaggagaggaccagtcctggaccaaggagctgttggaaggctagaggagataccacttctcactgaccactaccatccaggcccctgaaggcccggagggaccacccttacccccacccagacaagatcgtggagggagcgacgcttgaatgtagaacagggagggagccctgttcctgcgccatcggctggaacctattccgccctcactgaccatgggtaggggacctagaagtggagttcttggctgtccttggctttcagagccaacttagctctgcctcctcccccactggctaagttctaaggcccattctagaacttgaggctggttccaggaaacctctcctgacccctgccttttggcagtccccctttccagtccttccatggtactgtagcagggagctccctccccctccttgtgccttctttgtatataggcttctcacagcaaccaata

SEQ ID NO: 7565 - DNA, 323 bp, Canis familiaris
  misc_feature (1)..(323): n = a or c or g or t
gactggtgnnaggcatggacactgcccgacggctggcttggccttgctgggtctgcctagcccctatttagccatgtctccttttggaggcaggaacttagctcagttctcaggtcgtttctctgcctggggccctagctacttcagtcttgaagttgactcttttgtaggaacaatgccaacctgcttctagctggcaccgaacccagagtttctccctgagttgccagttttagcagagaggtctttttcctatcccctcagttcctctaccttaaagcgatgtgtgaggacctgtggnnnnnnaagtgagatagtgccac

SEQ ID NO: 7566 - DNA, 554 bp, Canis familiaris
ggacctccagctttcttcgtgcttgtttggggagggggctgctccgtgttagaggggaccttaaagctgggtggtgagttgaaaagttggatcctgatattgggacctcacagtggtgtctgaaaggacagatcactccagagcatcagggactggggacaggaatgagacaaccccgaggtacagcactggtttctcagtctctaacaggcaccccgccccccaacttggttctggatgttttggagggccttagatatgtcggtttgtccctctgtttttcagcaatcccctccccctttcccaacctgcctctccttaccacccccaccaccaccctgtgatcaaatattgaaggttaaccctttgtgcaggagcagagccaggtgggccctggaaatatttttttttaatataacaagagatatttataagtgggtattagggtcgtgactttctctcagcagggcaagcagtggggtgaggcttttaaatctcaccctctcctcaataagacgtgggctataatactgtgttgcctcccctcacccgca

SEQ ID NO: 7567 - DNA, 566 bp, Canis familiaris
  misc_feature (1)..(566): n = a or c or g or t
cactgcagcatcacnntcntctggtcccagagtgactggtgcatcccacggcccctccccaaggaacagagcaaaggatggacggcagtgaagaaattggccctcaaacccaagctatcgtgcagtagcattaagacccaccctcactagtgtgcgtgcccacatcagcagcatccgtcctgtccgatataaccacaccatggaaacaactatagcacaattattttaacactacttggtcatagatcagcttgctcctttctgtaattaggagactcagcatttcaaggggctgtacaaagtattactgtagctatgctaatggttaaccttatggaattaattcgtatttttctatggtttttatctgacactgtctctggtcacggggttgtttcactgtgcttgccttctttcttgctttcttgctttctccttcttcttttctgtttctttttggctttgcgttctttggtcagtgtgtaggctttgcacttgtttggataaagaaacggatcagaaggaactaactgctctctcctcaagattgtcttgagactttgtgg

SEQ ID NO: 7568 - DNA, 635 bp, Canis familiaris
  misc_feature (1)..(635): n = a or c or g or t
agatcctgctaaaataaggtatctccctggtgnctggnnnagtttagngccatgtgtgctgctgttccatcccctagaaattttctggtgaaagtgaccctaggnctgaaggttgcagaaggttggaaggatgctcatggtgggcctcgccagctggggaagtggggaggcaacacagggactgtggatggggctctgtggctctcttttagcaccggccaggttgacctggtcttttctccttcaggggatcttggggcctcaggctatcactttccccttctgagctcttcctccgtgactgttgattctggcctatgtagtacagagctgtaaatccacaaatgctgcagcattacacatacattgtaatatgtctgtgtccatttagaccctcataacctggttgagtgtgtgtgtgctcacgtgcatacgtgtgattaatgtagctcatagttganaatatnnnnnnataacagctgatgtatttatatgggagtgcagaattagtgcctgtggcagttttctgtattttaaactcattgatcaaattagttttattttaaggaaggggaaaaaggagtgggagggggggattgtaggcagaaggannnntagcaagatcattcnnnnag

SEQ ID NO: 7569 - DNA, 604 bp, Canis familiaris
  misc_feature (1)..(604): n = a or c or g or t
cnntctacacatgaagattaggctgtgcctggnnctttttttttttttttgtgcctggttctatgggcctggtgtctgggcgccagggtcaaggccatctccagtgtggggctgaagcaccagaaagatgtatgtcacttcctaccaggtgatcgtccatggacagggcagcagcaaacacccaggacaggacgtggatgtgtggctgtggcagttggagggctcctctatggtgacgatgggggaacagcatctgagcctggccccagatgacagccttctggtgccagccgggaacgcgtatgcctgggagcgagggcgaggctctgtggccctggctgtgacccaggaccccacgcgcaagaagcccctgggctgatcctcctggtgtggccctgaagcagccacagtgtcccccccatcactcccctaccctctctgcttctgcacatactgctgctgagccactcagtgtccccagcgctgagccctgggcatcaccatccaccctcctctggtcctctcagccgagaggctgggctgctcttcatccctctgtccccacaggctcagcgcagcatttgcctgccatcgagaaggcccc

SEQ ID NO: 7570 - DNA, 531 bp, Canis familiaris
  misc_feature (1)..(531): n = a or c or g or t
cagcatttggtctggcgtcgattttgacacaaatcctcanngccgggcgttgttgtcacagactgttttggaagacaagacgtaatggtcggcgcctcagcagccccctcagactgtgagatcttggcgacagagatcatatgcagcaaagtaacaagagaaagagtcaggtgatgccaccatggagtagaactatcatgccagctccagcctgccaacctcaagattttagagcaacacgcttctggcttagttctctgttctttgtacctatggctaattctgataaaaatgcaaactaagaccagtaactatcattttttattcacgagattggcaagaatgaaaagattgttgtaccaccagagacagcatagcaccgtggttaatatcccacctgggctggactcctgccctggactgaccagctgtggaaacgtggatcaaatatgtcatatcagtgccttgtgccttttttgggtgtgtcctcatttgaaaaaaaaaatgggggaaaaccaacgtgaatctgtt

SEQ ID NO: 7571 - DNA, 554 bp, Canis familiaris
  misc_feature (1)..(554): n = a or c or g or t
gggacgtgcctgtcatcgccatggagaccgccnnagcccacagcttccacgctgccaccactgccggcaagctggtctccctgtcccaggttaccaggtgagcagagggcctgcctctgtcggtgttcggtaagccttggggagcccgcctcggtgttggctgcaaggtagacagaccacctccatgtcagtcnnnnnttacagatgaggaagctgaggctttggtcacttgcccagagtcacaagccagcaagtggtactgctgagactgaatgcgaccgagtctacgtgactcagtaccatgaacattacactcctcacatgaagaggccaatattacgcatttattgagtttcctgcagcagggttttacacaccttgttgatttgccaaccatttactgggcccctaaaatgtgcaagcggtgctgatcctggggacagagtggtgaataaacacagcccccggtccccaggagctcatatcccagccccaaacctttgagagatgatacttaagattaggtttggcacattatacaagtaccccaaata

SEQ ID NO: 7572 - DNA, 598 bp, Canis familiaris
  misc_feature (1)..(598): n = a or c or g or t
cagctgcaccagcagtggcnnagacccctgacatcaagctcttngnnaaatnnagcactgatgatgttcagatcaatgacatttctttgcaggactacattgcagtgaaggagaagtatgccaagtacctgccccacagtgcaggccgctatgcagccaagcgcttccgtaaggcacagtgccccattgtggagcgcctgaccaactcaatgatgatgcatggccgtaacaatggcaagaagctcatgactgtgcgcattgtcaagcatgccttcgagatcatccatctgctcactggtgagaaccccctgcaggtcctggtgaatgccattattaacagtggtccccgggaagactcaacccgcattgggcgagctggaacagtgaggcgtcaggctgtcgatgtgtcccccctacgccgtgtgaatcaggccatttggctgctgtgcacaggtgcccgtgaggccgccttccggaacatcaagactattgctgagtgcctagcagatgagctcatcaatgcagccaagggctcttccaattcctatgctatcaagaagaaggatgagctggnnnnnntggccaagtctaaccgttg

SEQ ID NO: 7573 - DNA, 602 bp, Canis familiaris
  misc_feature (1)..(602): n = a or c or g or t
agctacgatggaatttccttctcactgccgtgagcaaagccatgacnnnctgccacagagagagtttcggctcctggcatctgtttcatttgctgcttttggaatttgtaactcatatacttcagtcacgcatagaagaagaagaggaggacgacgacgtgggaaatctcaaggaaatgctaccagatgaccagtctcttgtccagccagaccaggcacctttccaccctccagattcttcaccaactcaggagtatgacagcccaagtgtggatccacaccgggtgacactgaaacacatgggccagagccaatatcctgtgggtgtgagcagtgtggttctcagggtcctgggcttcctggtggacactgacacaggcaataagctcatccaggtattactagaagacaaggccacggaaagcactgtcaaactcagccttcctgtgggacaagaagcccttgtgaccctaaaagatggacaaaaatttgtaattcacatatcagatgtacccccaaagctctgaaaatattttttttcagggaaagcaatgctaatatataaggttattatttgaataggacatgagaagacatagatt

SEQ ID NO: 7574 - DNA, 555 bp, Canis familiaris
  misc_feature (1)..(555): n = a or c or g or t
ttcacgcccccaccccaggnnaggcnctcngaganctttgcgcgcttctgcaaagccttggactctgctggccagcacactgactcagcttcggaatccatgactccgccccctgacaccctggctccggcccttgagaaccagagtcagcctctcaaaggcgggaccccaccctcttagcccctcaaactgcgctcagaacccctcaaactccagctctactccccaaggttctggctccacagagagtctgaccccattcccagatatccagtcccccatctctgacctctaaggtcaggtcctggaagtagagcttgcctctagaatattcactcgggtatactctcaatattctccaacagctccagcggtgtccctagaatttcagattaccttcctgggattctatattctgttcctagaattctagagtgttctttcagggttccacattccattcttgagactctagagatccggccctgagtctcaggccctctatgtggttttcttgtcctcagaggtcctattttacctgagggttgggggaat

SEQ ID NO: 7575 - DNA, 310 bp, Canis familiaris
  misc_feature (1)..(310): n = a or c or g or t
gcnggcgctgggccngagccccggggtagccacgcccccccacgcnctcatttcttcntagtacagttttgtctcctccacccccttcctattttcttgctaatcccagaacctctacttttggtatttttagaatgagatttgggaggttcccagtttaggacctttcaccctaggatgatgaaagtcctcnnnctctgtaaatatttcctttccacctatcccaaccggtggnnagccagcctggcagaaagtgaccccgggtaccgacctccccacgtcgggannngccggcccgctccccgctccc

SEQ ID NO: 7576 - DNA, 564 bp, Canis familiaris
  misc_feature (1)..(564): n = a or c or g or t
tttcctgctgcagagttgggtnnacnttttctgggtataggatgttgagctgaatctcagcatcctnntgcagggtnnagttagggaatttggtgctcagctgctgtccctctctcttccccaaaccaaacaatacctactccaggatcccttgcaggagatgctcaagtttggctgcagagcnttctctgatgcagggaggggttgccctggggtgagggaacccaccctccatggggagcagctctgggtgtttggtagtgttccaggctctatggggaagccacacctggatctgggttccttgggagaactggtcctttctcctttcccaccctaagaggtctgagagctggactctaggcaggacagctggtgcctaggcctttgtgctgctgccatcacctgggaggagtgggctttcatatggagggtgtctccctttgctaagatggtcactatgagaaccactgggtttgaggtggccatgggtagagggaggagagggagggaaacatgggcatgcgtgtgtgcatgtgctgggggtatgtgtgtgtgagagag

SEQ ID NO: 7577 - DNA, 581 bp, Canis familiaris
  misc_feature (1)..(581): n = a or c or g or t
gtaagatcctggttttnntagctgtngaaattttannnnnctnnannataaaagtaatggctctgnncaatgcagagaagataacaaagtttctnnaaaatattcctcaggacagctcggacgcgattgtgagcaaggccatcgacttgtggcacaaacactgcnngacccccgtgcactcagcctgaccgctcctgatgcgcatggcctgccaggcccagtcactaaacttaccgaaaatagggttcttgcttttgtgcccaaagcataattttttccgagtaagattgggtggcatatcgtggagcagcatcttgtggttcacagaagtacaaagttcaactctgaatagcattgaaaagggttattcgaaaacacttccccattttcaaaacagttcaggcagggaaggcgggcgctttgataggcagtgtataaccaagcctgtcccgttcctctctaannngcaccaagctcgttactttctaaggttatttctggaataaagaacaacttccttttgttgacagctcagattcggctttccttgatgcagtacnnnnntaaatctaagctgnctg

SEQ ID NO: 7578 - DNA, 143 bp, Canis familiaris
  misc_feature (1)..(143): n = a or c or g or t
gctcattagactaaattggaaactttttgttattcttcaaagcatagccttcgaaattctaatttcttagtgatgcctaagatatttgaggtttcctctttggtgcgatggccactgaccttcttacgtgatgnnngtgaaat

SEQ ID NO: 7579 - DNA, 517 bp, Canis familiaris
  misc_feature (1)..(517): n = a or c or g or t
gatcgggtccctggacaacatcacccacgtccctggcggagggaataaaaagatcgaaacccacaagctgaccttccgtgagaacgccaaagccaagaccgaccacggggcggagatcgtgtacaagtcgcccgtggtgtccggggacacgtctccgcggcacctgagcaacgtgtcctccacgggcagcatcgacatggtcgactcgccccagctcgccacgctagccgacgaagtgtccgcctccctggccaagcagggtttgtgatcaggcccccggggcggtcaatgatcgtggagagaagagagtgtggaaaaaaaaagaataatgatctggcccttctcgccctctgccctcccccagctgctcctcacagaccggttaatcggttaatcacnnncctgcttttgtcgctcggctctggctcgggacttcaaaatcagtgacgggaaaaagcaaatttcatctttccaaattgatgggtgggctaataataataaaatatttnnnaaccan

SEQ ID NO: 7580 - DNA, 563 bp, Canis familiaris
  misc_feature (1)..(563): n = a or c or g or t
aannaaagaatgaatatgancttaggactcatgaggnnnactatccatcggngcacgaaattcaaccannaaatgtacatcactcggggcctcatcaagggtcctctgtcaaaaagtcacctnnngactcgagagaaactggatagacctctggttcgggtgtaccagagacacgtgggcacccagctgcccgaagcctcgcgcctcgctcagggtactgacaagctgcagcgccacatctcgcacgtggaaaaaaacctgaaggagctgctcgccacgcacaagaacctcaccgggagcctcaactgcaagaagaccgggtatgaagtggactacaatgtggtgcgcctgcgcctccgccagcggcacccgcacgtgtgctacgagcaggcgcagcgtctggtcaacgactgggatccgcgcacgcctccgcgcgtcgagtcggatgctgcagcgaaatgacagcctctccccctgccccggccatcccgcccactcacagctcagtggccctccctctcgcctgacctaccctccctttaagcatcctctagcagaactat

SEQ ID NO: 7581 - DNA, 546 bp, Canis familiaris
  misc_feature (1)..(546): n = a or c or g or t
actgacccnanncccgatgcagctactataaaaaatgatnnnnncaaacaaaaatctacnnncnnnnntgcnntctgtcnnaaannatgtgccntagctgatcatctgcttcatgcacaagatcaagatggggctgtttccagtgatactgaagggagaaaggaggaaagagaaaatactctggattctgtgatgttaactttttgggaaactacaaaatggactgatctttttgacaataaggttttaacatttgcatacaaacatgcattagtacataaattgtatgggagaagccttaaatttgcaactaaacttgtggaagaaaagccaacaaaagaaaactggaaaaattgtattcaactgatgaagttacttggatggacccattgtgcatcttttactgaaaactggctccccatcatgtatcctcctgattattgtgtattctaaaataggaactaagactttaaattttaaaaaagaaagttttatagtgaatggatataaaaacaaatttgtggcatttttagtcttaatgcatgt

SEQ ID NO: 7582 - DNA, 529 bp, Canis familiaris
acttacacagtcttttttttggtggtggtgaagtcaatctatgtatttgtatagctttccatacatgatattcttggggatatttgccttgagaaataaaatcagctataaatgcagttaatcctctatgacatagattttaatgatagatatttttacatgtatccatatacagtacaagaaggttagtaaaggatgaaagaatgataaaagttttttctttgtttcctcatgcccaaagccaaagtcacacaagtcacaaacttggaaatgtatttttgtgaaatagatgattataaattggacccatatgacttaaaaggaaagatttgaaattaacctccttgactaaatcaattccttatccttaatattccacatacattccagttctttgtacccctgccccaaaaatacctggttcctatttttttctggtgataatttctagtccctgctagtgttcatacttagagcattcatacagtatacttacttattttttcattgaattcttctatcttaaaac

SEQ ID NO: 7583 - DNA, 588 bp, Canis familiaris
  misc_feature (1)..(588): n = a or c or g or t
ttatttagannnttttgtgcttgcatattcccttngagcttagggaaacagtacctaatagaactatagcagcgggaaagggtccagttttgctcccttgtttctgaagatggaatgactcaaaacttcccttttcctgcccctagcttgcagcctactctgggcctcgaagccctcattttctctccatattgggccttgatttgtgctgacagtcagcttttggctccttcttcctgtgacagtggaaacaatgccagctctgtggcctctgccgtggggactgggagtggggctgtgggtgccactgcctgtgggttgctagcttaaaggacagttctgttcattggtcagggtcttcagcacccacacagtgtggctgaaagaagagggatgggggtggaggggaatgaccctgtcccagctagagggagatcaggagggtcagttgactcttaaagcaggtttggggagaagatatatagcttttagagcaaagggaagatccagaaaattacattgaatctattaagggttattttttccccctgcatttctggaaaaacaaggctcttttctaatccaaat

SEQ ID NO: 7584 - DNA, 693 bp, Canis familiaris
  misc_feature (1)..(693): n = a or c or g or t
gagctctgctatccccatcatcatgggctccaacatcggcanctctgtcaccaataccattgtggcattgatgcaggcgggggatcggactgacttcaggcgggcctttgcaggggccacagtgcatgattgctttaactggctgtcggttctggtcctgctgcccctggaggctgccactgggtacctgcaccatgttactgggctggtggttgcctctttcaacattcatggtggccgcgatgcccctgatctgctcaagatcatcacagagccctttaccaagctcatcatccagctggacaagtctgtgattaccagcattgccactggtgacgagtccctgagaaaccacagtctcatccggatctggtgccacccagaccccatggggactgccacagaagtgtccttctgcaccgtgtctactgcccagaatgaagatctgtttggatcagttggacacctgtggacctgccatgaccctaagctcacaagaaagcaggcaatcagcatactttctcactcagccacgaaaatggaagtgcttcatcaaaactgtaatccacagtatttgcttcttaattgtcacatataagaagcaactccacttagaacaagatagaaggaaacccgaagcccaaggctccgcgcaggtggccccctcatccttcctgttacctgatggccctt

SEQ ID NO: 7585 - DNA, 464 bp, Canis familiaris
  misc_feature (1)..(464): n = a or c or g or t
tactgcataactcacagccgattccanggcactcgttacatgctctannnaatatcagtaacaaggtgcaaaagagaaccactggctcttgcaaagtcatctccagtttctgggttaggaggaccatattttctgtngcctcacatctaagtggggccagcttgtctggtgactttggaggcttatcctgcttatctaatggatgcatcctatgtactgagctaccaccacaacaatttcatgagagatataaggaaaatctactgcttcctgcctcccacttcagtacgacaaatgtgttaataaaacccctacacggaatttcatacaaagtaagtcaaacagtaattatagtggcatgtgatgtatttggcttaaagaagcttgtgttactgaagttaatgcaaaagtctggcctctgctcatggtgttattaaatatatatcctaagggatcagtcatct

SEQ ID NO: 7586 - DNA, 603 bp, Canis familiaris
  misc_feature (1)..(603): n = a or c or g or t
cacnncaccccagtgtatgnngcntgcttctctctcctctaaaggactggggcaactcctgctggccagagggctcctgggcctctgggngcgggggtggggcaggaggaagagnnngcaccccccacagggagaggctggtgccttccgtcctccgctccagcctgcccgtttgccgcacgctggggacggccctgcgttggggtcggctggaactctgctgtcgcctgttctcaggagctacaaagatctcattcttgttctgaagctgccacaccccagcagccttgcattcagggccccactcgggtgtgtctggaggggcagctccgtgccttactggctcccagcagcagagacctgcgtgcgcagctgtgcacccctgggggaggagccaccgcagattccacttcggcggacagtggcgtgctctgggtaacccgagtgtctgctggtcaattcaggcacctgggggactgcaggccaggctggtgccgtgggaagaactgcactcggtgtgttttcttcagggttagaatcacagatggggtgtggtgagaaggcgggatgcaagtgtagtaggtggtgtaacttttccttaaa

SEQ ID NO: 7587 - DNA, 555 bp, Canis familiaris
  misc_feature (1)..(555): n = a or c or g or t
tacatagcccccaccatnntcatagacgtgnatacccagtcccaggtgatgcaggaggagatcttcgggcccgtgatgcccatcgtgtgcgtgcgcagcctngaggaggccatccagttcatcaaccaacgcgagaagcccctggctctctacgtgttctctctaaatgacaagatgattaagaagatgattgcagagacatccagcggtggggtgacagccaatgacgtcatcgtccacgtttctgtgcactccctgccttacgggggtgtgggcaacagcggcatgggatcctaccacggcaagaaaagctttgagaccttctcccactgccgctcctgcctggtgaggcctctgctgaatgacgagtctctcaagaccagataccccccgagcctggccaagatgacccgtcactgagatgcacctggcctctccgcgctacacccctgcctctgtccggccctaggaggattgttcctgggccccccctttgctcctctgtggatcagcgcatgtccccactcccatctgggccctgggcttcacttcccc

SEQ ID NO: 7588 - DNA, 607 bp, Canis familiaris
  misc_feature (1)..(607): n = a or c or g or t
atgatgactnntccacacnnccacttatactgtcagcagtatgctgaagttaaatatacccaaggtngacttgaaaacctcgaactttcaagaaagtattttgcgcaggcactgaaactgaacaacagaaatatgagagctttgtttgggctttacatgtcggcaagtcatattgcttctaatccaaaagcaagtgcaaaaacaaaaaaggacaacatgaaatatgctagttgggcagctagtcaaataaacagagcttatcagtttgcaggtcgaagtaagaaggaaactaaatactctcttaaggcagttgaagacatgttggaaacactgcagatcacccagtcttaaggtttcagactctttcacattacatttcacaactgcacagttgaacttattggcctgtgacttatttactaaatgcctagtgctatttatatactaatttttgttaagagggcaattgtaaagaatgtttatataaacctaaaaatgccttttattgctaagcaggaagatggagaaagtccatggaagagagatttaacaagattcatattgattgtacatcattctcttcatatcacacatacagaacttcttt

SEQ ID NO: 7589 - DNA, 560 bp, Canis familiaris
tccagcttcctgagtaccagtgacacttctcgccaagcaggacagtgcttgataacaggaacaacatttacaactcattccagaccccaggcccctggaggttgcctcccaatatgggggggaaggagactccactccaggtgtcctagacctcaactcttcccgtagatgctctgttcttctcacagatgtccagtgtccctggactctgcaaaatcctgggggtggggggagggggggtcagaaccctgccatggaattgttcccttcatcacgagttctgccgaatgccgcgatgggtcgggtagggggaaaacgggttggggtgggatataggactagcaccattttaagtccctgtcacctcttccgactcttctgagtgccttctgtggggactccggctgtgctgggagaaatacttgaacttgcctcttttacctgctgcttctccaaaaatctgcctgggtttggttccctgtttttctctcctgtccccctcccccccatccttcatatgaaaggtgccattggaagaggctacagggccaaatgctgag

SEQ ID NO: 7590 - DNA, 658 bp, Canis familiaris
  misc_feature (1)..(658): n = a or c or g or t
gtgaccgaagnagctgcccccgagcntgtgcnnnanctgagttctcattccgcttgagctcttcttccctgaggcagaaacccatttctgcaggcaagcagatgcttgacagtaagttcctgagacttgatcaccattcggtgtttccgtctgtacctgcggctctcggccacgggagaaccatttggcgggtgtgacgccctctttcgctcggactggttggccatcttacctttgtacctcggtgtacctgagggagcagagggggtgtcttaaccttgcttcactgtgtggcccccatttggctggagaagcatcgagacccggccaggtagcagcagggccggcagccagttcagatgcgtgtcgccgcgctggtgggactggcgttgtcctggatctttacgtggcgggagggtcgccgctgtgtgagggtctccgtgctgcattgctgtcttggaaaaggtgcggaaacgcacccgtgttttatttgtaaaggagcagcttgaacagggcaggtggcatgcagcatcgcatggtgggcttggcagcaccttttctgtgtatctgtgagggaggctgctttctgtgaaatttcttttctatttttctatttttagtactgtatggatattactgagcaccacacatgatacgt

SEQ ID NO: 7591 - DNA, 587 bp, Canis familiaris
  misc_feature (1)..(587): n = a or c or g or t
ccccatgnncactgattacatcattatgnnctactcagtcaaacacnntaaatacccgnntcngaaagacnnggtccgagctgtgtccatccagacgggctacctcatccagagcacggggcccaagagctgcgtcatcacctacctggcccaggtggaccccaaaggctccttacccaagtgggtggtgaataaatcttctcagttcctggctcccaaggccatgaagaagatgtacaaggcgtgcgtcaagtaccctgagtggaagcagaagcatcagccgcatttcaagccgtggctacatccggagcagagcccgttgccgagcctggcgctgtcggagctctcggtgcagcacgcggactcgctggagaacattgacgagagcgcggtgacagagagccgggaggagcgcttgggtggcgcaggcggcgagggcagcgacgacgacacctcgctcacctgagcgcggcgccaccgcagggaccgagacaagacggagtggggccaggggtggcgggtcctcccgcgccttctcccctcccccaccccctgcgcctcttagggacgctgggctcgggcccagg

SEQ ID NO: 7592 - DNA, 638 bp, Canis familiaris
  misc_feature (1)..(638): n = a or c or g or t
tataaaagaagacaatgcactgannttngctccttatgatgcctgctggaatgtctgtcgaggagaaagatgggaagacttgtccaaatcacaggtgcgctgctatgtccatatcatgaaagaggggctctgctctcgagtaagcaccctaggactctacatggaagcaaacagacaggtgcccaaattgctgtctgttctctgtccagaagaatcactgattcattcatcagcccagattgtcaacaaacacctgattggagttgacagcctcattgggccagatacacaggttggagagaagtcatccattaagcattcagtcgttggttcatcctgtgtcataagagatagagtgactatcaccagttgccttctcatgaactcagtcaccgtggaggaaggaagcaacatccagggcagcgttatctgcaacaatgctgtgatcgagaagggagtggacatcaagaactgcctaattggaaatggccagaggattgaagccaaagccaaacgagtgaacgaagtgatcgtggggagtgaccagctcatggagatctgagttctgagcaagacagactccttcctcttgtccctcagaactacagatgttggcnnnnccacctgtttgactctgt

SEQ ID NO: 7593 - DNA, 503 bp, Canis familiaris
  misc_feature (1)..(503): n = a or c or g or t
tcangctatccatnatgaactgagaggtatatcaggacagccnnnnnnnnnnngtacagcacccaaagtgatcgtcagcaatcatngnnnnngtgatacagttcagaacaagcaactgcaagcagtactccagtgggtagctgcatctgaactaaatgtcnntattttgtactttgctggtgatgatgaaggaatccaggagaagctacttcagctctcagctgctgctgtggacaaannacgcagtgtaggtgaggnnntgcagtcagtgctgcgctatgagaaggagcgacagctggatgaggcggtgnnaaatgttacacggctgcagctgctggactggctgatggtgaacctgtgattggcgcccacccactgatttcccctcttcccctccctnctgacttccacagctcccctctccatatccttacagagccctaacattatcttcataccactcacatcaaagacatgtcatnnnntgctagtcactggatttt

SEQ ID NO: 7594 - DNA, 685 bp, Canis familiaris
  misc_feature (1)..(685): n = a or c or g or t
gcagnagctgcagtgtcncaagatnaagacggtngatatcagtctgattctttctgaagcaattcnnagaatccacaacggggagtccatggcataccttttccgaaacatcactgtggatgactaagctgtcacggttgccttgactgaaactcccgaggaaaacatgtggagtgcagtgccatcaacttctgtacatggtgtttcttctcacgggaggactggaaatagcctgaagtcagatagtctcgccaagttgggtaggtaggaggccttaagatagtcaaggggaagacagagctaatagaaacatggccttaagtgtctgccatcgtcctcctgtgcctcaaacaaaagttacagacacttttctgaaaagaatccccaaatcttgctgatattgaaaaggagttaaaggcagaaagtcttaactctaatattcggttatttccaccgtgggaaatgtgtgtcaatgttgaacctggttagggaagctgagtgtcctggtactgtttccattctagttgtcctctccccagtcaacctcacataagtttttttttgtagaaaaaccctatttttccttgagaagctactgtgcctacagccagtgaacaacgaagcctttgtggcattaccccagccaggaggtcagattagagagtagcgtcctatctctggatac

SEQ ID NO: 7595 - DNA, 622 bp, Canis familiaris
  misc_feature (1)..(622): n = a or c or g or t
ctatcacagaagtgacccacaaattgctatatgnctagattgtttacgaaataatnnacaatcaggggacaatgtagtaaagggtttaatgaagaaattcattcgatgttctacacgtgtaactgtgggaactattaaaaaatttttaagtttaaaactaaaacttccaagttcttatgagttggatgtgctgtgcaatggtgaaattatggggaaggatcacactatggaattcatctacatgacaagatggcgactaagaggcgaaaactcctaccccatggtattgcagtatcgaccaagaattgatttcggttagaccaaggggccttgatcccactgagatgaatcctgcactttgtttactcatcaacagatcgcacagtgaacggtgtgtggacgagagggacacaaccagattttcagcatgcaaataaggccattgtctgtctctaagttgtcagttgcatttatgttgtttctattaagagtgaaccaagtgccattctgctactgaaccacccgcataaggtatctgtgctgtctcaccatgtaccatacaagccagggttgaaatcagctaggtgtgcagccatgattcagcctctcgcatatcttgctt

SEQ ID NO: 7596 - DNA, 622 bp, Canis familiaris
  misc_feature (1)..(622): n = a or c or g or t
gcacaatgagtctgttacaagtgnnntaancngagccagcagggcnntctacttgcccgctgctatactgtatgtaggaaattgcactgtggctgctttgtgtcaagaagagagtttttccctctcatcttgattccccttcagccaaagcaaaaggtgactgcttcataggcttgtgcctgcaagtgggaccctgcagtggccatcaggtcccccgtggggatttcagagacactgaaggagaagcatcttgtctgcacagctccagatggttctccacccccttcctccactcattgccaccagggagttgctgatcagggtctactccagtggcccagggggaatgcaggccgacaaaccagagctgcacaccatggccccttcccgtcacaagctccgagagggccagggtgcctgccaccggagccctctcaccaccaggggtctcattcttcctctgaggctctggtggaggtgggtatcccctgccagggccagcacttgatgtgaagaatgaattcaaatcccagctcttactgttaagatttgatgtggaatcacagctgcagtgatacatatttttatcagcgcttggttggttttaaataaaatgcacgct

SEQ ID NO: 7597 - DNA, 656 bp, Canis familiaris
  misc_feature (1)..(656): n = a or c or g or t
agacntgatcgggcatgtcatttcaagnagtcccctcctccacatttgtttttgccaatttgcacattaaatgacttccctcaaacatgtattatggggcaagagggggtagggtttaagatttaggcagttgggttttttaagggccctttttcaataactggaacactctatacaagagacttatttanntagatgacaatgactatttttgtttttattaaaagaaagctgacatgcctaccaagatttaatcttttatgattgcctttttataactttttatattcttagcacagcgctttacctgttaaagatgtggcaggttcaaattactgaagcagagtggcagtcttaaaggatgcagagtgaggtgtttcttttatacgcccagaatgcaaacttctaagcttttgcctcagctacattgttttttttttttgagacgcagtaccatgtttatttgaatggagttgctgaacagtaacatagctatgatttttatttgaaacactgatttcaaatattttgacttcttgagggtatattttatatagcaagacacttaatatataacagtaaagaatggtgaagtactttattttctaaataattcctgtcnnnatttatcattaacaannnaatcctatatagcg

SEQ ID NO: 7598 - DNA, 547 bp, Canis familiaris
gagaacaccacgagagaaaactctcggccaacatccatcccccacttggctgtgggcagactggctcatgactggcggggaggctgagccgggccccacagtgaggatgcagctggcccagccgtgccagaatccagggcatacttgcaactggttctctagccctggtgtactggcccagccttctggtcactgcagacattcgctcaggctcggggacacccttctcccatttccagagaacagtccagtggtacaaggaccaaaagcccaagatgtgtagatgactgctgggtcgaggcggccaaccgcctcctttctgcttcctgatcaggagccggttggttttctctcctgagcccctggcctgggagcagaatggttctgagagaggaaaggccagaggccagaggccaggcagtttcccagccctgggccaggtgtgagtgaggcaccgggacgcatgccttagccacaccaaggagactttgcggtgtctttttaaccttctcagaaaacttctcagtctctgatttatgtaatacta

SEQ ID NO: 7599 - DNA, 405 bp, Canis familiaris
  misc_feature (1)..(405): n = a or c or g or t
ccattatttccagtgagctantnannngacatttttaaagnanaagtactgattatctttcaaacaagagtttattaactggaaatttccctaagtactttcatcaccatggaaagaacaataggcttctttgtgctgtgttaccttaatagcaacactcaccctgggtcagttaggtttcccaaggtatgtacatgcaggtaaatgatggaaggaagggggaaaaatgtcaccagctgccggcatttactataaatccttagcactgcatctaactggtatggtaagaatgtaaatgccagctatgagctgttgttaggaaggcaccaacaaagagccttctctgcgcggactagaagaattgaaannnnaattgccattgagtacatatcatatcagttcagg

SEQ ID NO: 7600 - DNA, 462 bp, Canis familiaris
  misc_feature (1)..(462): n = a or c or g or t
ccaggggctccggggaccacccgtcctgnctcctccagctcccgactctgcctctcttgtcacctagcgcgtccccttgggggcctgccccctgcctcctgctgtgagcactttgtggaggctcctagggctcaccggccaacccagggcgcctctgggtcagaattcagttccccctgccacccaaggtcatattcccgggccgtgggtgaggaccgggcgccttcgagggagccattaggcagacaggaagagccgagcggagaccccaacgcgcggcttcccctgcggcctctgcccgaggccaccccttggcacttctgccggcctccctggctgaggcacctccacaggcgtcagtcaggccggtgctgactggggcacaggggcacccagaccacttgctaggatcccagcaagttctggccgcgtggatttaaagcagaagctgcttcccacccg

SEQ ID NO: 7601 - DNA, 542 bp, Canis familiaris
  misc_feature (1)..(542): n = a or c or g or t
tacatttnnaaggcagnnnaagagnnnagctttgtatacagtgggatttgnnagttagggataatgagcacactgcattcctgttaacatttttattttttcaaggtaacaggaattgtatacaaatnacagtagacccttgcctnnttatttttatcnaaataaaagataactcaagatgaattctcaagaaagaaaaaaagctatgtacataagggactatatcttccttcatcgtctacttggaaccagtagttgtgttgctgtcatagaatcagggaagaggttgtggtaagttggaagaggtacatatgctgctgttatcattttaccagcaaaccacctgccatgcaatgcattgacagcagcaatggctgctgcaattgatgggcacttcacatacacgttgccctgagcagaatttttgtcaacataaatatgaataactcctccatgtttattacattcttcaatcacatcatccttaatctctgtatcccatccaacttcttcttctgtttgagggttaaacatgttagaaa

SEQ ID NO: 7602 - DNA, 603 bp, Canis familiaris
  misc_feature (1)..(603): n = a or c or g or t
ctgtgancaggaatattgtagaggaatntattcgagaacaagtgnagctactccagaccacaggaggcatccaaaggactttgccactgactgtccagaaggtgttggcgtcccaagcctgccatggggccattaagtttaatgatggcctgagccgagaggagagctgtcgccttattgaagctctgtcttggtgccagctgccattccagtgtgcccatgggagaccttccatgctgccattagctgacatagaccacttgggacaggaaaaacagattaaacccaatcttgctaaacttcgaaaaatggcccaggcctggcatctctttggaaaagcagaaagatgtaatacaaggcaaagcctggaggcatccatgcctccttgtgagccaccatgagaacagaattactgatctgtatggaaccaaagggatgctaactatatgcctctgagcagagaccatgagcagcagataccagcagagtcctgagttggccggtgcccccaagcaacatgatattggccaatcttgagcagatgatcgctccaagctaaagagagttcattcgtctgcagnnnnnnacataggaggttgccct

SEQ ID NO: 7603 - DNA, 648 bp, Canis familiaris
  misc_feature (1)..(648): n = a or c or g or t
tctcagcnncgcacttataggggctgcccaaggaantatgaacttcctgttcttgagactnnggcaaagtttcctgcagtgctgacctttccaagtccctaccctataactgctcttggacttagactgttttgggttctgctaaccacctatacagtactaattgcagtattacttcaacgtgtgtttctttacaattgaggacgcgcttagagtttctaatccctgccccaacaaaatttacctctgagacccaaatccagccctcttcttgggggtttgcccaaagatgtgtgttaatcaaaggtttaggctctagggtcagaaaactaaggttcaaaatcaccactccacgtttactagctgtgtgaccttggacttctcactgaacttctcagaccctcactttcctcagttgtacaactggatcattatgagaatcaaaaacagtacatggagggtaatgaggggaacgtatgtaagtaaagggctttaggggtgtctggatggctcagttggttattcccagggtcctaggatggagtcccacatcagtctccctgctcagcagagtctgctccctctgcagctccccctgcttgtgctagttcnnnnnctgtcaaataaataaataaaatcttnnnaann

SEQ ID NO: 7604 - DNA, 650 bp, Canis familiaris
  misc_feature (1)..(650): n = a or c or g or t
gtaatatgngnactaactctgtattgttcagcagnnngtaaattgttnnaaagaannagttcattgtagacattttgagattataagttccctgtgctttatgatagtttagtgcattgtgcacttttactttatttcatgttttcttttattttccctgtgacatgaaacaaccaaaacggaaagatcaaagttgagattatatcctattgattagtatcagatttttttctgtatacaattataggattgtaatctaaactggaatttttaggcagtaagccactataaaatgttttaggtaagacgtaagatgattataaaaagcttaatgtttgtaaagctaacttttttagtattttttttccatatgaaaaagtagtggtggctgctaaaaaaaagctacagtgtttattaaaggttgttttggttcatgtaaatatttgtaaattggtcagtgcctgtacattgaaatatgaaaagtaatcttgaaaacgattttaactttttcagaaggactgtgtacaacttcttttagacctgctgtagcagtttgtacctctaatgtctttgggttttttgcagaccaattcaaatgctaagacttttgctttctttgacttgtaaaggtgcatattttcattttcttc

SEQ ID NO: 7605 - DNA, 542 bp, Canis familiaris
  misc_feature (1)..(542): n = a or c or g or t
ggggaattagggnctgtgaagagcagcccggggttnnnctggcatgtnngtggcaggaagagacagcngnnntctgagcctagtgaaacgtagtcagagagtngaagcggaatcgtgtgggagtgaagggtggcagggaaatgggggtggggcctgccagcatccagaccccgctgtcagactgcagaatattgagtgctccccgcagatggccttttccttcttccctggtgctgggagcagagggggttcccgttgcttctggaaggggcgggaaccatttccctcgttgtatctcttggactagggactttcctgctccccctcatcttcaaaccaggctctactgtgagagccatctcacatatctcaggatgatttctgaaaggattctgcagattgggaatttttcacgtgaggtgggcaaaagccacattcctgatttcatagcaccatttgtattttgcagggtctcctggaagcaagggagccctttgtcatcatcagtgtgtggttccaannnnnnntgggccgtgtctgct

SEQ ID NO: 7606 - DNA, 639 bp, Canis familiaris
  misc_feature (1)..(630): n = a or c or g or t
cctgatcctgtcagctcagnnggtggtcactggggcaattgtcagcgtattnnnnnnnnnnnagggtttaaaagcttgggtgcttgtgaatgcctggttcacctatgcaannnngccagcattttttgtcgtactcatcgtncttgcttgctgtgggaaactccgccgtcaggtgcctgcgaattacattctcctgggattatttacggttcttcaaggtctgctgctcggagccgtatcagttttctataatgccgaggaagtgctgtgggcaacagcagcaactgctctggtgaccttgtcgctcactttatttgctcttcagacaaaatgggatttcaccatgctgaatggaatgctgtttgttttactcttcgtacttattatctatggaattctcttactcttcatacgatcatattggttgcatctgttgtatgctggacttggaactatagtcttctcacttgagataacggcacagaaagaaagggtactgcacaaggtgcaaggagccaggacccatcccatacactgtcttcacacaaagcacgctttctcaccttattgcagctttgcaagacgcctcaatgggatacnnnnnctctctctattgaaaaattacaacttggtctaaaa

SEQ ID NO: 7607 - DNA, 616 bp, Canis familiaris
  misc_feature (1)..(616): n = a or c or g or t
attcatttnnntatgcagttaggtgnncacaccaatgattatgtggaatnngcagccaangacaagctgacccagctgcatctgcgtgtacagcagcttgtggagcaggtngaattgatccagaaggagcaggagtaccagaggtggcgagaggagcgcttccggcagaccagcgagagcaccaatcagcgggtgctatggtggtccattctgcagaccctcatccttgtagccacaggtgtctggcagatgcagcacctcaagagtttctttaaagccaagaagctggtgtaggtgggccctgaaacctagccccaactcattctccttctcttaactgatggaaagtggcctgccctggtctgtttcctggctcccagtcccccaaccctgcaggggttcctggtactctcagggggacagaggactgctttgaactggtttctcagccagcacttgggacaggaggggttttccatacacacttggttggggagctgcaggattctttgtggctctgtgcttcggaggagagtgagggtaccccaaccctcccccgcccccaccaaaactggatagatgaactaacccaagatggagaattaagagtgaatat

SEQ ID NO: 7608 - DNA, 580 bp, Canis familiaris
  misc_feature (1)..(580): n = a or c or g or t
atgcagtttctttcatgacctgtacacagaatgtcgctcctgatgtgttcagaaccattcctccagaggccaatattccaattcctgtgaagcccgacatggttatgatgcacgggcatcacaaagaaacagagaacaaagagaagacttctttactacagcaaccaaaaggagaagaagaaatgttagaacagggtgatttctattcactgctttccaagctgctaggagagagggaagatgtggttcatgtgcataagtataatcctacagaaaaggcagagtcagagtcagacctggtagctgagattgcaaatgtagtccagaagaaggatgttggtcctcctgatgccagagggagtgcagagcgtgaggacaggggcaatgcnnnnnntgttcgagacagaattcacaaattccacaggctagagtctactctgaggccagcagagagcagagttctgtcattacagcagcccctgcctgctgaaggcacctgggaaccagaccgctcaggaggtgcgtgtagggcttcttttaaagaacaaactataacacgctgcaatccacattagcagaa

SEQ ID NO: 7609 - DNA, 574 bp, Canis familiaris
  misc_feature (1)..(574): n = a or c or g or t
antacccttgctggggggctcagctcctgggggtctnnagtccccttcctcacttcctcctggaaacttagggtatttttgcacaaactcccacagagtttggggggatctaataggaaagggataaacctttagctattttcttaatccctccactcagctgccattagtttggctcttaaagagccaggctcccttttctgccatctagcagtgaggctttccacctgttggagtggcctctggggctgagaaagggggaatcccagcccaattggggtttcacacagcccctttgtcgctgctggaatcatccaagggtctcccctcagctgggcctaggaaggctctcgggggccaggagccgtgtcacctgggttctgtcccctcactctagatcaggcactttattgttggacctcagtggggtgggcttgcccctattcttccagagcctggaagggaagactagagggcttcctggaggaggctgtggagcaggaggggtcaggtggagaagaaagaggccagcagcaagcctttgcacactggggtggggnntgggagccggcga

SEQ ID NO: 7610 - DNA, 336 bp, Canis familiaris
  misc_feature (1)..(336): n = a or c or g or t
tatgnnncagtgtggtgnnnacaagaannaaggggattnnnaaggccagtnnngttttagntnnncnnnnntgttggttnnnnnttatgtggttgacctgtnnnnnntgtgntnnnnncagnnntgtaagcctnnnaaatataagtnnnnnngannnnngnnntnnncnnnaattaatatgnnntcattnnnnnngtgttnnnannnaggacttaaaaaatnnntgttatacatgaactttgtggactgtaagnnnnnttatatatgttcnnntgccttnnannnggctttttaattannntgcctgttttcagtgcttaatatgtataatgtaat

SEQ ID NO: 7611 - DNA, 623 bp, Canis familiaris
  misc_feature (1)..(623): n = a or c or g or t
tntaaaatattaaattannaattttattannaatgatggtgtttttttaagtgctttataantcattctnntagtagcagtttggaatgcaagttcatatttggatgatttacacactttttttttggtctcaaacattctgtgatccaatttctaaattgaaacaatgacttgtacacatctaattcatgttggtgccaaaccagtctagtttcaatttagtaaccaatctgtttgtcaatatcttctgatagcaagttacttaaccaaagcaaaattgatgtgctgagctcccttggacagcacatataccaaagcaaaactgaagcagaaaaagatttaggataaaagggcaggattcccttggtaatgttggtaagaaactagtatttttaataattactctatgaagtcaatatttagttaataactgttgcaatatatcttgaaatatgctatcagagaatctatgtaaaatgtatgtatatatatatgcgcatgtatttgtgtaatgtatatgtttatctctgggtttccctatgaaatgtttgtatatcatgtcaaaggaagaatatttaaattccaatatcttctcttcaaacatgtttattaatagcaataga

SEQ ID NO: 7612 - DNA, 608 bp, Canis familiaris
  misc_feature (1)..(608): n = a or c or g or t
gagcggnncttcttccgcagnnnnaacatngagcacccagaggacaagctcttcaacacctctgtnnaggtgctgccctttgacaacccccagtcagacaannnggccctgcaggannnnngctcagccaccctgcggtaccctcggagccctgatggctacctccagataggctccttctataagggtgtggcagagggcgaggtggaccctgcctttggccccctggaagcactgcgcctctccatccagacagactccccagtgtgggtcattctgagcgagatcttcctgaaaaaggccgactaagtggagggcttctgagagtgcactttggctggccctgaagccccctgggatacctgggatgtcgtcgctgctgcccccggagggccagcccaagggctcctgcccggcaccccgctccgcaggcctgggatcgccgctggcccggaggccccaggagctggtgctgcccccaacccccccgcccggccgcgggaggaggcaggcgccccccacactgtgcctgaggccggcccttgcggccctggaaccattcacatccctnnnnggcttgagctatcnnnnnnggcctttttagaaga

SEQ ID NO: 7613 - DNA, 213 bp, Canis familiaris
  misc_feature (1)..(213): n = a or c or g or t
catnntttgttttaattttgcagacagaatggtttgcaatattacannnttattgnngngctgttnnnnnntttnnnacttgggctgaatgtattnnnnnnnnnnnttgaannngtnttntnntatgcnnangattcagcggagagttanangctgcataaaatggagttttcagatgtccatattcttacttggtattttctctacctaccc

SEQ ID NO: 7614 - DNA, 599 bp, Canis familiaris
  misc_feature (1)..(599): n = a or c or g or t
actaagtcaggcagtcttttaattctagcaaatgtgtgatggagactgnntcagagctgtgcacacttctaaccagcgctgatcttgcaaagcactattttgagcacgcagttggagtacagnaagcagctccctgcatctgcagtgagctctccacttggtagctgggagactgttcggagagtgaccttgcatcttggacataaaatcatggtgtgtcctcaggagaatgtgcaatacctttgttattataatgcagattagggctccactgtgatcacaacacttcgttaatgaagatgatannnnggcgtagtgaccagctggggcacctgcagcatctttgactgtgtctccttcagagtcatgtgcttctggcacaggaaagtgtggaagaaccttgagtctatgtctacgccggggcctgggagaacttgttcattccctagaacaggttgttgaatgtctgtggaacagggagcagggatcatggatgacacccacaggaagccactacctaatgacacttggaagtgattgtctttaacatcacaggcatgacactttgaacgatatagagatgcacgcagttgaactta

SEQ ID NO: 7615 - DNA, 471 bp, Canis familiaris
  misc_feature (1)..(471): n = a or c or g or t
tacatcatccccatccccaactgcgaccgcaatggcaacttccacccgaagcagtgtcacccggccttagatgggcagcgcggcaagtgctggtgtgtggaccggaaaacaggagtgaagcttccagggggcctggagccaaaaggggagctggactgccaccagttggctgacagcttccgcgagtgagccctgccaggaggcagggggctcaatgccccctgccgtccccatcccctagaggctacagagctgacctggagcctgggtctgagtcctggctctgtctctggcctagaagtttccctttctgtggtatgtgtgtgtgtatgtgtgtgtgcacgcacgcatgggtgtgcccttggggtgagccaaagcctaggggtgtcttctttggtcttaggtagcctgagacgtctgagagtggcaatggggagccctggtatgtnnnnnaattgatcgtggactcat

SEQ ID NO: 7616 - DNA, 555 bp, Canis familiaris
  misc_feature (1)..(555): n = a or c or g or t
tgaacaaagccatcatnnnnnanttcggggccacccagcaagcacagggtgccaaatcatttaaagaccttgccctggttgccaaagctagaggtggggatgaatgctacctgcctaatgcgtcttgctgttcaccaaggcaaggggaaaatgggtgttttcaacatttgaaactcaaatgtaaccccaggccctgctccagcggaagcccctacagccttctcagacttccaccgcatagcgtgcagaaaccagtggtggccccagtcaccccattcccaccctaaagatacctgcttccagctccccttccttcccacgtgggacccagaatcctgccagccttaggggctcctctgggaccagaaannnnnnnagccttgggccagggaaaggaagaggcgaggctaccagctgcaaggtggggtgaaactcaagactttaacaaaggagcaggaagggtgttccaccccaccccggccctgtcagacaagggagtgtgcaacaggcctacatccgaacgtgcttgtttaaacatggatttgtatttgtttt

SEQ ID NO: 7617 - DNA, 633 bp, Canis familiaris
  misc_feature (1)..(633): n = a or c or g or t
atgnagaacgtggnnntgcccgctnntcaacctcccccccacgaagnnnnanccgggaccacagtcgtgagcnnnnncgggacagagacngtgatcgagaacgggatcgagaccgtgatcgggacagggacngcgatcgggacaggganngcgatcgggacagggaccgtgatcgggacagggacngcgatcgagaacgagagggccctttccgcaggtcggattcattccctgaacgcagggcccctcggaagggtaatactctctatgtgtatggagaggacatgacgcccaccctccttcgtggggccttctctccctttggaaacatcattgacctctccatggacccacccagaaactgtgccttcgtcacctatgaaaagatggagtcagcagatcaggccgttgctgagctcaatgggacccaggtggagtctgtacagctcaaagtcagcattgcccgcaagcagcccatgctggacgctgccactggcaagtctgtctggggctctctcgctgtccagaatagccctaagggttgccatcgggacaagaggacccagattgtctacagcgatgatgtctacaaggaaaaccttgtggatggcttctagggaatggagctgtatt

SEQ ID NO: 7618 - DNA, 626 bp, Canis familiaris
  misc_feature (1)..(626): n = a or c or g or t
actatcagaaactgaagcacatggtgttggataagatgcatgcccgagcccggnnnncacgagctgttctcaccangcagcccactgaaggtcggtctcgtgatggcggtttgcgtcttggagaaatggaacgtgactgtttaatcggctacggagccagcatgctcctactagagagattgatgatttcaagtgatgcctttgaagttgatgtctgtgggcagtgtggacttctggggtattctggctggtgccattactgcaagtcatcatgccatgtgtcttccctccgcatcccatatgcctgcaagctgctcttccaggagctgcagtctatgaacatcatcccccggttaaaactgtccaaatacaatgagtaaggacagaaaaggtgattatttaaagagaacaaccggtagttccaacacagtggatagtagaggggattgaggaccacgtctccttctgtaattcctttgaatgtaccccctcaaagaagaaagatgaggaggctttcttacactagggatggaccacacagccttgatcagtgagccacgggcactgggagatatatgctgccaacacggnnngtgatgcaatgtcttgttcctgtactgaatgcg

SEQ ID NO: 7619 - DNA, 648 bp, Canis familiaris
  misc_feature (1)..(648): n = a or c or g or t
gaaggagattgcccaagnctactacacagtatataagaagngncntggagatgatattagttctgaaacatctggtgatttccggaaagctcttttgactttggcagatggcagaagagatgaaagtctgaaagtggatgagcatctggccaaaaaggatgcccagattctctataatgctggggagaacagatggggcacagatgaagataagttcactgagatcctgtgtttaaggagctatcctcacctgaaactgacatttgatgaatacagaaatattagccagaaggacattgaggacagcatcaaaggagaattgtctgggcattttgaagacctactgctggcaatagttcattgtgccagaaacatgcctgcctttttggctgcaagactgcatcaagctttaaagggtgctggaactgatgagtttactctgaaccgaataatggtttccagatcagaaattgaccttttggacattcgagcagagtttaagaagcattatggctattccctatattcagcaattaaatcggatacttctggagactatgaactcacgctcttaaagatctgtgggggagatgactgagtcaagaacataatctccgaaggtcactgctccacgacgggcctttccaa

SEQ ID NO: 7620 - DNA, 607 bp, Canis familiaris
  misc_feature (1)..(607): n = a or c or g or t
gatgctgcttcgggtgcacacggtgcccctggatgcccgggatggcaccganncagagcccgatgacgatcacttctccatcggtgtgggctcccgcctcgatggacttcggaaccggggcccgggctgcacctgggattctctgcgaaattccgtgggagagaagatcctgtccctgcgcagctgctccctgggcgccttgggtgccctgggccctgcctgctgcagtgtcctcagcgagctgtccgaggagcaggccttccacgtcagctacctggatatcgaggagttgagcctgagcgggctgtgccagtgcctggtggagctgtccacgcagccggccaccgtgtgtcacggctccgcgacgacccgggaggcggcccgtggggaggctgctcggcgcgccctgcagtacctcaagatcatggcgggcagcaagtagagccccctggcctccctgcgcaccccggctccccccggcctccacctctgacacagactgcctgcctgccgggagccagggcccacggggcctcgctggcccgagatccgcccctgtccggtggcgggtgggaatgnggtgggggtcccctggagcccagnnnnn

SEQ ID NO: 7621 - DNA, 634 bp, Canis familiaris
  misc_feature (1)..(634): n = a or c or g or t
ttacgatattaagatgctnncatttttaatgttggtgagactctccaccntnngtnnaagtgcagtactgcagaggttnnnncgacnngtngagnngnnacgtgccacatgtacaactaaggtgaaggcaaactcagtaaagcaggagtttgaaaagcaagatgaactaaagcgatctgccatgagagcagtagcagcattgctaaccattccagaagccgagaagagtccgctgatgagcgaattccagtcccagatcagttctaaccctgagctggcggccatctttgaaagtatccagaaagattcatcatctactaacttggaatcaatggacactagttagatgtttgttcaacatggggaccattacattgaccatatgatgcactgaattgacaggttaatcataagacatggaaagaagtgtttaaggcttcaaaatgttccatattatttttccttcacggagacagtttggctttcttccattgttgtttttgtagcatttctttcagaaacatgtatttccacaatctccagaggttgtaaaaccactaatgtcttagtggttagggcaacatttaaaaaaatggaaacttaaaagttaggnnntatggagttagggtccagt

SEQ ID NO: 7622 - DNA, 638 bp, Canis familiaris
  misc_feature (1)..(638): n = a or c or g or t
cccagatggtagagatggctncctgcagagggaggacctcatnnnnnangacgnnncatgaccactnnannaangagcgcatatcccannaggccnntaagccccccagtctcaaatgtcagtggcctacacatgggagaagaggaagcctggaggctgccaggagcagccaggctgggcaacagccttcctcctgtttcacaaacacctccagcttcaaagatagtctccactctgctgcagcaaggttgagtatgacccttctaaacaaggtatcctgctcctcacacctggccaagcctcggcactcagctcccaacttgagcctgagggatcctgatcctaccctgcttcccaaattgggtgaccaacatacacgggatggcagcagtggagtccatatttctctgaagagagaccttcagccaccaggtcactactgtgccgaggccactcttcctaagacagagagtttccggggtcaaggggaacctgagaacctaaatggagctccacagaatgcatcgatcccccagaagtttggttttgtgaagcactggagatgttttctgctccagcatggctttagaaagtaggccacaggcccaaggtcctcagaacacataagagaaggcaca

SEQ ID NO: 7623 - DNA, 605 bp, Canis familiaris
  misc_feature (1)..(605): n = a or c or g or t
tatcaactgaatgagattttgcccaagatgggctncgtnnacctgttctcaaggcaggttgacttgtctggcatcaccaaagagaaaaaactgcaggtgtccaagagtttccacaaagccattcttgaggtggatgaagttggtacccaggctgcagcagccactggcatctttaccacctttctgtctgcctggcacaatcacagagtcctttggttcaaccggcccttctttgtggtgatcttttccaccaacacccagagcatcctcttcctgggaaaggttgtcaaccccacaaaaccatagccctcccagggctggctcttctgttataagcaggaggacgtggcctggagaacgccatgggagaagcaacatgtttggagagggggatacagaagatcctgagagtccagggcagaagctgttggcgagagagagggatgtgggtggtaggagctgctcatggactggacacccagatcctcaggacagtgcaatctcaggcagatcatctcaccactttgagcaccaccccaggaagtgggagaaatgccaccagctggttgaagggattaaacacaatgatggttatgaggagcctg

SEQ ID NO: 7624 - DNA, 526 bp, Canis familiaris
  misc_feature (1)..(526): n = a or c or g or t
aacagtcggtnnaagaggtggctgccatcacatgtctacgtgaaccaaggggagatnnngaggactgagcagtggccannnaagctgtacatgcagctcatcccacagcagctgctgaccaccctagtaccactgtttcggaactcgcgcctggtccagttccacttcaccaaggacctggagacgctgaagagcctgtgccggatcatggacaatggctttgccggctgcgtgcacttttcctacaaggcatcgtgcgaggtgcgcgtgctcatgctcctgtactcgtcagagaagaagatcttcatcggcctcatcccccatgaccagagcaacttcgtcaacggcatccggcgtgtcatcgccaaccagcagcaggtcctgcagcggaacctggagcaggagcagcagcagcgcgggatgggggggtagtggccacccccaggctgggcccctccaggagtcacagacgaggcccccgccaaaactggtcagatgcttctgagcaggggcccctggggatggc

SEQ ID NO: 7625 - DNA, 547 bp, Canis familiaris
  misc_feature (1)..(547): n = a or c or g or t
gaaatctcattgannattttgttcccttcctccccntnnaatataaacacctaaaaatgtgcatcagagtngaaatgcagtcccgaggctttgatattgatgaggacattgtcaccaaagtggccgacgagatgacatttttccccaaagaagagagagttttctctgacaaaggctgcaaaaccgtgttcaccaagttagattactactacgatgactgacacggcactggagttgcttcaagttggaacactctgctctattcccatatctcccccagctccatacactggaagaggactaaagtgaatgcttcctgtgggacaggacaggcattgccccaggcagtgttcatccagagagccttgccagtgtcctaccctacagatcgtggacttcgaaagagcccccagagcgttcagaggaggannnagctcccaatccactcggcccagggctcatgattttttaaaaatcatgttttaatcttaagtgtttctgtttcaaggaaggacgtctaagttttattgaaaatgtggtaacttta

SEQ ID NO: 7626 - DNA, 597 bp, Canis familiaris
  misc_feature (1)..(597): n = a or c or g or t
tgaatgcacaaggtggcnntattgtngaagaagatgatgaaataaatcgagattggttggattgnacctactcagcggccacattttccgtttttctcagcatcctctacttctactcctctctgagcaggttcctcatggtcatgggagccactgtcgtcatgtacctgcatcacgttggatggtttccatttagacagaggccggttcagaactttccaaatgatggtcctcctcatgaagctgttaatcaggaccccaacaataacttacaggaaggccttgatcctgaaatcgaagaccccaaccacctccctccagacagggatgtactggatgacgagcagaccagcccttcatttatgagcacagcctggcttgtcttcaagactttctttgcttctcttcttccagaaggccccccagccatagcaaactgatggtgcttgctttctggctgctggaggctttgacaggcatggactggatcacctgactccagctagatctcctcacctggacatggcaatggcacagaattcaagaaatcaacaaggaggaggttatgcttttgttgatcaaacaaaagcagaaact

SEQ ID NO: 7627 - DNA, 711 bp, Canis familiaris
  misc_feature (1)..(711): n = a or c or g or t
tcagcgctcgctnganctgtcnggccaggcgntcgatgagnnnnncgcagagttcnagcagctcannnnnncagcgtttgcagagaagaatcgcggnangctgatcggtggcctgcctgacgtggtgaccatcatggagggcaagaccctgaacctgacgtgcacggtgttcgggaaccccgaccccgaggtggtgtggttcaagaacgacaaggacatcgagctcagcgaccacttctcggtgaaggtggagcaggccaagtacgtgagcatgaccatcaagggcgtgagctccgaggattcgggcaagtacagcatccacgtcaagaacaagtacgggggcgagaagatcgacgtcaccgtcagcgtctacaagcacggggagaagatcccggaggtgtcgccgccgcagcaggcgaagcccaagctcatcccggcgtcggcgtcgggcccgtgaggggcacggggtggggggggccgtgtgcttgctgcgaggccccgcggcccgtgcccggctcgcatggcccttctgaccgggcacgggcgctgctgctgtaggtccccgggcggagtgcgggccgctggccccgtgggcgcggatcccgtggccgggcgggcatgggggccgcggtgtccccgtcctcnnngctccgggtccgggttgtagagccctgcacacgccttcctggctgcgctccgctttcccacgct

SEQ ID NO: 7628 - DNA, 477 bp, Canis familiaris
  misc_feature (1)..(477): n = a or c or g or t
gggaacgctgaatngnncagagggtgccaacaatcccaagctctaccggagacacagtttcatgagcacnnagccgctgtcagctgaagccagtctgagctcagactcccagcgcctgggagagggcaaacgggatgaggagccctggggccccatcnnnagctcagagccaaattagtggctcccttcaagcgaatgtccaggacttcaacgcatgcattttgtgttgccctcccctggcttcaccttggttccctaccctagttttcctggtgcctggacttccgccttttctttctaaacaccacactgtactggatgactttagatcttctttgagagaaggcaggctatggacatggaaccccaccacactgtgtttgtgattgtctgtgtgtctgtctcccccccagactgtgagctccgtgagggcagggactgtgtctcgtccgttctctgtatccccagtgcttggaa

SEQ ID NO: 7629 - DNA, 631 bp, Canis familiaris
  misc_feature (1)..(631): n = a or c or g or t
cttttcaaacagctcnnngcacttttatactaattacccatttgtgcattgatttttctttttcaaatgcttgttgtgaaagacacagatacccaggatgcttaatgtgaaaggaaaatgtgttctgttttgtagaggaactttcaagtattgttgtaaatacttgggacagaggttgctgaactttaaaaaaaattaatttattattataatgacctaatttattaatctgaagatgaaccatttttttttgtcttagaatatcaaaaagaaaagaaaaaggtgttctagctgtttgcatcaaagaaaaaagatttattatcaaggggcaatatttttatctatttccaaaataaatttgttaatgatactatgttaccaaaatagatctacatcaacctgattagtataaaattttgttgacaatgaatccattcctggcataaaaaaatatatatagatcaaaaaaaaagttgtaaatgcttgctttttgttttttcaatcatggccatattatgaaaatactaacaggatataggacgaggtgtaaatttttttattattattttaaagatatgatttatcctgagtgctgtatctattactctttactttggttcctgttgtgctc

SEQ ID NO: 7630 - DNA, 617 bp, Canis familiaris
  misc_feature (1)..(617): n = a or c or g or t
ctccaaggagtgctcaagggtcctgataccctgannnnnaatttctagggaagttatctcacatcttggcttnctgaagaaggtcctctctgagctaagatttttcttgacagattatttatcgaacacctctatgtgccaggctctatgtcaagtattttgatagagatccctatttccatcccgtcaacccccatcacatctttgtgaagtgcagtttactgtccctggtttacagacacagagggcaagccgctctgtggtgacattaagtcatgtagttctgtcttggcttagccagacttcttggctcaggctcagggctgtgccacctgctaccctgcatcccggagaagggcccaccagtggctgccaggagattgttctagcctggccttcccttcccgtctctgtgtgtggtgccttggttctggtgtccgtgtgtttgtgtctgtttttcgggagctctcggcctgtgtaatgtcgcttccctatggtgaccctcctcacccggccttctgctggagaagggtgatgtgggccactgtgaactgcagcagcatgctggtggatccatagcgtggattacctttgtataaagaaacagcctccaacnn

SEQ ID NO: 7631 - DNA, 464 bp, Canis familiaris
  misc_feature (1)..(464): n = a or c or g or t
catggcgnncgtcctcatcatggccaccaaccgaggcatcacccggatccggggtaccagctaccagagcccccatggcatccccatcgacctactagaccgactgctcattgtctccacctctccctacagtgagaaggacacaaagcagatcctacgcatccggtgtgaagaggaagacgtagaaatgagtgaggacgcctacacggtgctgacgcgcatcggcctggagacctcattacgctacgccatccagcttatcacagctgccagcctggtgtgccggaaacgcaagggcacggaagtacaggtagatgacatcaaacgggtctactcgctctttctggacgagtcacgctccacgcagtacatgaaggagtaccaggatgcctttctcttcaacgagctcaaaggtgaaaccatggacacctcctgagctgatgtcaccttcacctccccccccc

SEQ ID NO: 7632 - DNA, 458 bp, Canis familiaris
  misc_feature (1)..(458): n = a or c or g or t
aacctctatgtgggaccccagaccatcacagctgcacccagtctccccggcctcttcggcagctctgccctgtccccccaccccaccaaagggggctatgcggtcacggactttctcacctacaactgcctcacaggcgacacagacctgtacagtgactgtctccgcaccttctggacctgcccccactgcggcctgcacatgcccctgacgcccttggagcgcatcgcccacgagaacacgtgcccagaggccccgcaggacgcccccccagaggctgaggatactgcccccgagcccctccccaaggcgtctgccttgcagaggccctaccannncgaggcctgccagaaggnnnnnnngttcacgcccacggaggtgctgcggcaccgcagacagcacatgtgagcccggagccccgcctgcnnnccctgaacctgcgcnnngggctcagagct

SEQ ID NO: 7633 - DNA, 508 bp, Canis familiaris
  misc_feature (1)..(508): n = a or c or g or t
ctgctgaggctcaggtgctcgtgacagnngtgggacagatcctggaggagaaaatggtgcctcaccagnnactgcgggccccggagtgcaactgctacaaaagggatcagcaggctgcagcaggtcccaacgtctgctaccacagggttctttcctaccaagagcagaggagagtgatgagagagacggcctccaatcagcaagccatccccaagggccacagctgtcccaacagggccgagtggatcctaggcagggacaacaggtgggccttcccgtccagggtggcggggtgcccaggcagagcgtgccagcacaggcccatggtaccaggagcctcaggccaccctccccacccccactgcccaaggcactgcctcttccaaagatacgtctcgtctggccagtcagtgtgtgcctttcatgcctttcctggtaggactgtgcatacagtacagagaaaaacttatttttctcatgttagcacatcctccatgggctaatggct

SEQ ID NO: 7634 - DNA, 620 bp, Canis familiaris
  misc_feature (1)..(620): n = a or c or g or t
gcttgtcacatnnngagtcatttggaaagaagttccaagaactnaggtncttttgtcacttccctaccgaacggggtgaggaacatgctgtctttcctctcttgactccctttacgtgagatactggggagaagaggagaaaattatttctgacttagttgtaccatcccagggccaagcccgtgcccagctttctaaccccatcccaacttctggagcatgtgctgcagagtcagctcagtctgtgcacttgaatcagtcccctccttcctgagtatgggtcatttcttggggaattttctttgcattgaagaaagagggcggggaaccatattgcccctccttcccccatcaaacttccttcatttaacttgctataaaatgagtcatataaagaaattctatatgggtgaggtatatcccacttctgtgaaaacattacaaatcagaccgccttctctgagtttatttaagatgcttttgttgcgagcggagttctagagtgaagccccctctgtgtgtgtgagatagtaacaccttgtaactcattacagctgggcactatttacataaaccagagctgagccaggcaggaatttgctgattaatttatttttaat

SEQ ID NO: 7635 - DNA, 525 bp, Canis familiaris
  misc_feature (1)..(525): n = a or c or g or t
acacagancttttctttgccacaccaacttctttgcctatccaacttagtatagacctcagtgaattaagctgctgtcatctgtctttggnagtctcttcgcctatatatctgctcttggctgattttctctgactcattgcttgcttgcttgcttgcttgcttgtttccttgctttggaaggctatccaagatgtatacacactactttaggaagggaattgcttaaaaataacaagacactgcaaaagggattgggaagaattggaatcaggagtgaccaggctggatgactcaagtataaatgactgagaaattcttgatgaagtattagtctgactttgtcatcaagtgatgtaatataggaaatgcataaaagggaataactttctgacattgatctgttagagaggtacttcagagactcctggacttttgcatatttaaagttcctaagatatggctttttcctccttttggctgtatagcaaactgttttaatcnnnnnnttgtgccttattgttcc

SEQ ID NO: 7636 - DNA, 529 bp, Canis familiaris
  misc_feature (1)..(529): n = a or c or g or t
cgcttttaaatcctgaggtcntaagaagacagtttaggacttgagattcaccgttttgtttgcccttccccnnaggtagcgtagccaaccttggagctcgcttaaaaacagaaacccacccccatccccccctttgacgcagctggtgttcttggtttactaagataggtaacagcggcacttcgcagtcgcctccagtctggtcggaaaagcacggtcgctaattaactttctcattaaaaggcgcagaggaggacccgagccccaaaactccctccggcggctcgcgggtccccgctgcggtggcgctttctgcgctgtccctttgcgcgaggggtcttggacctgcgctctccgcagcttgacgtttggagaactgcatagatgaccggtcttgattcgttacagacgttaacaaattacttcacccaagattattttatgatctttcagcagcttgctttgaagtctctgtttaaggtttttggttgttggtagtagccgaatttaactggctttttattttatc

SEQ ID NO: 7637 - DNA, 592 bp, Canis familiaris
  misc_feature (1)..(583): n = a or c or g or t
ctctctgtactctgaatntgcatgtgtgttgtggtggggggtcggnnagttgagggccctcacttggtnnttctctgttgttttttccaggacaaagccaaaggccccttgttagctggctgcccctgcccccctttccccctggttctttccccgtggccacaggaatgtgtggtcccctgaattcctcacccggggtcctctgctcctctgcgcccagagccagggaccacctcagaagtgtcatctctctgagcacgcattcccctgcagcgagcaagcgagcgagcaagcgggcgggcagcaaggactgagcaaattgagtgatcccgggccagagaggcctgggaggaaaggtgttcagccagtcggttgtaaggcgctcgtcggcacctgctgaaacgctcccacctgacagccccctcctcaaagactgtctaattacacatggcaggttctagagactcaagggggacagctgctttcaaggccaccacgcgtctgtgctcccagcccaaccctatttgccttgtgttcattttgttcttttgtgactgcaaagaccaataaagtaacatgtttgaggataaaa

SEQ ID NO: 7638 - DNA, 643 bp, Canis familiaris
  misc_feature (1)..(643): n = a or c or g or t
actgctgcactttnctctctggcttcttgctantggctgggacacaggatggaaacatttatcagctggatgtgaggagtccaaggactccagtacaagtcatccacagatcaggagcaccagttctgtccctgctgagtttcagagatggattcgttgctagccaaggtgatggaagctgcttcattgtccagcaagacctagactatctcattgagctcactggggctgactctgatcctgtgtacaaggtagccacatgggagaagcagatctacacatgctgtcgggatggtctcgtgcgacgctatcagctctctgacctctgaccccttgggaaaggattcatagttaatgaaaaagattgaccctaatcaacaaaaagcaaaatagtcatcagtccttctcaaggatcatggccctttattgttttgggcaccccttggaagtcacagaaaagcagctgcattggcccatgcggaagtatcattccatgacaagacctactgtgaactgagtaagaagctaacgtgttccctgtataaacttaccccaagaacacagggcaaggatatggatccttacagtttgatctcataccattatgttaaatgtttacaaggactagaggactaaagcttgt

SEQ ID NO: 7639 - DNA, 499 bp, Canis familiaris
  misc_feature (1)..(499): n = a or c or g or t
aactctcactcagctgtagtcacttttangcagttctgcagtaacaaacacctacttaaaattctccctttgcatgttttgtaaataggctctagtttgttttttcattgcctcatcagcccacacaattaattctctgaatgggagggagagtgcttagcaaatggatttagaaaagtatctgtagaagaaaaataatactttattttgtcctgtttctcaagcactgttagatcgaacagttttgttaatagacacttttgcatccacgtttcaacattaacacttctgaagtcatggtctggtgtcagatttgataaagtcgaggcacttcatgttttacaatcaccttcattaaaataattcctaagatttccagcagtttatctaatatgtgtgtaaaatgtgcgttcttatttttattttagttttgcagatggttttctataaagtacgtttttactaagtccctgtgtgaatgatttaaaaaaactacaga

SEQ ID NO: 7640 - DNA, 512 bp, Canis familiaris
agcctctcatcaagtaactctccatctgagcatcccacacaaaaatgacaagtgacatccagacagcagatctcggtgaaggccttccccagtctgggtgtcccacggtgccggccagcccgcctcctgactgacctcagcaaggctttggcggtcccatctctgggggaggcgtccggcgggtgctttgggttcctggggtctggcggggaggctgcccgggcagggggccaaaggccggcctggcatctgggggcagcgacaacgcccggaggcccccggcccctccggccggcgacaagcagggctggcccgggaggcgctcagcgaccggggaccgcacgtgccgccacgccacgccacgccctgcaaacggacacgggaaggcggcgccgccggggcccgcgggagagccaggcgcgggccccgcgtgcggagacgctcgggcgaagcggagggaggagcaaggggcggggctggcgccgagcggagccgcctgagggtgcgcgggc

SEQ ID NO: 7641 - DNA, 413 bp, Canis familiaris
  misc_feature (1)..(413): n = a or c or g or t
gttctaccactcacntgccaannnggcccagggagggctcggcnnnnnaagagctggnnnnnaggggagctccttaatatactcaagttcctgtagagnnctggtctaccaggcccaccttgggtctgcaccaggactacagagaatgcgccagtgagtcctcaccccatggacttgtgcacactgacccagccccatgtctcctccccaccttctctcctttcctcatcctaagtgcctggcagatgaaggagttttcaggagcttttgacactatataatccgccctttttgtatgcaccatgggcggcttttgtatgtacttgcagcgtggggtggggggcatgggagggaggggtggaccctggaagaggtggggagggtgggccacccctgcctcacacctgtattgt

SEQ ID NO: 7642 - DNA, 681 bp, Canis familiaris
  misc_feature (1)..(681): n = a or c or g or t
caagaaaggaagaatnggtattgtgtcnaggtnnngnancctgacttatgaagcggttcaccaaacaacccaagttgggttgggacagtctttgtgtgttggcattggaggtgatccttttaatggcacagattttattgactgccttgaaatctttctgaatgatccagccacagaaggcatcatactgattggtgaaattggtggtaatgcagaagaaaatgctgcagaattcttgaagcaacataattcaggtcccaaggccaagcctgtggtgtccttcattgctggtttaactgctcctcctggcaggagaatgggtcatgcaggggcgattattgctggaggaaaaggtggagccaaagagaagatttctgcccttcagagtgcaggagttgtggtcagcatgtctccagcacagctgggaaccaccatctacaaggagttcgaaaagaggaagctgctatgaaagaaaaaacatgaagttccctaaacctatggaattaatcattatggaaatgtgaaccagcagctgtttgcttctgttgtcccaggtgtcagcctgtgtgcctgtcgctggtctgtcggtacagcaagaagaaaacacagggttcagaatgtcctatattgaggtgtttccacctcattgnnnacagacagccagtaaacctaccaannnnn

SEQ ID NO: 7643 - DNA, 522 bp, Canis familiaris
  misc_feature (1)..(522): n = a or c or g or t
ttncatgaaggataacatttttatacagaaggcagtcnngctcaacccagagccatggaggcaagtaccttcattagttttatatagtcacaacggaaatatattttctagtgaattcttattgaaagccaggtctctcctctcattagatcaaaagggactcatgtacatatcataattgaaagtgtttgctcataaaatcagttataaatatggtgacttttttctggaccataggaatattatttcaaagaaatattacaacttaaccattaaattagtacttgaagttgagcctttgtggtgggacttttttaaaaaaaatataatgcctttttaaagcattaatggctaattgaagtattttatgactcctcattccaggccccagagggttgtctttaagaccccgtttctgaccttgacgtcgcagcgtgtttctgtctgagggcagtnnncgtgggcttgcctcccgcaagccactctggtcaggctgttgagctctagtcatctgtggagaga

SEQ ID NO: 7644 - DNA, 527 bp, Canis familiaris
acgaggactggtatcgtgtgtccgtgtgtgcttaggttctaacagcaagttttggaaacctctctttaagtaacgcattacttctgtcagaagtgtctttagggtggttatctagttcagtactccaaattattggggacctcgaggcttaagtatttttctgcatataatgctaaaggtaagttacattcatttacactaatagagtagatagagctcggcactatctaatgactttcacgtccgtggtttcagttgtatatacattaggacgtggagaggggaggtagacggggggaggttccgtagctcataagcacttgtaagggggaggtcatctgcaccccagtcttcagcctactgtcttactgatttacggactcctgtcaatcactgaggtacacattaggtgagtcagaggaaaccagaacacttgttcatagttgtttttttttccccgaaagcaaattactgtatttttatggcaggagggagaaagtgttaaacggtttctaatgaagtcagat

SEQ ID NO: 7645 - DNA, 517 bp, Canis familiaris
  misc_feature (1)..(517): n = a or c or g or t
tattcngaatgttccaaaattnnnattgagaaagcannntaggatttggatgccattnaataannnattagtgtctttttagacttggtggaattaattaggggagttcattttgctacaatttgggaagcattcattttcagttttgtnnnagtaaaaaatttaatgttcatattctnnncannnannnnnnanaagttattgaaaatcttgtttaattccgnnnntacatttcacttgccnnntttnnnaataagttcataaaatttgccnnnaaatatttttatatgattcctggtacctgggtaggctttggnnnnntgnnnnnaatctcatttcacatgcatacantatggaaagaaacaaataaaattgttgagtgcttattcatatatctgtattctctcaggaagtttcattnctttgtgtaataatgtatgcttgatatatttactgtnnngaaaaaaagtcctgtnnngattttgaactgcataaagtnacccgctcatgtttcacc

SEQ ID NO: 7646 - DNA, 591 bp, Canis familiaris
  misc_feature (1)..(591): n = a or c or g or t
agnccgccaccatgagctggctggaggagaacgttcgtgaggtnctgcaggcggtggactctggagacnntgcggtngaagcgtgtgagagcagacggaaggtgctctaccagcgtgcgcccagaaatatccaccgccacgtggtcctgtccgaggccaaggaagctgttgctgccctccccccggatgtgaccacgcagtctgtgatggggttcgaccctctgcctcctttggacaccatctactcctacgtgagaccagagaggctgagtcccgtcagccatggaaacacaattgcactcttcttccggtccctgttgcctaattacactatggagggggagaggctggaggatggaggggctgggggtctgaaccacaaccaaggcttgaacaggctgatgctggccgtacgagacatgatggccaacttccacttccacgacgtggaggcagctcgcgaggacaaccccgagggggatggggagtgggactgagcccgcgtagatgccacgccccaatgctnnnaattatgttcctgattgctgttctggtcggaattgaccagtaccctggagtagaaatgctgtg

SEQ ID NO: 7647 - DNA, 567 bp, Canis familiaris
  misc_feature (1)..(567): n = a or c or g or t
cagtcacggcncgagaaattgannagaactcacggctcctnnaaaacatgacagaggtggttcnnaaagggattcaggaagctcaggttcagctacagaaggcaaatgaggagcggcttctggaagagggggtgttgcggcagatccccgtcgtggggtccgtactgaactggttttctccggtacaagcttcacagaagggaaggacttttaacttaacagcaggctccctagagtccacagaacacacctatgtctacaaggtgcaaggcacgggagtcaccccacctcagacgccttcaggcactcgcacgaagcagagacttccaggccagaagccttttaagagatccctaagaggctccgatgctctaagcgagaccagttcggtcagccatgtggaagacttagagaagatggagcatctgtccagcgggccagagcaagatgccctggagaccaccggccccgagccccctcccggggctcccagcccgcaggaagccgagccactgggagccccccagagcagggtgcagcgcccagaagatgaccgtccacaggtag

SEQ ID NO: 7648 - DNA, 573 bp, Canis familiaris
  misc_feature (1)..(573): n = a or c or g or t
cattgttgagcgctgcgacttgcnnnngatacacgtgggcgannnnntgctctttgaaaacatgggtgcttacactgttgctgctgcttctactttcaatggattccagaggccaactatctactatgtgatgtcggggccaacatggcaactgatgcagcagatccagaaccacgacttcccgcccgaagtagaggagcaagacgtcagcactctgccagtgtcctgtgcttgggagagcgggatgaaacgtccccccgctgcctgtgcttcagctagcattaacgtgtaggtgccactcctgtagctgttaacttcgagtttagcttgaattgtgggatttggggggaccgtttaacttaattactgctagttttgagatgtctgtaagtagggttggcatgaatgcaacagtatggaagactaggagatggggtcacttatctgtgttcctatggaaactatttgaatatttgttttatatggatttttattcaattttcaaacatgctactaaggagtgcccctcagctgctgagcaagcgtttgtagcttgtatgttggcagaatggg

SEQ ID NO: 7649 - DNA, 633 bp, Canis familiaris
  misc_feature (1)..(633): n = a or c or g or t
tcaatgactgttttaagctctgaaaggaatacatatgtttagataaanncgcatattttaaataattgggtgtaacacagacacccnnnaacacatctccacttgtggagncttctcccattgctccgttttctangaccccacagtactctgtcttcatggattatgattgtagcctaaggctatttgagggcagagactagttctgtctctcctcttttttttgtttttttaacacccgatatactgctttcctcgtggtttcaaaaagatattttgcatgcataattgcaaattaatgtacgctaaaagaaaggcatgtgaacacaaggcacagactaagatgtcttaagaggaagcagacacagtgctgctaagaaaaagttctaacttgcttgaggctggaacgctagggatggaggctggaaaattctgggcctgctggggagccacggaagacattcggcacggccaccagctcctgaggttttcatagtgatactaagaaagtgtctaagcagatcacttaaaatttgctctcatttatggctcttttcatatgaatatgtgatgacctgtagctcaccgtataccagacgtgaatcataccacagttaccttcacggagttctc

SEQ ID NO: 7650 - DNA, 610 bp, Canis familiaris
  misc_feature (1)..(610): n = a or c or g or t
tctattgttnataaactggtaatcaaaagtattttnnttttaggtgagtgggaaagtgttactcttgttntaaatacttaagcaatgctgacaacttttttgtgttctgattactgtagtcatatttatgaaaaaggttcatgttttagtctcttgctagttaaaaaagtgggacaaaatatgcttttgaaataaaatggcaaatggcacctaattatttttcctttcaaaatgccttacattgcagtctcattttcataatcatttgcttccagtgtttctaaaaaaagcaattggggaataagttatgaaagcattatattaggtttccaaatttaatatgaattctaaattcacttagcaataaaatctaatttttaaaaagtatataaatataaaatgtataaatgatggaaaaatttttgtactgatttgcaaaatgcagattatatttgataggccatagtatgtagatattccttttaggaatatcccagctgtaaaaaatatcagaaatgcccgtcaaatgctatttggaaaaaaaaaattactgcaatctcaagttatcggaatatttttaaatcnnnnnntttaaagtttaaaacactgg

SEQ ID NO: 7651 - DNA, 663 bp, Canis familiaris
  misc_feature (1)..(663): n = a or c or g or t
caggacatnntgctattgtgataaacaacgcagcagggaattttatttctcccactgaaagactctctgctaatgcttggaagaccataactgacatagttctaaatggtactgcctatgtgacgttagaaattggaaagcaactaattaaagcacagaaaggagcagcatttcttgctatcacaaccatctttgcagagagtgggtcaggttttgtagtaccaagtgcttctgccaaagcaggagtggaagccatgaacaagtctcttgcagctgaatggggtaaatacggaatgcgatttaacgtgattcaaccagggcctataaaaacaaaaggtgcctttagccgtcttgacccaactggaacatttgagaaagatatgatcgaccgaattccgtgcggtcggctgggaactgtggaagaacttgcgaaccttgccgctttcctttgtagtgattatgcttcttggatcaatggggcagtcattagatttgacggtggagaggaagtatttatttcaggggaattcaacagtctgaggaaggtcaccaaggaggagtgggacataatagaaggactcatcaggaagacaaaaggctcctgagatgactctggccttcatcttggttatgatggaaatgatacaatctatgatcttttga

SEQ ID NO: 7652 - DNA, 591 bp, Canis familiaris
  misc_feature (1)..(591): n = a or c or g or t
ttatactgacaatnnnannnnggtccccagaaagtgatgggtgaaannagagctgaagggagcaggtgcnnnnngtgttttcagtttgctctaacangaggaatagagatgcagaaaacaccctgtctccccccgaggatgggaagggtttttgtttgagtcagacaaaataaagtgacatggtcgaaacgtttgtcacggaggtgggctacagacagcaatcaggtgtcccaggaacttcgtcttctcactgttgcaccagccttaggcttaggcacaggtgtacaaagttctaacaggaggaagtgttcgctgacgttagggcacctccgtacaaagccagtcgttgggttattttgcctttaagtacactcgtaaaaggccctgtgtgtgtttgagtaaaactactagggccagctgccacctggtaagtgtagtgcaggggtgggtggacccacactgtctcacttctaaatccccctttgttttgctgcccaaatctaaataaatacttttactgataattgcttttactaagagatcatctttacttatagaaatgtattttgaaaacttactttacacgacgat

SEQ ID NO: 7653 - DNA, 581 bp, Canis familiaris
  misc_feature (1)..(581): n = a or c or g or t
tccgcatcttnnnaaccccaactgaagagacgtggncaggcattctgtccaacgaagagttcaagacatacaactaccccaagtatcgagccgaggcccttttgagccatgcaccccgacttgacagtgatggggctgacctccttaccaagctgctgcagtttgaaggtcgcaatcggatctccgcggaggatgccatgaaacatccattcttcctcagtctgggggagcggatccacaaacttcctgacactacttccatatttgcactaaaggagatccagctacaaaaggaggccagccttcggtcttcgtcaatgcctgactcgggcaggccagctttccgcgtggtggacaccgagttctaagctgagttctaagccacaaaccgaggccccagcaggcagcagcagctggagggatgccactcccctcacagggcagcccccaactgcatccttcttgcttgctgcctgcctatctgcctgactcatgctcgcctgcccacatgttccctgctgcctgtccgaacacccgaccattggcctgtcagcccacccattggcnnnnnngctgggtgc

SEQ ID NO: 7654 - DNA, 565 bp, Canis familiaris
  misc_feature (1)..(565): n = a or c or g or t
cgaaggcagcnngtgcccatcttcccccagccactcatcactgaccgtgcccgctgcaagtacagtcacaaggatatagtagcggaggggctgcgccagctgctgggggaagaaaagtaccggcaggacctgacggtgcctccaggctactgcacagacttcctgctctgcgtcagcagctccggtgctgtgcttcctgtgaggacccaggaccccttcctaccgtaccctccccggtcctgtccccagggccaggctgcctctcagtccactacccatgaccccgcccaaagggtggtgctgatgctgcgagaacgctggcatttctgccgggatggccaagtgctgctgggctcccgggccctccgggagcggcacctgggcctgatgggctaccagctcctgccgctacccttcgaggaactggagtcacagagaggcctgccacagctcaagagctacctgaggcagaagctccaggccttgggcctccgctgggggcctgaaggggggtgaggggatgtacatggggctcagggtgacccccaaagggggtggacaattt

SEQ ID NO: 7655 - DNA, 710 bp, Canis familiaris
  misc_feature (1)..(710): n = a or c or g or t
ttcaagaaaaaaacatcagagnnngtcaagaaaaagtagaacttgtanntgataaggaaaataaaaaactgctctgcagaaagtgcaaagcctttgcatgttatacagctgacatcagagtggtggaggaatgccattacactgtggttnnagatgcattcacgaagtgcttcgtgagtaagtnacaccctaaaccaaagagctttgggcattttgagaagagagcaaagatcttctgtgccagacggaactgtggccatgactggggaatccatgtgaagtataagacatttgagattccagttatcaaaatagaaagctttgtggtggaagatattgcgaccggagctcagaaactatatgcaaagtggaaggactttccttttgagaagataccctttggttctccagaaatacccgaatgaccttgggacctcaatcttgagctaaaaggaatgggtgaccttgagagaagaaatgaacctcagtgggtagtcatggctcgcttttaccagcatgtatctgtcacttaacttcaccctgtttactgttgttagcagtttgaactgtatcctatatataaagcacaagtaaatgaatcacagcactaatgctccataggccagtggagctctgagtacttggaaaagatnaaaaagccttcttttcctatccttcctttcacagctcagtgccagtgtaccccccag

SEQ ID NO: 7656 - DNA, 687 bp, Canis familiaris
  misc_feature (1)..(687): n = a or c or g or t
cagcagaaccctcagnntctcatctttgacattgagatgcttaaggnnnnnaaccccggcacatatcagcangacnnnngngccatgacagatgaggagaaggcaaaggcagtgncagtcatcnnncaggaaggcaacaggctgtaccgtgagggccacgtgaaggaggccgccgccaagtactacgatgccattgcctgcctcaagaacctgcagatgaaggagcagcccgggtcccctgactggatccagctggatcagcagatcaccccgctgctgctcaactattgtcagtgcaagctggtggcccaggagtattatgaagtgctggaccactgctcctccatcctcaacaagtatgacgacaatgtcaaggcctacttcaagcggggcaaggcacacgcggccgtgtggaatgcacaggaggcccaggctgactttgccaaggtgctggagctggaccctgccctggcgcccatcgtgagccgtgagctgcgagccctggaggcacggatccggcagaaggatgaagaggacaaggctcgcttccggggcatcttctcccattgatagggccctgccggccctgcccaccctgcctagcccactgctgctcccagcacccctgcccctgctgcatcatgcttctctgtatataaagnnnnnnatttatctctcaaaaannnn

SEQ ID NO: 7657 - DNA, 616 bp, Canis familiaris
  misc_feature (1)..(616): n = a or c or g or t
tgtacacgagtgtacattaggtgaagaaaagttcacttttatcgaggcctgtgttaaccctcgttctgtcaccttgttggttaaaggaccaaataagcatactctcacacaaatcaaggatgctataagggatggacttcgtgccatcaaaaatgccattgaagatggctgtgtagttccgggagcaggtgcagttgaagtggcaatagcagaagctcttgttacatacaagcacagtataaaaggaagagctcgtcttggagtccaagcttttgctgatgccctcctcattattcctaaggttcttgctcagaattctggttttgacctacaagaaacactagtaaaagttcagactgaacattcagaatcaaagcaacctgttgnnntnnnnnngaatacaggtgagcccatgatagcagcagatgcaggagtttgggataattattgtgtgaaaaaacaacttcttcactcttgcacggtgattgccaccaacattctcctggttgatgaaattatgcgagctggtatgtcttctcttaaagggtgattgagttcaaaatcaactcttctannnnctgagatttagtacnnnnnacatccaaactaccattat

SEQ ID NO: 7658 - DNA, 682 bp, Canis familiaris
  misc_feature (1)..(682): n = a or c or g or t
gaagtccatccgacttcacttccaaatnnagcagatcgtctactgccaggaccacgtctatcagcgngccctgcagagggtcagnnagaagnantcggacgaggagaagaagaagaagaccagcagcatgagccatgacgaggtttcttccgtcaacatctccttgtctgaaatcttggagcacctgttggcctaccgccaggaggccaccaaccgcatctccagccacatccccttgatcatccagtacttcatcctgcaagtgtacggccagaagctgcagaacggcatgctgcagctgctccaggacaaggacacctacagctggctcctgaaggagcgcagtgacaccagcgacaagaggaagttcctgaaggagcggctggcgcggctggcccaggctcggcgccgcttagccaaattccctggttaaggccggctccctgtcccgcctgcatctccagggcacgtctgcagggagcagcacccgccctctctccccaaacccacatcgcagatactcgaggagttagtagccagtcttcccggtcaccatccatgcttgtccctgagtgggcaaggacctcctaagaagacgcaggtcatgattaagatcaagacttagggattgagtcccacgtcgggctccctgcacggannnnnnttctctctctgccagtgt

SEQ ID NO: 7659 - DNA, 541 bp, Canis familiaris
  misc_feature (1)..(541): n = a or c or g or t
cacagacttattnntaataactcattctccttttaaattatgagttagaagattgtgacagctgaatttcaaaatcntagcctcccggtgtacaatagacaaagctatttgtttctgttccaaaagagagcaaaattgggaaaagaaattcatttgagtcttgatgaagcaagtacctattactaaagaaacttgctaataatcatcatggcacccctagcaagcggtggttgccttaccaatgaaaatggtgcattgatataacaactaaaataggaatgtgattcttaatgtttaatggaatagtcctaatcctgccagttgttaccattatagattttatagttgcctttctaactactttttagcacagtttgagaatatatgttgctatttactattgaaaaacaaaagatttactgaaatccttccataagatccttctagaagagccctaataatgtaatattttcctctgaaatggatgcaaagagtgtaaattttataacagcattatttatcctggttcaatcctaatgga

SEQ ID NO: 7660 - DNA, 538 bp, Canis familiaris
  misc_feature (1)..(538): n = a or c or g or t
agaacagatgccatctgnntgaatgttgatatgcnagtggatgtgaatcctttttcatttctccttccctctggacagtgttacagtgaacatttagcattctgtttttggttgatagttaagcaaactgacattacagaaagtgccttagacactacagtactaagacaatgttaaatatattatttgcctctgtaacaattcaactgtgcttcatatcatgtacctctctagtcgaagtggtattataaacattcagtgacaatgaatcagtgttaattataaatccttgatcctctgcaacgtgcttgaaaaacaaaccttttgggttaaaagctttaacacctgttaggaagaatttgtcatgtgggtttggaatctttggttttccccctttatgaattgtactggctgttgaccaccagacacctgactgcaaatatcttttttcttgtattcccatatttctagacaatgatttttgtaagacaataaatttattcattatagatatttacgcctgctctgtttacttgga

SEQ ID NO: 7661 - DNA, 660 bp, Canis familiaris
  misc_feature (1)..(660): n = a or c or g or t
gtgaatgtaaggacntattatgttggtgaggtggttgccacaccnttgacagagttagtggatctcgcacgccatagtcaatctaatggtaaaacatgcttnaactacannnnaaaaaaatcctcatgattataatgccaaccacaataataatctttactgagtgatacaaatagttaatgaattgaaagttcaccactgcatgttttatgatcagataactcattgaaatgagtctttgctctttagactaaattcccacctagtactgccattaaaatgaatttgccagctggtgtgcatactggaaatgaaaagatactgaaagaatggaacgaatggtgagcttaactcagtggcactgtcatactggaaaaatacagtaaaatcataaaaacagatctgccagctgatgtttttattctcagaaacagcattgttgataatattttagtatacagagctactgtacaatttttaccttgtaaacatgactgtggttttgtatttgtgttgactttaggggttgggataaaatacagtataatatataccttatcaaaccttttctttgagctcttactaaaaatatggcatgcataagattgttcagaagagtagactgttaacctagtttgtactagtaaaaacaaaactgaa

SEQ ID NO: 7662 - DNA, 597 bp, Canis familiaris
  misc_feature (1)..(597): n = a or c or g or t
gaanctgnaatatgccatccacttttgcaaatcgatagacacagatgattatgctcgcntagcnnttacgggagaaccagctgctgatgatagcagtgatgactcagagaatgaggatgtggattcatttgcttcagactctacgcaggattatttaacaggacactgagatggagaaatgccattcttcaagacaccaggagactaagcaaggaggcagagtactgcagtttagactgcaggaggtagtatgtttgatgagaaatattaggtctctaaaatgcatgggggtgggcagggagactgatcactcatgattgaaccatgaatggaataatgattggaaaatcagccttcatgtggggcactatgtggacactaacatttatttttgagacttaaaagggtcttctcacccataaaatgctgcattacatgtaggacttctgtgtttactacaatatgtaaatgtttatataaatactggattgcagcattcccaaagtgaataaaaagcctttttacttgtgggtgcaatagattgtgtcttttttcttttttcttctttccaagtgttgtgcattgtgttgattgtac

SEQ ID NO: 7663 - DNA, 499 bp, Canis familiaris
  misc_feature (1)..(499): n = a or c or g or t
ggcaggtaatctgcaggcaggctgtttgggaaggaggagtnctnnacaaagtcaataaggtctgacatgagacagaaaagctaactcacttcgaagacagcttatttagggcaggctctggggttttgtggtgggcagccaaatcagacagggggaccagtggggcagccttcttagcataagatacttattacaaaaggatccccaaatcctggccacacaagggggcagttcttgacgccttaagcctcttttgccaaccataaattggatttgcctggtcatgtgatctcaaaagaagccagacacatcgaatccagaaataagtttcatttgggggagaaaatgcctgtaaatatcatttctttccaggttgggatgcaggaattttcagtattttttttaacactgatgatcattgaagagtatttatgtaaacatataatgggtgggggttctgatcagggtgacgtatgggatgggttctcttgctgtgatg

SEQ ID NO: 7664 - DNA, 583 bp, Canis familiaris
  misc_feature (1)..(583): n = a or c or g or t
ctcatataagtgtgttgaatatggnncctgctgaggtatttgttctgagcnnacaactagctttcnaggcattgaatgactctagagattgtcctactattgtgtattattccatgnnnnnttnnngttcattttgcgttagtggttctgtggctgctgtgaattgttggcaccctccccccctgaggcagaacaccccagtagccccaggccatttgttctgtcccatgtttctaggtagtttttgaatgtccagttgaaacacattctaacttgtttctcaagcccactcaggggcctataccaaaaatttgtgtttctttcaacagttcgcttgttttatttttgttatgggaggaatacatacatattttaaaggaccaaattttcagttggggggggcatgcaagtttggaattcataaacactaaaataatgaaaaataagagcctgngtatccatgtatctttttaatgagctctttccctccaaaataaaaatgtattgtttttaaaatgaaagttttatctgtattaagtcatcctgtnnnggaaaaaaaataccaaacttgttaacatggtat

SEQ ID NO: 7665 - DNA, 625 bp, Canis familiaris
  misc_feature (1)..(625): n = a or c or g or t
tagaattgnnaaaatggtgaccatcagcctttcaagtgtgaagataaannnnnntttgatcagaattttaaatactttatccntggtctttatccactagacannttagaggaaaaaatagggttggctttaaaagtacatcattactcattccaagtactaattctctgggtcaacccacttgtccaattcccttaggctattgagaaagtctcctagttggtgtcaatatgtcagtagtttccattctgatccttacatgtgttctccacagttaacttttctcatccttattcagacccctcaaaatacttgccattgcataaacttgccagcccagttgtgcccaccttgatgtaaggtataccaccacattgtttccattctgtcttccagtagatgaggtttctgtttcccagagtgaatttgaggaaacaaaggagaggaattgccccagttctaagtttgctggcttaatccatctaattgctggtttccttgaagcagtttttatatttttttcaggagtcttaggcgtagttaaatgatttccagaaaacaggctcaaaaccttgagacctaaattcctttccactcaaaaagagatcctaaaccatatattttg

SEQ ID NO: 7666 - DNA, 594 bp, Canis familiaris
  misc_feature (1)..(594): n = a or c or g or t
gagtngnacgacgtcaagttcttccagctnnnggcccagtggtnctcccacgtcangcacttccccatctgcatcttcggacactccaagtccacctgntagncctgccccgaagccctggacggcgagcgccaggagggcccagctgcttttctgttaacatttcagtttaccacagagacccttacaaacaaagagaaacagtcttaagtatgaatgtgctcgcgacctggaaactcctggggaggctcccgccctcggagcccgctaactgctctgctcattaaccagacgtgccggcggggtgggaggtcaggcggacggtgctgagctctgaggatcatgaaaggtgtgttttggcctcaggacctcccgagctccccagcaagaagggtcctcaccttcgcgtcctgtccttcctgaaagccaggactctgcgtcctcagggagctggggtcaggtggggtccgcacagatccacgggctgccggaggctgggggccggcctcctgttgggggcgtcccgagcagaccagggaggccggcagccaggctgggcccagccgcccaccagccgggagatgccccagcacc

SEQ ID NO: 7667 - DNA, 655 bp, Canis familiaris
  misc_feature (1)..(655): n = a or c or g or t
atgtatgtngagctgtgctcanntttggtatgggctcgttatatatgttcgttcagaccatcctttcctaccaaatgcagcccaaaatacatggcaaacangncntctggatcagactactggtggttatctggtgtggagtaagtgcattaagcatgctgacttgctcatcacttttgtacagtgggaattttggcacagatatagtacagaaactccattggaattctgaggacaaaggttacgtgcttcacatgatcaccactgcagcagaatggtctatgtcattctccttctttggttttttcctgacttacatccgtgattttcagaaaatttctttacgtgtggaagccaatttacatggattaaccctctatgacactgctccttgcccggttaacaatgaacgaacacggctactttctagagatttatgatgaaggaatgaaatatatctgtgatgattatgattctcagggattggggatatgttcatgaaagttccttattctgctccgacatttttaaccagttaatcaaggttgacagtgatactgatgaatactgataatcaagaaatataaacaaagccatttgataagttactttcaaggctatcttcaagaagaccatgtaaaaacatatatgccca

SEQ ID NO: 7668 - DNA, 624 bp, Canis familiaris
  misc_feature (1)..(624): n = a or c or g or t
ccttcctatctctgncttcctttcaccgctttctctgcaanntccttgcttcagnnnngaattaattggtgccttggtttctctgtatctatttatagagtcagaggcattagnctgaattttgcttgaagannnntttgtcttggaggtgattagaaagaccgaggagagagggtcccagagttgctgggacctcttgcggaggcctggttctggctcatattgcctcccttgggggatcttcatgcatcaaccaaatgggctatcaggcacttcattagccatggcaggaggaggggaaaagactaattggtccagacagaaaatcagcttcctttccccagccatacccctggataggaaaggactgcttggagcccttgggtgggagtgaggatataaggagaccagaggggaaagacctcagtcttgggtgacttgtctttgcttcttgccaagtgggtcctgtccacaccctgactccccataccacagtgccagccatgcccttctcctgggctcccattgccccctttctcaccaggtgatgggggagtcagtggatgggaggcccatggactttggttttataatgtaaccactgtggcggggggagggtggtgt

SEQ ID NO: 7669 - DNA, 690 bp, Canis familiaris
  misc_feature (1)..(690): n = a or c or g or t
gatttgaacnnctgcaagaagtacaactcagnagagctgtannnngaagnatannatgttnatanntggggggtggggggnnagnagaagaaattattgttcatggtaaaagatatttagcaactatggtattcttattctgaagatttttgcacactcaggctatctgagatactggtaatcatccttctgtgaaaaatgtacagagatgcaggtctgtaatataaaaatcttaaacattatatagttcttcctgcactgttttattttaatttctttattttcttaatcatttgctaaatacctataatattttgtcaaatgcactaaacatttgggttgaactttttgtcttttttattttgtgggggttttggttttgcccttgggggggtggaattttgagggtttaacatgcccagaaagctgttgtggctgacacttgtcatgatcaacaacaaaggtagaaaatcctcccactgacctaactacctgtaatatacttctcttagggcttctaaagatgagccattaaaatagagttgatccttcatggaccgaaacttgaatcactgcaaaatgaatctaggttgctgtcacttttttcttttgggtggcggggcttgttgtagattttactctatgtacagaatttaatgttgaatatgttaaaataacaaacctggcatg

SEQ ID NO: 7670 - DNA, 652 bp, Canis familiaris
  misc_feature (1)..(652): n = a or c or g or t
atataccgtatcactaccactcatccctcgcccagctgnacttcaacagctccgacacgtatgaggcccagaacgtctacacaggtgatgtcatcagtggtctccactctacaaccaacttcacagtgaccatcaacccctcaggggtagtgatgtggtacctgtatcccatcaggaagctggggacgccccagcactaaggagctgagacacgtgacaggctgtggcggcatcactgagcctagactatggagcctccacctgccgagggccagcaggcggggttctttgctacccaggcccacttggtgatttggccccatcagacccaaagtgcaatcccagggccaggtcccatgccctgcccaagtgtgaaccttcttggagacttgacttggggcaatgtcccgtggccttcctagcctctaccttgtctgcacagccccacagatgttactgagcagctcagccagcctcctgagcccccacaagcagggggaccgataccctctgactctgtttactcggaaatcaggatttggaatttttcttacgattaggagtggagatctgatctcttgtcaggagctcccatgaattgtgtgattggttttcctgcctggagaaggccttgccagttgatgccacccag

SEQ ID NO: 7671 - DNA, 567 bp, Canis familiaris
  misc_feature (1)..(567): n = a or c or g or t
gcagttgtggtaaataaaaacatttcacctcagtctccttttacttcataacatagatactgacatgataggaagatcttggcttagaagaaagataactaaattttagattttagcacatggactcagagtggctgatgaaacaaattggttgataccttaaactggtaacttgttcctctggtatatcctccagaattattccactaaagttttatttttcaaaagatgtacttcacattattgtaagtgatcacttgtcagtgttccagatgtatcttagctaaagctagtgaatgccctaacttagatggttttgaagcctgtacatttggtattgtttgacccttaaacttttacatctcttagcatggaggacgaagaaaggctgtacattgttgcttgagagtctgtacatttagaccaaattgtatttgcactgtcagtatggcaaatgagtggaaaaaatgttaatacactattggattttttatttttttgattcagcttgtcccaggctgaaaacctcaatttatgttcatgacagtggggatttntnnntttttt

SEQ ID NO: 7672 - DNA, 497 bp, Canis familiaris
aggatcaaggccacagggaggaagattgcccgggcactgttttgaggaagaaaccctgcgagctcaatagaactcatggtggccacaccaatgtgggttgccatcctgagtggtggcagtcatgttgcaccgggaagaaatccagaaaggtggccaaccaccctggggcagtgaagtgctactggtttaaccagaaggctgagagattcagctttgtgagaactggttatcttggtaaccaagttgggatacctgtgtatagctccctactttccatgaatgcagcacatggccagtactggaaaaagggatcagttcccggttcctggccacatcctagcattctaaggccaaggagaggcctacaaggaggagggagaggaaaagcctagaggctctgagccctggggagaggggatggcaagaagtaggatctagtaggagtttattttcctactctgggtgttcctgtcactgtgacaacactaagataataa

SEQ ID NO: 7673 - DNA, 603 bp, Canis familiaris
  misc_feature (1)..(603): n = a or c or g or t
gctgnnagagcatgngaggggaccagggtcagnnncacccagnnnnatagctcatcctctttccccactcgtgacaggcccaaactgaaccggtcagagtctgattggggttcagtatgactggcaaggctctagagcagcaattagccaggaatctccagatatagccctctagactgtaagttgggtccttgagtcaccagcataccctggccatattcagttggcctgtgggcccaggcctctggcatctcattgtctgtgtttctgtcatgttgacagtgtaagggtccaagaagctctaggggaagacctgctttctgaagttcccagggagcagaccaagacagtgcatccccatgcagagaggaacacctactcttcaggggtctttgacttcctggcattccagctggccctatagtctgtctccccatagaaagcctgacttctggcttctcctccagggattccaacctcagatccaagcaaagttaggacacctcattgatgggccttgcaggagaggaagggggcatctagaaaatctgcttgctttggggacctccctccattttgcctgctatccactggggtctgtat

SEQ ID NO: 7674 - DNA, 524 bp, Canis familiaris
  misc_feature (1)..(524): n = a or c or g or t
aatgcaaaacagaaagannctgttctggccattacaactccactttcaatacagctgcctcctgtcctcatcattggaccctatgnnnnnggcaaaacgttcacncnagctcaggccgtcaagcacatactccagcagcaagagacgaggatcctcatttgcacccattctaatagtnntgctgacctctacataaaggattatttacatccatatgtagaagcaggcaatccccaggcaagacctctcagggtatatttcagaaatcgctgggtaaagactgtccacccagttgtgcatcagtactgtttgatctcaagcgcacattccacctttcagatgccacagaaagaagatattcttaaacaccgagtggttgttgttacattgaatacttcccagtacctctgtcagttggaccttgaacctggtatgctgactcaagacacagatagggtgtctctgaatgcatagggcttctgcattcggtttagatcaggggttggcaaactataacctgtggg

SEQ ID NO: 7675 - DNA, 540 bp, Canis familiaris
  misc_feature (1)..(540): n = a or c or g or t
cagagaatactnnggcgagtttggngagattgannccattgagcttccaatggatccaaagtcgaacaaaagacgaggttnngtcntcatcanntttaaagaagaagaacctgtgaagaaggnnctggagaaaaagttccataccatcagtggaagtaagtgtgaaatcaaggtggcccaacccaaagaggtctatcagcagcagcagtatggctctgggggccgtgggaaccgcaaccgagggaaccggggcagcggcggtggtggcggaagtggaggtcagagtcagagttggaatcagggctacggcaactactggaaccagggctacggctaccagcagggctacgggcccggctatggcggctacgactactcgccctatggctattacggctacggccccggctacgactacagtcagggtagtacaaattacgggaagagccagcgacgcggcggccaccagaataactacaagccatactgaggcttcattcagcaggatgcccgactgatcgcacacgctttgtttggata

SEQ ID NO: 7676 - DNA, 577 bp, Canis familiaris
  misc_feature (1)..(568): n = a or c or g or t
actgaatgacggtcggtnctcagngtagctgaggtnaatgctggnntgagtaatgtttttgagaagcgttgtagggataaatatcgcgntcctgattactactatatgtgcaagggtttattaaatgaaagatttctaagtggccttttttaaaaccatgaaggagaaaatccaacaacttgaaaagatgtgttcttttcactgtttatatggtatttcccactcatgtgcctgcaaatctctaacaagaggcctttttgaactgttccgtgttttgtgagagagacacttgcccagagctggagggccggttgagagtgccctgagctaaatgaaggagtcaacacaagcaaggttgccaagagtattgccagatcctaactctctctgacaggtggaaaactttttgtcctttgaagataagcactaaggatcacgtagttaaaaagaagaaggcctggatgattggagaaaaaaaaaaaagatgggaaatggaataaagcagttttatcaacattatgtgaaaatgggggagggggagggagggcaggaggaccatgaggaaatagccccaaaa

SEQ ID NO: 7677 - DNA, 628 bp, Canis familiaris
  misc_feature (1)..(628): n = a or c or g or t
gagcaagatnaaaattggnctaagattaagtnngactggctgacnnngncttcaaattagaggttttttnctgtcagtagtaatnggannagaaacactnttnnncangattttcatgggagaatggaaggagattgggagtgttaaatgtattgcgtagataagagttctttaaagaaacaaagcaactttgagtgccttctcttgttttcatttgacttaatttatgcagaagattaatactgttgttatttctctggtgtttagtaaaataactttctgcttactggggaaatttgagctgtacaggctttctttttgctttcaattgggaatggttgaaaaaataacaattttactttctggtaagatacagagatttacatgaaaatgagattttttgacttcttgtttctgtttaaactgtatccttagaaatataatttgaataagttggttttgtcagattctgaagactgggaattgtcttcatagaaaaaataacctacaagagatgtttggtttgagtgtcttactttaccctggtaacaacttagtaattgatgtgtctttttttcctaaatatactttgtgagattgctctgtcaannnngaaatgtaccattgg

SEQ ID NO: 7678 - DNA, 578 bp, Canis familiaris
  misc_feature (1)..(578): n = a or c or g or t
agatngaactnnagcggaacacggcannggtccagcaacanngtggcgagctgcgagctctcaaggaaaagatggcacatctgaccggcctggtnnagaggaaggacagnnagctnnagctcctcaaggaggcgctcagggcctcccaagagaaacacagagtccagctctacagggagaaggaacaaaagcccaggaacaagacccagatgtgcgacatctcggtacagatcgaaccggtccacactgacactttcttgagcagccaagaggagcaatccttcagtgatctgggggccaagtgcaaagggtcccgacacgaggaaatcattcagcgtcagagaaaggccttgtctgaactgcgtgcgcgaattaaggagctggagaaggcctgctcatcaagtaagtcccctccctgctggtctcccactccccgctcagatccctgagccccagactctagaggtcactccgggcactgacagtcggccaggaccacccgcttctagcccatcacttcataaccaaaggacgttgtaatacaaggaaagacggcaggcatggtctcagagtcgagg

SEQ ID NO: 7679 - DNA, 631 bp, Canis familiaris
  misc_feature (1)..(631): n = a or c or g or t
tacagcccctttccangaactgcanntagnccaggagnacggctcacccgtgcncctttccttcaccacccactnctggcgtgggaccagggggagctcagaaagcatggctttgaactgaggcccggtgacagcagcgtgcagtggtgtgaaacacacgtgggtgtgcgctgacagcctcgtccagtcccaccgcgcggcccctgagccctcgtgtccctcttcacatgcatgtgccgtctccatgctggataccggacacaacgtgggggcttgccctgtgcttgcttcgagaaccagcagagggtctgctgacaagtgacgctctggttgccccaggactctggcgctcccaccgggtcttcctcaccctggagctcaggtgtgcgctcgaggactctcgggaacaggctttcgcgagaagtgggggaaaggatgcttagcagcggctcctgccccaggaacaggagatgggccggcgggcggccagggcctgtgcggaagcctctggagccagggagaagacaggggcccacgtggggccttccccttgtggggatggtgtttctttttcttccttttctttctttctttcttttttttttttttttaaagataaaacgttcagnnn

SEQ ID NO: 7680 - DNA, 545 bp, Canis familiaris
  misc_feature (1)..(545): n = a or c or g or t
actggggaggtcactnnagtccactcccttccccccacatttttatcttttccattcttagaaatcttccacctaacctgaatggcagccccctcttatttgctttcctttggcctccccgacctcaggaagtttggccttccctccccgcccccatcccagtgctgtggtttctgccattggccatgatttcagggagctagctgaggccacggctgtgccaatggggcttccctggtgctgtggcacttgtaaaccacgccccagcctctctccttggacatgtgaacacagtggcattcagtattggtagcctggcatggtaggtactgcccgatgaagaatggactatatattttctttactataggccatacttatacagacgtgtatatatatttatataagatctacctatcctagggtggaatgtttgagggaaaataaaattgaaggctccccctaaaaaacaaacaaacaaaaaaaaaaaaaccacttccagttgtgagccaagagagtaagctgagagcagccaggagcagctt

SEQ ID NO: 7681 - DNA, 658 bp, Canis familiaris
  misc_feature (1)..(658): n = a or c or g or t
gcgaccagcttcagagagcagagggggattccagtcatttggtgataccgggggctttcacttctcatttggtgttggtgcttttccctttggctttttcaccanngtcttcaacacccatgagccattccgtcggggtacaggtgtggatctgggacagggtcacccggcctccagctggcaggactccctcttcctgtttctcgccatcttcttctttttctggctgctcagtatttgagctttgtctccttcctgcccacctccagccagaggagaatcagtattgggggtccttgctgacccttccttactcctggcccctccctcccaacccctccgtttctactggctaaggccaaccctggccactttgtaggagggtgtggggaggaggtgtgacatctgtgcagaggatgggagaaacttctgccctgaactcgctgcgtagcatcctaactcccagctctgggacaggaggacagacggaagaggatgtctgtttcttccctctcctgatcttttgctttcccccacatttgttgatttgatgttgaaagatgggcaaggctcccactgactctcccctactttacccctgttgacttaatttttctctccccagtgtctaatatgggttctgattcttaagtccttc

SEQ ID NO: 7682 - DNA, 514 bp, Canis familiaris
  misc_feature (1)..(514): n = a or c or g or t
ggtagcatcnanagtnnnnnnccaacaggnngggcagtgtcatcagcctagcgttttgccagcaacggncnggacaggcctgggagactccgggcatgagcccaggcctccagcatggctcaactgctgaatttttccttgaggctctttgatggccatcccagcaaggatcctgtgtaggcggcaggagggaaagcatcaggtggccttagcagaagggggacaaagagggcatttcgagaaccatctcaggcacttctgcattacgaaggccccatcccgcctggcccttctgcagatgcccagggacaggcagaggcagaaggggtgggccacactcaggggtcaggagtgggaacatgcaggaaatggagcaggcaagcccagataggggacagtgaccccggtcaaggttggccatgctgctggccagtgccccagcaggcaccatctcctctgagctttgcacaaacnnnnatttcccaccagagnnnnnntgtgtgaggagcaagaa

SEQ ID NO: 7683 - DNA, 662 bp, Canis familiaris
  misc_feature (1)..(662): n = a or c or g or t
gacnnntccatgacattcatcactagcaaagaggannngaactgccaggaagaggaggacccgatgnncaagctcaagggccagaaaatcgtgtcctgccgcatctgcaagggcgaccactggactacccgctgcccctacaaggacacgctggggcccatgcagaaggagctggctgagcagctgggcctgtccaccggcgagaaggagaagctgcccggagagctggagcccgtgcaggctgcccagaacaagacggggaagtatgtgccaccgagcctgcgggatggggccagccgccgtggcgagtccatgcagcccaaccgcagagccgacgacaatgccactatccgtgtcaccaacctgtcagaggacactcgtgagactgacttacaggaactcttccgaccctttggctccatctctcgcatctacttggcaaaggacaagaccactggccagtccaagggttttgccttcatcagcttccaccgccgtgaggatgccgcacgagccattgctggggtgtctggctttggatacgaccacctcatcctcaacgttgagtgggccaagccatcaaccaactaagccagttgccatgtttgctgctgctgtctggccccggccccaggaccccatggccttaggaggtagctccc

SEQ ID NO: 7684 - DNA, 537 bp, Canis familiaris
  misc_feature (1)..(537): n = a or c or g or t
ctcccaaacctgcctgtcaacagnnnngacaccaggtgacaatattttgtttcagcaaaatgtgtttcatggcgcagagnngtttaggatggcaaagttctggactggggtggtgggaatgtttgtacaacactgtgaatgtgctcggtggcactttaaaaatggttcaaaggggcccctggtggctcagtggttgagcatctcccttctgctcaggttgtgatcccggggtcctggaattgagtcccacatcaggctccccgcagggagcctgcttctcttgcctctctctccgtctctcatgaataaatgaaatctgtaaaacaacaaaaattaaaattaaataaaaatggttcaaaggatagattttttatctacattttaccacacacaaaaaaatcctacatcatattaactatgcatttaactgtgatattaacctaaattgtgtcttgagggttttctctccttggtttgtagttttactggcattttataattcatgagggccagnnnnnnaagcttctatctgacctt

SEQ ID NO: 7685 - DNA, 552 bp, Canis familiaris
  misc_feature (1)..(552): n = a or c or g or t
ccgnnngcattgaacgtgtgtgcagcctgcatcatgggcttcaccccaactgcggcccagccttggcctggcangctgtgctggccacggctgcatccacggccgtaggggctctagattctgaggcacatttggtgtccatcatgttccctggctcgtcctgctgtcagcgccaggaagtaccttcaaaggcagggcctgccagacttgtacttttcctcctctgagctagatttttatagccattaaagagaagaagccgggtaccaggagggcttctggagacaaactcagcaggggacttcagctggattctgttgaggagcaaagctgctggaatggatgggacagcggaagctggcgtgggaaggaggggctttctatggaaaaccttgacctagaaggtggcttccatctccccagctctgccggaagcttttggaaaaaagtgttttaggctcccaaacttaaccttggttttaagggaattctgtcccagggatgagttggggctgcttctgaagagcatttaaaattaaaatctatagctca

SEQ ID NO: 7686 - DNA, 622 bp, Canis familiaris
  misc_feature (1)..(622): n = a or c or g or t
cnnntgtgtatgaggggnnagctgncgannggcatggtggcattgtgaagggggatgaggtcatggcgatcaacggcaagatcgtgacggactacaccctggctgaggctgaggccacnntgcagaaggcctggagtcagggggactggatcgaccttgttgttgctgtctgtccccccaaggagtacgacgatgagctgaccttcttctaaagttcagaaggagaaaccaaattcaccccaagaagccggcgaggtctggacccacccttctgaacacaaagcctggaaccggccttgagagatgccagcgtgcgggcaccctggaaacctacatccagcccccaaggacttctgactcccatcaccccccaagtagggctgaggaacaccgcgggccacccctctgaaggccaccagggagggaggaagtagggcccctgggatccagacagtgacttctgtcttccactcctgtgaatttggtctctcccagccctgggatctcaagcattcaagggaattctcaagaaattaagagttcttccatgaattcttatgggacctgactcctgggtctctctcgccctccctctcctctcactcctgctaattgctgccac

SEQ ID NO: 7687 - DNA, 619 bp, Canis familiaris
  misc_feature (1)..(619): n = a or c or g or t
gnntgttagagcagccctgcccctgccacgaagtagtgggcaggtgagagggcatttggtgcgnngcctcacatccagctttcacaatgggttttgatgccaaagtcgtgtccgtgtccttgtccttgttcttctccctctccctgccccgcaggctgggtcctggctgccttgaggggctggtggggtggggagacttctgtcctggagagggcagagggagcttgcctgagtccgggtgccctgggcaagggctgtaaggtcttacatcaagacctagacatctttgtgtttctttgcaatacttgaaatactgccactgtgcttggacttcaaggcagccctgtcatatgttccctcaacacccagtgacttcgttccttgctgcacggaatgtgtgcatatttattgctttacagtcggctgaggtccagggccaccaggaggctggtgccacgggaggggactcaggcagcttcccacccctcgtgggtgcccctgtgggctgccgtgctgcccacctcccagcgtgtgnnngccagctgattctgttctccacgattcagcgccccacccttggtnnntttaaaaggagttttgtgtgattctcccaacccct

SEQ ID NO: 7688 - DNA, 489 bp, Canis familiaris
  misc_feature (1)..(489): n = a or c or g or t
agatactgtangattggtccgaccccgcctggcggtgnngtcgcggggcaggagcgatcaccctgttgatgcacattgtatctgtagtttaaggagacgctgccctaaggcgtcgtggctgaagcccaaaccctcctttctcggagggcggggagggcggcggtggggagcagaggcctgggctgggggccctgtgcgcggccccccctccgccccgtccctgggacgccggcctcggctggctagttaggcaccgtgtgcctgccctccaagggcccctcctgtacgccaatgaggcctcttgggtgctctcgcggggcacccggcttcatgtcagtaagcaagatgcttcttaataccccctccgtcccgctctgttcgccgtgtcctggcccccgccccccggcctctgtgctgggggtcctctcgccctcccgcgggggtggggtgcgtgtatgtacctgtacaggtgtaacgtgcactatccta

SEQ ID NO: 7689 - DNA, 591 bp, Canis familiaris
  misc_feature (1)..(591): n = a or c or g or t
tgcaatgacagcctgccccccggcaccgtgaagctctaggcacagnntgcttgncgccaagggactcgaactcctgctgctgccacccgcatcacctctgccctctgccacagacggctcccagacaggcctcggctgctccttggattcttgcaccctgaacagtgctgcctgcccccctgcccctctccacgctcctctcctgctgcccacccagccgagctggcttcagggtgcatcttagcactggttggagtgcccagggcaacgggagcaagcagagggtcatgtggccaggttccagggaggccccagggaatcctgtgggctggtctgcgccactcccttggacatcagccatgaggcagaaacgccaaggactgctcatgacagtgccaccttctcaccattccacccccatccccggcccagccggcctggagagacttgatgctggaactgttttggcacttctgtcaagcctctcctgccctcccctccgattgccttgaagtctctgctcttcgtcagagatttgcagactcatgggttttttttgttcttgttttctcatcattccattgtgatact

SEQ ID NO: 7690 - DNA, 563 bp, Canis familiaris
  misc_feature (1)..(563): n = a or c or g or t
agagaatattttttgtggtactatttgttttgtgattgcctttatgtaataatcatgaatattaaatttcaaaaaattgtagaatatccgttgtacctagtctctatgggaggaggtgtctctttgtaaaaattgcagaaagcaaaacctgaagttgaaggtttcttcaaagaattataaggatagctcatgggactattaataactgagactgccatgatcctcaggcctcttctaagaacactgtgaagatgatacagtgagtgggatcaatgcaaagagcctgtttcaaacccctgacataactacattggcctttaacagctccctggcttctaagctaccaaaacccactatantaccgcattaagttnncatctcagaaatagtgctggtgagagagtaacaaattgtcaagtactatggatatagnctctagattcagactggtaggaaattaaaacaatgcaaacggagctcattcttatataattcaagaaagtcgatgacttaggtttcatattcctancntaacatggggtggttcaacataaagtctgaca

SEQ ID NO: 7691 - DNA, 635 bp, Canis familiaris
  misc_feature (1)..(635): n = a or c or g or t
tcctgctcatttcctccatcctgnnntcgcgcaccgctggtnngcacactcagtttgtgcagtggttcatggaggagtgtgtggactgcctnnagcagggcagccgaggcagcatcctgcagttcatgcccttcaccaccgtatcagagctggtgaaggtatcagccatgtccagccccaaggtggttctggccatcacggacctcagcctgtctctgggtcgccaggtggccgccaaggccattgctgcactctgaggggcttggagtggccgcggggggccatctgggggaacgcagccccaggcgcctcagaagggaacagtgaaggaagatgagacatcattgctcatatccatgtgatgtaagagccctatgtcatttccagatcattcccctatcctgatatctgacctctaagacgtctcccagtttctttctttcataatttcctctgctcactgccagcacctgaagaatgtgtgcagcctggctcttagcccaggccctcagcaccccgcacccctgcttgccctcttccagcagtacgtgtacctctgaggaactttgtaggtgcaaagttgtgtgtgtgtgtgtctgtttgtttttttgtaacacatgagggaagttcactca

SEQ ID NO: 7692 - DNA, 619 bp, Canis familiaris
  misc_feature (1)..(619): n = a or c or g or t
agtnncaaaatttaaaacatgacattcnntgcaggcantgttatatatcagtatatatgnnnnnntctctttttttatttattttttgaccatcangtagccaacgtcagtaggagttnataacaccaagtacaagaaaatgctgcatatcttgtctcagtaagttctatnaagtaacattttaaaacatgaaagcatgttacttgacctaatttttttaacattcgagttgttccattaaatgtggaacatcttataaattgcaagtattttatacttgtaactgtcaagaatttaaaagtaactgggtttgttgcaggcaatgagttaaggaatcctttcacatttttctcaactttaaaattgaggatttccagagccctgggtagagcaatgaaaataagactttgtatgtttgcctggggacgaactggtattccacctgggtgaggggatttcctatgagttcaggccagggaacctgttatcttactacaagatcccaagcacctggctgagtgtgctggagtgaggactgaacagaaactctggtttctgttattattcaacacaaagctaaaatggctaaatatatactgnnnannntgcttccttttaa

SEQ ID NO: 7693 - DNA, 577 bp, Canis familiaris
  misc_feature (1)..(577): n = a or c or g or t
cgtgccnntgcgggcgccggcacagctcatcttctctccccacgggggtcccatctactctgtgagctgttcccccttccacaggaaccttttcctgagcgcagggacggacggccacatccacctgtactccatgttgcaggcccagcccctggcatccctgcagctgtcccacaaatacctgtttgctgtgcgctggtccccagtgcgccctttggtgtttgcagccgcttctggggaaggtgatgtacagctgtttgatctccagaaaagctcccagaaacccacagtttcaatcaagcaaacccagaatgaaagccctgtctactgtctggaatttaatcaccagcagactcagcttctggctgccggcgacgccgagggcacagtaaaggtatggcagctgagcaccgagttcacggaacaaggaccccgggagaccgaggacttggagcagctggcagctgaggtggccacctaagtgacagcagggctccgtgggtggaatgcccccaaatatgggggcaggtggggtgaggccacacctgtgctgagctatggatttcnngtagaagct

SEQ ID NO: 7694 - DNA, 624 bp, Canis familiaris
  misc_feature (1)..(624): n = a or c or g or t
tntgcttaatctcctctgttttcagatcaagnngcatttatagaaagcttccngcagagctgatgttcagccagtttgcattggtgtagctgcttcagtcgctaaaatactgcaaagttccttacagagagttgctgtcttccctctgctgtgnncttggttgctcaggaaatactccggcagtttgggaaaaagagtagtccagaaactgaaggcccgcttttccattggtagagtaccaaccggtttccaaagaattagaacacagagcactagacagaaatactgtcaacacaccatgaacctctcgtgatgacaaatagctggattctcctgactgctccttcaggtcgccttggacaagggaaaggacgagatgtgtgggaggccacatacctaacagaaccttcccgagttctgcctcttgacccatcgctgcgggccagtcagaaattatagacccagtttccaaaagctttggaattatacctgggttttaaagaacaactgcaacttaataaccacatctgtgggcaagttatttgacctctcatctgtaaactggggatagcagtacctcagagtttaaggagtatgtcacatggtacatggaaagcatccagc

SEQ ID NO: 7695 - DNA, 555 bp, Canis familiaris
gcacaccgagcaggcttctccaattttccacggcagactccagggagcgatcacctccctccctctgcggccagttggcccgacaactggcccccgatccccacccagaaccccgttctgagcattagctcgaagagcaaggcgccagggggccagggccagtggacactcttggctctcggcacccccgttcccccacgcacagccagcaccggtacacgccttcgacctcccgtgtgtgcgcgactccagctcctgcctgtagatttatgctgggagaagacccctctcccccctccccttccttttgcacgcagcgcgctctccggccctccctccctgtgctcccctctgtcttgtctcctgtctggtcaggaacctgtttgcaagtgaagcaatatctccgtgttttgtatatacaaccgctcttgtagcctttggtttttttgttattgtagagaaacacagattctttatacactttgtaagattgacgccaaaccccagctctcgatctcttattctccctgtggcccctgcactgttgccccgatg

SEQ ID NO: 7696 - DNA, 654 bp, Canis familiaris
  misc_feature (1)..(654): n = a or c or g or t
cctggcgcccgaggtgctgctcaaccagggctacaaccgctcgctggacatgtggtcggtgggcgtgatcatgtacgtcagnntcagtggcacgttccctttcaacgaggacgaggacatcaaagaccagatccagaacgctgccttcatgtacccagcctgcccctggagccgcatctcctccggagccattgacctcatcaacaacctgctgcaggtgaagatgcgcaagcgctacagtgtggacaagtctctcagccacccctggttacaggagtaccagacgtggttggacctccgagagctggaggggaagatgggcgagaggtacatcacccacgagagtgacgacgcgcgctgggagcagttcgtggcagaacacccgctgcccggacctgggctgcccgccgatggggacttgggtggggccctcccgccgcaggaccatgagatgcaggggctggccgagcgcatcagcgtcctctgaggccccgtcctcccgcctcggctgcccggtgatgctgtcctctggtccccggagagcggccctccacaccatctcagcaaggaactgttctacacagaaggggcttcctgccccgaatggatgggacacgccccgggagaggagcagggcgggggtcagtggcgggt

SEQ ID NO: 7697 - DNA, 636 bp, Canis familiaris
  misc_feature (1)..(636): n = a or c or g or t
tgggggtgtnngtgagcctgccttggnnnnctggccannccacattgctcctggtgtgacccatgagctcgccagctccctggacctgctgcccacgctggcgtctctgaccggggccccgctgcccaacgtcaccttggatggtgttgatctcagccccttgctgctgggcacaggcaggagcccccggcagtctctctncttctattcggcctatccagacgaggtccacggggtctttgctgtgcgcagtgggaagtacaaagctcacttcttcacccagggctctccccacagtgacaccacaccggaccctgcctgccacgcctccagccctctgactgcccatgagcccccactgctctttgacttgtccgaggaccctggtgagaactacaacctcctgggaggaatggctgaggtcgccccagaggcactgcaggcgctgaagcaacttcagctgctcaaggcccagtttgacgccaccgtgaccttcagccccagccagatggcccgaggcgaggatcctgccctgcagatctgctgtcagcctggctgtaccccccggccatcctgctgccactgccctgagccccaggcctgagagcactggcacgggccagccaggccctcgcc

SEQ ID NO: 7698 - DNA, 528 bp, Canis familiaris
  misc_feature (1)..(528): n = a or c or g or t
tcctggatngaccaagggtcaggtgtggattaatggcnnnnnnntcggtcgatattggnnagcacgnggcccccagatgactntgtttgtgccacggcacatcctggtgacatcaaccccaaacaccatcatggtgctggaactggagcacgcgccctgtggtgacagtggcccagaagtgtgcaccgtggagtttgtggacaggccggttatcggtgcccctccaacccctggtcatccccctccagacctgtcccatcgagacttgagactggactatgtctgatgatgaaacactgtgacccgttggagtttcagccttgcacgtacctcacctatccccctgtgtaatgccaacactcactggaaagttcaactggaaaatagatttagagtgtgcattttctcctgaggtttccaggcagcctggtagtgcccaagcctccactggcaggggccaccatgaatgcatgatgagggcagtggcacacagtttggaatggaagctttgaaggtgttcctgatttt

SEQ ID NO: 7699 - DNA, 507 bp, Canis familiaris
  misc_feature (1)..(507): n = a or c or g or t
actcttcccctccacataagccatgcttgcttggaagtccaaagtgcagagttctgtgctccaggannaagggggcaggaggtaaaatngaaagatgaaagagtctgggcagagctgaaagccttagcattggaagaatttcctgaattgaaggaagactgtagccatacccagttatgccagtgatgcagaaaccagagaaacctatgcaaatctggctcgagtcagacaagaataaggaagnannnagagagaatgagactccagttaggnnnnnnnngggaaagaaagaatggccaggttgctttgggaatagaaaaggttgtttgagttactggcaccaggagatgtgttcaggactcctgggaatactggcatatgccctggtagccatagaagttatcagcaaactcaccaggataggtcccaattttctagctgggaaaggctgccctgagactctatttcccttctatgtataatttagggatatattttgcagagttg

SEQ ID NO: 7700 - DNA, 589 bp, Canis familiaris
tgtgtgtgtgtgtggggggggtgatggtaattctgaatgctcagaatcaaccatcaaatttttatcaggtttattgagaaattttctttggactttgggctatgtagacacagtcaaaataattttaaatcttgggaaaaattttaaagatctgtaacttcacataaaaaaataatgaaataatttttaatttaaagcttctcgttctgttggttaatttgcccaaaggaaatgtttttaaaagaaagtgtgtataaagcacacgtggaattactgaaatggatactacatctttaaacagtatttttacattgcctgtgtatgtatgaaacaaaaccggttgaagtgtacctgtgtacataactctgtaaagacactgagaaattatactaacttatttatgttaaaaagagattttttttttttttaatctagaccatatacaagccaaagtggcatgttttgtgcatttgtaaatgctgtattgggtagaatagtttttttcctttcttctgttaaataatatggctatgcttaaaaggttgcatactgagccaagtataattttttgtaatgtgtgaaaaagatg

SEQ ID NO: 7701 - DNA, 629 bp, Canis familiaris
  misc_feature (1)..(629): n = a or c or g or t
tttatatcacagagccctgtattgtgaactttgaantgtacttnnggcatgcnagcgtgctaacttcttttaacacttaattttctatgaattactaattttgtgggaatnnaancagcaaaatgggcccagaaatgtctgacatgtatagttagtcttatttcggcaaggaaaggccccttcagttctgatagcacttgtaacataaaaggaaaggggacaatttttaacaatgtgaaggagagagaacacagctgcttcctgtaaagtggattcattgaacaaaagaagcctcatctctgccttcccactgccagagcatgcattccactgaagcagggtaaactacgcgtccctaaaatgtgagtaacctcagctccaacggtgcgaccactgtgactgctcagaactactgatagataacatttggatgttttgtacttacatctttgtttactcttcatgagttggggttctagtaaaggccaactgaaatccagatttttgcctgtggccttattctcaaggcatgtcctcaggaggggaatgggaaagtggccgcttccttgtagggtttccttgggataggcaggcttggtgatgttagtttctttcactgaaagctgaat

SEQ ID NO: 7702 - DNA, 699 bp, Canis familiaris
  misc_feature (1)..(699): n = a or c or g or t
aaccgtgtgtgtgctgcttctctctacatcctgggcactgccacccgttggnnttngtctgtccgcaagtggaccaccactgcactggggcttctggtcatccctgtcatcatccatcccattgacaggtcagtggacttcctcctggactccagcctacgcaagctctacccctcagtggagaagcccagctcttcctgaccccaccctgataactggcccattcactgctctagtccaacttcctcctcctgccagggggtacggatggatgcctggctccctgagtctgaggcccgggtatgtttgagccagatggaaactaagagaacaaagacctcaaggagcagcagctgccatgactcacaggaatgggagacctaaaccccatgtgcttccttggaatctgtgataccgagagggagtggacctgtcttttgacaggaaagtaacatcctcccatggaggataagcagacaggcccagacaggggaagcccagatcacttagcagtctgggaacccaggaggcccagtggcttggccctgcaaaagtgtggctgaaccaaaaagcagcaggtacccgaagaaatgcaggggtgccatagggggtaccctgaggactgattctccagctagctgatctgctcaggcctggttggaaggcaggacagcccccagccaataaatctcaagaagn

SEQ ID NO: 7703 - DNA, 560 bp, Canis familiaris
  misc_feature (1)..(560): n = a or c or g or t
agctcagcccaatttgcctactgctgnnngtcccggtagccagaaggctcagatacctgaagatccagccacctccagaaccaagannaagccacatgtaccancgtgggctgagaagcagagcacccaggccacatgcccagggggcagtcccagggtgctaggggacgacgctcttgggccagggacagccagggagaccctggtgcctcccctgggccaactgtagctgcctccaggactgggatctgaggagctgggcaggatcactccactctccatccacatgcccaggcccctggctctccctcgttcccacggaagaagcaccagaaggtgcttctgcagcacagggaccttcgggctgggggtcaggtcattctgtgcatttagagcaagaaggccagaacacagctgtgcacagaccatgacgacagctcctctgaaagtgccgggaagcagaccccacggagaccgtggtctatgctgacacaccagggctgccggcgcttgcctctcnnnnntccgcattctcctnnnnnntgtgcatctggtattgc

SEQ ID NO: 7704 - DNA, 615 bp, Canis familiaris
  misc_feature (1)..(615): n = a or c or g or t
ctgannnagctgtcnctgnagcagagctgcccgcagcccctcgacagccagcacgagccgaggaccgggccacagaggccacagaggccgcaggagcagctcaggcaggtgcagccgcacgcaggggccaccgaggtacagacgcgggtgcaccagcagctgctggcccagctggccgagctggagaggtggccgcccaggagtccggagcacaggagcgccagggacaaggggcagcacaacccggagctgagcgtcccgcgggaggagttccatcacatcctgaggctgacagccaagaaggaggagaagggccacgtggagggcatcatggagggcatcaaggaggccgtcaggaggaaggagcagaggctggagcagatctcccgggagagcgacgccgccttccaggagttccagaagctgtcctgggcctcgaggagggaccaggcccgcgcgctggccaccagcctcctggagcagaggccgctcaagggcccgcacggggcagggccgcagaggtgctgagagcggggcgcccggtgccggggcgaggcagaggcgggcacctctacgccctgcagaaccgggtcgccaccagcacagnnncagaaa

SEQ ID NO: 7705 - DNA, 598 bp, Canis familiaris
  misc_feature (1)..(598): n = a or c or g or t
aggnnatgccacatgtgccacaggtgaccccaaacatgccaccacgcatggtccgcctgtgcnnagggcacctgnntcttggcnnttgagcaacccccctccaccccccaccgctcctcttccctcccgctgtctccaaatcggacatcctttctagctgagatttttattttttcagatctgtagtgtcatgaagtgattccgtctctgatttccagcggtagacccaggtgattgggaactcacgcacacctccagctggacaggctggaggcgtggggcagcgcctggcacaggctggggcacaggggcaccagactgaccacagagcagtctgagttggtttctaactgccatcgcccggttctgttgtgacagctctgccctcctgtagagactgtacaactgggaccaggtaaccaggttagaggggggtcacctgggagcctttctttctcttttcctaccggcccctcgtaccccgcccaaagctactgtcagtccaagccattggcgttgtagttttttcttttgtcaattaaaaccaacataccagcaatagtctgctctcccctgaaatctcttaacatgctctgtt

SEQ ID NO: 7706 - DNA, 513 bp, Canis familiaris
  misc_feature (1)..(513): n = a or c or g or t
ctcctgtgtcagcacttaactccctgcgcaccccatgcatgtcaaaacatttgttcttaagttgcaagagaccagacccaccctggtattaaggcttaagtaacagccactcacccttgcttcggccctttgggactcccaccacaagacaaagctcaggatgctaggaacacatcccaccccctcaacaccctgcaccccgattccagattcctccagctgcccctaccaattccaccaatcaaaccagtgaacttctcgaccttcctcacagcgactccatagctccaggcagtgtccaccaagaatcaggttggagaaaagggaacccaagcagtggagaatgatagtgcaggcttttgttcatccaaatctcggatttttttccctaagagattctcttttggggggtgggggagtagggaaatggactcctcaaaaagggttcagatgtcatcaatttttctgacttttttaatcatcatnnnnnntatttttaattaaaagatgcct

SEQ ID NO: 7707 - DNA, 656 bp, Canis familiaris
  misc_feature (1)..(656): n = a or c or g or t
ctgagaatacagaaagaaagcaaaatcagaatnattttatnnagatgatgactgtagaaggagtctatgatnanctgatgtatgtangacgggtggttttccaggttcctgactggcttcatcatctcttaatgggaactcgaatcctgtttaaaaacaccctggaaatgtatactgactactatcttcattgtaaactagaacaactgtttcaggaacaccgcttggtctcactcataacacttctcagagatgctgtattctgtgaaaacactgaacctcgctctctccaagataagcaaaaacgagcaaaacagacttttgaggaaatgatgaattacattccagatctgatagtcaagtgcattggtgaagaagccaagtatgaaagcatcagacttctatttgatggcttacaacagccagttctcaataagcagctgacttatgttttattggacattgtgatacaagaactatttccagagctcaataaggtacaaaaagaagttacctctgtgacgtcctggatgtaaacatttggatttgggaaagaataaccaaaaagagaacaatttctgttgtgctagtgtagtatacatgtatttttttcttttacttttgtatattcttgtatatatcatgtaatccattgt

SEQ ID NO: 7708 - DNA, 647 bp, Canis familiaris
  misc_feature (1)..(647): n = a or c or g or t
aagtacaagctcttttatgggatgagttctgaaatnnccatgaagaagtatgctgggggagtnnctgagtacagngnntcagagnnaaagacggtnnaggtgccctttaaaggggatgtggaacataccatccgagacatccttggaggcatccgctccacatgtacctacgtgggagcagctaaactgaaggagttgagccggagaaccaccttcatccgggtcacccagcaggtgaatccaatcttcagtgatgagagctagacctgagcagctgtgccctctcaaggcactagcacctcccaagtgggttcctcacccatccgaactactatggctatttatcactcagtcatttccagttgtctcactgctgagggctcctgcagtaattctgtactctgtacacacataatgcccagggcacacactggggaggaagcgaggcagccaagctaagaaaatgaagacagtcaaatgcacactggggacccagcatcctgaagattattaaaaggaaaagatgctggttcctatctaggtgtttaatgtggctttgatctggaagagttaggctcttgaaatcatgttttggtaatgagcttcattaaataggagctttgaatacctaaaaagctcagaagtgt

SEQ ID NO: 7709 - DNA, 546 bp, Canis familiaris
  misc_feature (1)..(546): n = a or c or g or t
gagccagatgccgtttccgtggnntccgaggcctnngaagatgataactgcagcaacttcgtgtctgaagatgactcnnaaacccagtctgtatccagctttagttcagggccaacaagcccatctgagatgcctgaccagttccctgcagtcgtgaggcctggcagcttggatctgcccagccctgtgtctctgtcagagtttgggatgatgttcccggtattgggccctcgcagtgaatgcagtggagcctcatcccccgaatgtgaggtagaacgaggagaccgggcagaaggagcagagaataaaacaagcgacaaagccaacaacaatcgaggtctcagcaacagcagtggcagtggcaagagccaaagcaacacctcccgtgagggccaggccttggagaacaggatgaagcagctctctctccagtgctcaaaaggaagagatgggattattgctgacataaaaatggtgcagattggctgatccatctgaagccctgnnnnnagtgcatagcagtnnnnnnncacgaagctgtatgga

SEQ ID NO: 7710 - DNA, 677 bp, Canis familiaris
  misc_feature (1)..(677): n = a or c or g or t
taaagaaaaggagaaagatagtaaagganctaggctngcgtatgtngcgnntacaataccaagacgactagncagtacatctgacattgaagagaaagaaaacagagattcttcaagtttgcgaacaagtagttcctatacaagaagaaaatgggaagatgatctcaaaaagaatagctcagttaatgaaggatcaacttaccataaaagttgctcctttggtagaagaccagatgatttgattagttctagtgttccaagcaccacatcaacaccaacagttacctctgcagctgggcttcagaaaagcctgctttccagcacaagcactactacaaagattacaacgggttcttcctcagcaggcacacaaagcagtacctcaaatcgtttgtgggctgaggatagtactgaaaaagaaaaggacagtgttcctacggcattgaccatccctgttgctccaactgttgtaaatgctgcagcctcaaccacaaccctgactacaactactgctggcactgtctcctccacatcagaggtcagggagagacgcagatcatacctcactcctgttagagatgaagagtctgaatcccaaagaaaagcaagatctagacaagcaagacagtctagaagatcaacacagggagtaacattgactgatcttcaggaagctg

SEQ ID NO: 7711 - DNA, 624 bp, Canis familiaris
  misc_feature (1)..(624): n = a or c or g or t
atgtcatnantacattctcacttttgtannnnnnaaactaaccgnnnnnnngnnnnnnntanaaagaaaaattctgcnangactaatatttannagacgagggttcatttttcttgtcccaactgtcgggacagcgagctgaccctgagagatctgaggaatgtaccttcttgcgtgatatttctcccgatatttcacgaactgttcccagctttgctcttctgctttgaccccaggcccttctccttgagctggtggttttggctgatgctgacaggagtggcctgctcctgtgcggtgggcgtcaagtacatgggtattttcacatacctgctcgtgctcgcagttgctagtgtccatgcctggcacctgatcggagaccagactctgtcaaatgtttgtgtgctctgtcacctgcttgcccgagccgccgctctgcttgtcatccccaccctcatgtacttgctgttcttctacgtccacttgatcctggtctaccgctctgggccccacgatcaaatcatgtccagtgctttccaggccagtctggagggaggactagcccggatcacgcagggtcagcccctggaggtggcctacggttcccaggtcactctgaagaat

SEQ ID NO: 7712 - DNA, 455 bp, Canis familiaris
  misc_feature (1)..(455): n = a or c or g or t
gctgtctttgctcatctttccccaccngtgnggaccccacatccaggagcacttggcctgcctgggctncttgtattaattagccattactttttcttttctttgaaaaaaaaaaaaaaaagacctagttaacagctaggtgacacttgggttagcaagaaaagacgctcaggtgccacgatcattgctgtcatatagacccggagcaaaggcccgtggagggtcttagtttcggagcaggaaacacgtgacattggtagacacttggtttcaggggaggtgatgtgatgaggggggaagtatgtcacctacttctttggacctctttggctgtgatgcctgtgtgtgctgagcccctcgtgccgggtaagcttccaggtgaagagtggggttgtcatgaccttggctatgacgcccagcatttcgaggtggctccctctattctttactttggg

SEQ ID NO: 7713 - DNA, 596 bp, Canis familiaris
  misc_feature (1)..(596): n = a or c or g or t
accngccccctggtgnnncgctcagtcatcgctggctacaatgctacnntctgctgtgctgtgcggggtagccccaagcccaagatttcctggttcaagaatggcctggatctggggaaggatgcccgcttccgcatgttcagcaagcagggagtgttgaccctggagattagaaagccctgtccctttgacgggggcatctatgtctgtagggctatcaacttacaaggcgaggcacagtgtgagtgccgcctggaagtacgagtgcctcagtgacctggctggctccctggcgatgggcaggtgcaacaggatgccgatggcccacggcccgggaacctggaaggacgctggacaagccaccttcctgctgttgagtgtgtgtgcacaagtgtgtatcttggggtggggctgggggggaagcatccatagggcagtgcccttaagataagcaggcctggcggctctgtgtagactgaaccgtctgagctcccactggccgctctctggccttgggacaagaagttggtgggctcaggaaatggtggctggggacagaccttgctggcctgccatgttttctcaatatatgaggg

SEQ ID NO: 7714 - DNA, 650 bp, Canis familiaris
  misc_feature (1)..(650): n = a or c or g or t
aatgtgnnatctggtcaacgttttantccatacgcaacatatnnnnncacacatttttaaaaggttnactacatcatgcaagatataatgctgattagaatatctttataatcctatgaagaaagtacattacagaaaagncgtatctttatattaaccaacaaaattttagcaattgcatttcactcttttagatcattacagggtttaggggtgatctctgaaaaaacatattatcaaaatgtctcttgcaatcatgactttgtcctccactgttcaagtaaaatcatgtgtcatccagttggaaaatctatttattggcaacatgtatacagctcacactgcaaatttttaaaaattgtaccccgtcaagtctgacaaagattttatggacgctgccaatctcatcatttcatctcgtactagtaagcaaagccattattttctacttctattcatttgccaacttttcggaaagagtacgttcatatttgcaaatacacacaacatgacaaaccaggataaatggcactgaaaaactgttataaaagagacttgcctgaagtcatttcattcaacaaaaattgatttaactcccaaacaaagcccaattgtaaagaaatacataataaantagtacannacannnn

SEQ ID NO: 7715 - DNA, 615 bp, Canis familiaris
  misc_feature (1)..(615): n = a or c or g or t
taggattgctgtttgggctgtctgaaagtgatgccaaggctgcagtgtcgactaactgccgagcagcgcttctgcacggagaaacgagaaaaactgcttttggaattatttccacagtgaagaaacctcggccatcagaagcagatgaggattctcttccagcttgcaagaaagccaagtgtgagggctgaaaagaatccccggtctctgtcaacactcccttcttccctttgataatccatcagtcacaacagaaacaaaacctttatgacttactattttcattcagagctagaactcagcagtctataaaaacaattttatattcaagccattaaaataacaaaacctagtgaagcagtaaaaaagacgactgcccacttaattaatttagatatattttgagagaaagagacaagtttatttattttttgtgttaagtgataaaacggcagatataactgaataagatatttcaggaggagactccttaaaaatgtttcttcttgggcagccttggtggctcagcagtttagcgccgccttcagcccagagtgtgatcctgnnacctgggatcgagtcccatattgggctccctgctcagtgaggtctgct

SEQ ID NO: 7716 - DNA, 607 bp, Canis familiaris
  misc_feature (1)..(607): n = a or c or g or t
gnnnaggnntcannaagcagcagaattccaggcagagtttgtgtccacccccaagctggccgccgagtccgacttcatcatcgtggnctgctccttaacacctgcaaccaaggggctctgcaacaaggacttcttccagcagatgaaaaccacggctgtgtttatcaacataagcaggggagatgtggtaaaccaggatgacctgtacgaggccttggctagtgggcagatcgcagctgctggactggacgtgacgaccccggaaccgctgcctacaaaccacccgctcctgaccctgaagaactgtgtgatcctgccccacattggcagcgccacctatggaacccgaaacaccatgtccttattggcagctaacaacttgctggctggcctgaggggggagccgatgcccagtgaactcaagctgtagccagacaggagctgctgagggtcaggaggcccacagagccctcggagtctgtcagggagcacgggcttgatttggacccaccggatgggagccaaggaaaaaaagtctctgttctgatcctacagaaagaagactggtgctgatacaggggcttgccgcatttgtggttggaaatac

SEQ ID NO: 7717 - DNA, 594 bp, Canis familiaris
  misc_feature (1)..(594): n = a or c or g or t
ggccctggacacgtctcaaggggagtaaatagcaaactnnnagttcactgatgacagacgaagataccaagnnatgctttttctggcctgttcgtttatttttgcggggtgaattggaaggatccaggagttcaaaatgtaaaatagtttcaagacgttagttctctgaagatgttgctcacgtagccaacgtagccctctcttaagaataaccgtgaagtgtgtactcccaaggtggcctctgcctcgatgctgcccccgcggacccttcgggaccgcagctgcgctccgggcagcgtcaccgtgaaacgctgccccgtgtgctcctctgcctgcaggtggaagtaaccacacgtgttttgaattgatgttgccctagaatgtaaaggccaaccacgattccctgctttgtgtgaacagcatgtgtgtcaccccccaaacgaatcttaactcctgcaagatgggcaagaagcaactcggtcttcagagagggaaacaccagctctttggttgtttgggatatgacttcacaggataaatgataaggggttaacttgttacttataagtcatcctgaattttctatttttccct

SEQ ID NO: 7718 - DNA, 651 bp, Canis familiaris
  misc_feature (1)..(651): n = a or c or g or t
gtggctagagntggtagnnnnnngtcagatggatgagagcgnnnagttcttgtatggtgatgatcgaattgagccatacatccatgaaggagatattcttgaaagacctgaccttttctataactcagatggattaattgcctctgaaggagctataagtccagatttcttcaatgattatcaccttcaaaatggagatatagttgggcagcattcatttcctagcagccttggaatggatggctttggccaatcagttggcattcttggacgtcctgccacagcttatggattccgccctgatgaaccttactactatggctatggatctcgataaagtcatccttttcttgtgtactctcagcttagaagaaatctgtatgggttgggttaactttgaatcttggctaataatgcatgttgatattattgcgggtctgtgggggtattttttattttttattttttatttttccatgttgttagctacaaattaactctgatacctttgtcctctgttaggtacagttgatgtttgacactgttaactcatgaaactacatattaatgctgaataacatttcccatgttataaagagaggtgcagaattaaatgctgaaaggcaatcagactggaaaacaaacactaca

SEQ ID NO: 7719 - DNA, 691 bp, Canis familiaris
  misc_feature (1)..(691): n = a or c or g or t
tntatccatttgttcactgctatgtgatccaaacccagatgaccccntagtgccagagatngcacggatctatnnaacagacagagataagtacaacagaatanctcgggaatggactcagaagtatgccatgtgatgctaccttaaagtcagaataacctgcattatagctggaataaactttaaattactgttccttttttgattttcttatccggctgctcccctatcagacctcatcttttttaattttattttttgtttacctccctccattcattcacatgctcatctgagaagacttaagttcttccagctttggacaataactgcttttagaaactgtaaagtagttacaagagaacagttgcccaagattcagaatttttttaaaaatggagcatgtgtattatgtggccaatgtcttcactctaacttggttatgagactaaaaccattcctcactgctctaacatgctgaagaactcatctgagggggagggagatggatgctcagttgtcacatcaaaggaagcagcattattctagcatccagattttttttttttttaagccttccactgttagagatttgaggttacatgatatactttatgctcataactgatgtggctggagaattggtattgaatttatagcatcagcagaacagaaaatgtgatgtatttta

SEQ ID NO: 7720 - DNA, 650 bp, Canis familiaris
  misc_feature (1)..(650): n = a or c or g or t
ctactcggacagtgttgtgagagtngagnnacactccgtgagtctnnaggactggctnnacntctccaacaccaatgtggagaaggcgaacaggcagagaaacaactccctggcgctgaaggccctggtggaccggatcctgtcccagacagctgacgacctgcgcaggcagtgtgacatggtggacacggcattccagatggggctgaaggagaccaaggccgccagggaccagctggctgcccacctggccaaggtcatggaagagatcgcatgccaggagaagaacatgacggttctggagaaggccatccttgatcaagaggggcctgccaaggtggctcacacgcgcctggagacccgaacacgcaggcccaacgtagagctgtgccgcgatgtcgcacagtaccggctggtcaaggaagtcggcgagattgcccagaatgtcggaaggctgaaggaggccctggcacaggcgcaggtggagctgaagggcctgaaccgccggcaactggcgctgcaggaggaagtccaggtcaaggagaacaccatctacatcgacgaggtgctctgcacccacatgaggaagtccatccccctgcgggatgggggcgaccaaggccagtgggccaggggcctgcgccccgaca

SEQ ID NO: 7721 - DNA, 537 bp, Canis familiaris
  misc_feature (1)..(537): n = a or c or g or t
ctgccacctgnnngcggnnnntgccacnnatgagnactgcanntgnngcctgnnngcgctgcacctgccatctgggagcggcanctgccgcctatgagcactgcacctgccacctgggagcatggcccctgccgcctgggagcattgcacctgccacctgtgagcgttgcacctgccgtgggcagggagagggcccaccagctccccgcagggggcttcccgaccgcttcctgcattcctgaaccccctcccttgcttcactgaaaccccgggcctcagagattggtttggggcgcgtgtgtggccgagcccagcactgagctggaggaggcgagtccctcccactcggggggccagcctggtgtccccggggctgcggtgagtgggtctgaggagccatcaaggcttcaggcccccagggacccgggtttccccatgtctctgtgatgggcctggcgtgggctctgtgggggctcctgctccgtgccaccaggtgcatggctccaggtcctcnnnnngtgggtgctttgtccccaa

SEQ ID NO: 7722 - DNA, 582 bp, Canis familiaris
  misc_feature (1)..(582): n = a or c or g or t
taatcagatttaaaagggaatttagnnttctagatattcttcgattatgggaggtaatgtngactgaactgccatgcaaaaatttccatcttcttctctgttgtgctattctcgaatccgaaaagcagcaaataatngaaaagcattatgggtttaatgaaatactaaagcatatcaatgaattgtccatgaaaattgatgtggaagatgtactatgcaaggcagaagcaatttctctacagatggtaaaatgcaaggaattgccacaagcagtttgtgagatcctgggacttcaggacagtgaagtgacaacaccagattcagacactggtgaagatgaaaacattggcatgactcgttgtcctacgtctacatttcagagtgactccttgcccgtacttgccactagtggagccagagatgacagcccaacacagatagcaatgtccccaaatgttagcagattaacacctgcatgatcattcttcttgcttaatttttgaagagacactttgttgcagccttttgcaagtacttgaaaggtggaaatttaaaatcttggtattgatcatgctttaaggt

SEQ ID NO: 7723 - DNA, 614 bp, Canis familiaris
  misc_feature (1)..(614): n = a or c or g or t
gatgagancaagggcttccatcagattnnntnnnnatccatgatcttcattgaaaggactgactntaaagannagccagagccaggctataagcgcctggcgtggggnnagcctgtgggnntgaggcatacaggctacgtcatcgagctgcagcatgttgtcaagggccccagtggctgtgtagagagcctggaggtgacctgtagacgagcagatgctgcagaaaagcccaaggcctttattcactgggtgtcacagcctctgacttgtgagattcgcctttatgagcgactatttcagcacaagaaccctgaggatcctgctgaggtgcctggtggattcttaagtgacctgaacccagcatcgctacaagtggtggaggcagcgttagtggactgctctgtggccctggcaaagccctttgacaagttccagtttgagcggcttggctacttctccttggatccagacagctgccagggacagcttgtcttcaaccggactgtcactcttaaggaggacccaggaaaggtgtgagctgtaaggaagccccatggacctacctcatgcttctggaggctagggataccctagactccgtnnnnnnnaaaaca

SEQ ID NO: 7724 - DNA, 652 bp, Canis familiaris
  misc_feature (1)..(652): n = a or c or g or t
tccacccccatcggccaacagcagggactgtctgtccccggggatnnacccacagcacgggtcnctgaagaagggaggctacagaccctcctcaagggagagcagggcttctcctcaagagggggctcagccggaccaggggctgaaggggggccccaacacaggagtccagggccagaggagcagcgtcattccagataacattcgtcacaagtttgggagcagcatggtggaccagctggtctccgaggaccaggctcgaagggccatcggtgaggtctttgagggccagaagagggcaaactcgtggcccagcaggatccagagtcccatggaaatcacctccatcttctcagactactatgatttgggctacaatatgcgatcaaacttgtttcaaggggccccccaggagacgaagagcctcatgaaggcctcctatactccagaggtgattgagaaatcagtgagggacatagagcactggcatggcaggaagacggatgatctgggacggtggcaccagaaaaatgctatgaatatgaacttacagaaagcattggatgagaaatttggagaaaagagcaaaagcaagagctcaaagtactagatacgaccaagaagagtgccctccactnannnaaagagctaa

SEQ ID NO: 7725 - DNA, 504 bp, Canis familiaris
  misc_feature (1)..(504): n = a or c or g or t
ggtcnccacagtngntaagctgagggnnagncactcagtgnnagntcttccaaccccgctgtcccttccctggggtcagtccctggacttgcagctgctggaagcccccttgtttctccggtctctggaagctggactctgcgtgtatctgaagatattgtcgacttctaccaaacatagagacctcttcctgctttacagctcccagatgctctaggcttctcctgctctgttctggtcttggcccgagtatgtgcctcattcatccctgctgggggacccccttgagctccagtgaatgatcccgcccttcccagttgaagttttcagctctactttccttggcagcaacctgtgaactattcaaaagagtccccttgggtttaggattatcagtggttttgccattaatgagtgttatgatttttagcaagtaatctaatggaggaacatcggtttactcatctgtaaagtgggggataataatacctacctcagggttgc

SEQ ID NO: 7726 - DNA, 658 bp, Canis familiaris
  misc_feature (1)..(658): n = a or c or g or t
attggaagatacaagcanntagttaaagcacaggagcccaagaagaagaagggaaaagtagaagtgagacccattaatttggggacagattatgaatatggagttttaaacattcacctgactgcatacgacatggccctagcagaacgttatgcccaatatgttcaccacctctgcaaccatctatccattaaagttgaggaaagttatgcaatgcccaccaaaaccatggaagtgttgcggctgcaggaccaaggtaacaaaatgctcctggactcagttcttaccactcatgaacgagtggttcagatcagtggtttgagtgctacatttgcagagattttcttggaaataatccaaagcaatcttcctgaaggagtcagattgtcagtgaaggagcacactgaagaagacttcaagggaagattcaaagctcggccagaactggaagaactgttggccaagttgaactagctcattgcagaccctttcatgtcaggactggtgatgttgagtgccaaggggaagatcttcctgggtggtcaaagttaagcagaagacactaacctttagatatcataactacccatccccattagccaagaatgcttcctttctagtatggaggagtgcttgccgattgtcaccactttccttt

SEQ ID NO: 7727 - DNA, 602 bp, Canis familiaris
  misc_feature (1)..(602): n = a or c or g or t
gccatatgancagttngtggtccacatnngaatnactgnctaaaaggcgtcaagtgtgaaaacacaggtctcntagntccccttnnacaatgatacttccacgtttacgataaaatcactgtaaagggaaccctgactgttgcttttaccgtttcaatctgagggagtcactgactccggtggccccactctccttgccatgccggccctgacccaggggcttgctgtatccatgcttccttagtttctgttaactgaagggctgccacgttctgatcagagactccaggcaggaccaggctccttgggctacagacatggtttctgggactgtgaagtgaagccctccgagggagcactgcatggagctctgttgtctaagtgtgcggtcaggacgccgggatgtgtgaccccacatctgtgcagaaagaatcctgtagctcgaaaatccgaagtgtttactctgatcctgacagggattctcggtacctgtcgatgttgtgcgttctgtaacattcgggagttgggcagctgtgctggtgtcgagggttcgagtgtgccatttcatgtgccgatgttggagggtgggaataggggtcaga

SEQ ID NO: 7728 - DNA, 683 bp, Canis familiaris
  misc_feature (1)..(683): n = a or c or g or t
tttttngcagctnncattttatggtgctgannnnnaatgatcaaggtagaaaacgttgctactctatcttctgaactattactatacatactttcaagacactattgtcattgcttttaaatagcatctgccgcactcaggacattttcaacaaggaagaagagtataaaaatttgttaaaatgaaatacagatttaatttatgaaccccttcgtcatgatgtttgtgtaatgtatctttttgataattattctccattatctggctcatccagggatatcgtatcccttttcacagtactgaatttgagaagtgacagaggtctttagagtatggatttccttaaagcatgctggcttgcagtcttgtgtttttgagtatgtcagcagatggtagataccactgagggggttttctgttctcattttcctttggattttaacctgagccaagtgaaatcttcagactgatgccctctctccccacccctgactccccaccccctgccaaatttggaataacttggaagttatgtccattcccttcagatgatagattttgctgatctactgagccccacacttcactatgaaatctacacattttaagcacaaggcccccattccttctgcgtacaagaaaagtccttcctgcagggcaaactgtgtcctttttaaactttt

SEQ ID NO: 7729 - DNA, 557 bp, Canis familiaris
  misc_feature (1)..(557): n = a or c or g or t
cagnntgngtcttcaaccaaggtngatgagcccttgacnntcttcctccggacactgtgtaccagcttctctgtcctccgccctgtcgtgctttcttttgagcttgagaagaaaccctccatggtcaccccgttagagcctgcccggctgcagcggttccagtgcggagagctgactcttctgactcgtgtgaaccccaggatccgactgtcttgcctttctatccaggagcccaagcaccccagctccctgggagccttttctttgtcctaacaacctggacagcaggaggggggcctgctggaagccctgaggcccgggcccatctccacccccctcattgtacccttacctgttctgtgattgcaccaggaccccagatccctgagttcacaaactggtgcccttctgtgatgtgtccttccgttctggtgccagcctgccttgaggtgtggaaatgggcagatgatggcaccaccgttggtactccctctctggttggggtcaccgcattggccctgacagggccctgagcacctaggttctgcctttggggg

SEQ ID NO: 7730 - DNA, 634 bp, Canis familiaris
  misc_feature (1)..(634): n = a or c or g or t
acaccccaacttcagctgcaggagccagcctggctgcccgaaacccnnatgccctactgggtgagnacgagtgctgagtccctaccctgtgccacctgctccacccagtatctctgcttttggactgacctgggggtacctcccctctgccgccccaattgtgaataaagattgtctgctttgtagccccttccccggatggactgaggtgagaacaggtgagagcggctgctttaggccaacagctctgggaagcttttctcctcttttcccttcttgccttgtgcattctctttgggaaggaagagttctcttaggggttaattcactgggtgctaaggccccagagtccactttctgctcattctcccactctgcactttatgaatcccattatcatcatggaacatggggaggggaggtcacttcaggctttgaggcctggtcgaaatctagccctcatgcagctggtgccattccttctctctcagatttgagcagcagcctcatgttgcctcctgctgctagatctgagtctactagctctttggagctttttggagtagaagtggtaagaggtgtgatgagctattgtctctgcatgagcgttttataggnnnnnntcaaattcaac

SEQ ID NO: 7731 - DNA, 569 bp, Canis familiaris
ggagcgccccacagtcatgctgttcccttttaggaatctgggttcaccatcccaagtcatatctgagccggagaacaaggaaaaacatgggatgcacatggcagatccaacaggtgctgtgggtacgagagcagcttccactggaaagtctaagaatctgtccccaatcctgggggaaaggattctgaagaacccagctgacctgttggcttcagagcaagaagagaattgtttggtctgcccagcggaccccctgagactttcactgtcccctcctagggccaggaaaccagtgtgtcctccatctctgtgcagctctgtcattaccataggggacttggttttggactctgatgaagaagaaaatgtccagaaggaaggaagggagtctctggaagactttcagaagacaaagtttgacaccttgattcccaccttctatgaatacctccccgcttctggccccagtgccatgtctgtcccttccatgaccacagggacaagtccagacacttaggataggatgagaattccctctgcaccctgcctgtctctttcctcagctctat

SEQ ID NO: 7732 - DNA, 588 bp, Canis familiaris
acccagctcaccccagagacccaaaaccccagaagagaccaaaccagcctcaccagggccccaggaagatacggacagtgagggggagcagtcagaagaacagggcaatggggcagaagattctggggataccgaggatgagctgagaagggtggctgagcagagggaacagaagcagccccctgaccagggggaaaatggtgaggacccgtatgcaggatccacagacgagaacacagaccacgagggtcccccagagtctcctgacctgccagttcccgagctcccagacttcttccagggcaaacacttcttcttgtacggagaattccctggggacgagcggcggaagctcaggcgatatgtcacagccttcaatggggaacttgaggactatatgagtgaccgggtccagtttgtgatcactgcacaagagtgggaccccagttttgaggaggccctgatggacaacccctccttggtgtttgtccggccccgatggatctacagttgcaacgagaagcagaagttacttccccaccagctttatggggtggtgccccaggcctagagtatgtgcttgcatgc

SEQ ID NO: 7733 - DNA, 606 bp, Canis familiaris
  misc_feature (1)..(606): n = a or c or g or t
cccctctgcccctcccctgcagctcaaacnntcaaggttggccaccacaggtgcatccctatctgataagcatgcagagtattgcgttatagttaccgatggaaagcttaccttctcgaacccaccctgtgcacacacaggggaacactttctgatattttactatgatataatgcctgccagagtaagtgcactaaaagtttgaaaaatgagtaaagcagggcaggactggggatcaatgagaaacaaagatgaggcaaactggaaggggaggggacttgagagtcaagcagagtctcagaaattatataaataaaatgaaatagggagctgttgaaggctcttgagccaggagaggcaggatagaagctgtgttttcggagccttgaggacaggaagatggggtggggggcaggcctgcagaaggacagcctgattttccccaggacaccctggaggcccctgcatcagccctccttctttccacagccgtgtcaactaccagatcccttggcattaatctgtgaaaaggaagccaagcttcaggctgctggactatgtcatctcagtttctccagcaggacagagggtatatggtggcatcac

SEQ ID NO: 7734 - DNA, 624 bp, Canis familiaris
  misc_feature (1)..(624): n = a or c or g or t
ccactgnagtcaatgacatatnnnagtatgaagatgataaaaaagaatgggctgggatgttgaaggaaatacgttatgcttcaggagctagttgcctagcaacacgtttaaacctcttcaaactatctaaactataaacagggaggtgaaaaaacaatagaatgggatgtgtttggtttggataacagggctttaatttattctgtttttcaaaagcctatgcagagattcatgtagaaattattcactaaattactatccatgaggttagcagtgggcgtcaaaacctcagtcattgaatcttcagtataatgatcattatttaaaactattttctagtaagaaattaaatattaagttgagtggattatttcttttgttaatctgtctcaatcaattgtaaacgtttctaaatttgagttatttactgtttctttcatttgcattgttatggtaactttacagtcattttctattaaaaatgaaattggagaatgaaatatatacatatacattttttaatgtttaaaatatcaaatatcactttcccttgtgcttcaagatatgacaagaatcctatgccttatattaaagattatatgccataagaagactttggaaatg

SEQ ID NO: 7735 - DNA, 375 bp, Canis familiaris
  misc_feature (1)..(375): n = a or c or g or t
ttttacaaagaatacccagaaggtgactccaaaaatgtnnnggagcctgggaaaggnnnnnnnaggcactttcaataagnnagcagtgctgccaattgcaagaacattcctccactttctgctaagtcttggaaacagttggataaaacatgatctgacccccagaggtcatgnncagctccacagagcatgaccccagagatacttagagacaagacacgtggctcccaatgtcagcatgacccgcctggnngggtgactttgtgggagccccttgccagcaccggatccctgttttattatcctgaagatccagcacgtctgacctggcgatcccacaggcctcgggaagaggtcaccgtctttgggagctgt

SEQ ID NO: 7736 - DNA, 673 bp, Canis familiaris
  misc_feature (1)..(673): n = a or c or g or t
tctacctgcaggtnnctgatccgttttctattcctataattttgtattctctagaatttcataaaaacgaaaccatagactaagtagtgctgtgtgtctgcttctgtcacttggcacaatgcttctgagattcatccgtgttgtttcatgtatcactaactcatccttccttggatttgagcagtattccagttttgggctattataataaagttactatgaacgtgtgagtacaggcatctctgtggacatatgtttacatttttcttgggtaaatccataggggtgggactgttgggtcttacagtaaatgcacatttaacttataagacactgccaagctgctttcctgccagcaatgtgtgagttgtagatgttccatatccttggtgtcaagcttttaaattctagccactctaatagtgacatctcactgtggtttaaatttgcattttcctaaggattaaagatcctgagcattttttcatgtgcttagtggccattcatacatgttctgtgggaaaatgtccagattcccgttttctagctgcactgtttatattctcattaacttttaaatgttctttatatacaatggactaaagtcctgttatcagatacaagttttgcaaatatannncttttcagtctgtgnnnnnnttactttttcttc

SEQ ID NO: 7737 - DNA, 603 bp, Canis familiaris
  misc_feature (1)..(603): n = a or c or g or t
gtnntcaagacangnctgggttnccttgctccactngtctcacaatgctctcaaaagagaaaatgagatcatatggnctgccttgtatttattgagcctctgtgggttattggtgctggctgctttattttctaaatgcttgccaactgcttgattaaaccattttaagattctgctgtgagttaacatcgagttgatgagtctgtcatttccataatctaccttatttttgtttttaaaagccaagagttttatgtgtcctccaacctctaccacttttcctaatttctttttttttccctaatttcttgcatattattactgcctagcttttggtcacattggtaaacagtgtccatgttgtgagatgtaatttatttaggtcagagtgcctgagctcttagaaaggaaactttagggtgtctcctcgactgacttgaacttcatttctctgccagctctttttgttcagtttcagtgtcagcacctcccttcttgatataaaagatcaaagcaaaattgagagaaacatctactttctttctgttatggcttcaactgagggtcatttttctttttttcttatttttggtccccaaactg

SEQ ID NO: 7738 - DNA, 162 bp, Canis familiaris
  misc_feature (1)..(162): n = a or c or g or t
cccccccgccccccgccacccgcgtgatgctcctccctttccagctgtcctggtaggcccctatggatcctccatgcaccctgctgttggggtagggacctggtctgtcctgtgatgtgccttcctgtagctggagcnnnnnnngacccaagggaaggaagg

SEQ ID NO: 7739 - DNA, 329 bp, Canis familiaris
  misc_feature (1)..(329): n = a or c or g or t
actgaatgaatctcagtttctgggctgaggcagatgggagtggggactcatttggctcaccagactgggctcttcccacaccaaccaggccagcctgnnnnnnngctgnngcatacaactgtacctgaatccctgacactttgtggcctggttgccccagtcaggcactaaagagactcagcccttcctgttttcacgtctgccaatccgttaaacctcattgatcctccngagccctgccgtagccaagagnnnnnnccacaagcttccagaatnnngttccnnncaggaataatnnaagcttggagcccaatgtcnnngactcagac

SEQ ID NO: 7740 - DNA, 495 bp, Canis familiaris
  misc_feature (1)..(495): n = a or c or g or t
agaaattccnnnnagtntagattatatnnatcnnngcattgtgaaaggtngnnncatccctgntgatattgtaaatnnnattgtcaattctgtctccaagaccagaatccagagggacctctgtaggcagattctctttcgaaggatgaggggaaggccaaatcctcatcctggtccccgcctttcatcaaattntntggtttgttnnncttgtgcttcctgcataaaatctcagtgtaggccaccttacaggnangaaggaccctcgcagtgcaacactgtttgtcataccaacgcctgaacttggttctgagggagaagtggaagtgaagtnagtttttctcctttccctgccagagacttctctctcatcttgtctcccatcccctgtgaaagaaaatcagcctgttgcagcccctgaagacaaccttgaagggacggaggagatgcaggtttcccctccatctgaatctgacatcacgcaggagctaaata

SEQ ID NO: 7741 - DNA, 619 bp, Canis familiaris
  misc_feature (1)..(619): n = a or c or g or t
ttggtaaaattttcntgtaaatgatttatgaaaaagggaaaatatattttaataaaaactttataaacttacggtttgtattactactagaactcaaaagacatggtcagttttgcaaaatcagggtaagctccccaaacaatttgcagtgttaatgagtagtaggaatatgtgacattcctagaaaaaaatctttttggaaaattataaagaatgtgcatttccattcccttttttgaactcattctttatgcttttgatgccaatgtgatcataagaaataatctgtgtgtgaaatcagtttaaataaactcttgtagcaataattaaccttagcccaaaggctagatctcttggtgtaacttcagacactaacatctggcggcagggaagggtgattgagtatttttggtcagcaggggctcaccaaacagtctatgaaagccgctgcttaccttgccatgcctactgcccctggcatagcagttctcagcctttttaggttacatttaacctagccttaataaactcaatttttagcattatttccgacttgtcatctgcatctttttcagttgtctttaaaaataccataagtagagtcttctatttcatttgc

SEQ ID NO: 7742 - DNA, 586 bp, Canis familiaris
  misc_feature (1)..(586): n = a or c or g or t
catctgcattaaaatannnagtttccntagctgaagcccatgctcgactgagcttaaggaataaagtgcttaaagaagatgcactaattgcagccttattatttgaaacatctctcacactgaaatatggggccactgtattttgtgttgctccaagtgcagtatttccatttgaattgtataatgaagagtatttagagcagagggatatctatttgactcaatgccaacagcagctccagcagtttattgccacatatggacctgggacagctattttcactagtgatgaataagcaatcggaggacaatattttcttcatatttaagcagtgaaaagggactttgaagtaatgcttcaggtactactatgtacagtaatgcattagaatgctatcttaaatgtatgaaagatagtctcaatatgaatttagaaattaagcaatgtaaaaaatgggtcacttttatgtaattccctctatttgtcacaagatggcaataatactttaaatgagaatatttacctacaaataagttatttttttttcaaattaagttattttaannnntttttcttgcacctgag

SEQ ID NO: 7743 - DNA, 546 bp, Canis familiaris
  misc_feature (1)..(546): n = a or c or g or t
cattttgctgctnnannannacatgctgaaatagtacagattctnntaaaccatccagaaattgacagacacataacagaccaacagggaagatcccctctaaatatttgtgaagaaaacaaacaaaataactgggaagaagctgcaaagctgttgaaggaagccattaacaaaccatatgaaaaagttcgaatatacagaatggatggatcatatcgttctgttgaactgaagcatggaaataataccacagtgcagcagataatggaaggaatgcgtctctctcaagaaacacagcaatatttcactatttggatctgttcagaaaacctcagtaagaaagttgttactctgttgtgtaaacatctattcctttttgagagtggattggtaaatttaagtatagcatcagtttcttactgactttcaaattttgaaatgatacaatgatcctcttttttatataaattactggtgtttcaactgctgaaacaggtaagcttctggggctccttatcccccacttcattcaaagcattttaaaac

SEQ ID NO: 7744 - DNA, 611 bp, Canis familiaris
  misc_feature (1)..(611): n = a or c or g or t
gtagannatggctcggnncgctgcagaagnnagagngcgcagggcctggcgnnnntggctgctgggcgcggcccnnagaggtgaggggctcaggccccggccccccggccctgcccccggctggctgctggtttgctcacttcgcagtgaggcctcggacaagtgccttcccttctctatgacttgctttgcttatacaagaatagggtgtctgtcctcagtgacaagggcgttgtgaggcacacggtgtgtcctctgccagtgggagccagcattcttttgcttgttgtcatactacccagatctgagcccacatgagcgggtgcccccaggcggctgaacactgaacatctccccctctccacacagatctgggacatgagcgacgatgagaccgtgtgacatggcccacctgtgtgcggctggcttctccctggctgcgcgccgaggagccctgggctaccggagcaggacagctgcccccaggaccgatgactctgggccctgcaccttccaacctttgtggtctcctcctctgcgtaccctgagggccggagccccctctccgctgcccaggagcttctggggttctccaggtctcatgattcatg

SEQ ID NO: 7745 - DNA, 622 bp, Canis familiaris
ctgagtaaagaaagagaagatcctaaaccaacattcttatattccctgattacagtccacagcaccctgagttgggaaggggaaagccacaacttaaaaaaagtatggatgtttgatttttacagaacactggaaattttaaacactgacctgtacttttattcaattactaaactgtgactctaaggacttcagttacataagctttgcaagagaagtcgtggagactgcctgagattccctccagcgtcaggaaaaggctcaacttcactgagaaaatttaaaagtatgatggaaacaaaactaaagttccctacactgtacatcccagaagcatcctttttgatataacattatactatttagttttaaggagagagtatggatatatcactgatgatgatcatataccacttttgttacatgacgaatgttttattttaattctcaggtttgtggtaaattcagagctatgtttatttagttttacatgtatataatctgacataatgtcatgcaaaaactaaaattgctactttcttggttctttgacctatcagtgatttgacaaatgtgttctcttggataatactataggtccagttaatgcataaaatactgt

SEQ ID NO: 7746 - DNA, 573 bp, Canis familiaris
  misc_feature (1)..(573): n = a or c or g or t
atgcaaatctgccgagatgtgtgtgtcgctgcgtgacttctgaaagcaggatgaattttctgcagctgtttcaaagnngtggcgtgtccttgaatcctctattaattactgtgtgcgagccggagggagncgtggccggggtgggcctccagcctgcagggaactttctggactcccgctctttgaattgatgtaggcatttgggctcgctacttgaccattctcaccctgtgaaacgtcccccactttgaagcaaatacgattcacggcgcagcgcgcacaaaaaccttggcgtaagacggagaaggttcttcttattctgtggactggttgctgtggaaaccgataacaaagggcagccttccacttctggtataattgtgtagcccccttttctctgggcttgacacctgtctgaataagagtgattagagctgaataatatccctcgcttggctattgaatatgtggttcacgtacagaactctgtgtaagttgaagtgttcatgttcatgtgtgcttgtctgctactacgtttttgaagttttgtaaaactgttgttttttttttttt

SEQ ID NO: 7747 - DNA, 438 bp, Canis familiaris
tcattgggcatcagaagacacacggtggggtgaaatacaagaagaaacaacctacctcatagccctccagctgagccggttgaagaacattgccttttcagccttatcctgcaaactgcaaagtaacctgaatgggcctggttggcattcagaactgaatgtgaaaagcagcattgagtgatgatgttctgaagaccaaaggacaaccagggataacaccctgcacatgaggaaataaaactgctggggggttgttgctaatgaacataggttggaaaaatatttaatttttcactcacttgatttgctgttataatttgtttgctcatttggtcattaaaaatgatactagtgaaacctgaaaaatgcttttaatataaatttaaaaagccaggtaccaaaaagtctgtgcactgatatatttgtggtaaagtattt

SEQ ID NO: 7748 - DNA, 567 bp, Canis familiaris
  misc_feature (1)..(567): n = a or c or g or t
accagatnnacntctatttgccgacgactcctcagaagactcagaagtcctcatatgaggagagccaaaagagacattcgcaactcaagaaaattcttctgctttaggagaatccctatacactccatgtgtttggaacttgtcttccttaccagtcaagtgccatggccctaaagcaccaggtgaatgttgtcaagtaagtcatcattaaaaatacataatatatatttatttaaagagaagatacatatatatgtatatgctgggaagagacaaagatctattttaataaaatgtgacttacttcacttgcttaccttgcagacctaaaatttcagctttaatggccttatctctacagctgttccctgatgttaacatttgcacagagtcagtgttattttttttaagttcttttcttttttcatgactattaagtgtaaaaataatttgcaaaatgaaatgttatatttgactttgcttctggtcttatgaaagatctgataatgttacatgaatcatctatttgataagaatgatttatttaatatttaaagttttataact

SEQ ID NO: 7749 - DNA, 564 bp, Canis familiaris
  misc_feature (1)..(564): n = a or c or g or t
actgtaattcttactaacttttctcactaatactgttctgctagagtgagtgtctcaggtcagctactagngncagcactcagccgagctgctgggnnagctgacgcacgaacaaggtgggaaataacccacagcagtgacggctgccacagctaatgccttcacccctcgggtgtatgattctaactggggtttcctttctgtactaacgttagatgatgatgttcaccaaacccaaagttctgtgcgggagcgagcagaggcctggagagcgcgggcgagtcctgtgcaccagcctgtaggtgcagcaggagcccctgagtggggcagggggaccccgtcaggctacgccgtcctcccgaacagatgagcctggccagctaagccgctcgccctttatgacaattcaagatcgtgatggtgtcattgaagatttttattaacaaagtttctgaacaactgttcactacagtttgaagtgttacttcctcagaatatttattcctttgcgtgacatgctagattcccatggatgtagcttatcatttctattttgtaaataat

SEQ ID NO: 7750 - DNA, 523 bp, Canis familiaris
  misc_feature (1)..(523): n = a or c or g or t
ggtcatcatgatngngggtcatgtgaccagaagnnnnnccagaaaagctcgagcncntgcttcagggtggagngagggnnnnngnnnnngaaaatacnnngctccacaggaaatttcagtgtctatgcagacagttccatacctgggaagggagactcagccggcggaggccgacaggcagttcactaaagcacaaggggagtcttttcagaccaagttgtcccttgcctcccaaacaaacgcccttcgagtttgttatggtttctattcctgcatcttgtggtatcaaaaccacttcctggaattgtaaaagtgctgccagaataaatgtttttttttccctcttccgagaaaaaaaaatganagtgctcatatttgacatttgtgcattggactcttttgaatgaataaaaaggaaagggtttggtataattcctgctggggcgtgtgtgtgtgttctttgtcatgccacactttgtaaattgtgattgtggtctcccctttgtctttactgggcagaaat

SEQ ID NO: 7751 - DNA, 596 bp, Canis familiaris
  misc_feature (1)..(596): n = a or c or g or t
gtgcacgctctgaagaggctgannnactcagccaatgccaatgacgtnnaannnnnngctncnnnnagatggcgcnnatccctgtgcagctgatgacaagnnncgcacagctctgcactttgcctcctgcaatggcaatgaccagatcgctgctcctggaccatggggctgatcccaaccagcgagatgggctggggaacacgccactgcacctggcggcctgcaccaaccacgtccctgtcatcactacactgctacgaggaggggcccgtgtggacgccctggaccgagctggccgcacgcccctgcacctggccaagtcaaagctgaacatcctgcaggaaggccactcccagtgcctggaggctgtgcggctggaggtgaagcagatcatccagatgctgagggaatacctggagcgcctggggcggcacgagcagcgggagcggctggatgatctctgtacccgcctccagatgacgagcaccaaagagcaggtggatgaagtgaccgacctcctggccagcttcacgtccctcagcttgcagatgcagaacatggagaagnnnnnnnaagagaggctccctgccttccct

SEQ ID NO: 7752 - DNA, 282 bp, Canis familiaris
  misc_feature (1)..(282): n = a or c or g or t
cctcccgtccccatccccacccccgggagcctgcaaaagtgtaatccgtgtatctgcttcagcggcccggcccggccctgggagcgcggggcgcggacgccccctccctgctccgcgcagcgcagccgtcggggcgggggcctgggggcctcgggccccggggctgggggggggggggcgcctccggcttccctgctccgcgcccagtcaccacgagnnnnnagccggctaggagcagggcgttgtattgcgattggnactttatgctgaccatcggnaacg

SEQ ID NO: 7753 - DNA, 574 bp, Canis familiaris
  misc_feature (1)..(574): n = a or c or g or t
aacccctnnnnncagctgggtttcagagtggttgtatatatagtatatataccaacctgaatcattgtttatgccaaccaaattcctctttgctttgtcatctctctgccatgtaaatccttacatcatgtgtagatttgtctaggaaaatgaaaaaaggtaaatgccttttgctttgtacatatcaactaaagctaaaccccactgcctagattgttctattacttctttgtaacgtgaattcatagaggcagtgagacaaggtttagagccctgaggagagctgagggtctggatgctgatccggcctctgatgcaaagtcctgactgtgacctggacgaggggggacagcctttctgggtttgggatatttcgttgatgaaaaggaaaagctaggttgaaaattttactttacttttttatggcaacccaagttctgccgatgtacaagcaaaagacaggaagagatggaaaaatgagttttcagtcttagcactagtaagtatctgctcttttcaaagaagcaaagaagaaaaaccgtctattttaaatataaaatgtcaattctccaac

SEQ ID NO: 7754 - DNA, 690 bp, Canis familiaris
  misc_feature (1)..(690): n = a or c or g or t
ccccatctgcnntgatcacaagctgcatgtcgactttaggaacgtgnngctcctngaacagtnnnnctgcgcccacacaggtgtcatcttccatgccccatatacaggggtctgtatgaagcaacacaagaagttgacccaggccatccagaaagccagagatcatggtctcctcagttaccacattcctcaggttgaacctcgggancttgatttcagtanctctcacnnagctgtgagtgctactccgccagcccccaccctggtttcaggtgacccctggtatccatggtacagttggaaacagccaccggagagagagctgtcccgccttcgacggctctatcagggccatcttcgagaagagagcggtcccccacctgagtcaatgcctgaagtgccccttagcagcccaaccgaatcttcctccactgaggagagccctcagagtgctctgtaggagccatagaccgggaagggattaagggatagtgcctaggaattacatgatgggatttcactctcaagagttgtgtctgtatgtggccaatggcaggcccagggccagaggaaagaaatgattgctgttgaagggaataaatgcatcggagggcaggacagatgtgtatgggaaacctcaacccctatgtattgtaaataggctaaacattgttacttccannnnnnngc

SEQ ID NO: 7755 - DNA, 555 bp, Canis familiaris
  misc_feature (1)..(555): n = a or c or g or t
atatgttgttnntaatgtggatctaccanntctgtgttcatcgagatttcgatctgganntcctggagaagaggcccaggtggctagccagttcattgcagatgtcattgaaaattcacagataattcagaaagaggacttatgcatttctccaggaaagctttcttgggttctgtactgtgatatcatttgccttgactatgatgggaacatcttggatgcctgtacatttgctttgttagcagctttaaaaaatgcacagctgcccgaagttactataaatgaagaaactggtttagcagaagttaatttaaagaagaaaagttacttgaatattagaactcatccagttgcaacttcctttgctgtatttgatgacactctgctcatagttgatcctactggagaggaggaacatctggcaactggaaccttaacagtagtaatggatgaggaaggcaagctatgtnnnnnnacaaaccaggtggaagtggcctgactggagctaaacttcaggattntatgannnnagcagttaccagacnnnaagaagta

SEQ ID NO: 7756 - DNA, 183 bp, Canis familiaris
  misc_feature (1)..(183): n = a or c or g or t
ggaagactctgaagaggtagtttgagtcccaaagaaagagatgatctcacaaaggttcctatgttccctccaaccccaggaccacctccctctgcctgttcctcctccttgatggaatgttagaggagagagatgccagaggggnntgataggatagaannnaaggaacatttcaacttctca

SEQ ID NO: 7757 - DNA, 484 bp, Canis familiaris
  misc_feature (1)..(484): n = a or c or g or t
ccccaggtcccagcaccagnnncataaccatctgannncggnnncgtgatattgcctttcttcaggatnnnnnnnnnccagnnnnnngnnnnnnntagggcccgtttttcccacnnnnggtccaatgacatggacagtgagnngcaggctttcagctgtggcattaatttatttattcagaataaattnnnagctgnnagtggtttccctggaagtggcagcagnagtgggcagttagcaggagggtgatcagttgagtttagctggagtggggagccggagccccaggagcaggggtgttagctgagccccattctgggtcgggccctccccnnnnncagggtagccgaggatcagatttttgcaccagggagaactggcaggttcctgcctcctgacgcacctcacaccctgcagggaagtcgatgggatgctgggatctggggaaccaaaaatgggacaggagtcagcacagtgaagggcc

SEQ ID NO: 7758 - DNA, 575 bp, Canis familiaris
  misc_feature (1)..(575): n = a or c or g or t
gtgttcagtagaaagaagtgnnaacgnaggctggcttgattgtgcatttagggggaactcttggtacctngaaatgtgaatctnnaancntaactgtgtcaccaaagtagtgatggattcagtactcctcaaccactttcctaatgattngaaaaaagcaaacaaaaaagaaatccctctataacatgaataaaatgtttaagaaaagaaaaagagaaggaaaaaagggattaattcagtgaaggatgattttgctcctaattgttggagtttgaatttctgccaggattgaattatatcaaaatctcctgtcttttttaacttttcagaatatgtctccaaggaaaaccagcagaacattagcctgtgcagaaccatctgtttggggagcgcactcttccattatgcttggcacatagatctccctattgtgggatttctctccctctatttctctctctctttctccccctctttctcttttctttttttcttattttctttctttctttctttctttctttctttcttctttcttctttcttctttctctctctctctttttttttctttct

SEQ ID NO: 7759 - DNA, 381 bp, Canis familiaris
tccaaaaggtgtgggatttgggatctgccccagtcccctgaaattgacattatacttgtacatgatccatgaaagggaaatgagaacagagtgcccagtggacagaatggccggagaagcacccttccatgcctctgccttggcggggtgagggaaatgctaggtggaacatgaccctgggctgctggtgggagggtccaccctctccctgtctaggccgtgccagaggagccatctggcttggagctcaggcctagcctggcactgggcagtcttccagcaggctttggcaggtggcagagcaaaggagtccctgggggttgccactgccaaggcattcagcacaacttgtcccatgacccacatggaccactctagaca

SEQ ID NO: 7760 - DNA, 489 bp, Canis familiaris
  misc_feature (1)..(489): n = a or c or g or t
attgctgnagcctgnntcaaggaggtcannnctgtgatgccagtcatctttgcaaaagccatacccgtggacagacaagaaaccaaacacacatacgaatgccctgtgtataaaaccaaaatgaggggctctaattatgtgtggaccttcaggttgaagagccaagacaagacagccaaatgggtcctggcaggtgtggctctgcttctagaagcatgaaatggcccctccagcctcagccagaacagtgaggattttaactggcatctgcacacattaatttgttctactgaaagccctaaaacatcctcccacttatgtaacatttgcattaaacactaaagtctccccatcggttaagcaggattttagttcttgcagacattaaaatctttttaaattaaaaaatcttgaagccgctgacctcaggcagcaggtgaatcctgaatgaaggggcagtgctccaaggcctccagtgtcgggaacggg

SEQ ID NO: 7761 - DNA, 607 bp, Canis familiaris
  misc_feature (1)..(607): n = a or c or g or t
cattcatacnacgcntgtggtgtcatagnnncnntagnnttcttgatgattaatgcagtatcaaatggacaagtccgaggtgatagntacagtgaaggttgcctgggtcaaacaggtgctcgcatttggctcttcattggtttcatgctggcctttggatctctgattgcatccatgtggattctctttggaggttatgttgctaaagaaaaagccatcgtataccctggaattgctgtatttttccaaaatgccttcatcttttttggaggactggtttttaagtttggccgcactgaagacttatggcaatgaaaacacctgatttacttctgcacagcagccctgcgtgggtttttactgctcgctcccaattttttgtaatgccattttctaaactcatttttgagtgtagtctcagcttcagtttgtgtaatactaaaatcatgagaatttcctatgtaaacaacaacaaaaatctgttgtgtgcatcggattaacttataaaatgttgaaaatatgccacatgagtaatttgtattaagttttatcatggtgtaatttgtaaaaataaattacaaaaaatattatggatgcatcttataca

SEQ ID NO: 7762 - DNA, 589 bp, Canis familiaris
  misc_feature (1)..(589): n = a or c or g or t
tagacttgctgtaactgtactcatgnnnnagtatgtacnnncttnctatgaaagagaaaacactaatnntaaattatatccagcaatgtttctggtatcctttaagaaaagnnaagactattatttccttcccttccctgtgcagcattcaaaatcacccctagaaaaagtgagtgttttaatgagacttcctaggaagggatgcactgtaaaacaaaagtattcttgtaactcagttttgtgaaaggtaaaaactactatgttttaaagtacactttagaaagtctcttcaaaacagtcctgtatttgaactctgttcatagtttttttttttgaacagtttagactaaactgctggaaattaaaaacaatttcctgcattaagctgagacaagtatatatacagccctatacagtttcatagctccctccccccccccatttatgtgtattggtgacagtgggtataaacagcctgaaagtgtatgcatgtaccataacatctagacttaatatattgtggagtattcaataaccattatgtagaaggtagataagaattaaaagggtttaatttcctagaaagaaa

SEQ ID NO: 7763 - DNA, 584 bp, Canis familiaris
  misc_feature (1)..(584): n = a or c or g or t
ggtacataggaaannaacatagtggttgcatatctatttnnnagtctannnagtgtccttttaaactatataaaaaatagtatctgagttttgtatagaagatgcaatttcataaaaatcatacttggttatatttcaataacatttgacctttttgtagtcgcttgggtgttacaagaatgcagctatatcctaagctaaaagcatgacattaagatctcatttttgtcaattttaataaaggctaaatcaatgcagatatttatgaaaatagcacagcttcatattaacacctgcagtgcttaaatattacccttagttaattcgcaggtttgtgtgtaagtctgggattactaatggttgaaataagaaaatacttcaagtcctttagagggatcnnnnnntgctagtgataataggtgttcatcaagcacctgtgcttgagcctaccagccctgagtgtgaattagtgcactattgttcgagtacctgtgtgaactctgtcaaactgtctactctttgtagatctgagtttctaatctgtaagacaaggtccagggtacctannnnncatggttgcagtg

SEQ ID NO: 7764 - DNA, 462 bp, Canis familiaris
  misc_feature (1)..(462): n = a or c or g or t
tcagggggtcnctcaacatcagatgattcaagacgcccaaggataaagaaaagcacatatttcagtgatgaggaagaactgagtgattaaaattatatttaatatgtaaatatcattaaacatttttttttaaatcttagagttcgaagttcagttgggactaaagactaattttagaatttgagcataaagaacacttagtaccaaataatttttttactataaagtaggttcataggaaattgaaaataatttaaaagtatcatgtttctatcttgcctgagcagagtaataaagatcaagatttgctagtaaccgttaatcttaaaaccagttcacttgaattaaaaaggaatcttaatactatcatagtattgctgttgtcatcccaagataaaaaatattaaaaagatatgtttgagaaactcattataaaagtttanncatgaagactggaaaatg

SEQ ID NO: 7765 - DNA, 542 bp, Canis familiaris
  misc_feature (1)..(542): n = a or c or g or t
acgggcaggcccacgagccagcgcccgcgcccgccagccacgtnngccgagagctgacccgcaagaagggcatcctcctgcagtaccgcctgcgctccaccgcgcacctcccgggcccgctgctgtccgtgcgggagcccgcgcccgccgacggctcggccctggagcacagcgaggaggacggctccatctacgagatggccgacgaccccgacgtgtgggtgcgcagccggccctgcacccgggacgcccaccgcaaggagatctgctccgtggccatcatctccggggggcagggctaccgcaactttggcagcgccccggggggcagcgggaggccggccccgtgcggggagacggacagcgccctcctcatctggcaggtgcccttgacgctatagcccccgcccgggcgcccagccgcaggcctggtggcaggggtgcgcggctctcggcccactgtgggcccctcccgccggccggggaccccctggagcgctggggagactggccttccagggacctcgacgatgggcctgggt

SEQ ID NO: 7766 - DNA, 135 bp, Canis familiaris
ctccacgtgactgcggcgcccgcccgtcggcgctgacaaagggaggcgtcgcgcgtgggcgggggcctgtgccgctagcgcgcccccagccggccagcccggcgcttggagccccgccccgccccgccccgcccc

SEQ ID NO: 7767 - DNA, 670 bp, Canis familiaris
  misc_feature (1)..(670): n = a or c or g or t
tagagtcaggtgtctggggtnngttggtttgattaggggacctgccactttgtgtctgtgtggtgttnnataaatgactagatctccccgagtctaagtctacagtgtggaaggagggaaatcaggttgggagagtcgtgtcggagcagagtatgatctggattgctaaacccaggtctccaagctctatgaagtgggcaagagaatcattgtaagtatctgatgagagctccacatcaggaaaattaatctggtggtggcataaaggatgaatggaacagcgagaaggtggaggtgggcaggctccttagaaggcttgcacagtagtgtatgtgagaggcaatgactaattaaataaaccagcctaaactgtgtgagtaccttgtgggtgatgagtcattatcataaatctccagcctcctcgtagcatctgttctatagtctgcgctgagcagaaatattacctaataataccgtatatttccaaagccttttacagttcaaaaagtgctttcatgtgtattatctcatatgatcttctagggtgtttacaagttggtattgtgaaggactttgtaccgggcctattcatttacaatttccagccctccccctctcccccctcccacttcactcggctttcttttgttcagtattcagcaacttacag

SEQ ID NO: 7768 - DNA, 125 bp, Canis familiaris
  misc_feature (1)..(125): n = a or c or g or t
ggtattgagtaggatgnngggcaataatggagagtaattnnnntcggnnngngctgcctcagtgccacttaaaatgatcgttttggagttggnnnnttttgnnttcagnnntttagtatccaggc

SEQ ID NO: 7769 - DNA, 446 bp, Canis familiaris
  misc_feature (1)..(446): n = a or c or g or t
aacatacnntttgtttcccaaaaagagagaatggnnnnnnnntgtgtgtgtgtgtgtgtgtgtgtgtgtgtgtgtgtgtggtggtttctaagatattcagggcaagcaaccaaatggaaaggattctagctgtggggggagcccagaggaaggggaaggtccgtctgtggtgtgttgtatgtgtttcaggtgctctgtgtggagaaggatccagatatatgtgcttctgagtatgtgtgtgtatatgcccttttttctcagcaagggggcttctagaggctttggggaggtagggtgggaatatggggggaggcccactgcccaggtgtggagctctggctgtatataagtaggagcagagaacgtatttctgtcataatgtaggcatgaggggtagtggggtgaagtccaggtcataagtttcatgtttgccttttttttttttt

SEQ ID NO: 7770 - DNA, 627 bp, Canis familiaris
  misc_feature (1)..(627): n = a or c or g or t
gctggtnncggctgctgaagctgagggnncggccngagccctgatgccagctgnngcttacaaggtaagacacgtgatggtcagacctctccatccctgtcctgacccggaagaaccacntgcacccttgnnagcgctnnaggccgaacgggccccaccaccggttatcgaggtcatcgatgggccggagcagccgcctcactcaggggagcaaacggcttcggaccccgagcaacacccggaaccaccgcggcaagagcctgcccgaggccgactgtggggcctgctgaagctcctgggcctgaggtgatcgagccggtcccggctgctggtgctgagagctaggcctgggacgagatgacggctgctgaggtcaagccaaggtacctggtggtcatacctcagattcactggcccgacctggaggagccacctgcttcttggccaccccagaaggaggagcaggtcccggcgctggctctcgagttcatcgaagggccagagctgccacctgcctcagtggggccacatggctcggcccccgagcagcagttcgtgatggctgcagcacaattgaagcctcccctcccctttcgttgtgctgtttctgtattttgtgtttttcat

SEQ ID NO: 7771 - DNA, 483 bp, Canis familiaris
  misc_feature (1)..(483): n = a or c or g or t
atnnngnntgcatttannnntactgttcagagtgggctgtttgtataaagaatgtgtaatgcagtgatctagtttgttttgttgcagctttctttttcacttctatagaatgtcatttgcaatatgcnagtttactgttagtttcaacatnnttcattgataagagtcctatgaataaaataaatatgaagataaagctttattctttagtgttagaaatatattatatctaactaggctcattagtagagcaatgtattaaaanaatgttttatataagaagtgtttatcttcaacaccaaatacctaagtatatcaattactatttataaacagagctttcaaanactccccagaatattcttttaagtatgtcagtgaagtaacttgttatttgannnnnngttttaatcannnnnnaaacactnnnnnactgtaagtattcatgatcctgtggtattgataagaaccagtaggtttgta

SEQ ID NO: 7772 - DNA, 661 bp, Canis familiaris
  misc_feature (1)..(661): n = a or c or g or t
gccaacttaaacnagtccttnnnagtcaaagatgagacattttgaacatcaataaaggtaatgaccaaagtagcttgaaaaatattaaactatttaaatccatgagttcataatgatatctatgaagtcaatcatcacctttggaaaatattaagcctcacgattttgaaaattcataaatggaagaaaataaccattcaacccttaacagctataccttagggcaatcaaagagttgatgaagacagatttctctatatagaagtatttatagtaaggattgaggaaggaatgatggaatattacccttctgtaacgtcaaatgaattaattcatctagtgattagtgattagtgattttcaatagctactactatcataacaacagagaaaactggaaattagttacctcctatgggaagaacacagcactacctgaaggagtctggaaaaaaactctaacttgaatatgatgactactcatgtacatgagatatagagaatgcaggatgttagcattatgcatatgacctccacaacacagcctgcaacaaattctacaggaaaaatgatggattctatatcaacaagaacaacaacaacaaaaaaaaatgcaagaaaaaaaagagaaatggagaagacacttaaggggcatgttaat

SEQ ID NO: 7773 - DNA, 503 bp, Canis familiaris
  misc_feature (1)..(503): n = a or c or g or t
tctctgtaggtacgtgcagcattacggcctngacggagcctgtgatgacatcacccgtgtgctgaagcacgtggcggtgaggctggggaagacccacaaggtgaaggtgctcacaggcacaggagacgtcaatgtcatccagcccaactaccccgcggcagcccgcgacttcctccggaccttccgccacgggctgctgggcccagtgatgctggatagggacgtcctgcggagctcgtcccgcgcagacccctgaactggtcccgctggcgggggcctcgtgcccgcctggcccttggcacccgagatgtgggacgtcccagagcttcacagccaaggactgggcgctgggatcccaggagctctgcgtggtcgttgtagagtccacgcggggccccacccaggagggggccgggccagctgccgcccacagggcctgcgcccagggcggctgacctcagggctgtccctgcctcgcacacgccagggatcccttcaggaga

SEQ ID NO: 7774 - DNA, 628 bp, Canis familiaris
  misc_feature (1)..(628): n = a or c or g or t
cagcttttgacattctttaccttgtttgagagcaggttatggccatagttaagcattatcccttccctgtgcnncaatagttgaaaagtgctggggtctctgtggtgtgaagcctgctttgtgaggaagcacagctgaagtgaagcaagaggccacttcctgcaggacctttcaaggtcaccctttacagcagacaagaatctgacagagcacagctcacatctctcctggaaaggaatgtaacctaaatggatatgtaattctaaatgcgctttagtgtatccaggcaagggtggcaacttacacaaagatgagtggataagaaacactacattgcactaagtagtctagaaagtctgaaaaacctagtccaggcatacctcagagatattgctggtttggttctagactgactcaataaagtgaatattgcaataaagcaagtcaaatgaactttttgctttcctagtgcatttaaagttatatttatgcatattaaagtgtgcaacgggggcacctgggtggctcaacggttgagcggctgccttcggctctgccttcggctcaggtcatgatcccggggtcctgggatccagttcctcatcaggctctccacggggagtctgct

SEQ ID NO: 7775 - DNA, 511 bp, Canis familiaris
  misc_feature (1)..(511): n = a or c or g or t
acatcacttattnatctatgtaactntgatataaaacattgataggacaaagaaacattctgatattaccagaccccttttctgtagtgggatctatgtattttcattggtggcaattaaaaatattgaacattattatattaattcagctttgatctgaggtactgcttaaaggggtatgtgtgtgatatatgcttatttcctgtttctgttcttcgaagtcactataaatcaataaaatcatctttcttactaatcatatcgtgaactaaatctctagactaaatctctaaatctctataacttagccattttgtagaaattcaggttcaaatataaaagagataaaatcctttcccagtacttcagaatgtatttaatcatgagcaatgtactttaatgcaaaatcatgagtttttttaacatcaagactaaaatactgtcattgaaatgtatacaaacattttgtcttgctttctgaaatgcttctatttccatgggctttgtactt

SEQ ID NO: 7776 - DNA, 578 bp, Canis familiaris
  misc_feature (1)..(578): n = a or c or g or t
gtgctgtcccgctccaacctgggcgtggccngcatagactctggtggctatgaacctgagggcctggagaataagcccatcgcagagagccagccgagccccggagccctgggcgtcttcagcctcatcctgccgctgcaggctggagacacggtctgcatcgacctggtcatggggcagctggcgcactcggaggagccgctcaccatcttcagcggagccctgctctacggggacttggagctagaacaggtgtagacagacggctgggcatgaccggcccgaagtgtctacgccgccggccaaagagccagcggggacggcggggctccgtcctggccccccagccccaggcgagccgtccagtacctgtgccgcgcaggcgcccagagcgctctcctcgccacggcctgagcgccccgggcggagactctgggatccccacgtccagacttttggcctgctcgccctgcagggcccagacggctggggagccgatcctcgcaccttcgcagctcctccagccggtctctagcccgaggcagggctctcccgaggggctctggcccccaccgccg

SEQ ID NO: 7777 - DNA, 606 bp, Canis familiaris
  misc_feature (1)..(606): n = a or c or g or t
gagaatcacctctgctttctgtggcattcttgaaaacagctgcctgggacagtagtctccagctgtgttgatcttataccctatacttaaagatcttgagtacatactcctgatttagatatcgatgtgttattgcactattttgtacatttgaaaatatgcaaaacttttaagggacaagattaaaagttaatggaagttataatatttcttaaccacattccagtgagtcattttgcactcacctgggtgtgtgaacaacccactttgtaaacctctggctttagatacagaatctacatatctttcaaataaactatctgtcaccctcctcgcattcctgggttaaatatgctttccagtggaatactggagctgtggaagaatgtaggccacctctacatatttactcccagagatgtccaaaagggagtaagtggaaaaagcaagtattaataaagatgtatggtttgatttcttgtatgtaaacatttttaagtttgtaaaaatgtataatttatgtatagaaaatgtctaaattgataacttaaaaatggttatttctgagcactggacttaagggtcttgggaaaggaagnggtttat

SEQ ID NO: 7778 - DNA, 653 bp, Canis familiaris
  misc_feature (1)..(653): n = a or c or g or t
aaagcaagnatagagaaacactttaaagagatattttggttttttcccattccagaatttgtgagcatagtcatattttgcnnnncatttacagtcataaactctcaagctgnnnnntacaaccaagaaccaaaaaatggtgcatcctgcttcttgtaattcatctctgctaataaattatgagaagcaaggataattaattaggggaaatatgttatttaggtggtttctataagcaagggactataattcttgtacattgtttttcatctttgctgtttctttaagcagtctaatgtgccacaaaattattttttaaggtgtttcctgtaaggattgttttaaaggtgttctcattatgagtagttgtagatatgtttcaaaatataactggtgatttttaaaggcctgagtactgacctaagaagcaattatatgaattctactctggagggaagagaggatgttaatggaaattgtttgacttttacatttctgtgccatcgaatataggtaaaaataccaattgtgcaattctgctgtttaaacagaaactattggcctccttggccctaaataaaaggggctgatattttaagttgactattttattgtaaattaatccatcctaatttttaaaaattgattgaatg

SEQ ID NO: 7779 - DNA, 431 bp, Canis familiaris
  misc_feature (1)..(431): n = a or c or g or t
ctgcagatccaggagcatncttgagtnnaagagagaagagtcnnntaaacattttatagccattttaataactttttcccttncttttacttaaaaaaaaaaaagaaaagaaaaaaaaaaccaactcaaagaactcttcaaaaattttttaactgtgtaaattcttaatttgcaattgaagatcacccagagcaatgaaattaaaattccctgcatcacttagtagttggctttcgacatttaattgtcttaatggttctaaggctgtaagtatgggcaggttttagnnctcccatgtaccttgcgtntncttgatttgcantctcagttgccaatatctgatgttgagtatctnntgcacttttctcagccctggtcactttttcctgaagtgacaagttctccaatttaagatcttctatctcacgagc

SEQ ID NO: 7780 - DNA, 473 bp, Canis familiaris
gcagttttgcaactttgttcccaaaatctagagaggcttacttgaaagagtgctggcctttggtacagaagagccttgaatgaacatcacattaatgcaatcctggacctgatcgagggcaatatgactgtacgacaaagaagacttttgatccatatatcatcattagggccagagacctaattaaaacttttagcaagaagtgtatcatttgaacagattgataaagaattggctagtggtgaatattttctgaaggcaagtcaaaatagaagtgtcagaaaatggaagccacaaaggctaaacaagcagaagctctcagtaagagacaagaggaaagaaacaaagcttttattccacctaaagagaaaccagtggtgaaaccaaaggaagcttctactgaaaataaaattgatgtggctgccatcaaggaaaaggttaagaaagcaaagaataagaaactgggagctctt

SEQ ID NO: 7781 - DNA, 512 bp, Canis familiaris
  misc_feature (1)..(512): n = a or c or g or t
atatatgactagatgtnnnatttctcagagttcactctgcttccatgctgnntacggaatgnnnnngagagnnngctgtgtatgaaaaagtannacacttcttatggccatgatagagccatagatagacctgatttaccctcctgctttcattaactgaaaactagacaaaacgtataaggcaatggctttcagatgctggaaaaaggcactagaggacactgacccgccagagaagggaaacaatgaggttattcttgcatggggtggttgaccagttgctccaaggtactctaggattaatgcctatggagttgtgctggggccccttggtcaatccctggttctgggagaacagcttggtgaacagatcattccgttcacaacattgctcaagactagactaccagaatgatgctgacctgctaacttgagtgactctcacataggaaaaatatcagacacaggacgaaggatctttggacccattgaattgacaagaaacaaatcca

SEQ ID NO: 7782 - DNA, 656 bp, Canis familiaris
  misc_feature (1)..(656): n = a or c or g or t
gaaatgaaaataaaatgcccagtnnnnntagnnagncaacgagacaaatcnngnctacggtnnggtgtnaaatgatgccnttaatcccctgctcttgggacctggtatctctgctgaactttgatcagccttggctcagagtctttgccttccctgcactgatgttcagggctgtttgcaggcacagtaaatatttgtcctgtcaaatggcatttggctcttcacatgtcttgtttaagagataaatgtcagggatttcttctctctctctctcctctctctctctctctctctctttagtggggatcacaaggagatatacgtacattaatatcatttctacttccctaccaactgtaagccacagataaagacttatatcatcagagttctcatctcctgattgggtttgtgtcaagtaaaagtgaagtcacccccgcctcagtgatatacgtgttatcaagagcacagcctgttccagaccagaagcaatttcgttctgacatgtctctgttattaaaaagttaaggaaagtagagaagggaatacaaagattagatctttcaaagatgaaactacaaagttaatggcactgggccatctgtttggagaggtgaggaaatctacagtgactgggatttcaggaggaggannnn

SEQ ID NO: 7783 - DNA, 634 bp, Canis familiaris
  misc_feature (1)..(634): n = a or c or g or t
ctgctgctgacctgaacctggtgctgtatgtgtgtgaaactgtngacccagggcaggtttttgggcagccaccctgcccactctcccagcctgtgctcctttccctcatccagcagctggcctctgaccttggtactcgaactgacctcaagctcagttacttggaagaggctgtgatgcacctggaccacagtgaccccatcactcgggaccacatgggctccgtcatggcccaggtgcgccagaagctcttccagttcctgcaggctgagccacacaactcacttggcaaagtggcccggcgtctcagcctcatgctgcacggcctcgtaacccctagcctcccttagctaagcctgccttgcccaggggtggggaggcactgaaggccagcagacaggcctaggccaaagcagggtcatgtctattcttttacctgctcaggctcccacctctgaggcgtgtgaggggagagcacggctgtggtctataggttgtggtagccagcaggttcaggctgggcccagggtgggcattgtgccttcttgggttcttctgtgcctggagcatgacccctgagatcgtgacaccactggagttgaattttccatgttcctttttacctccaatttgg

SEQ ID NO: 7784 - DNA, 343 bp, Canis familiaris
  misc_feature (1)..(343): n = a or c or g or t
ggtanngtattgaatgactaagaaaaannaaaggatggagggataaaaagtaaaannnnntgaaggggagggattnnnnactnaaaagtagcannnaatagaaggtagaggtggggtagcaatggtattggcaagcattgtcgttttagttcgttcagnnaagtttaacgatgtgtttgaaaacaaaggtagatattttcagtcctgtgccttagtgtaaatttcaagttnnnaagatacctcaaaaactccagaagaggagggggagcctgggtagnncagttgtttaagcannngccttcggnnnaggttgtgatctcagnnnnnntgggatccagcccan

SEQ ID NO: 7785 - DNA, 558 bp, Canis familiaris
  misc_feature (1)..(558): n = a or c or g or t
ttctttttnncgttttnanntcatttttgttccanntctgnnacntcagggttttttgcttttgtttcccttnnnacagnnactactacnnnnnngtatntaaaaagaaaacttggtgtcactctcatgaatngaaaacaaactaaattgccatagatagacgctacctgtaagaaatgaatatagtgaaataaatacatttcaaatagatactattcctttggaggttttctgaatctgtgagaaagaaaagctagctagcacgtgttaagagggtagcaagcaacagttagactttcatataatcaaaggaagtggaagatgcttccctttggaaatgataccgctgggtctgtttccctgcaaacccctgaacggtctcatttggggaagcattggccagagggaatttactagatggtaaaagactcgagcatctactatgtcccaggtgctaattcacaataaaagtaagagatgggccctgctctcaagggcctttattgaccttttacttctttattggagatgtgagatggatatttatgaaaagtcaat

SEQ ID NO: 7786 - DNA, 664 bp, Canis familiaris
  misc_feature (1)..(664): n = a or c or g or t
tttaatgnntnaaatatatactgaaatatcacataaaaaattaacttacacttcaaagattgtgcagttgataactcttctgccccaccgcccaggccagaaaaaggataaaaaggaaaaaagctgtaacattaaactgatttgttttgcctggaaagaataagattatcaactagtacatcaaaatcttgacctttaccagtaattccggtgcggttaacatcttcatgaagcctgggttgcccttgcccctgtgctggggacagtaatgccatctgtctaccacactggagcgcccctccgtgcactgcatgcctgttacctctggctcagagtgcttaaagaccaatttctcaaatgctcctttttaaaagcacatgtcaaaccgtggcataaggaacagaccagactctggagtctccgcgtttacgctgaattcccctagcctactaagaagagtccgggcattgccatcatgagtagtgccgcgggggcagctgggagactggagaagagcagaccctccctgtggccagcgtggcaacagatggtgctccagcagctggcggttactcaggacttccctaagagtgtgacagaagcatcgagaaggcagggacagaaaggagaccagctgtgtcctttattccagacaagcnnnann

SEQ ID NO: 7787 - DNA, 611 bp, Canis familiaris
  misc_feature (1)..(611): n = a or c or g or t
ccaaatanncatcttttcactactagnntaatttctctcttnnnnnnngcatctccttttcatttggattanagtgagtgtggcctctttctatgtcgtnnataantgttttctaagtaactgctgcctctattatggcacttcaattttgcactgtctttcagagatttgagaaaaatttctattctttttttttttttgcatccaaatgtgcctgaatttttaaaatatgtaaatgctgccatgttccaaacccatcttcagtgtgtttgtacaaagctgtgtaccctggaaacaacatacagccccatgagcaggtgcctgagatgtggacccctttgcattcacagagaggtcattggtcatagagacttgaattaataagtgacattatgccagtttatgttctctcacagcttataaacaatgctttttgtgcacaacatattcttcaatgtagagctcttgttttatgggaaaaggcttacatgccaaatcgtgtctgatggtttaatatgccttttcgctgatgcatactattattgatgtgattctgttttgttgcagccttgctttgtttactgaaacacacttgtaaacctcttttgcac

SEQ ID NO: 7788 - DNA, 456 bp, Canis familiaris
  misc_feature (1)..(456): n = a or c or g or t
aggcactgcagctggctgcagccaacgagcccacgttcttcctgtatgcnnagcagctggcccgcaannaggtggagatcacatcactgagnaagcagaaacacaggctggaggtggaggtgcatcagctgcaggatcggctgctggaggagggggagcggcaccgtgagcgggtcggagccctacagagccacattgagaagaatatcagggaccagagcagggagggagccaacctggagtacctcaaaaacatcatctaccgcttcctgaccctgcccgacaccctgggccgccggcagacgctcacagccatcctgaccatcttgcatttcagtcccgaggagaaacaagtgatcatgcggcttccaactggtagtagctggtggccttctggcaagagatgatacccttttcactaactcccgacattgntgtgcctcctgtgtgggaagg

SEQ ID NO: 7789 - DNA, 251 bp, Canis familiaris
  misc_feature (1)..(251): n = a or c or g or t
cccccccccccccccgtgtctctccccgcccaacactttctctttcttagtctctttttttttttttttttccnnnnnncntgannnntanagtctcnnnnnnagnnncnnntnnnnantgctctttnagaannnnnnnnggctcagatcctgctgtggcatggggcctatgtgtctcagtcgcgtctgctgtgaagcacacgatgctctatttattgtagaaagtgacttnnnnnnntttcnnnaattgt

SEQ ID NO: 7790 - DNA, 635 bp, Canis familiaris
  misc_feature (1)..(635): n = a or c or g or t
cattctggtgatttattaatgatttgaaagtccattgttnnnnaagaaattccgtcatacacatctacgcnnataataagctggggattttttttttgtttgcaaatgcttgcccctactctgcaacagttttctatgttagtaattgtgaaggagaaccaagggtggggagcaatactacaaattgagtaatagtataagtatatgccacaagtctaatggcagtaagttttattaatcagaataatacttggttatggaagtgactgatgctaaataaatccttattattttttattagataatttctcacttatagacaaactgtcagcctgctagcgtcttagttaaactttgtaaaatatatatatattcttgtttttccattgtatgcaaattgaaggaaaaagatgtaccatttctctgttgtatgttggattatgtaggaaatgtttgtgaaaaattcaaaaaaacgatgaaaaaaagttcctgtggatgttttgtgtagtattttggcatttgtatggatagttaaaagttcacttccaaataaataaaactcccataatgctagatttgatgtgtgcccaatttgaacaagggttgattgactacctgtaaaatttgttcaaacg

SEQ ID NO: 7791 - DNA, 577 bp, Canis familiaris
  misc_feature (1)..(577): n = a or c or g or t
annatgccccattatgccactcatagagcaatcagaagannnctggcactcttgaataancagtatcataaggagggagggaactgggggcagggggaaaatgcattctgaagaagcacctctgataaacctgactttgaaacagcctaccagatgctggtatgccaatgatgcccaaagtgccagaaagaggatgcaccttctagatgcatgtagtctagaacatttctaggttaggctagagattgggtataaagaaatcttcctcaggggaacctctacctcacattacctctgggatcctggcatgctattgccaaactctgtcccacatctggggtccatcataccccaatttattctgtgaagtaatgccactctgagccattatgatctcaccaagtacttagagaagtggacccgtatataaacaaatttcagaaagccaataatgatttattgccatgtgatactgcatctatgacatctaggcttacaatcttgacttttcttcctccaatttattttttaaagataaagattttattatttattcatagacatagagagagagagg

SEQ ID NO: 7792 - DNA, 492 bp, Canis familiaris
  misc_feature (1)..(492): n = a or c or g or t
ggtgctgcagttgctctcctaggggggtggccagtgggccagggccactctcaggatgcagctggctgctgcctccnnnnggtgcggccccaacgagggacaggcaggcttaccagcagatcagtgaccaatgggccnagggactcccgggtactgagtccccgttcctgctggctcctgacccttggaaggactaactctggccaaactgtttatagatgatgatgtgttttcgtccctttacagcagaatgtgaccactccaacataacctagaagatgccatcctggcttcaggcccccagggaagttgcttattgagggaaaggtctatttttctactggaaatgtcttagagactgaccagggccagcccttccctccagctgtagtctgtgcctggtggggggtgagagtgcctctctgctgccggccaccagcatcctggtcacctgcctgcattccccagtgggnctgggccatggctcgccca

SEQ ID NO: 7793 - DNA, 630 bp, Canis familiaris
  misc_feature (1)..(630): n = a or c or g or t
catgtgatctgtannnctagaaaataaaaacccaagtcatnnnnaaatgtggctaactagatttaaatctccatctgaaatgctgctatagggctgggacccataaaaaaatatnntaatgcatatgttttaccattttgatttttaaagtatgctgtagcatttcttgataacacggttgtaatgttcttaaggcagaccttttcatcataaaaaggacattaatggcaaatttatctcctgtggaaatcccaattgcctgaattactgatattttagaaataggctgtttttaaaatgccatatgtaattttatgcaagttgactatatatcttggacttaataaattataggcacttttactgtccactagtttaaaataatttgtttaataataaatatgtttttagaggaaatattgttacttggaattaattttccaattacacagtcttctataacttactcatcatatgctatatgtatcttatgcaatttccctataaagaataaactaccattatggtgnnnaccaaaatatggggaaaataaacactaactgctgcttatgaatgacgctactacttgttatgcatataaatattttactttttcatatgtatagattg

SEQ ID NO: 7794 - DNA, 518 bp, Canis familiaris
  misc_feature (1)..(518): n = a or c or g or t
tttccctgctnnatgtaagtaggtcttgatttctttatttatttcatgtcccaatctatatgatagaggagactcaaagcaggattatgataatctgaaagattatttcaccaaaggttaccggatttaagtatattttcattttgacacagaaacaaaacataggataacatttccttagttgctagatcttgattttcccattaaatatccagcagacctttacttatttctgctaccaggacacatctttgtctttcattccctttgaagagacttttatttttgtttatatatactcaagccatttgtaatccttgaaatttccagttgttttctttctgacagcaaacacaaatttaatgcatgtttcattttaccttttgggtgaatgattacattttttattacttttcatttgatcaatatatttggaaaggatgtttatcaaacgcctatgtcactgcttccatagaggaatgaaattaatacttagatggtggtacccttgcctgtac

SEQ ID NO: 7795 - DNA, 651 bp, Canis familiaris
  misc_feature (1)..(651): n = a or c or g or t
gacaaagtacatgctctctttctagatggcatcactctaacnnnaaactnnaatttcagctctttgactgaaaagagacaggtaaatcaaggtctcaatttaggttggtgtaaattaacttttcctgatggacaagatcagttaattcagattgaacaccctggaccatatgaaagatatgtgacagcagttatatcatggtgcagaagactgacccagactagtcagagagagatgtccacacatccttcatcttctgttcttgaagaaaattggtctgtggcctctgaacttgaaaagataaagaagtttaacttgttattggaaaatagtggtatcctaaaccagatttctaacaaaaaaaatgaacagtcatctgaccattgtgaaccaaaatcttcagagaccttgctggaagaagttaatgaaaagagagtatcagtggcattgaaaaaaacctctgaaatccttcaggatattgactatcttctatcaaattctaaaaagtgaaaaatggaattataaaccttaaggatatttcaagtgactagtataaaattactagtaagccaagaaattatatatattacttctgtgcaatgattgtatgaaannnnacatttaactttggagggtacctatcttgtaaac

SEQ ID NO: 7796 - DNA, 504 bp, Canis familiaris
  misc_feature (1)..(504): n = a or c or g or t
gaagacagacttggggtggttttggttttgttttcctttccttttctttttaaattgaaattgatagctnngtcaggctaccttgatgnnnntctccacgctgtgtggcnntcacacaactaggnntcgagnnaagcaacatcagtgttccnnagaccccgttccatgcctttccccatcatcattaacagcactccctnntngaggaaagactctcatcctggagaaggaaacaaagggaaagggaagtcgtgtagaggcagggaaaaggtgaaatggcttggccatttcttatgtccccatctggtcgatagatgagtatgatggagagacacaaccataggtaacaaagtcggatgtgcattaaagacaagagtcctgcgtttatccacctccgtttggatcagtatgttctgtaagacttcttgcattccttctagctgcttttttgggatttgggggattttnnntgtttttattgtttnnnnnntggtcccacagagc

SEQ ID NO: 7797 - DNA, 516 bp, Canis familiaris
  misc_feature (1)..(516): n = a or c or g or t
atgcannggtnngaannaatgcatggttatnnngaccagaaaaaagtgccacagaagaccaataactgttttntngncgaggnnagtctnnagnctttcattagagcaatattcagttattgcaattcatttttaattactaagaaatataattttggaatttttaatctgttatgctttgttcttcaactttattttaattacgacttttataggatgagcaaaaatggcagtttacattatttttgcaaaaaagttagactcgttcctttcttgctagtcagagtaaataggcagtaattttgaaaagatgtgaactcaaatattgcacttctttcaagatgttatcatttggttattgtactgtatagttttaataatattgtgattgaaaccctttaacaactctttgtaaattttaactcattttagttgttttttcagtactatttacataggaattgatttttatggatatagtagaagaaatgtgatgtattttgataaaattcattt

SEQ ID NO: 7798 - DNA, 652 bp, Canis familiaris
  misc_feature (1)..(652): n = a or c or g or t
cannagtgcatgagctgagtagntaagcatacccagattcagacatannaaagagtagtgggggggaaatacactntaaattttacgtatgtcggtgcaaanctaagtgaccaagttattaaaacatcttcctggtgtatcaaaaggcagttttagctttagattttggagaatttcctgggtaatttcaagttttgaattttatgttcagtgtagttggtactaagataacagttttgtttctggttccacattagtctctagccttgacctacatgttcacctgtggaatagttgatctcaccttcaaaatgtaaatttttcgtgttgatgaacctgccttttgttttatttggtgcctgcaacttcctttgttcaatgatgtttgtacttgctggctatcaagttacaatgcacttggcctccttttgctcttgttttgctatttgaccttaaacctaggccaagtaccaatcaatgttggttattgcaagggactgtttattctttaaacatgcaaccttagggaacaagggagattttcattttaagttatgttgtcaaaagtctgtaggtgcagtgtctttagggcagtgaatcctgttaagttcaaatttatgaataggtgacaagttgacattgagattgtcct

SEQ ID NO: 7799 - DNA, 333 bp, Canis familiaris
  misc_feature (1)..(333): n = a or c or g or t
annagctttaaaagggtnnnatcaaccagccccctcaaccaaaaaatgccacccaaaattagcttgtccatctctaaatttggtacataggctacttgttgnnngctgtttaaattnnnnagttagacctgtaaaggtcagtgagtgataaaatccacagctgatactagatactcttcccataactggtttattaaaacacactgaaacagaaataaatccccagagtgcttatccacttagggttgnancttaacatttcaagagggattgtncgtgctccatctcagatgcgcagccttnnnngcctgttttgtangcagccgggactcc

SEQ ID NO: 7800 - DNA, 540 bp, Canis familiaris
  misc_feature (1)..(540): n = a or c or g or t
tgaagaaanngagtctcagnnnagtgaagggacgtgcccaaggtnnctaagtnnnagagttgattnnnnngtgttttggtttgnactgcacccccagcaccctcccctgccnnttttannngaggtgaaaaaagaaagcctttcagaccaaaatgcctcactcccctctgatctccagaccaaatgaggctccagccagcaagctcagccaagttcatgtccttctgggaggctgtgcttccactccccttactggagggagggcacgtaggtctgtctctgcgcttccaggcatgggtggccacagccaatcccatgagccacacggaggcagcagacactctgcttcgatgcccagcaggctcttcccctcgtgcaggtccaggagggcccgccccacagtgagcagtccttgtcccttgtaaggcactgattgctttggctttctcatcttcatctcctaccttttcctgtcccccactgtgccctgaagctcatggtgggggagggcctnnnggcccctcctgctacccatctgta

SEQ ID NO: 7801 - DNA, 534 bp, Canis familiaris
atggaggtggagtataaattttaaatgctttatggaaaggtgccatagagacacaaaagggtggagttttcagagggcagctgagggctcatctcatatctctgcttctcattgaatctcttcttcctgttgtctatccccggcaccacgcgctacactgtcctaaggcttcccattaagaacgtggaatctactatgtaggaactatttctacaaatctttcttaagggtgttacaaaatagaactttcctttactctggtagtcttgaataattatatttgaggactaaaactgagggatggtttctatgagattttcattaaaaattttgaaaactttactactgagtaacctatttggatggtgaaactgaagataattttcaccatcagaagacacaagacatgaaatttgaaatccatacttttttttttagattccacatgtaagtgagatcatgtggtatttgtctttgcaatcctctcttgtattttttctttgaatcacttttttcccttgaattcacaagtca

SEQ ID NO: 7802 - DNA, 486 bp, Canis familiaris
  misc_feature (1)..(486): n = a or c or g or t
agaagtttatggtctctgcatcgtcaatttaatttaagcantgctgagacgatctttaatctactccccattttgtaataccttatttatgatgcattttcatttttttaatttggggggaacgttagtccgacagaagccagcagatgaaagtgccaaaaggaggtcaaatggaaacaaagcctattacccactgtatttcagacaggaccgaggcacttagcctgagagccactgggttattagattaatttcaaaagagcttttacaagttgcttaattccattttttttttttttaaacccatggaccacaaactcaaatttctcttcaaatggggttaatttgacaaatgaggcatggacccagcgttgtggaaaaagcattccactataatgagatcttggtctttcttgcgagacnatgttatttatgtaaatatgtctagaggcaccnncnataagcttttagttttctatgatctat

SEQ ID NO: 7803 - DNA, 609 bp, Canis familiaris
  misc_feature (1)..(609): n = a or c or g or t
cagaagtgggtatgagcnnnnnntactcntctccatccttgctcttctgtaagaatgcgaggaccatgtgacagctnnnnctttcnagnnatcaagcagcnctgaggggaagaagaggcttcttttttnggcagcagggtctgctatggagaactttgttcaaaatatcagctcctacactctccactaacttcagagatggaaagagacagtatgtctacttggtctgagcacatcgcgtcatacttgtttacagacgttggggagaccacatcttggaagaaatagtcgtgcaaaaagattgactccaagtcctaatttttcaaatgtgacatcaccaagaaaatggttctcacaaaaggtgcagaaactccaggaatgagggtaagttcatttcacaggaaggtccttggctgtgtgctaacgatccctcactctcattttcttcatgggggaaggggattggatgcaccccagagggcaaaggagggggccttagcttcctggatgaccccaaaagaaccattaagtaaggacacacagagatatcattaacaggagtgtgtgagactcagaaaccaccagcctgaaaccaaaatcctgattctg

SEQ ID NO: 7804 - DNA, 409 bp, Canis familiaris
  misc_feature (1)..(409): n = a or c or g or t
acaacagctacagctggggggctaanngaggcctgacccccctcctgcccggnnnccacnnnaacggcatcagagagagaggaagggggggttccgctgcccctacctccagtgtcccaccctatgcctcagcttcatgtctgtcccgtccccataccacccctactctgttgtatgtattataggatttgtattttctccttttttttccccctttcctctcctcctccccccttgcattcaagattatgaaactttgctgtgggccccgccttccttctnnncctgttcaccctggtggtgtataggtgaggtggggcagggggacccccaaatatatatcagcccaacagccctacgtctcctcctttattattaggaaacaaaacaacaacaaaatggcgtcatg

SEQ ID NO: 7805 - DNA, 164 bp, Canis familiaris
  misc_feature (1)..(164): n = a or c or g or t
ggcacccccaattagtgcnnnnnnnnnnggcagnaggctacaccaagaaaactggnnnnnctggggagagggatgctgaaactggcccaaaccctccctgcttggtgacatttcaggtcattttcagcccccagtgggacaagggtcaggaacaggtgacttgg

SEQ ID NO: 7806 - DNA, 81 bp, Canis familiaris
  misc_feature (1)..(81): n = a or c or g or t
gtcaaccatttaacctctccgtgtgtctggaaaataaaagggacaaactccatgttttctaacatccctnnnaattattga

SEQ ID NO: 7807 - DNA, 434 bp, Canis familiaris
  misc_feature (1)..(434): n = a or c or g or t
gcccccgccgccccgccnctgcatggagccctgtgattagtgcccgaatgcatcatatagactcgcccgacacactcctgcacattggctctgcccgtggatttactctcctctccttgctgctgtgtgagtaatcaggtttggggcctgtcccgggaaaggcttaggattaactggccggcaaacaccacttgtcttcggccccggacaggctcttccctgccctcccgctggtcaacgtcgttggcgacgctgtagaagacgtgcacttaccttgagtcggcactgagtgacgtgggcaccgcggtctgcctgtgcgtgtcacacacccggcacctgctgccctcccgcccccccgggccttctgctggggccggcacctgctgggggttctggtttttacttttttaatgtannnntgagtctttgtaatt

SEQ ID NO: 7808 - DNA, 347 bp, Canis familiaris
  misc_feature (1)..(347): n = a or c or g or t
ttagtccatatggannattgacccctcttgagattgcaanntacactcctaaatcannnnggnnngacttgcaagtatcttaacttgtttctgnncatgnnnngcnnntataagccnnnnnattttnnnnnnnannnnnnaaacacctattnnnnnnnnttnnnnnntnctacttagtgtcagccattgctggcattctgtcactagagaatacagcaatatctggtatgttgcaagctttcaagatagcctcaactttaaaaagttggtccattagttgtttctgatggatgtaaatttgcctcctagttcactttgtgtcaagagctaaaactgtgaacctaact

SEQ ID NO: 7809 - DNA, 612 bp, Canis familiaris
  misc_feature (1)..(612): n = a or c or g or t
acccaaggtgcacatcatnntgtttcaaccacagaagaatgtggtcacacacagactgcatctcaacaggttcagtgtcagcgggactgggaccacctattctcagtcntctgcaagcacctatgtccccacggtgtgcaatgggcgggaagttctcgactccaccacctcatctctgtgattgtgaattacagttcagttctcgtgtttttagactgttagacagaagtgctcgcgtgcagctccagaatatggaaacagagcaaaagaaccctaggaccttttttagaaacagtacgataaattatttttgaggactgtacagtatatagtgatgtgctagaactttttaggctgattttagtgccccattattaacgattccccggaacatggaaataaccactgtttacagagctgagcattggtgacagggtctgacagggtcagtctaaaataaaatttggtggcaatattaggtaactttttttcctatgaagtcttttgtaggtccttgttgtaactaatttaggatgagtttctatgttgtatattaaaattacattatgtgtaacagattgtttttttctcagcacaaaataaaaagcatct

SEQ ID NO: 7810 - DNA, 583 bp, Canis familiaris
  misc_feature (1)..(583): n = a or c or g or t
atagacttacagaacagtttcatatttcacatgactgtngactattattacatacaccattgttccgtgtatcatgacgctagctagcaaagatgtggaagtatctgtccaaaactttgaaagtttagtgagtttttcttcatgaggacatcagtaaaagataaattgatgaaaagtccttaacaaagaattttgtaaaaattttcacaaacctaatcagttaacatcacttttctttggcaaaagaaaaaaatagacttttttcaactcagaattttaggagatgaaaaaattgtaatgtaaattttacaatgttgaggatgcacagaatatgtatgtatagtttttaccatagtgaatgtataatactgtggcatcttgtgtgatgttttatacaagggctggtattcattaataatgttcctaatttttccatagttgatctaaaataatgtcactatacaaattacgatgctcagataattgaataagcacctttgtgttctccttcatttgtatcactggccagcaatataagcagatnnnactttagcttgtagttctatgtactgtaaatattttt

SEQ ID NO: 7811 - DNA, 540 bp, Canis familiaris
  misc_feature (1)..(540): n = a or c or g or t
aatccctgtggtgcnntcagcaccgcccnannaggaggctgaggctgcagccagcagcccccattttgcagatgcagtctctctctccacgaagagccactcacaacagcagctgttacctgccaccttcggctccatgcccggtgcccctgaaccccgccctcaagatggcagccccgctccccaccccttgccccctcccttgtgcatctccacaggtgccaccgtcccctactttgcagagggttccgcagggccagtgcccaccaccagtaccttgatcctgcccccagagtacagctcatggggctatccctatgaagccccaccatcctatgagcagagctgtngcggtgcagatcccagcctgacgcccaggagctgaccctgtgctgtcttctccgggtgggctgacctttgccctgggaccaggcacccagggcctcgtgccttcttcactcctggcctgacccggcccactcaggacccctgctgcccggctgctcctttcagcctccacctggggcccagcctctcccc

SEQ ID NO: 7812 - DNA, 539 bp, Canis familiaris
  misc_feature (1)..(539): n = a or c or g or t
ataantaaaacccgtcccacttccactataantctatgtgggtgagatgtgtccacatgtgctnntagaagcacaaatgaagtcagccatggtacaggtcatatctgtgttggccaagcttcctctaaaacattcagtggggggagctagagggctaagacttagtgtacccagacccaaggtcaagaatgtaatgtttttctgctaatactgtttttatttctgtaactcctatctttaaatcattgtggtttactctggaattttatgatttcaatattgtgtcattgtgctaagaaataacttgaatctactttgtttgcatcctttacatataagtcagctgcactttatgctctttgcaactgttttaatgatcagaaacatgtaccatttacaaggttaaatttttcttaagaaacaccttcgctatttgtataaaaactgagatttttaacaacttaacctctagagttactgaactattttcaccttgagaatgtaagtagaactgcgnnnnnnaatggttggttacttca

SEQ ID NO: 7813 - DNA, 174 bp, Canis familiaris
  misc_feature (1)..(174): n = a or c or g or t
atccttccctttttaggagaaaatgtgacacttgtgaaaacttgtaagaaagcccctgttnnnnnaacctttttttttttcctttacacctttaaatgacaaaaatctaggtaattaaggttgtgaatttttatttttgctttgtttttaatgaacatttgtctttcagaatag

SEQ ID NO: 7814 - DNA, 397 bp, Canis familiaris
  misc_feature (1)..(397): n = a or c or g or t
ggcagtcaacgnnaatgtgggggacgnngnngtccannagttggctcggaactgcccggaactcgagcacctcgacctaaccggctgcctccgcgtcgggagcgacggcgtcaggacgttggccgagtactgcccggccctgcgctcgctgcgggtgcggcactgccaccatgtggccgagcccagcctgagccgcttgcggaagcgcggcgtggacatcgacgtggagccgccgctgcatcaggccctggtgctgctgcaggacatggcaggctttgcaccctttgtcaacctgcaggtctgacttgcctgcgaatggggcacagctggactgtgtggcggggcctgactatgaactgtagggaaactggaccnnnngagcctctggatagaggcg

SEQ ID NO: 7815 - DNA, 493 bp, Canis familiaris
  misc_feature (1)..(493): n = a or c or g or t
ttttnnacaaagactgatttgcatggattgagttacactaactgctgttcattaatgaagattgtgggcccgttttaaagaaatacttgtcaacaggagtgggtcctctgaacttttaagaccagtagcccttaagttcctccaaatccacaccctttattcctccttttgcattgtcctcttgtaggtgcctcagccttggcatcccaggaaaactgttactgctcatctaatcctaatgatggtatcttgtgccctaattctactgcttagcaaagaagcagtatgtctttaataaagggttcagcccattactgttcaactctaacctgaggcagtaccactcctgtaaccctcctattctgaattctgaactccaggnnnaaacaagcgaaccgctgatcctttcagtgtannnagcatctactgtcaaggaaatcgtttgttaagccccatatacatacnnaattttcagatccagagatgtttacat

SEQ ID NO: 7816 - DNA, 498 bp, Canis familiaris
  misc_feature (1)..(498): n = a or c or g or t
tagcatannttcagaannggtanaaatnnccatatagaaaattcnatgaacctatannnngtcatttcaatnnnnntttctatgnnactgantttaatttgcatttagtttgagtcaaaactagttacaannntattnnnnnnaaatgggaaaagcttcatggtagctcttttttgttttttnncagtttagtagaatcccagtaatgttaaggacttttttacattgtatattttaantntntacaatcatttgtccattattcgtcacataaagatggggaaaaggatttttnngttatatatttaaatatttactgttgtatttttannnnannnnnnngttttgtcaaagaatgcaattngnaatttnnnattatnnnnnatttgcaatttgaaaatattnggccatcttcctttgcaacttaattgnnnnnnnngtaaattttgncannnntattttnnnanngtgtttnnnannnaaatgtattttttgacc

SEQ ID NO: 7817 - DNA, 212 bp, Canis familiaris
  misc_feature (1)..(212): n = a or c or g or t
atttcattagtgtgtgtaaaaccagcgtcttccgtggccacaggcacacacttgcttttttgaatgtgatgtaaaatttgtacagtaaaagtttttatattttctatcaactgcatttgtcttccagaaatgctattaatttaaattaaaatggttagtattaatgaacgtgctgtnnnngttttttgccactnnnnngaacacatcttttg

SEQ ID NO: 7818 - DNA, 570 bp, Canis familiaris
  misc_feature (1)..(570): n = a or c or g or t
tagcatgtgcagagctatgaccttcctgtggcttgggaacggctctgcttactgtcccagtgatgtgctagggcagttcagcggcttgtgagtgctggctgtgcttctcttccaactctgcaatcagtggtaacttcacgtttgttgcttgaatttagccacagtgagagtatagaagccacagaaaccaacaaaggctgctaatcagggtttttatttttttaaagagctggcttagcacatgactagaactatgtacctaaatgccaccatttgcccaagcactctatttagatcacagtggtcagatattcttagcaccctctcacccccttccactcaccacccaaagttcctattatctcctaaggctggtgatggatagaggcattgcctaaatgcaatatgaataagggcttctagacctcttgcagccttccacagctaccattagaacaaatccttgcttgatggtgttgttttctaaagaccgcaagggattatggaaagaatatgggcctcagagtcatgtaaatctacatacaaattttgaccccaccannngggaat

SEQ ID NO: 7819 - DNA, 472 bp, Canis familiaris
  misc_feature (1)..(472): n = a or c or g or t
cctggattgtgttctgtatcgatatggctccttttctctcaccctggacattgtccggggtattgagaatgctgagatnntgcaggctgtgccatccagtgaaggggatgcatttgagctgactgtgtcttgccaaggcggactgcccaagnaagcctgcatggacatctcatcaccagggtgccagccccctgcccagaggctatgtcagcctgtgccgcccagcccagcctgccagctggttttgcaccaagtgctgaagggtggctcagggacctactgcctcaatgtgtctttggctgatgctaacagtctggcaatggtcagcactcagcttgtaatgcctggtcaagaagcaggcgttggacaggctcccctgttcatgggcatcttgctggtgttgctggctatggtgctggtatctctgatatataggcgaagacttctgaagcagggctcagctctccccctt

SEQ ID NO: 7820 - DNA, 587 bp, Canis familiaris
  misc_feature (1)..(587): n = a or c or g or t
aannnagaanncattgagctcaggggtaaannnagccaagattttatnnngcgaaacattgannnnnncaagaattcaggaaagcctgtggtcatgactgacagagagaagaaaaggctgattgaacttttaaaggacttagatgatggagattcggggctgtcctgtcctgagggtgatgagtctggctggctggtcccaggagaaggatacacacttgcaatcacccagcaccagcagcttgctgaaatagacacaaagctccaagaactttctgcagcctcaccaacaagttctagcttctctccaaaacttgaaaaccagagtgaccaggaacctgaccttaatgttgatgatagaaatatggaaataacaccaggagaaaaggtgcttcggaacaccaaagagcaacgggatcagcaaaaccggctgagagagatagatgataaactaaggaagctgaaggaaagtgtggtatgtctttttatttcaactttataagcagtgattgtcttaaaaaaatgtttccagtttcctttgactgttttatgactgcttctatatttaagtccgtcaagaaaactgac

SEQ ID NO: 7821 - DNA, 552 bp, Canis familiaris
  misc_feature (1)..(552): n = a or c or g or t
cggnnagactggggggcagcaccgcgccagctcaatgaagaattttggcagtataacaccttccagtactggaggaatcctttaccacctattgatctggctgacatcgaagatgtgattgaagacaactcaacagaagcagcgcttcagggcaagaatgaagtggttgagattgacatggagtcctgacggaaggagctgaagaataggttcttcttaatttgaggagacatctcttaagtgaatttacatattcttaagaagaaaagttattttccatacttgatgtgataccattcccaaacctgaaaaatgaggaacagttattttaaagataaatgcctatagccactactgaaactcccaaaaaggatttgtcaaggatctagtgcagttacaggggaagtattttatatatgtactcttgcagagaaatttatgtttagactctaaattcgaaaacattgatctcataaaaaggaattctgacagttttagaannnngaaatgtttaaatattcttcttctnnnnnncaaaaagtcaatttgtgg

SEQ ID NO: 7822 - DNA, 627 bp, Canis familiaris
  misc_feature (1)..(627): n = a or c or g or t
tganngagtgtctatcannnacaatcagaaactncgtgtgttcactgtgaccatggaggagctcanntnnnnnannnnanacanntannnnngnnnnatngnnnganctnnnactnnnnnnngngnngaagttaangtgaccattgacccagtgtcactatggcccagggtgngagacctttgtgaagtcatggtgtccagatgctgatttgaatagntgtgccatccttgttcaaaccactggatcacagctgaagaagaaccagctgtccatcgatcagaaaaagcaaacattctccatggccatatggggagagtaaaacaacttttgagaacaaatctgctgttgtttttctgaggtgctgcccaggcgttttacagtatggcaaccctgctcacacccaatatctagaagtttaaataagtcccaaagcttagaattcctccctgagttcttgctttgttctttgttcttcctggggcaccatttaaaataaccacttagatttgattgcatgaagaatgaatggcctccgccctaaccactgtatatacaagaggagctactaccttgctcttggtctccagcttgctcccggtctgggatnnnngactgcctttccccca

SEQ ID NO: 7823 - DNA, 603 bp, Canis familiaris
  misc_feature (1)..(603): n = a or c or g or t
ctgactcccaatatgatgcttannctgttccatcatacagccnngcaacannacaaaggaaatatgtggtnnnctatgctcntagcttcccaacagncnncaatggctttcattttttccttaagatggcattttttacttatgtgcactttgaaacataatctgaattttggaaaagggaacttttttaaatcactgctcagaaggaaagaaagctttttcttttttctttttttgttttggtttattttcaaaggaattatggtgagaaaatattcttgacaatagagatgtgctaacatttaatttgggtgttttgtgggttagattcccatttgatgtgtgtacttgatgggcttaaatattgcttgctttagaaagtcaaggctgtacatgagtgtgttcatatatgtgaaaaagttcttaaagtgccatatagttttattattgtacatatatatagttgttgttttgattcctagagtgtgctatcatctctatacacatcacacaggaaagcttgactgtgtaacaatgatattaaagaagactctcagttgtcttttatggtctcgttaatcaaatgttctggtcaacgcacgt

SEQ ID NO: 7824 - DNA, 484 bp, Canis familiaris
tatttagcaaagacagaaactagctgaggtggggtggggaggtgtctgggtgtctcagtccattaagggtctgctttcagctcagagcttgattaaggggtcctgggatcgagccttgtgtcaggctccctgctcaacggagaggctgcttctccctctccctccgcagctccccctccttgttcctctctctctctctctctttctctctctctctccccatctctctgtcaaataaataaataaatagtcttttttttttaaagaagaaagacagaacctagctggggtgggagaggggagatgaggctcctgctctgtgctcggttcactcctttctgcagggtgccagctgactgaggactgacctgggcttctggactgtggggccatcctgttacccctgaggtcagggcactgggagaagagaaccccgagcctgagctatgctgggttttaagtcagctccttgggatccctgggt

SEQ ID NO: 7825 - DNA, 609 bp, Canis familiaris
  misc_feature (1)..(609): n = a or c or g or t
catctgtnnaaggnctgggnnnancagnnnnnnnnnnnctctcnnnnnnnnnnnnngatcnnnnncnnnnncannnnncangnaannatnnnnncnnnnnnntgctcactgtgccccacanatganatnnnannntaggctgttncgtgatcaaactgtcntccatgtagacctggtgaatgtaacacatacccctccacttctcctaaggtaatgtaagtagagttttgacctactagctatatagtttcttctcttcttccctgggcttgtcacttttcaatgcatttctaaagggaagagcaggggagacctctatactgatttttcccttaaatgtgaaacagcatggatttatgggattaggtggcagtgactcatgtttgcccctagctaaaccaaatgtttgacttcctatgtagttatacagtaagttggaaatccttgtttactagagtatattatgcttttgttaatacattagattaaatctaatttgctaatctatgatgttaatttattttttacaaaacaataaattttatttttactaagattgtgcttttcattttacttccaaatgtgtttctgaactgtgtacaaggcatg

SEQ ID NO: 7826 - DNA, 482 bp, Canis familiaris
  misc_feature (1)..(482): n = a or c or g or t
gtatnnnaacatctaagagtctgnngcatctggaanngcgcctccaattccgggccccggttttctaagagagatagtcgaacctgaacactgataaggagccggggatgccgcggggccagcagaagggagccaagccttcatgtaccagcaggacggccagaacaagagggctgggtgttgctgccgcggaggacagtggttccgtagaagagcctgccgacaatcagagctgcgtgcccaagtcaccgggcacgtgggctccttatcaccgaagtgtccaagtagaaaccgaagggccatccagcctcgtagaacagggcatacttctcagctccctgagctggtaagatcttctgatcccatgttcccatcctgggagggggaggcgggggtggggggtgctttcatatggacaaccttgtcctcgaccatgaatagccttatccccaaacgcttatcacagcagctcattataacat

SEQ ID NO: 7827 - DNA, 582 bp, Canis familiaris
  misc_feature (1)..(582): n = a or c or g or t
tatatncggcttngatattgccanacgcctctccaaagtgattgtactgatttgtattttcagtagctgtaaatgaactttttagntgctccacatccttgtctgcacttgttattgtcagttcttataatttgagttttttttattgagtgtttgagtgtgtctcattttttttgctcttccttaaatttttattgtatgatttgcatacagaaaagtgcatgagtcaagtgtacagctgttacttttcgcacactgaacatgctcacaaaaattagcaagaaattaagaattggaaaatcaccagcactgcagcagtcccacgcatgcatgcccttttcagccacttacaccaccatcccaaggacatctattatcctgacaccataaattctttttgcctggttttgaacttcaaataagtgaaataatatgtagttttttatgtctagcttctttgattcaacattatgtcttttccagctcatcaatactgttgcatgttgtagtttggtcattcatatggttgtagagtattacattatacagatatactgcaatttattcattctgtgaataggc

SEQ ID NO: 7828 - DNA, 565 bp, Canis familiaris
  misc_feature (1)..(565): n = a or c or g or t
aaccaacnnttccacggtcataatgatnncaaaaatcttaaaatatgctatgtttgagaatagctcaccaagcaaaatatttaaagttaatgacggtgtagcaatggttgtcgctaggctacagagttgtataggtaatgtatagctgaaatcattcaatgacattttcctgaaagtctttgttttagtaaaaaaaataaaataaaaacaaaaataaaaataaaaagtaattttacagtgaagaaaaaaatcataccaaaagaaaacttgaatatgtgtctgaacatttactgtattttgtaaattaagttatatgctattccagggacttttgccttattgaagaggcagaaaatgtgactggactccttgagaatgctttatcaagaatattatttttctaatgtaacaattctccatcataagttcttttaacatggactgcataacaattttcataaaatgtaaataaaggaaaagctagtgctactgtcttgtacttggtatgtaatattcaggtttatgcatcaaaataaacattcggtaaatattcctgttacaaatt

SEQ ID NO: 7829 - DNA, 610 bp, Canis familiaris
  misc_feature (1)..(610): n = a or c or g or t
anggtaccatgcccatcttaccnnnnnntccagaagaaaatttttcacagaagaaactgattttctaacttactnnaaatgcatcctttgacatgaccttagaatatcattgcaagtcacttggtttgaattcggtctagttacgtcttcatggattatgtaccagggctattaatatttaaacctcttattttgatggggtggtgagatttttatttcttttcaacttgtgcctttgtcttaattattacatgattatattcatgccaattataatacaaatgagctatttttaatgcctgtatggaggattaaggcaaacattcagttattgatatgtcaggctttattgtgtgtggtaaaattccatgggatgtgatttgatttagaatatattcaaattcttacaattatgatactgagttatgncagatttctgttattttaaaccacgagtagtgcttgtttctccctatatgaagaatgttaatattttggattataagtgttcaagttgtaggccgaagttaccaatgcaagacgaattttgtgcaacgtttttgtgaaaattaaaagtgttttaagagggaaacctgaatgtttttctgta

SEQ ID NO: 7830 - DNA, 580 bp, Canis familiaris
  misc_feature (1)..(580): n = a or c or g or t
cggtgctcccgcgactccctgcacatgacacagatggggctctggtcgtcctcacagaagagcttgaggagctcctggtgcgccttgcacaggtccctgctctnnaaggccgggtgctggcgtgccatctccgccaccttggcggatgcactcccggcagaagttgtggccacaggcggtcatcacggggtccgtgaagtagtcaaggcagatggagcaggtggcttcctcctgcagctttctggcgagttccaaggcatccatgtctcctggggcaggaacagaaagaacgcccctcacaccctctgcccgggagccctgggctctccacggccaagccctgtctttggccagccccgctactttaggggggatcatcgtgccaagttggctgagagtgcccccccatgacgtcagatctagctcctcaggtccccgctgccctgtctagaagcctttaggccagtctggaaagaatccccctccctatgtcccctcttagtgattttccatggctgaccaccccctctgctctttagccttaagtcccccaccccatcctgcgagccggttctgcggg

SEQ ID NO: 7831 - DNA, 421 bp, Canis familiaris
  misc_feature (1)..(421): n = a or c or g or t
catccagttcctggnnnnntnntgnngnnnatatcaagcacgccacaacccaaccatggctctcagactctgcagctgctgcnnnnnnnnacccccacctgtnctgnnngggttggttcctcagcccgcccccgtctatgctgaatnnngctgccctccgcaggacctacatcagcctctgccagnagnnnagtggctgcnntgagtctccaaggtcctgctctgggaccaagccctgccttgcctctggcctggccctggtgctctcccccactcacttccaactgcatggctctcctggcccatgcgaggccctcacaccacaaggcctacgctcttagacctgcgtggcctgtcctgctggctcttccctccctcaggtnnnaggcagatatccacctgggtggctcatcggctgagt

SEQ ID NO: 7832 - DNA, 646 bp, Canis familiaris
gtgctgtgaaagtgctaaattactttgtgattatgagcaaattttctatttgacaaagccctgctgtgggatcttgatgattcttatgtaccagattgttctcttacaatatatatgttagaaaaatatgcacactttcaaatagaagagggagaggctttttagccatagaaatcactttaataagagctgtatgataaatcgttgagcgagtgtaaatatttttacgtctatcagggttctcatttggaagtgtgctctcaccattccccttgttgaagagagtagagtggttctaagtgtttatgaaggatgcgcgtgcttgctccggaggtcccaggaaaagcaggcccctcccagatcactcaagaacactggccgccttacggggactgaacccacactttctttcacgaaaaagatgcagatgatttacttttgtgttaatatatagaaaaacggtaaatacacgtaagtacctgcaaatacatgtaaatattgatatacggggtgtctgtgtgtggtcgcaaggcctgtaagcaggtgggtggggccaccctggggccgtcgggtcaaatgtgaacacgtgctcttcgtaactgcgtcactgtggggccgtcacgactgctgtacttgcccgtttcta

SEQ ID NO: 7833 - DNA, 407 bp, Canis familiaris
  misc_feature (1)..(407): n = a or c or g or t
aaagaatgtttccactggaattgttggnnnagacttagagttcacaactgatgatnntgatgtatctccattccnnnnnngtctcaaagaccccagaaaggggcatagcctgctcaatctgctcatgaacctgcangaaagtctgaagaaccaatggaacattaagtcacaaaccagtctatatgtgtattattaaatatgtaagaatgtactgtatnnnnnncaataatctatactttgaaccaaaagacacagggtggtcttatggtatgttttagcaaccagtccaagcaacttgtcnnnaccaaagaatggtnnnnnntttctttgagagggtctatataatcatttnctagaaagtaagatannnncagtaatgtttttnnnnnnngaacatagtatattca

SEQ ID NO: 7834 - DNA, 622 bp, Canis familiaris
  misc_feature (1)..(622): n = a or c or g or t
agttcaaaannggtttgatccatgggcatcaagnnattccatggggagacatggccagcnnngncctgttgcagaggcagttcgatgtggacattcttatctcgggacacacacacaaatttgaagcatttgagcatgaaaataaattctacattaacccaggttctgccactggagcatataatgccttggaaacaaacattattccttcatttgtgctgatggacatccaggcttctacagttgtcacttatgtgtatcaactaattggagatgatgtgaaagtagaacgaattgaatacaaaaaatcttaaaagccaggcctgtcttgctttttttttttttcattcccatgttcaaatcaagtaattaaacatttatgtaccacaaaattgtatcacttttataatattttgcagtaaaatatcatcttctgttaatacaatgttctaagcttcttgtaaactataagaatatattccatttccatatatgatttctatgaaaaaaatgtcatcacacagtaaatggtcataatgttcagaaaaatttatccttgtaaatatcttcaaagttggtatttggaactttactatgaaagtagtgcatgaggaaaaagaat

SEQ ID NO: 7835 - DNA, 546 bp, Canis familiaris
  misc_feature (1)..(546): n = a or c or g or t
ttngatttccagtttataaagaaatatctcccaacacccatttctccaacctttagcaataattaattttccacttgattttcagaatattgtcctagttgattttgattagatagaacatattatgaaatttgaaaataggctaccattttaaggcaattggatataaattatgtaaatatgtatgattatagcttttataaatggcatcacataaatgtactagtgacattctatgctagccatactgcagattttctggaggtatgacccaatggtatttttttatgctcagaataaaaatcaactttacacctctccattttttcagagtgacattccaggctccagaacaagtctatagctatttatatgaggtgcccaacactcattcatctcaagtgcttcagtctttcgtttatttcatgcactgtgccttcaaaatgaaattttaaaagggactttaaatgaagttgaatagtagttttaaaaagtcaatctgtgtaatttatgtgaaatctaattgtaatgaggtcctttctgttt

SEQ ID NO: 7836 - DNA, 517 bp, Canis familiaris
  misc_feature (1)..(517): n = a or c or g or t
ggtttcccntgtggctgacgtcttacagaactgtggcatggggtttatggggacgtggtcaagatagcaccttatcaacatgaggacccctcctgctttctcttaaaagctttttgattcattttaagacaactgttgtgaaatacacgtgagatgtgccgtgctagccatcggcgggtgcacagcccagcggcacgacgcaccttcacaccattgtgcacacatccccatcgaccgtctccagaactttccgacttctgagactgatgctctgccccatgaaacnnngccccccttcctccccaatcgctggcgcctgctctctctagaaacgtgaggactttaggtccatcgtgccagtggattcagagggaatttgtcctctcgtgaccagcctggctccctgggcacgcgggcctcaaagtcgacagtgctgccatacccgtcagaacttcagcggtggtccatcgtgcgggtaacgcacgcattcgtctcttcatctgtgctggacacctgg

SEQ ID NO: 7837 - DNA, 525 bp, Canis familiaris
  misc_feature (1)..(525): n = a or c or g or t
annnatcatcttgtctggttttgtcagatctaagtcctcagcctcagtcgccctctccattgtcccattaatgcaccttctccagacctgcctgggcgctgggcggtttctctgcagagtctgctgtgcggactggccatgcctctcccaggcgctttttgtattcattacacagtctgctctgtgtggggcgcaggggcaacagggcatagggtctttactcagttaccaccgtcctccgcactgtatgcctggcagcccctctccagacccacttgtgaggccgcctcgctccgctgggtcaaggtcagctcgccctggctgctggtggcctggacgcgcacgtcgccgaggccgagcgccccagccccgggagcccgcacctggggcgcctggccccgccctccctctttgccccgccccctcccctcccttgccgggccccgcccccctggccccaccacgcccgcaggaggcccggtgatttatgtggccttctgagnnnnnncctataaacccttttct

SEQ ID NO: 7838 - DNA, 627 bp, Canis familiaris
  misc_feature (1)..(618): n = a or c or g or t
atnnnacaatcnnatctattgccngaacaagattccntagctattttgtccatcctaccagttcttcttattccccatcatttgcatatcttcacttgccagattctcatttaagtaaaacatatatgaagaactatgtaagcaagaagtactcctaccctaatcagtcaggcaataaagtactttacttacgaactagaataatacaaaagttacacacgtcaacttgctggttacaagaagtccctggtaaaccccagctggatcaaaccccaaaaaagccacaggtgacaagccctcagccctcaaaaggaactggcacaaagattaaggaagaaaagcgatcttatagacaaagaattatggatgaacttaaatattattacaatggattctacttgctatggattgacaccaaagttgctgccaggatggtttggaggctgctgcatggacaggtgctgaccagacgagaaagacgaaggctcttgaggacttgtgccgattttttccgcctggttccatttatggtgttcataattgtacccttcatggaattcttattaccagcatttctgaaattcttcccagagatgttaccatcaacttttgannnnnatccaaaaa

SEQ ID NO: 7839 - DNA, 589 bp, Canis familiaris
  misc_feature (1)..(589): n = a or c or g or t
ctgcccacnnnnaggtggctggtgtgaacgttggtcctgagctgttgtnnactcgnnntctctgtnnaggtgccacggccacggctctgcacagggtcatcggggagtgggactcaggtcacgggcagacaccactcacatgagcactgagtctctttttagctcaatgattttctcttttacttcagtggagatgaggtgttcctgccccagtgtggtcgctgctgcccagagcgggggtcaaggcgactccacgccaggcgctctgggtgtgcagggagccccgccggagccagtgtgatgcatccctgctccctcaagatgagtgacttctggctggcaccaagagggttctcgttggggtcaccgtgggtgtgcccggctgctatgaaaactgtggggaatcttggcttcggttttttattccatggtaggttgtacagattatttatatcatcgttttgagggactaatgaaggtttattgtaacataagattataatagtgaaaccacgggattgtatgaaaatgctacatgaaaaataatattttgctgattgtaaatttttgtggggaattttgtgataac

SEQ ID NO: 7840 - DNA, 619 bp, Canis familiaris
  misc_feature (1)..(619): n = a or c or g or t
agagacacccaacccaaagcccaatgtctnnnnngnntcacatgtngcatttctggcactgtgtgatcctccctaccgtgtgggattattctctgccctctgtaccttagnntctggggtccttatacgggcctccggaaaacagccacaggctgttactttttatggctctaagtgcttctgactattgaatccagtccctgataacattagcctatcagagctgttccttccctgaagctcagcctgcctctgtctcgcagagctgacattctctctccagcacaggaggcactgtgaaggagctgccatggcatgagatcagcaaaaatcctttgtccctagttggctttctaccctttccctctgaatctcctttgcctggctggtttccactgaagaactacctgccttcctgagccaccatggggaagagtctgattaaaattcacaccagagttcgagttcagctccggttgactaatcactgccttcggccactgagtgtgcgcatcctgaggatggggccccggctccagggtaggctcctgaccactgtgccccccggcccacagagatcccnnnnngggcaagggaatcagctggaacacgtccaagg

SEQ ID NO: 7841 - DNA, 486 bp, Canis familiaris
aggtgtggctcaggcaccaaaccactgagccacccgggctgccctcctttgtcatttctgtgcctatttaatgtttccctaatgtgtcacagactaggaaggatgtagttctgcactagcatttatgtatttaaatttacatctgtgaatttaccatacaaaattgtccagagggtctgtcgctacatatgtatgatgctctgagagatgtcagcttatgtgataacaggtgcaaccatagcatgttggatgtgatgatgtatcatagatggtttttaggtgtgtattgccctatatttattatcaaaatatgagccagtggttaagatgctaagttattttctgtttgaatcacaactgtactgattctgtgcaatcaaaacaagaggcagaatcaaatgctgaggttgataagtttgcagctgtcaactctaaccctggatttctgatatgtgtcatcagaacattcagttctgaacgtcattc

SEQ ID NO: 7842 - DNA, 243 bp, Canis familiaris
  misc_feature (1)..(243): n = a or c or g or t
aggaagcaagggccgggagggcnaggcagtgcgccagaagagctgccgctgagctcggtgcagggcagagctggggagctggcnnccgtgccgggcacatgttccagacactttacagaactctcctgagacctttgaaggagattgaaagacatccaaatggggcatagtcgcacggtggacggtgggcgtgctgatcacttttctcactgctggttacattccaccttattttatagcttc

SEQ ID NO: 7843 - DNA, 567 bp, Canis familiaris
  misc_feature (1)..(567): n = a or c or g or t
acnnnagagcccatctgctgtaacattttgtaacatcttngtaaaacttgaccacaaagtctgtctgannatctcataatcgtgccaagataggcagaagtggtataaatgcctccactgtgatgtctgtaggcaaacccgttgcatttgtgtntgcagttctgtcttcaacatgaagcctcttttttctcctcttttcaagatcagtgggtttgagggtactttccacagaggtttcttagcgttgctcgcatctcttgtatgtttgccatggagccagatgtgccatcgttgagaggccataattagcctgatacgctgtgataaagtctcgagatcttaggccaaaccgctgtgtctccagggtgtcagccagctgctacccgaaaggtnnnnnnnctccaccaggatccttggtgcctctgtatggttctccattcacaattgcttatttgcacattcctcatccgggtacacttgaccgtgaacaacacaggcttgaactgcataggtccncnnnacataatttttttcccnnnannnntnnnnnnntttggagatttacaa

SEQ ID NO: 7844 - DNA, 615 bp, Canis familiaris
  misc_feature (1)..(615): n = a or c or g or t
cgngtcccatggnctccgttcgtcggcgctgcctcgnnnggnnnnngcaggcnntcagcgccctccccgggcgannacggntaaaagncgtggcctttcgacacagagaaggtgaaggcctgagcacgtgtttttaancaggccggagcatgttcctctcagttccttccacgctggtttccaacttcctgcctcctccctcagactgagcttgacggtctcacaaacctggccagacagcgtcacagaattgttgagctgctaaggccctcgcgagctgctcatctgatgtctcttttgtttatttctacagatgggggaggggggcgggggcgcgggattcgaggtccttcattgtgggggctgttgtctcttggttgtaaatgtttcccaaattatgacaaaaggagctcaaggaaaggagcttggtgacaagccgttcagaggtccttggggccgtagcgcagatggacaattggaaccactggacctgtgctgaacactgcatcagcccagcactgtgctaggcactggggcagagggcactggacacgtgagttcctgccctcatgggctttataccacaatggggggaataaaacaatgaatctttat

SEQ ID NO: 7845 - DNA, 141 bp, Canis familiaris
aaccccctctacccacacccccacccacaccccaatctaccggtaatttgccagtagtttggagcattctctttaatggcatttgctttactgaaagtgttcggaggacctgcttctgctttcctactctagttcctaaaa

SEQ ID NO: 7846 - DNA, 580 bp, Canis familiaris
  misc_feature (1)..(580): n = a or c or g or t
gggatggagtccagttccaagcaaaatggaaaaaaaaaaaaagaagaattgctgggttattgtcagaattaatgaaagttgaagaataaaggacactttggctagtgaggagaaatagcgaaaactcaagatttgtgatacagcttgaagacatggtgggaggtgagagaatggacaaagtgggttcagtggtggtgtctgagaaggggcaagcgccggcgcgaacgtgaccagatgagggaagtgtagtaccagtacgctctacatgaggacaattctgacccactgttagaaaagcaaatagtttgaacagtttttttttttttttcccaaaaagcaaagataaacttgtttctttatagccatgttttccacttaagctttttccttgccttttcacaaacctttcatgtggtcccaagagggcggcctcggggctatgttaaagatccatacctcatccaaagaatgaaaccatgggtccctgagtggctcagtcggttaaatatctccctttcggctcaggtcatgatccctggggtcctggggtcgagctccntttcgggatccctgctcagcg

SEQ ID NO: 7847 - DNA, 575 bp, Canis familiaris
  misc_feature (1)..(575): n = a or c or g or t
agtggggtgaannaagannggtaatatccagtgattagtgagacaannaaactgacatgactaaagaaatttcaaagaagggaaaaacccaactggcaactgtgatgaggangttagctcagaggcatatgaaaaaatgttctagaagtggcaggtaattgagaagtgactgaaataacatttctgaagaacattgctaaaccattggaatctcataaaatcctctctgtaattgtgttttacataagagtaacggttatttcaagcttaccagtaaacttggttgtcgaatattatgccaagaactgcagctacactaattgcatatgctgcacagtctctgaataggggccaacatgatagcgttgagacctgtaaaatgacaatttactgtttccattacactgtaactttgagtacatgcttagcataatactggaattgtatgtagttaaatattgttatcttttgcattttgcttagagaaaaaggaattttaagaaaaattgtgtttcaaaacctactctggttttcataaatttgaccaagagctatttgtgggttaactttaaatg

SEQ ID NO: 7848 - DNA, 221 bp, Canis familiaris
  misc_feature (1)..(221): n = a or c or g or t
ctgactacctggacgacttcagcgggggcagatttgtgttcntnnnggaggggaccaacaggacggtggagcccagagcaggtcgggtgtccttcttcacctcggggtcggagaacctgcaccgtgtggagaaggtccagtggggcacccgctacgctgtcaccatcgccttcacctgcaaccccgaccacggcatcgcagacccggtgttcacgtagccc

SEQ ID NO: 7849 - DNA, 514 bp, Canis familiaris
  misc_feature (1)..(514): n = a or c or g or t
actccctcgctccatcaagttgagcgggacagtgggcttnnnnagcttgctaatcattgcccccctcactgtagggataactctggaaaccctatatccaaactctggaaattccagctcctgcaagaagccaccccagatggttactacaagaaccaagaacacctgtagctagtcttctaaatctcggtgcccagtgtggcctgtctaccacccctcccccaccaccaccaatatagtcctccttaacctgagggagctttcatccaagcggtgagttctgaagaatcaggaatcactctcatcatccaaggctgccaagatgacccccaagagcaaaacaacacctgaaatatggtagtttggtttttggcttttacagtgtacaaagtgcctttacatgtcatttaatcctcccagcatcactgggacgatgaagaaaacttaaccagaggcacacagcttaaaaaatgacagagcctggattcctgagaagttcacctgctctctgcct

SEQ ID NO: 7850 - DNA, 453 bp, Canis familiaris
  misc_feature (1)..(453): n = a or c or g or t
gaagaccctcctgatnnngctgtggtcctgcctccntgggacctgtgcttcttgagggactctcattctgcagcctgcactgttcctgtgngnanatcttaagaagtaagagagaaagtggtttatccacaaacaaagagaaagcaaccagaaatctacagaatcatggcactctacatcagaactcgtttttgaaatgaaagacagctgagaatggcctggagtttatttttcaaagcacttgggttttgttaacatgagtgnnnntgttcttaagctctccatgctctaaacccttagcaggctcagtttccttcatcgtattctgtatcatattgtacccgtatacttaccgagttgatagctagatattgtgtgaaattgtatatttttagggcacttggctggctcagctgnnnnagcatgagactcttnnnnnnggggtcatgagtt

SEQ ID NO: 7851 - DNA, 542 bp, Canis familiaris
  misc_feature (1)..(542): n = a or c or g or t
gtatgacagnnaangcttttantagatgcaaaaactnnganatngaatcactnnannnnatgcatattttcactatttctaacatgtttcatcagtgataagcatgataatatttatataggtaacacaggagtgannnnaaaaaaatatcattaagaaattgtttacaaagcaacgcannnnnngagtaagcagccagtcaggaagtgacagtacaatattcattcattatttttatcaagggatagccacttcttacagccttaaacttatcttgaaacccaccctggtccctgaaaacacattctctcatgcctcctatctttctatacattgtcccatttccccttcctccctttggaccatgaaactttagaatctcagccaaaacactgctttctctgaatagccttcttgacatttcttgcctactcttgtaatcccccaacttctgcagggcacccacagcactttgtgtatacttccatccaagcagattccattgtctcataatatttattttattaatattacccgacaat

SEQ ID NO: 7852 - DNA, 590 bp, Canis familiaris
  misc_feature (1)..(590): n = a or c or g or t
aannatgaccaagaagatgaannngnnncncttgtccattgggnnntannnnncttttcaannggnnatcnnaactgacagcgngaatctatnnanaaagaaacaagacttttnnncttttaagtgacgtttctgaagaaattaaggttggcagcaagtttgaggcatgtgtcacttgcctctggacactggttcctttacgtttcaatcctagaaagtgaagtggaaaaaactggtgctaaaatttgggtcagagatggcacaggagagtttttgttagcctaaatttcatgtgcttgtcctggcagtagggatctcccttgtaccaagccagagccctgcaaaacaccagattcttcttactacacaggtaccaacaggctggcaggttcctgtaacctgcctgcaatctggtggtgtgcgcagaggtatttctgtttgttgccaacctcctgtttaccagaaggatcaccaaatcgttttccataagctgtcaaacaaaatccacgaggtcactaatctagaagggaaaaaaaaggtttctgggtctttgttttgcttggttttttatatagaagggcatgaaatgg

SEQ ID NO: 7853 - DNA, 400 bp, Canis familiaris
  misc_feature (1)..(400): n = a or c or g or t
aggtcgaggaagaactcaatagtaatttnnctgtaaatgactattacacaacacaccggattaaactcggctgtgttgtattttcgatcctcatgtgaatctcctaattcagtgtaaaggcacaccacagagacagaactaggaatgtctaagaaaaccaccccatgggacagggctgacttactggaagnnnnnnntctggcctcgttgtcatccacaggaggaggcctcctttcagaaagtttttgtgaccctcaactgtcagtttctccaatctctttctctcggctcaggcccttcctccatatctctgcccaggtccttctgcttcccaggggagcttgcttctacatccactgcaatatctacactaggacatgtcttcccacctgaaaagaag

SEQ ID NO: 7854 - DNA, 567 bp, Canis familiaris
  misc_feature (1)..(567): n = a or c or g or t
gaagacttctgcgatcgaggtaatgcttctnnagacatctcggaggtacaaccctgggagtgagagtatcacgttcctcaaggatttcagttataaccgggaagactttgccaaagcagggctgcaggtggagttcatcaaccccatcttcgagttctccagagctatgaatgagctgcaactcaatgatgccgagtttgctttgctcattgccatcagcatcttctctgcagatcggcccaatgtgcaggaccagctccaggtagaaaggctgcaacacacttatgtggaggccctgcatgcctacgtctccatccaccacccccacgaccgactgatgttcccacggatgctaatgaaactggtgagcctccggacactgagcagtgtccattcagagcaagtgtttgcactgcgcctgcaggacaaaaagcttcccccgctgctctctgagatctgggatgtgcacgaatgactgctcttcccccccatatcttctgttttctgaggcacctgcctgcttcctagaggtgaagcagatggagaagggcaaacattcctgggagc

SEQ ID NO: 7855 - DNA, 504 bp, Canis familiaris
  misc_feature (1)..(504): n = a or c or g or t
ttttacatatnngtggttttcccnactnnnnnntctgtaacttagagtntggnnnatttcttagtnnaacttttctacatttnnnngatttctcnnnagtgtgaggnnnctgccttagagncttggctttcnactgaaggctttcccacattcccccatgtttgttcatactgggctctcngatgttaatgttttgtcacacagcaggttctggctccttcttagggcatctcatatccagtccaattgtagatgatttccacagcatgtaccattttgtgtgcagtgaggaatcctctattactaaaggtgttatcatatgtagcatacttgtgaggtttctctcctttaggagttttctaatgtatacaaagtctggaatcctagaagaaggcttttctacaatcagtgtnnncaatttgatcannnnngtccagcaaggggttnnnacttcctaaaggtcttcccatgctatttacatgcatagttttgccttctgtgagg

SEQ ID NO: 7856 - DNA, 595 bp, Canis familiaris
  misc_feature (1)..(595): n = a or c or g or t
agccancttcttctgtatatgaattggcatgatctggtattgtacttgtataggattgtagaaattcatcacaaatacgtaaggctaggctttactattttatgcttatggacattgtatatttgtatcttaagaccaagtagaccaagtggacacggttatctcctaagtgtacaataaacctgcagcggggagaagtctggaaggctccaccaggtactaagggcagcttcttttcctgtcttttgtgcatggctggctcaccacactaccaagtaaggttgcgttctgatgggtaaaacagaggtggcgtacatttgtcaggaaggccttatccattttgattgtgtgacagattgaaaatctattgtttacattggggaatgtatctcagattttaaaatagaagagtaataaacagacttaaaaacaaatactaagatttctacttgttctaggcaagtaaatgaatggaattatctgaactccacagcgctggttgttgagagcggctgattaagcacaacatttggaagcatggttatcacatctccagcctgctgcgtaagtgcagggcnccagtagacaacgtgta

SEQ ID NO: 7857 - DNA, 592 bp, Canis familiaris
taacaatcttgcaaccccaaaatggtgtattaaaacttattgcactctgagattgctgcccttttttggtgattttttttgctttgtcataagtgggcctaggtatattgaaagaaaaccattcaggtaatacattttgtattaacagggctgtattatctaagaagggctacataaaacttttattttatccccactactaacttgaaaactattggtaaagtcattacacaatagactaatattttttaaattagtaagaagacttaccttgtaaaagtaatcagataatcctgatatttctctttcaaaggttaacaatggcacttcttggtcctgagctggttggttcataaaattactactgtacatgttacaatataaactattaataggtttgttgaagattctgggtttcaagattagcttgaaggcaatacatttgctaccatgaatcatgactcaaattatccccatgtgtttactacctgtgtatgaatgcaaatgttgttacaaaaaatatgcttgaaatgtcaacacaatgtgcaattaatattgcattgtcatgcttcagcatgtgatatctgtatgg

SEQ ID NO: 7858 - DNA, 189 bp, Canis familiaris
gatgccatcaaacgattaacaaatatatttaagtactaaaggtgatttttttttaatgacatttttcaaatatgtcaaacgatttaatgcagatgaacatatttctattttaagttacaggggaatctgtaagaatgttcatttgaaacatggttaacctttttcctttgttggttttgactgaattag

SEQ ID NO: 7859 - DNA, 355 bp, Canis familiaris
  misc_feature (1)..(355): n = a or c or g or t
cctccatccacccttgaggcttagtacgaggannaacagccgtggtaggccggtgataaccacnnnnnnngagctgcttcagtactgaaagtgctgcatcacaggtgtcatttgaaaacaaatggagatttgggcaaaaggtttgcaaagcgtgtcgttacaatcattaaaatccacaggtatgttgtacaagnnaggcctggaaagctcgcttagatttcaacaggttttcaacctctgaattttatgctaatcactgtgttcatagagatgtggatgttttttggggggaagagatatttatatatggattaaagcattaaatagggagagtagcagcaaataaccaagtttc

SEQ ID NO: 7860 - DNA, 513 bp, Canis familiaris
  misc_feature (1)..(513): n = a or c or g or t
cccccccacccccacttcaggtcacctctgtttgcaactgtcctagcagagctcaggggtgnnagcaggtccataggactcccannaaacattctatcaggtataatgtttaaagctgattgcctggccaccccccccacccacacacactgccccactccaccctgcaggctggggatccccaccctccagcagtaaaggcaggcacccaggaggggggcacccacagccccttctcctctctgcccgggtctcccagcatcctgtgcagcgcccccaaccttggaatctctagaaacccaagcctgcccaggaaaccgcgaaagaaacttctcccgccgggccagccaggtccgagcgcctgcagacaggccggaagtggaagtccgtcaagttctacaaagcccacgtctgagaaaggcagaggctggaaatacacctccgggacaggcggctggctttggggcggcgggctgggtggatccgaggnnnnnncgggtgactctctccctt

SEQ ID NO: 7861 - DNA, 539 bp, Canis familiaris
  misc_feature (1)..(539): n = a or c or g or t
tgccacactttcagtatataggctgcagnnnctgtttccgtacccctgtggnnnnngtngggtgagcggggtcanngtnnatccacggctcttctgaagggtnnatgcctggtgtgnnaatgcttccctgataccacatcttccaacctcccccagcccatgaggcagcctgtggattcgactggccttgccatctgccccgggcaggaggccaggcttgcctttgttccagcctcaagtggccaggacagaggcagcattggctgccccactttgttgcggacaggcctctgacctgttcacatccactctctccggggaagctgaggggagccgtgtagaatccttgttccatttcatcattactggagtcttggggcagctgctgaaaccactcggttttagtattccgtgcagggagtgtggcagtttcccatggtgggctggcctgggaccttgtgctgtgctccgttctgtttgtcacccaattactgtagatattttctaccttcctgcataacccaggtnccaggatacgt

SEQ ID NO: 7862 - DNA, 576 bp, Canis familiaris
gcccctccggtggccccggggaaaccccagctggacctgttctcctgtatgctcaagcaccgcctgaaactcaccaacagcgagatcatcagggtgaaccacgccttggacctctacaacaccgagatcctcaaacagtcggaccagatgacggccaaactctgttagcctgggactccccgccacgggctttcccttttgttgtacaaaacctaacagaacaaagcaaagcaaaacaaaacagacagaaatttgtaaaatgtaattactgttcaaagaaaaggaggaagagtcttcatccgttggaaacgacaacgttctagcaactgtataaaaccgttgggcatgtttgtgatttctatactctgtcatgaagaagggtctcagcccttggaggagcttggaggggttgcttcttaggcctcaggtgctgtattgtggggggagaaggggagagcatatgcaacgaattgcaaagatctctgctgtgcaggtgctaagattaaacactgaaaagaaggagagatatatgtaatgtacaagcgacactgccatttttccttgtgggaggaaatg

SEQ ID NO: 7863 - DNA, 538 bp, Canis familiaris
cattttggtatataggaaatatataaggaacgttgaagttgtatacaaagatttgtacatagaggaaatatacagagattcccgagtaccatctttatatcatatgtttatacaatttaatttaagaattcattttaatgaaggcagataattggaaagagttcattttgtttgtttttcctgacttagttcacaaagtgtcactttttggctgagcccccatttactatattcttaataatcattgtcatccccttaaatctgtgcctttttcttctcgagcaaagctgtttgagtaaatctgttgaagagtctttgtgtcttgtgtgctttttttgtgttcttattaaaaccaactaaaccctataggaggcagctttatgtttgtgtacaaaatgatggttctttttctcttggtattatagtggccatatttcttaaaatcaaataaaaaggttcatgagtttaaaaaaatgagtttgagaggggaaaatggaagtttccaaagcatttctagttatttatttccacgttcaat

SEQ ID NO: 7864 - DNA, 530 bp, Canis familiaris
  misc_feature (1)..(530): n = a or c or g or t
tgtgcattngnncagaaattcctacattctnnntctcagaattccgtagatcagtattanncctcattannagacaactnngnntcagactgagctcaactaaagagacttcagaggataaactgaagcatagtaagcntgaggttgctgcccagttgagactttcggagatgggatcctttcgtttttaaaaaagatcctgaaactgggcctggccacggccatgcctctctcacaagcacaggggtggagtgcccggctgaggttaactgatggatccaggtaaccggaagctggccaaaaggcacggagcaggacatggggtacactggaagaatttccttagggaaaagatttgtgaacatgaaaaatcctccagcaggaggttgcatctgggaatatttaaactaagaaatgtgctttttagtctcagatggatgatgtgtgaatgagtgaagtgacaggaaggacagattcggtggcttccaaacatttcacccgtgaatccatgatgtctagttgttggggta

SEQ ID NO: 7865 - DNA, 414 bp, Canis familiaris
  misc_feature (1)..(414): n = a or c or g or t
tatatgtggaatgaatggagccttaaagagttaggaggagcnnncagagaatgcctgctcaaaattaatagcnnagcagtttggagaagaaatgaaggtgtcaaagagtccattcacctgagagatgtgtaaagatatacatatcagttgacatttagcttttctgttccttgagtagtttcactcaagtatataatctttcatgtgtgtttcttattagtagagttcactggaaagccagctctccatgttacactaatgacagtttgtcctccttgcaaaggagagacatttctgccacctggcgtgaggagcttttttaaaaaaattatttcatggatttgtgatgcttttgctgtttacatgcagtcccaagaaatggattgttggtgnnnnngaatgggttatggtccc

SEQ ID NO: 7866 - DNA, 623 bp, Canis familiaris
  misc_feature (1)..(623): n = a or c or g or t
gcttctggtgcatctgtgaaatgnctccagtgtttctcatcagctgttcccaccaannnctctttttctacgttggatttctgtctttgtatcttgatctcacgtgtttcattcattttacttttaaaagtttgtccttaaaaaaaataaaaataaaagttggtnntgcgagatgagaggctggtgaagatgaggacaccactggccttccctttattctccaaaggccaccagccaggcctgcctgggctggccctggggaggagagctgagcagccggagggtgcgtttctgggccctttctgaagtcggccttgccccagagacccagggaggactgctcactaatgtgggtagaatgccaagtccttggcagttttgttcttgttccgctgctgcttctctcctaatctcttcctctctcctaaatgggattcttattcactggtgtaaggtcaggctgaaaataaacatgcattattgctgaattagggatgtttttccccctttggcctttttcctcttcccagacagagttcaagtcagtttaagatgtgctcccacctcagtaattctttttgtttgtcaaagactctgaaagactctcttttttatactcagta

SEQ ID NO: 7867 - DNA, 595 bp, Canis familiaris
  misc_feature (1)..(595): n = a or c or g or t
caacannnagaggccaccccccctggccgttgccagagcagggaagaagggtgtgtgtgtgtccaggaannaaaaaaaggtggatcagtgatttttacttgaaaacaagctccatcccttttctatatttataagaagagaagattctgagcgaagcagcacgcgacccaggtgtgtgtgaattgaatggagatgtttcttttctctcttttttttaatttttgttgttttgttttgtttttttctttaagaaaaagttttattttgtttcttttacttttttggtaacaaaaactaaaataaggaatagaaaagctgtttttcaggctgacagtcaattaagggtagtcgaggccgtgcatggtagactaggaatcatagtgtcagtgaggtccagtgagtctgtgtgagtccttgtgtcatcgtttggggcactgttttttatgcaagggcaaaaatctttgtatctggggaaaacaacaacaacaacttttttttaaattaaaaaggaaaataaaagatattgaggtcttcctagtgttacttaaattaagatcaaggtaagaaacattgtaaaaaaaattacaaaagtgct

SEQ ID NO: 7868 - DNA, 503 bp, Canis familiaris
  misc_feature (1)..(503): n = a or c or g or t
tcctgtgatgagtgtttacaaatgttgaactcagnnggttnntgaaacaaactcaggatttacatggcctctttctcacgggggcgagcaaggagggggaaaggggagcatagttggtgcccaagttagaaatgtaaatggaacagaatggtataaagtgaaaaagacgtacccactgcttgcttagctattgttaaccactgttgctttttctgtgtccttccagaaaatattagctgcatacatatacacattcatatatatgcattcagtttacattaagttttatatctttatatttggttatatatttgtatctcaagttttcacaaaggtagtacactatataattggtacttcgacatttccatgttactttttccaaacaggtttggtaaccttctatgatctgcatatgctcctaatactcatttattactcatgttttgtcattataaaatatgctaccgtgaaaattaatacacaccacacacttttacaag

SEQ ID NO: 7869 - DNA, 479 bp, Canis familiaris
  misc_feature (1)..(479): n = a or c or g or t
ttccagggttttttttttttttttcnnnnnanngnctcttagtgttaacactggnnctgcaacgtctctgaggtgcaaagaatgccctttccatgtggggcgctgagtttgcctcttttgcnaggcagttaccatgcttccctgccccagcctgtttcttttggcttgatttggaccacnnnnttctgctacccaggattttagagccccctgctctagaaactgtcgtcagtttaagaaatcattggctccttcccagcacagagtgggggagaaacaggctgcagtacagtagcccagcactagctccacctcggttctccttggagaacggcctctccccccagccccctgctctaggatgacacgagtaacacctagtcatagaaatcagtctctttcatttgttttatattctgttgtacatcattaaagatctaaatacaaaggatatacagtcttgatgaatctaaagtaat

SEQ ID NO: 7870 - DNA, 452 bp, Canis familiaris
  misc_feature (1)..(452): n = a or c or g or t
aaacagggtggtggtttgattttttcctgtcaggcttattaannnatatctttcaaaccnnnnnnctcatttgggtgnnntatttttntngcgacctttgataatcttatcanannnngatannnnnnnntgttcnnnnnnnnnngnnnagaatttcannnntctatgctctggannntaccttnnaatatattaaacattagtggaagttgtggtannnnnttcaattgcaaatgnnnatnnnanngcntnnnnncangcagggcaataannngcccttcatagcctgggnnngatgttnnnnnnnnnnnnntgccaagtttcagnnnnnnnaaaccaagannnagccagcaatctttcccttcttgtggctnnngccattggttgggggttgagacaagtgggacatggaacaggagtttttattgttaatgtatnnngcaaagtgantt

SEQ ID NO: 7871 - DNA, 619 bp, Canis familiaris
  misc_feature (1)..(610): n = a or c or g or t
tacatttttnnnnnntgagccatnnnnnagacttgctcntnngtagctcttccaggtgcttctgcatatttggcttatggnaatcacacattacgttcaaaataaggccatacataagactagttttggcaagtactgagcagaagtgacgtatgtgttttatacacatatgtgtcaagaacagcctctgtttaaaatccaggcaatgtttaccactccagatgcctctgcccctgcctcagcaatgaaggatactacgtgctccagatggtacagctactaggtgggaatacctgagaaactctgtggaccagaactcctcctccctaacctcaacctgaactggacctgtaatattggcaaaaaacaggttgagaaagacactaattacagcaagccacccaggttcaggggttcatttggcactgtagcataagcttatcctactctgactgatacaagggtgttgcaaatgcttcctttacatttatttttcccatatataccaaattaatataggttcaccccactaacttagagtagagcactcctatgaaacctttcatcagccaaaatggtataaagggaagaagcaattaccattaatttatatggaaaa

SEQ ID NO: 7872 - DNA, 459 bp, Canis familiaris
  misc_feature (1)..(459): n = a or c or g or t
tatcacgggatacacgcagcagaaatagactgcttannancgtttcgaagacgggggctgtgccccggaccacagcggccgtctacaccccgggaccagaagtacacgtggaggacccgctttcaacacttttcttcctaccctgggcttcagcctgcatctggaggggcctatcgcacaggcgtgggggacacctgggccaccacatccaagctccttgtcgttggaagctgtttcccattggccaccccctgggcctagggcgagggccacagccggctccaccctctgcagaaccgaccctcggggaaagaggaaggccagagaaagcgctggctcagaggaagaaagagacttggagccagagggtcagaacctggccttctaaagcgagcagcaggaccctggctgtcctggaactggggggtgaggtgggggaggagaggatggggcggggag

SEQ ID NO: 7873 - DNA, 409 bp, Canis familiaris
  misc_feature (1)..(409): n = a or c or g or t
aggtagagatgataataatatctannngttaagaataaatgaaataatatatgtaaagttnnaacacagnnnnnnnaatgtaannagctcagctagttattatgaatgtttttattacttcattctcttttctatctcttttggtaccaagacactgtcatctgtacaatacacactgtatgcttggtggataaatcaacaaatgaatgttctccacaataagaatctaaattgtaaaatcagtagacagctagttaaaggagaattagacaacatcttgccaaataaaaatcatacacatatgatttgggccgggaattatttgttccagtcttcattttatagatgaggaaaatttaaatttaaaagtgagaattagggatgcctggatggctcagcaattgagcat

SEQ ID NO: 7874 - DNA, 627 bp, Canis familiaris
  misc_feature (1)..(627): n = a or c or g or t
cttttccctcaatacagggaaagantagtaagangagccattgcttccctcccatgaacagagaccanngccggatcatccacgacctggcccaagtgtatggcctggagagcgtgagctatgacagtgaaccaaagcgcaatgttgtcgtcactgcaatcaggggaaagtccatttgtcctcctaccacgctgattggtgtccttgaaagggaaatgcagtcacggcctccaccaccaattcctcatcacagacatcagacagacaagagtcctgtgagcagtaatttacagaaaatagccaaggaaccagtaattgactactttgatgtccaggactgagaagatcaagatgcacttagataaaagaatgattaggtgtgatgggactcgtttgccagcagataaatcatgcttgttcctaactctctggtggactcacacacagcctcagatactatcttgtactgatacatccaaagcatgagtgtatcagaaatccttcatccgctattccgtctgtataaagtgtttcagtatggccagatctctaattagacggtcactagtgattcagtcatgtatttgcagaggctctgccatcactgcgattgcttagagggctggg

SEQ ID NO: 7875 - DNA, 574 bp, Canis familiaris
  misc_feature (1)..(574): n = a or c or g or t
acacctcagnntctgctgcaagtcaggagtcgagctgaatgacttcactgtctttaccaccttcggcctggcctcagccctgctcctgggtgtggacgggcccctgaacgggttcctggccatcatctatgtgttagctgctactttccgcctgtgcttttactcaactggtgctcagctcacctataagggcctcccctgccgctatgcttcctgtgtcctggcctccacctcccttctgaccaaaggcaacacgttcattctctcttgcatggcctcgcttatgattctcttcatgatggaccagagctactacccgcatgatgaaatcctggagtctgagaactggaaaaaattggtttatctgggaggtatcttcatgctgcttttgtccccgttctccctaactgctttttactgcttgctgtggtcactgtcctacatcttctttccagatgctctgtgggggaaagcagcgtgtctcaggctacagtgcccaagaagctaagcagctttgcccgctgccatgggcctctgcggggtctgtgccagcactgcgggccatgctgggctt

SEQ ID NO: 7876 - DNA, 628 bp, Canis familiaris
  misc_feature (1)..(628): n = a or c or g or t
tcacctgtgtgggcattccaagattcaccaggacacgaaactcaccaaacatgtgcctttgcttaaaaagannctgnagcttttagtttgcagagtgaaagccatgcttatcttcaataattgnannnaggctttctggctgggcaacctcaaaaatcgggacttgcagggtgaagagattatatcccagaactcccaggaaagtgcagccgaggagagtgaggatgataccgcatctcaggtctccaagagcaaaacaacannngatgctgaaaatgatgaagtaagtgatggagaaaaggatcaagatagtgatgagagtgaagactccgattagaccacagagagactgatgtcccctccccatctctgctagcctcttcccattttgtgttcaggatttgaaatctgctatctgccttccttactggaagcatcttgttttgtcattaggagggtgggctttactgaaccaacttaattgtatatttcataggttatctaatatcatcaagaccctanctcagggttccactgtagcattacctagnagtctgggcaaacatggactgttgtgctgtgaagagtcacaatnctgggctttgggagctagttttgaaactcagaa

SEQ ID NO: 7877 - DNA, 630 bp, Canis familiaris
  misc_feature (1)..(630): n = a or c or g or t
agtgtgtcactatgcaaggccccgaggctgttggggactcccctccagcttgccggggcccatccagatgccaatctctggggctccccctctacttctggtttttctgttgaggatttgcaagtcctctccnngactcttccccattccctccccagcttcagcagccacaacacatcactgtcatttggatgttttggtaactcaagggccttgaaatgaatttgaacctttgctttcactcggagcacctgtgtgcactggtaggcctaggggatagtatctctcaggtgccttgagagttaccatttctgtccatcttgatcttacgagactccctcccaaccagatccaacagctaggatcaagagtttacccgttggggtgagatgggtgtctgcacctggctttgggaccacattaccctctggcaccccagcaccactgggagcctcaggagggataccagatttccactcctacccctttcattcccacatcacagagaacaatagtatttcccctctgtctctccctgacatcggggagagcagactgtacacatttatttcactagggtccaaatacggaaggggccagcctaggggtatgcagctccctgatgggtct

SEQ ID NO: 7878 - DNA, 524 bp, Canis familiaris
  misc_feature (1)..(524): n = a or c or g or t
ttttcanngcatttaaaaatgtaaaatacttgcatgnnaccagttgtaatatcttaccagtttgaatgcctgtaatgtgtgancttatgtgtacctgtattgtttttgaagaaaacaaangaagtaatactttgtaaactgtttaaacctatatgggcaacatttatttggctaagcagttatcaaaaaattcacataatttcatttttcgttttgaaacttttcaaaggtagacatttattcactaaggaattaaagactaatttgcctttaaatgtgaactggacattgtgggaaataagtgtgtgataaagcaaaatgtatgaagtgtgaaatccttttaccctcataattaataagaattccagttgacacaaataggtgcaatgtttgaccctttggaattagccagccagatgtaacactaaggtaaatgtatactgttttaattcatcaagatctttctgctttcaaagatataatgtattcacttatgtctggaataaagtttccaagtgtaaatg

SEQ ID NO: 7879 - DNA, 445 bp, Canis familiaris
ggccaccccagggcccctcctcgtcccctctcccggttcacagtgagaccccctccagggtgggcttgaggagggaacaactgttcgccctagcgccctttacacccactcctagggagcccccaatactgccccccctttgaccggaatatgtactgtgaagagtgggggtggggagggggtctgccggcgtcctgcccccagcactgccgatccctcactctgagctgggggaggaggggagggggagaggagggtctgtgtccgctctgcgggagggggactagcaccacctccctgatgccctcccccggaccagaccagctacagggctgaggcagaacgggcaagatccaccacaacctctgccctgcctgccctgggggggaccccgacatccaggcgcccctatcatggtgctacaggccctgccctggggcccaca

SEQ ID NO: 7880 - DNA, 389 bp, Canis familiaris
  misc_feature (1)..(389): n = a or c or g or t
tccctcccggggatcaggnnnggcacagaagcannncgttttncnannnnaaggacgaacttctcttccaaggggatggagagtgggtccccggcagagcccctccccagnngctcctccgnngaggcaannnnngngagagcctcacactttcacttcnnncnnnnntncagaggaaagcagttttcttccaggaggccaaaatnnncngcnnnnaannnnncannnaatgtagnnnctgcctaacatttccctccnnnaaggccaacttgctgccgaggggggaggtccctctcccttctcccttcnnnnnggtgcattacaaaacagtgttcttttgaaatgttcatcagaaataggcttttttaaaatgttgtgtatctgtatat

SEQ ID NO: 7881 - DNA, 656 bp, Canis familiaris
  misc_feature (1)..(656): n = a or c or g or t
atgcccagcntnnagcccancacagggcttgaactcacgannngagatnnagatgtgagctgagagttnnnngcttaactgactgagccatccagacntttggccttagcgaccnnnctcaggcgctggtggntgacggtgcatgcgtggatggtgtgtgcttgcgagggagctgacgctgaaacggtcccgatcacccctggagaaagtgcttctgtctgagccgtgcctgacaccacgacccagtcttttctgggtttaaagggccttcggaaaagcagccaatttaaagtgcagggccgctgtcagagctttcagagggtgccccctgccttcccccctgtcttggagcaagggaggtttctccatcctcacgtcctggagagagaggttcttgggcttagccctgtgtttctctaccagcttcctctgacctccgtctggacccttcctggcctggcatctgctcctgggcatgtcagctactgacacatcacggtggtgtacctggggctttgctgtcttggtaccttcagggcttggctgtcctccctcattgactcaaccctgtgtcagacctcactgaacgtcagccacgtcctccatctggtcacttggccattggagggccacccaaggtggctccatcctatgcc

SEQ ID NO: 7882 - DNA, 551 bp, Canis familiaris
  misc_feature (1)..(551): n = a or c or g or t
aagctcaacannnagnnagnagtatgtggtttaggggaactgtatgacaaatgtaaaaatctaaggcaattttgtaaatctttgttnntagagcatagatatttttgcctttttcaactagtagattgaacttttcttaaaactttctttcaaaaaaggttagtttttgtcctttaaaaaaaaaaagatttgagagagagcaagcgtgcgcatgagcagggggggcaaagggagagaaaaaaatcccaagcagaccccacactaagcccaacacagggcctgatcccacaaccctgagatcacgacctgaacccaaaccaagagtcagacccaaccaactacaccatcaaggcatccctgctttttgttcttcaaaagctttgtactttatcaaaacaagtatttttcaggtaaggaagaaaaaaagaaaaaaagaattnnnncctnnnaggannnagtctgtaagaagggagcagatagaaaggagaactttagaaatggttagtgctggactccaattatcttttaatatgtccaagcaaataactcct

SEQ ID NO: 7883 - DNA, 581 bp, Canis familiaris
  misc_feature (1)..(581): n = a or c or g or t
acaaaggcctctcaacacagctatcagctggagtagggatgtggactgccttccaccccatccagataaggttcccctctccttttctcattaannaaggagtcaacccaactgttctgttcttacccccaacctccagtggcgtctctaggcccagctcagattggaagggtggagacggataggcttctgagttggggacttcagacggtagttgagtcttgcccagtcgtgactttctacctttctactgccaccaggtgtgtgcctccgagctgggacagggggtgcctatgtgcatgtgcgtcagttcatggcccacactctcctctgagaggcagtgccagctgcaaagccacagaacagcctggagcaggcacctggcccaggcccagctctgacattaattcacaactggacccaagcaggtctcctctgccttctcctgggtctcaatttccccatctataaagtgcaagacctaagacctatagttctctggaacgacagcccccagtcctcactcaccaaaaaaaataatggggagagggaacaagnnnnagcttaccttttgaaaggtc

SEQ ID NO: 7884 - DNA, 672 bp, Canis familiaris
  misc_feature (1)..(672): n = a or c or g or t
tcaaaatgagagaaatgttctttgaagatcatattgatgatgcnaaatanngtggtcatttgtatggnnttgnnnntggnncatcctatgtacagaatggcacagggaatgcatatgaagaggaagccaacaagcagtcatgacatgaaatagtccttttatttttatttgagctacacacaagcttgtatataggttttatctctggttgaatcccttgaacaatagatactattttttttctttcatagcccattttattttctgcctttcagtactagtatgaccattcctatctcagatcttaataaatagaaaagcattcaggttaaatttggccttaacttaatatacttgttagcaggcatgtgtgacagagagtggggaaagctgcatcgtattgaatattttgataaactttatctgcttgggcttggtttgtttttcccccttcctaaattaactagcactgactgtaatttatttccctgtttcatgtctcccttccattctgcaggagttttagctttttgagattgtggaccatcaattttgcactttagagagtgattctgactcaaatcctctgttttatcagaaattttggcttttcttgctcttagctggaaaaatgaccatctgccaaccttatacagtatttacttgtttttg

SEQ ID NO: 7885 - DNA, 698 bp, Canis familiaris
  misc_feature (1)..(698): n = a or c or g or t
ctgtttctctgcttcttggatgtatctgtcctccctactcaagccaccaaatgccatcagaggaagtttgtttctcaccccttgccaagtcctcccacgggttgatagatgttacaggttccttcatttccacctttggccaggccagtagagggtggcagactgggttgcagcttggatgctggagataagaacactgccctctgtgtgtgtgtgtggggggggcgggggcgttgtgggagggggacaatcctttctactccagtgctgattttaggttatagatgtatcgctgaggttacctggccatgtgggaattcaacacattccatgttcaatcataattgtggtatctccccaaaggcagctggatcctagaatgtaaccccaaatcctgagagtcctgaatggtctggcccctgctgacctctgggaccactgctcatgaagttcnnnnaatgcactgcctcctttctgccctttgactctgccaagctcattcctgcctcagggccttttggctttgctgcttcctccctgcagtgctcctcgcttagccctcactgggtgtagctcagacatcccttcctcttgaggggccgtttcagctgcccttgctaatgctgctcaccctctgtagtccctctggattgctttcctctgctgctttttcttatttaaaagcatttttcnnnnnn

SEQ ID NO: 7886 - DNA, 420 bp, Canis familiaris
  misc_feature (1)..(420): n = a or c or g or t
ggggagnnncagggcccctggcccgcggcccctcccntgcagaaagctccatcctgtgccaccccctcccccagggtatagggtgtccctgcgcagccctcaagggtcaggggaggggcaggggaggggatgcacgtctttcgccccgtgttcctgccactgctttcctgaccggtttggccttgagtacttagcgcgcttcttccccaccccttccctctcccgcactgggccctggctgcctgacaggctctccatgcactttatttatttgcagtctgtgttccaggcggcagagcttctacagcatcagagccacgggctgaatatgatgactgtcactttcccgtgtgtgattaactgctggtcagcgccctctgctcagaggaatgggctcgtttctgctgtcaaatcctgtca

SEQ ID NO: 7887 - DNA, 603 bp, Canis familiaris
  misc_feature (1)..(603): n = a or c or g or t
gctcggggacctccttnnagcccctctgtatcccacaccntgggtggggccgggcgcnnncntgctcannnccagagcgtcgccaccacgcagcctcagctcctgttcgtagtgggacacagcccggcggtggtccttcatgtctcccaaggtggtggccagggacacgtggatgatggccagctcaggccctggcctgcccagcagctccgcgaaatgcagctgcggagacagtgacagtgaggccatggctgccttgtaccttgccggccggaggtgtcaccacccctccccccctcctcagcaggggacgcacacctgcnnnnnntaggcctcagccgccttggggaagtcgcccgccttggagaacaggtcccccagctgctcgcagatggccatggcaccctgagggtcactgccctcggactcctgcagctgccgctgcagctggaccacagccagcactgcgggacagggcctcgcgtgaagggtggtgctgcgtgcgcctgcctctgtccctgcgcagtgccctccggcaggccagccaccctctccannnnnncgctcaccccgnnnnnngagcgggtagtaagaaaatgtacc

SEQ ID NO: 7888 - DNA, 595 bp, Canis familiaris
  misc_feature (1)..(595): n = a or c or g or t
acttcatatctggaatttttnactgggcttcatggnctcaagagctctgcgtttgcttttcaggnctgggcagaagctagtaataatgtgttacaatctagaggccaaaagaaagaaaaacctgggaactatggaaagatggttaaaaacaaaaactggacgggtgaaaaatggctaagagagggaggtcaaaatagatggccagctaaaaggagcagagaatcggaaagagcttcttgtttttaaaaattatcgtcaacaaaaaagttcccactacaaagggatatgtacctcaagcagaaagagcttatcggatgttacaggatgaaattaattgcaattattgccatgcttggatatgtagttaataaatttcagaatactaaagagaatgagaaacgctgtttgcagaataataaaaaaatatagatacaaagaggcaaaaattagatggtaatttttctgatgtcatcttggcaccattctttactgcatagtaggaactgaattcatctcatctataatatgaatatattattggaaattacctttgtaacaaatgacaacacctgacattctcagagtaaagccataa

SEQ ID NO: 7889 - DNA, 554 bp, Canis familiaris
  misc_feature (1)..(554): n = a or c or g or t
ccgagtgacgtgnnncgcctcgtcagcagcgatggnacgtgtnncgtccccccacccgctgaggaagcatggggaccccagccctccctgtgcccctccccagacgggctgcggcccagcctgcgccaccagcccggtcccacgcagctcccagtgtgctcacccacgtgtgcgcgtgtccgtgcgtgtgtccgtgtccgttgccgtgtcgtgaaactgtgcccgtcaccccgtccaaacaagtgaatggccgtcgaggccgcggttatgcaacttccgatgtgtgtcatgacaatgtcactgctttttaaacttgataactctttattttagtaaaatgcccccagagtccacaaaactgttggatttgcagaggttttatttttttggccttagaacctgcggaaattaggaggtactgaccccagtgcggcagccttggcccgggattgcgtttgccttagcggatatgtttatacagatgaatataaaaagttctttttctttggcttattgctctttttttttcccccttcccttctcnnnnnccccca

SEQ ID NO: 7890 - DNA, 605 bp, Canis familiaris
  misc_feature (1)..(605): n = a or c or g or t
tcccacacatactctgtctgtaggaacaccntgtctctcctaatcccatctgcagggtccagccacagggcagcagtagctcctcagggcagtgtgagtgtggttgcaggaggggagataatcagcagacctgttagggagaccactgaaggtccagaagtgggaccctccaactcatctttccagagtgaaggcaatgtgagcaaacaggatggggaccacagagtctcccaagtccgggatgaagtcctaaggaagagcaaggaaaaggagagcactcctgctaaaaggccttcacatcctggtgggatggaggaagacgaatcatcactgaaatcacatagaaccactcagggaggtaaaacagaggacgagagcaacctaaaggggcaaggacatggttcctcattccaggagttagttagcttcagcttcatccaaaaggggtccaggttatctcagaaattgaggaagagcttgtctagaacttggtcaggtggatagtagtgctgttcatagagctgggaagatacaaaaaggatcttcaaattgaacccnnnnnnatgttttttgttgttgttgttgttgttcagatcttcagagct

SEQ ID NO: 7891 - DNA, 484 bp, Canis familiaris
  misc_feature (1)..(484): n = a or c or g or t
gncttgccagctatgtcaaaaccaccacttgtgctcagtttgccaaaatttgacaaccatttannactgtctctgatgaatgccttcaatctgaatatccagaaattgtctgatttgcagtctgcttggaatcaaccacattattggaaggcagtgagcaactggataatcaaaaaaacattttaatttggttatgtgtttttaaaaagaaatctcatttttgccctcattcttgtaatatgctcgggaaaataatattaatttgtcttttctatgcaaacccttagcagttgaaagggaacagaccaggaaatgtgatagagaaggaaccacctgggtagatgttccccttttatcccctgaggcacgattttcaattgttaattttcatttagagaattctatgaggtgcttgtaacagtgcagattcctggacctgcctgcaaacacctatccctttactgaaatgcnnnaattgaataat

SEQ ID NO: 7892 - DNA, 502 bp, Canis familiaris
  misc_feature (1)..(502): n = a or c or g or t
tccatagcctctatgtgggtnnngtgcagttctacaaaaacctctataatngaactcttcaagtgggacccctttggggtncccagtggtgtgtttagagaaacagaggaaagcacagtgtgagcatccaggtaccatggtgctggagagcttggggacttacctgtttcaaaggagtttgaattctgactttatttttcagagatacgatttgttgtatgacatcagaagacatgatttctaggactcaatcagcaaatcagagttatcgtttagctgctgcatcagctttgaaatcaagataaaactgggctcgagttacaagtgtccccattttgatgataatagacacagagaatgcacatgaatgataatacatagaaaggaagcctagacctggaacacacacacacacacacacacacacaaaaatgtgtatattggccgaaaattatagttgtaaccagtgatccagcttattcttttgatattttgaaagtcc

SEQ ID NO: 7893 - DNA, 372 bp, Canis familiaris
  misc_feature (1)..(372): n = a or c or g or t
tcaatctctgccaggctnnnggctngaaatgtctgncttccaaannnagcgattatttcatgttgagctcagacagagaaaggggagatacagatgggagggagggagggagggagggagagagagagagagagagagagagagaggaggctcggagggcgggaaggagcagagggggagggagaagcagccccccgctgcgcagggagctctgggctgctgggctgggcctccgggacgatgacctgagcccaaagcagacacttaactgacccagccacccaggcgccccaagacagagtagattttaatgaatactcttacgagtgcaatttcctggggcacctgggcggctcaactcaaccgagttga

SEQ ID NO: 7894 - DNA, 594 bp, Canis familiaris
  misc_feature (1)..(594): n = a or c or g or t
caccngatgcagnnacctggccagcgtgcagcctgcgaccgccgcccgggtccncgcggcccccctcccctgcaccgaggacaccccgctgcaggccacgctcccctccagtctcgctgagaagggaccgcagagaagcgggcggaaggtctgatggcctggcttggaagccagacctgaagtctgatcaaagcctgcagggccctgccgctcgcccgctcttctgggaagtgggctatttccaaagccgcgctgaggcgccccggccactggccaccgtgggccctcggactctgcttgtgacgctctttcactgctaataacctaagggacagttgtggggttgaggcagtaatgcggcaggagcacttggcccacttcggcttccaccagagccttcccattcgcacgctgaaatattagatgttcagttgggagtccaagagcaaaatatttctgaaattgtgtgtgtgtgtttttcttctaatttaatgtgccagacaagcctccctgtaattaaaaccagaaacaaggaccagacttagacagagatttgaaggctgtaaaattctaggacaggtttatgtaaagcaa

SEQ ID NO: 7895 - DNA, 363 bp, Canis familiaris
  misc_feature (1)..(363): n = a or c or g or t
gtgnnngaggaacacgatgtnnnnatnnnnncagcttcaaatgatgtataaattgaatcttagacaaccaatccctttgatcatcgacaaaangcagatacctgcctctaccgaatttgttcaacagccattcctagagctgctaatagaagaagacagnaagtctgacacattcaagaaatntcgacaagatcaaatgnnngctatctnnaatactgatctgtcgacttcaagctacccaataacagagaagacatcaatacatttgctctgggcccagctgggtgggtacccagatattcctatgctactccaattagatgttcaatctaccttcagaaaatctcttgcatccattaaatc

SEQ ID NO: 7896 - DNA, 567 bp, Canis familiaris
  misc_feature (1)..(567): n = a or c or g or t
caaactctcgctgatttacaatcgtcatgttgttgccatagtagcctnctcacacgtnacactgtcggcctctggtttccctgtcccccaaaagctgttgaaccacagcatcaggaggcctgaaaaggcccagggcagtagccacagccttgtcccaagttctctggtaggtgcccctcctgatgactgtgcgatggaagccagttgctctttgtggttgctgctctggccttgagtgactgtccacaagttatttttttctcttaggagtgataccttttctgcatccatgctccatagagtctttcctttgcagacatcctggaatgaaaggatttggcttctactatttttattaaactgtttttttttttttttttacatctgttttctcccttcctaggctatgaagcaatacagatagttactgcttttatccctctcagatccctttcnaagaactgagagcgaggggagggcgtcagatcgcttcctgcaccaggaacagagttctgcaaagggtctannnncgctgctgggctgactcttatggggtgacactgccct

SEQ ID NO: 7897 - DNA, 705 bp, Canis familiaris
caatgacaagcatgtaatgagtcgtctatctagcacatcatcattagcaattgtccattctgtttccacaagcaatataattggatttactaagcatgtttatgtacagcgctcaaactctactggtgggcgctctcaaaactcctggtttcgatctatccgtcattctgcctcacgagctagtttttcagagatactaaaaggaactattgatttttcaaatttcaaaaaaagtcctatccaagtcatctttgatatttgtgaagaattaggagatatgccaaccagtaatggaaacaagcctcgtgaagtttaatggtatcccatctccctcccttatcagcctaccttccttctttgaaagaagaagtcatactttaagcagatctacaactcatttgatatgaagcttaaaaaaagtcttaatttaaagcaacttataaacacttcatgttcaaataagaaactgacttaaatggtacttgtcattagcacttggtgaaagctggaaagaatatagataacactaaaactgtcatttgattttcttcttgaatgagtaaggttaacctcttacatatttttgagttaattcatgtaaaaattatattgattttgatgtaatttttctcttcactcgaatccttcattctaagaccaataatttaagttattcatattagtagccttgcaacttgataatag

SEQ ID NO: 7898 - DNA, 590 bp, Canis familiaris
  misc_feature (1)..(590): n = a or c or g or t
gctgggacattnngcgagggaagctgtaccatcagagcaaggggcctggggccnctcagtatccagccagacctcacggtgagcagctgnnagtgccggagaggctgctggtggttctggacatggannagggaactctgggctacgctattgggggaacctacctggggccagccttccgcggactgaagggcaggaccctctatccggcagtaagcgctgtctggggccagtgccaggtccgcatccgctacctgggcggaaggagagcggagccacactcccttctgcacctgagccgcctgtgtgtgcgccacgccctgggggatacccggcttggccaggtatctgctctccccttgccccctgccatgaagcgctacctgctctaccagtgactcctatgataccacagattgcgctggggccttactacccatcccctggggggtggggaggcggcactgctggcctagaccagctactacttaaagccggtgaggctgggcctctaccccaacccaagctctggggatccagcagccccgagccacccacaggggtggcagggagggagctattatttgagg

SEQ ID NO: 7899 - DNA, 452 bp, Canis familiaris
  misc_feature (1)..(452): n = a or c or g or t
cgtgactcgctcaaggtcacnnacagcntgcgtgactcgttcaaggtcgcaggtcaaggtcgcagacccagtcactgccgcatcaagtgttcaccttctcatctgatgttgggtcctctttgccctttcttagagaacaagaattagtagtactcgacattaggatttgtctttcattttaaataaactgtacttttgaagtaacgtctgtaggattttaagaattagcatatactttgactctgtgtgatagcatcttctgtaatgtatggcttttttttttcttttttaattagaatttttttgaatttagaatttcttcctcactactggcgagagagggtccaggcaaaactgcattttcctttgcgcctcttcattctcgtttcaaaatagaacatttccaaatacctgaaacttcatgctgctcnnnnatgctattattcaggttt

SEQ ID NO: 7900 - DNA, 663 bp, Canis familiaris
  misc_feature (1)..(663): n = a or c or g or t
ttacnatngctcttgcttnaggccaaggnntagatttcctnnatatgattcaaatcctgtagaaaagcagtatttnnacactttccctttgaggcatcagaaattcagcctgtgcctcttactatggggttgggatattttcacagcatagcctcctgttccacctccactatgggcatcattaacattctccgcaccagtcagttcctaggccttaagcccataccccttcacctcccctaaataggctgccagagccccacagcctaccttatgagaagcagccaccggggcatgttgcccctgccgacagctcactgttcccattcaaagcctctgcttcctctctcctcctgctaaatctgctgtctgttacataagcaattcctccccttatgctacattacacatgagccccgcctcttccttgttgttcatgactagagatgcaaattgctgcagcctaaccccactcttatcctcaaatcctatcccccacccccaccccagttatgaataggctcatagccagcactaaaatgtgcagagacctattagggggccagcgtcaaaccagagctgggaagtatccatgatatagtttcacaggagggaagaggccatcctcagagtaacagctaaaggatatgtcttgggttgatg

SEQ ID NO: 7901 - DNA, 561 bp, Canis familiaris
  misc_feature (1)..(561): n = a or c or g or t
tttggtgcttaatttcacatttgnannaggtctgnnnaagttcagatcaaaatgttatatctgtnnnnnnnaaaatanctcatctccatggctgtacattannacttaaaacatcggnntattgtttttggactnnaatcatggctgtttaagtagagcaaagcagacgtttgagacctagccccagatgacagtacttaacaagccctggtgaaagtaggagggactggagacattatagataaaatacagaaattcctagagaaagctcttgattttttttaaagtaactttttactaagtatatattttacaggagctaaatttttttttagaaaaaagttagatctagagtttgcaggataatttggaggctgtgagtcctctgtaaatggaaattattttttgaaaggagccaaaaactaatttagaaagtaagtttctagaataaattctggtatttggtaaactaggttctatgtacatggctatgaagtaaatgatcaattatgttnnnancacaaagnnnnntattgggggattattaagggttccgctgtc

SEQ ID NO: 7902 - DNA, 134 bp, Canis familiaris
  misc_feature (1)..(134): n = a or c or g or t
tgatttcgactcaggncttnnnctcagggtcatgggatgnaggnntgggtggggctccccgctgagactccccctccatccctccccgttgcttgcttgctctctcttgcatgctctctctctaacatagattt

SEQ ID NO: 7903 - DNA, 522 bp, Canis familiaris
  misc_feature (1)..(522): n = a or c or g or t
catatgttttggatcccagancaacantagncntgcatgttcnnactaaacatgaaaaaaatcccagtcnnnaatggcaggctcaactctttcaagacctccctctcaggaacatggtaaagttcagcaatgtcacaaaattgtaaatacacgaggattacgaaagaaatgttcaagaggtcacagtgccctcattgaataccatacaacataggacagcaaatgggaacaaacctgataatgaggctgctcaccctgcttactataaactgagcaatgcaaggtggttcagttataatttgcaagttcttgcactgacagcttcatttcaaagccagcctttcatctgagaaggtggaactttgacggtgattactaagcagacatgagttgagtactcttgcccttctatttacttcctcatgatcagatttggccaatcttaacccaaacaaagaagctaatgccaaatgttataggtattttcctctcattcatattctaattnnnnnngacatatat

SEQ ID NO: 7904 - DNA, 520 bp, Canis familiaris
  misc_feature (1)..(520): n = a or c or g or t
ctgtactgatcttctgaaggtcagataacacactggaaactgngtnntaccaaatccccaggcttggggtaacagctgtctacagtggnctcatgaactcctgggcctccctatggctcctcagactagaaattaaaagcaccatcctctgcacaaggccaggctggcgccaggcatacagagctctttgctctcagacgggagggagaccagcaaactggtgaggatgacagtgggaagaacaactgaaatggcacagaggaaagggtatctggtataccagggaagagagtctaagaaagctttgcacaaaagcatctcccctctcagagaagactcatcatgcaaaagttgtgcccacttggttgttatggacacagagtatgccgacaaatcttacctgagtggacagcatacagctcttctccctgcttacctgctgctgatacaagcagccaagagactttcaatacacttcaaggaaacgtggcaacagagagccaccagaagagacttctca

SEQ ID NO: 7905 - DNA, 287 bp, Canis familiaris
  misc_feature (1)..(287): n = a or c or g or t
gannntgctggacaatgcctctttcaccctgtatgagttctggcgggatgaggcctcttggagaaggcaccagcattctgcttgtagtaaggccttccannncatnnnnnnnnaccacctgcgggctccggacaccctcacnnnnntgtnnnnnnnagcctcctggtggattatgaataataactgaacctgacctgcataagccaaggccctggggcccagctgcctcattctggagctnntggactggtcaactcagcaccaagaccaaggatgctgcctctctt

SEQ ID NO: 7906 - DNA, 448 bp, Canis familiaris
  misc_feature (1)..(448): n = a or c or g or t
caagaaaagagattaaaatnnattaaagaattttgaacagaccatgagaatnnaaccagaaaaaatctctagctataaggcagatgaaaatatttttaaatgagtcaaatcatttagattgaagtttttgaaaaagcagcgcacaatagaaattaaggtctcagaaagtagatggcaagcaacaggttatggaatgacaactgacacaactcaaaaagaattggatgaaattacaagtaacaggagcccatggagtccagagcaagcatggtaaaggaagtaagtttctttcccaggaactcaagagaggaatctcctttacaaacccctctaaatttccataacagagatctaccctgtatcttttttttttttaagatgctgtcttatgggggtgggggtgactaggtgatgggcactgaggnnnnnncntgatgggaagagcgct

SEQ ID NO: 7907 - DNA, 567 bp, Canis familiaris
actcacccaggccctctccttgctgtctagacagttgtcaccctcctgccaggccctgaggcatctgctgtccctgcagagaggtccctgcccggccccctggcaccccagcccctgcctctgttcctcaccgacctctctccccagtgtcccctctgccccttctgcctccccccctggatccctgccattgcagccttcgcctgaggaagagcaagacccacgtccccaggacatctcgggccagggcttgcaatgccgagagccaggctctgttagctaaggttccgtcttccactctgccttgctctgagctggacgtgggccgtgggagatacccgggagcagcaggacggtcgcttgccctggtgggtgtgccaacctgacacggagggcaggacacggccccagagtgcagaggactggggaggacagcgtggaggagataaggatgggacccgcctgacttgtctagagagacaaggctgggaaggacggcaatattttgggtgagagagtcaggattcaaagtgctcttgaaaagcgagtgtaatgagccaaagccca

SEQ ID NO: 7908 - DNA, 566 bp, Canis familiaris
  misc_feature (1)..(566): n = a or c or g or t
agtatatctngaatctgaccgactnnnagtagnctccaaatatcgctgctatttttctcatttaaatttcagtggttttccacgtgtgcatcccaagtcatatgccagtctgccagttacctttctgacaggatctgcttgttaaactctttagaacaacgacaacgagacggccctgcattgtgcggcacagtacggccacacagaggtggtgaaggtccttttagaggagctgacggaccccaccatgcgcaacaacaagtttgagacccctctggacctggccgcgctgtacgggagactagaggtggtgaagatgctcctcaatgcacaccccaacctcttgagctgcaacactaaaaagcacacccctctgcacctggcagcaaggaatggccacaaagctgtggtccaggtcctccttgacgccggcatggatagcaactaccaggtagtggggcacatctacctcctgggctcagggggcctggtctctctagggaaggcacaagtaccatgctgctgggctgtgttctcatttagcacgtttctcaccacgtgtcaaa

SEQ ID NO: 7909 - DNA, 552 bp, Canis familiaris
  misc_feature (1)..(552): n = a or c or g or t
cgcatnnnnnancttcctcctgccaatcctgatcacatcggtggatacagacttgccacagccactttcgctggcattgaaaacaagtttggcctttatctccccaaatttaaatctcctagtgttgctgtagttcagtcaaaggcagtggcggcggcagctcagtgatgagacaaccattgagggtggcaaaatggtgccctggagaaagaagcctagaagagcagccctgtaatgtacccagtcagctgcatggtgctggctgagctgaggaggcaaactattctttctatatgacatatacatatatttgtttataaaataatcatttgcccaggaaaaagcaacaatgcagtttcaagctttagtgttaagtgttgagatgttttctaagctctggcatgaattagtgttctagactgctttgcacagcttgcacttatagtgactgtacatattgtacatctttgtacagagacatcttggcacctcatcccaacaaatcacgtttatagaatgtaatgcggttctaagtggcttgaaatgtacaga

SEQ ID NO: 7910 - DNA, 441 bp, Canis familiaris
  misc_feature (1)..(441): n = a or c or g or t
agggaagaaggtggctnngtnctctttccnngnntctgnnnnnaagaagtgcttccacatgtctncagcaacatgccaatgcggcttctctccgcacacctgggtctcctttcacccagaacagaacacagaagcctttttccgttgtatggaagatagtttttaagacacttaactttctactatagtttacagagcaaattattttatttttattgtaaatcttagcgnnnaagagccgatttcttaaaatacgattagaggaaatannnnnnctgactatggaaagttggcccactgaccctgccatggnnagcacctgcntgcaggggtgaccgcaacaggtggctcgctcccctcagcncctcctctgctgggcnntgctgtgtgaggtgacactctaaaaggcaggaagcaatgctgctnctccgttctcccnnn

SEQ ID NO: 7911 - DNA, 646 bp, Canis familiaris
  misc_feature (1)..(646): n = a or c or g or t
ganctgattnggcatcaccaagnnagncttgccccgatcactcaacactgcactcgaatagggaatgtgttctatacacccggcnngtctagagaaacggtgtccacnntnnnctaaagggaaatctgacctcgtcatcttaaaattggtgatcgcttaggctcaagagttgtcggttgttcactgtttctattgagatattctcacaaagagagcctgagatttctcagtgtcatggatctttagatatgagaaacacagactcaacactgaatgaaattgaaagttttgattcaaatacatacatttaaggccaggagcagatggccagttttccaggtcatgctgctccttgattcaagtctgtttctaatcccgggaatgttaggggcaccggggcaccttacagaagccttaaatgagagctcatccaatccagagaatactggtgtcggcgttttggtctgtgtatctgcgtgtccgtgtatgcgtttgtgtgtgtgtacatgtgcccccgtgtgtgggtccagttttaaggcatgtagaataagcatggagtcgtattgagaagaactcgcctcttggagatattgcttgctgctctacaaacacatgtaaactattctttagcataaatgcattcatt

SEQ ID NO: 7912 - DNA, 558 bp, Canis familiaris
  misc_feature (1)..(558): n = a or c or g or t
actgacaatgggaccttcaacctttcggaaggatacactccacagacagacactnctgatgatctcgatcgacccagcgaagaagttttctctcgagacctttccgattttccatctgtagaaaatggcatgggaacaaatgatgaagatgaattcagccttggcttgcccactgagcaaaggagaagaaaggagcagctggacagcggtgtgagaacgagcagagagaggcagtcggcggctggtctcagccttcctctgagcagtgaccaaacctttcacctgatgcgcaacctggctggggacgccatcacggccgcagtgacagctgccatcaaggagcagttagagggcgcgcagcaagcactctctcaggctgcccccagcccaggagacgacacagacactgaagaaggtgatgactttgaactactgaccagtcagagcttgatcaaattgagagtgagttgggactctcacaagaccaagaagcagaagcacagcaaaataagaagtcttcgggcttcctttcaaatctactcggaggccattagtctg

SEQ ID NO: 7913 - DNA, 566 bp, Canis familiaris
  misc_feature (1)..(566): n = a or c or g or t
tccatgcgattctatgtattgataaggggaaaagttgaangtgagtcacgaagaatgggtatgagaaagaaancattctacctggatgtgttatagaaatttaggctggagaggcatagattttaagttaagcttattattgacattcctttttctctaaatacggttgaagtgggagagagagagagtaggaagggaggaaagggcaataaatagtgccataacgtcggattcttccttttgctctgtttttgagagttgatgacttcaggcacttttaggtgtgtggggaaattgagaaatacatggagaatatgaggatacctccccaaaaccaactcaggtgtgtaacccaaggctatgtagttggttttctggtctgctttggcctttcttttattgtcatcttactcaccagcacttaatataagtagatgttttagaattgtgatatttattggttttgtatttgtcatccttagaaatgttaatgatgtatttttatattgataatataaatggatgtataatgtgtgtgtggacttcannnnnnttagagtactgtg

SEQ ID NO: 7914 - DNA, 520 bp, Canis familiaris
  misc_feature (1)..(520): n = a or c or g or t
ttttccttctannngnagttactgaatacttatcattcaataatccctgatcctgttgagggcactcccttttcagccaattagtatggatactgaagacccaatctaatctttttacttctttctcattattgactgatacaaccttggacatttcaatgttctaaattttggctgtgtttagtccagttcagttattttagtagctgtggtctttttttaaaaagctatttgaagagaaaggtaaagatagtcatttgtggaggagaaatgcttttggaagacaaccagtgcaaaggctttattttatgtgctagttacctacaagagcttaaaaattctgaaacacatgtgatgcacaccatcaaataggggatttctgaaattatagttgtatgctaattactcattttaggctctggttttttgaagcagtaaatgatcctaagccctctgtctcagtgagggggaaaaaaaaaacttcgaagtcggggactgttagtcaccaatataggaattg

SEQ ID NO: 7915 - DNA, 641 bp, Canis familiaris
  misc_feature (1)..(641): n = a or c or g or t
accccanatatnngcgggggttcagagcttnnngtctctccacatccctcccccagccaataaacccagaatatttgttacaggggaggggggaaagaaaagtggaaaatgctggtggaaaaacaacaaatattagtttatgaaaactataatctggatgcatgtgatatagaagaaaaatgtactcctgaagccaaagagacctagaatcaggtgtcaacaatgctcctttctagctgtaactagggcaagttatagatgctctgagaagttgtgttctcacttaccaaaacaaggaaggaaaacacctaccctctagaattgttgtgggttctaaatatagagagataatatatgtaaaggcacaaagaggatactaactagccaagtcaacatggtcccaccaacgattgaagactgggtcaatttcccagttctttctgaaggagccagcatccaaggagacaccagccatttagcctgaagacccaatccacatattgtgccccccactcctatgcaagatgctgctttgaggatagctggttctttaatggcctttcttgtgctaaggaagagtttgaggattggaaccaggttttccactcttccctatcatcattattttctagctttggtgc

SEQ ID NO: 7916 - DNA, 673 bp, Canis familiaris
  misc_feature (1)..(673): n = a or c or g or t
tgtanntccccaaatcacaagaccaaagacgaccaaatgcaagatggactctgctcattattctttgagcangaaaaccaagcagcgtgtgtgctttaaatgctgttctgcctgaaaataagaatctttgaattacctatggaactggtgttttcagatagtggtgaattattttgacatttataaagagaaaggatttttggccttggatgtgtcacatagaatggtgtgatgaataggctctgactggggagaagtatgaattttctgagtgtgagaggcacattgaaagaggaacagctactcctcaaaggcaaacaaaatcatctgtactcccacaacatcctgaacagactacctcttctctccctgaatcagccaaactgtaaagctttgagtgatttgctttattgtttaatcttagatcttttattttaatccagcaatattcaggccagatcttttggaaagcagtgatgtttccttctgccatgttcacaagtctgaatattgggggctcaaaattagttttatcttctggttcctgattatacttctggaattcctaaaagtttgcaagcttttaaagcacagatcaattcagctgatgtttctgaagcaatctaactacgatagagtagaaaatgattttactgtcaattgtacactgagg

SEQ ID NO: 7917 - DNA, 496 bp, Canis familiaris
  misc_feature (1)..(496): n = a or c or g or t
acgtccaccactaggcttaagagaatacgcaccaggcattccacctggaaaacgggacntgtctcttgatcctcgagaatttttaccgggacatgcaccttttagacctttaggctcttttggcccaagagagtactttattcccggtacccgactaccaccccctgcccatggtccccaggattatccacctccacctgctgcaagagacttactgccttctggctccagagacgagcctccacctgcctcccagggcagtagccaggactgttcacaggctttaaaacagagcccgtgactctgacctctaacgtgtagtctgagaaagtggactgtgcactattcgttacagtaaaggatttcattggcttcaaaatcaaaagtttattttaaaaggtttgtttttagaactaagctgccctggcagtgtgcatttttgagccaaacaattgaaaaatatcatttcccccctgaataaaaaccacctcataag

SEQ ID NO: 7918 - DNA, 615 bp, Canis familiaris
  misc_feature (1)..(615): n = a or c or g or t
tccttcagaatganngctaatttaattcactatgcacctgtaaccaaatccgnngtgtttgtgaaagcagggcttctcacacttgaatgggaatacggggtacctggacatcttgtcaaaatccaaattctcatcccataagtggggtggggccactgattttgcgattctatcgtgctcccaggtgacattcctgctggtccacagatcacattttgagtagaaagaagctgatttttttttttcaagttagagcagtgcctttcctgtcgtctagtccatggacttagtgcttcaggaaaaaaaaattcagatttctgggctctattccagatctattgaatctgaatctctgaggaattagcctaggaacttgccattttaataacccccttaggtgagtcctgtacatcttgaagactaacttactggttcatcttcaaccccattcctagggtttccgagtcatagctagatgttttgagagttgatttctataggtattatcctaatccaaaggagcaagccaagtactagaggcaacataaaatgacagggaaggtgggaaatagttttggaaaagtaggacacaactcatgaatgaagccatgtctt

SEQ ID NO: 7919 - DNA, 463 bp, Canis familiaris
  misc_feature (1)..(463): n = a or c or g or t
gcancattttccacancagacctgcttggcaccacagggagctctnnancnntgcacaatgacattccaaccaccaccagccagaagttacagccaacctgattgtcacaagcaggaccttgggtccatgggcactgtccgtgatagtaagccatttactgggaggagaggaaagtcctctccaccaatctgcttgggcctgtgcaaatggcacttcagaggagtccctgtgcacttggagtccatgagccaatgggatatgcaaagacgcttaaanatttcagggnnnnnnnntctgttcatatccaattctggtgcttaggaacagggacccatnnngatgcccaagggcaaaaagccccacttcctttaaggaagggggcaggcctgaccctgatgcccaaaaaggggcaaccctaggctttttgtttttcttgcttttattccnnnnnntgttggcctt

SEQ ID NO: 7920 - DNA, 578 bp, Canis familiaris
gctcagatgctgaccgagcccgggagaagctgaatgggacgatcgtagagggacggaaaattgaggtcaataacgccacggcccgcgtcatgaccaacaagaagactgcgaacccctacagtaacggctggaagctaaatcccgtggtaggcgcggtctatgggcctgaattctatgcagtgacggggttcccctaccccaccacgggcacagccgttgcctaccggggcgcacacctacggggtcggggccgggccgtgtataacacgtttcgggctgcgccgcccccgccccccatcccaacttatggagcggtcgtgtatcaggatggcttttatggtgctgagatttatgggggctatgcagcctacagatacgctcagcctgcggcggcggcagcggcctacagcgacagttacggcagagtctatgcagccgctgacccctaccaccacaccatcggccccgcggcgacctacagcatcggaaccatgtgaaagcttccaccgtttccttcttggaccatgaagggcaaaaacaaaaaacaaaaacaaaaacaaaaaaacaaaaaaaaatca

SEQ ID NO: 7921 - DNA, 595 bp, Canis familiaris
  misc_feature (1)..(595): n = a or c or g or t
caagatctantagaaaaagaatccctaaagcagaaggcnnnacaccaagatgtnnnngctgtgcatgccataactcgacctcaacaattacagagcattccatttcaagacagtcagtatcaagataagcaccaacaagaccttaaatacacagatacccaaaaagaagatatgcatacaaacaccatgcaaacagacaacaaatcagaagacatgaaaagtgagagccaaaacctatacaacctgcagatggaagacaaaaagccagattgtaattgttcctcctgccaaagctcagtgcaagacacacatttcacctctacatccgatataaactcagaacaagatgttcagaaaaacatttcaatttgctcaactacataccaagaagatataactttaactaccacctcatgttacccgaaagaccaacagcattctgaagactctgactaacgtgcataatctacccaaacgccatactgctcccaattatgaaaacaaaataagggaaaacaatatagtctcctccaacctatgttctcaagcatagctgctacctttttcactcgcagaaaacaaaggccatgcataa

SEQ ID NO: 7922 - DNA, 627 bp, Canis familiaris
  misc_feature (1)..(627): n = a or c or g or t
aatccanntancatagagactggtatgatttatatngnnnagggtatctatggctatcatcactatatgcaggatcggatagatgacaatggctggggctgtgcttaccgatctctgcagacaatctgctcttggttcaaacaccaaggctacacagagagatccattccaacacacagagaaattcagcaggccctagttgatgccggggacaaaccagcaacatttgttggatcacgacaatggattggatccatcgaggtacagctggtactgaaccaactgattggtgtaacttcaaaaatattgtttgtcagccaaggttgtgaaatggcctctcaaggacgggagctggctaatcatttccagactgaaggaactccagtcatgatcggaggaggagttttggcccacacaatactaggagtggcatggaatgagattacagggcagataaaatttctgattttagatccacattacacaggcgctgaagatctgcaagttattttggaaaagggcnnnnnntggatggaaaggcccagacttttggaacaaagatgcttactataatttatgtcttcctcagcgaccaaatattttttaaagtatctcagactcaaatac

SEQ ID NO: 7923 - DNA, 494 bp, Canis familiaris
  misc_feature (1)..(494): n = a or c or g or t
gcnctgatgaggncngcagcagcaacagcaaggactctggcttcactattgtgagccccctggacatctgaccacagggcccctggtctcttctgtggggattgggcgcccccctcaacagccccagggcccagctgaggcttcctcagcaggagacccctctgaaaccaacactcctttctcagcatgcctgtggccttagtacaacccatcggaaccctctagagagaggcagatggccacagagcacacaggctgatggtccccaaatgcagacagggctttctgggccctttctgcatcccacctcacatttggtctgaggtagaccggggttaagtatccggtatcaggctcactgtcaaaaaaagaccaaaccaaatgagaatcacttttcctctgtccccttctccccagctaagaattaggtatggcagccccatctgttataactagaagaaggaagaagagttggtttcaaatcttccctccct

SEQ ID NO: 7924 - DNA, 400 bp, Canis familiaris
  misc_feature (1)..(400): n = a or c or g or t
gcttcatctgctgcatcctctcccatnnngacaagggcatcatctatggctctgatgggcangaagcccctatctatgagctgacctcttacttcactggttcaaagtgcccttcccttgcaggcaagcccaaaatcttttttattcaggcttgtcaaggggataaataccagaaaggaatagctgttgagactgactctgaacagaaggaagcctatttagaaatggactcatcatatcagaagagatatatcccagaggatgctgactttctgctggggatggccactgtgaacaactgtgtttcctaccgaaaccccatggaggggacatggtatatacaatcactttgccagagcctaagagaaagatgtcctannnnnnaagatattctcaccat

SEQ ID NO: 7925 - DNA, 496 bp, Canis familiaris
  misc_feature (1)..(496): n = a or c or g or t
tcacataaatgaacnaaatcacatgttaaaaaagggaaaacacaatttttatgtnacggtgacaccagcagtttgcatcttttattagtaatgtggattgatgttttctcagagtaattcagtgtcattttcacttgaaacttctgatctacttgtcctgaagaccagctgctgctaaagtaatactagcctaaagataagaagcatttttgatgagaataccctcatgttaagggggaaatgctgttgacctactccgacacgcatctgtgatgttgatagccttgtttcaatttcaatagttgttttggttttcttaattgattttgttaatatcttaacacagggtagggagaaatggcacaatgtgtatcgcattatatacatttatcactgatttacttaatgttaagaaataggtaaacactattaaatacgcggtaatacttgaaaagaagtacttataccgtaagtcttaggaaataatgcttgtaat

SEQ ID NO: 7926 - DNA, 568 bp, Canis familiaris
  misc_feature (1)..(568): n = a or c or g or t
gccccctnncnnagnnnggcggggtgaaccccannantctccttgacttcccgactgtttctcaggctcctggcctggtnnagctcttgctgaaggggcctgtctcgctggcagcaaaagaggcgtctctgcttaagtattaggttttattccagcctccagaagcctcagtctcccgcgcccccgcctctgaagaattataacaggacacaagtcatccagaagcctctggcttcaagaacagctggcttcattcctgaataattccattgataattccattccactgataattcatgatcatcacaagtaacaatcaaattccacagaaggagaattaaaattcgtctgggtcacaaacttggtgcctttctttccagatgtttaaaaggcagagatttaccggcacctgggtggctccatgggccaagcatctactcttgattttggttcaggtcatgatctcagggtcctgggatcgagcccccagtcgggctcagcctcagtgtggagtctgcttgagattctctttctccttgtccctttgcccctcctctcccgcctctct

SEQ ID NO: 7927 - DNA, 531 bp, Canis familiaris
cttcattggaacgtatagaatgctatagaaaatgttgcccttctattagactgctaattatgtacccacctctgatttgacttctccttaagggacaggatttgttgttccaaaggtgatacacttgaagattttacttgaaattccgacgaatacccagatggagtgaaaaatagaaagggttttgtgcaatgactaaaatgctgttaagtttcaagaataaatactttcaacccaagtagccctctgcttgactatatattatggaatagtaacccttaggattttcaaaattggagtctaaactttcaggggaggtgggctcccaggatggtaccattgctctttcctagctaaccctagatatggcagctctttaatgtactttaaaaagcaaatatatattactaaggaaagaaaaagttatttataattgccttgtcataattgttaaggtgttctagagccatttgcatacaatttaatgtaatttcattccattctattgtttacacaacgattactcaaaga

SEQ ID NO: 7928 - DNA, 121 bp, Canis familiaris
  misc_feature (1)..(121): n = a or c or g or t
aagacatgcagctctcatgccctcgcctnnnaaggaagaacatattagaccacacgtgcacataccagagatgccttctagaagggttagactgcttcagaaaaatggccaatgaacatgt

SEQ ID NO: 7929 - DNA, 638 bp, Canis familiaris
  misc_feature (1)..(638): n = a or c or g or t
gacaccatgaactgctgnnagattttacagtagcagtgatgtctctcagctgtacttcaaacttgtctanatgagagtcaaaatcaaatgtcagaangtctactcagtcatttttatttcctaaaattctcaaaatactgaatagtttgcagtgagattttgaactgtatgtaaaaatagatacgtcagtattagaagtcagtgtttcaagctcttagcaagagtggatacgagtctctaggtcctgttaggagtttatttctactcactttgctgacaaggttaaatgaggtactgacctcagtaaagctagaacctctatcttggaagagcagggtgctgtaaactggacttttattttctgctttgtttttattaggtgtgtgagttgatgagccttagagggaggcagctgttttaacagcttcatcctttaaagggtctagagacttcagtgtatcagaccggggggaatggtaccttttctgacaacacacacacacagaacaactgcagataatgcacacatctcaccagcctgtcatgactgtgcagtgcaaacttccccacgtaaattatagttccttcctcccattttctcctctggccctgttagttannnnnttcctgaatggaaa

SEQ ID NO: 7930 - DNA, 579 bp, Canis familiaris
  misc_feature (1)..(579): n = a or c or g or t
ggctcatcttcttgtatcaaaggatgttctttttttttttttttctgatatctcganngtctcnnngcagggtnnaaggaagcattccatcagtgtcagcatgtacagtagttttcttttttcttaccccaacgtctgattcatttctgtcagaggccagaagtcactatcttgtgaaatggtgtggcacccagaagtaaatgttaaccattttggataatcagtggataacaggacatccattccactgccatcctcatacttgttcccacaggccttgtgatctagaacattcattgtggcatccacccaactgtgaggctgtacagtgtctgtctctgaaatctgtacctggtttaccagtggtgctgtttgatcttcacaatgccaacacttactgagcacttatgatgtgtggggcgtgtaagtcataaagaaactaagcacaattagttgattggtgtaaatgccaaaccctgaggcttaagtgagcagtatgtcttctgagcctgtgttcttaacctctttacgccttacgtaacatcttttcaaagaatgaagttttagtcacatcttgaa

SEQ ID NO: 7931 - DNA, 508 bp, Canis familiaris
ttcaagccatctgatggcagtgacaatgagatggagacagagattctggactacgtgtgacacagccctgccaaggctgggcctccttgatcatgcaagactgatggagccaggacaagccgtggctccccagtgctgcccacggtaaccagaacagccctaggagcacccccagaggaaagctggggtcttggcactgggtgcatctgaccctgctcctgcctgtctgcctgtgacacctgctgcttggggttgccctcgggcccccagtgcttggggagatccccaaaggactggcagccatgaaccagtccattgtctagcaggctgggccggtgcatagcacctctctgtggctgaaaacaacaaaagctggaggtggagatgatgtgactaggggaggtgtcagtcttgctttggagcttatgactgatggcagtgatggctgatgaccagtgaggaagctggtccgtggtcacagatgggcgaagactgtccttgggtttgc

SEQ ID NO: 7932 - DNA, 618 bp, Canis familiaris
  misc_feature (1)..(618): n = a or c or g or t
gcccangcagctcacagcagggcatgggggacgatgaggcttgcagcatggacaccaactgatgctgcctccaagatcctgccgccccacagcaccagtgtaatcccccaggagaacatctttgacaccctgaagactactagtgtttggtctaaaaaccagatgaggaaatccccttcttttatgagcagaagaaaaaaaaaaaagaccctgtttgctcagaagggttatgtcaagaggctgaattattttctttttaaacaggtggtgagaagtttttgtaagacctgtagagctggaatgtgggggttgggaggggggctacacagtggagtaaggccgatgaattccaaagaatggagaggaacactgtaattgaggatggtggccatgaagacctacagcaggctgccctgagttcctggatttcttactctggtgctggttcctggtcaccccagcagtctacccacagtaaaccaagcctcaagttcacttgatatccccttctcccttgctgtgcactgagatgggtttataattcccacagaattagtccctgaagcctgtttctgtttcccttnnnnnnntcttggaatttccatccttctctcccct

SEQ ID NO: 7933 - DNA, 401 bp, Canis familiaris
  misc_feature (1)..(401): n = a or c or g or t
actccgtccnnnacgaggaaacccgaggtagcagctgggccggccagaatttccctgatcagcccaccccaacacgnnngcatgggcagcgtctccnanggcggccctcagctccccggcctgatgcccagtctcagcagcgggtcccaggctctcaggatcccagcgctgcaggtcccctgcaggacgccccaggccccaggcccagcgggagtagaggactcgcccagcctggcgggctcccgggtgctggcccccaggccacccatcagcatctcagcgctgctgcagaggcagcatgtagggtctgctggcctcaggggagccgcgcatggaannnnnncgaggtcctgccccccccgtcncgtccgtccacccggggctccctcnncaccagccat

SEQ ID NO: 7934 - DNA, 513 bp, Canis familiaris
  misc_feature (1)..(513): n = a or c or g or t
tcaagatcttnnagacnnnnnnnttatcttaaggacacagctgagactaaacaagcatgtagaagaacactgggtnctacaaccatttatcntgcacccaagattcaatccagtgcttacaagaaggaaaaagactctactttatttgcagctcaaactggagaaaaccctgaggaatcatttgatttggctggtcgcttagaagattatatgaataaaagaagaaaatctcccccacagacaggtgattttagcaaagaagaaaacaaaaccatcagaaatgatcaattaagtgaatattgttccataagaaagaaaaatttgctccccttgtgctttgaggatgaattgaaaaagccaaatgccaagataatcaacattagtccagcaaagacagtaacttctcatatggaacaaaatgacacaaatcccataattttccatgagactggatatgtacaaatgttacttttgacaaaaaatagacttcctctctatcccatggaaaaggaa

SEQ ID NO: 7935 - DNA, 596 bp, Canis familiaris
  misc_feature (1)..(596): n = a or c or g or t
ttcggttcaccggcttnngtgtcggcangacnnatgccccaaggnntcggggtgccacccgctcctgccggccgtgacccgcacacagccttttggtctctgggccagggaggcggtagaagtgagagtctgcagggttccaagctcagcctcccgcttggttcagtcgagtggctgagctgaccgccttggacgtgttcctgcaggtcttccagtttcttaacgcaaaatgcgagtcggccttcctttccaagaggaaccctcggcagatcaactggactgtcctctacagaagaaagcacaaaaagggacagtcggaagaaattcagaagaaaagaacccgccgtgcagtcaaattccagagggccatcactggggcatctcttgctgatataatggctaagaggaatcagaaacctgaagttaggaaggnnnnacgagaacaggccatcagggcngccaaggaagcaaaaaaggctaagcaagcatctaaaaagacagcaatggctgctgctaaggctcccacaaaggcagcacctaagcaaaagattgtgaagcctnnnnngtttccgcaccccgagttggtggaaaacgct

SEQ ID NO: 7936 - DNA, 363 bp, Canis familiaris
  misc_feature (1)..(363): n = a or c or g or t
ctcaagggctcattctnnnagggcacatgtgtcgtgtttctgtgtggggtgttccttcccccttcacgtgctgtcagttatggacgacaccagtttctctttacatccttgtttttttgcatcacttcactgctgcaagttgtttgggatttattaacttgaaagggtgtctctgttttatatagaaacaaggtctccctcctgggggagaagggaataaaggacatatatgatctgcccctccctggaacaatctggatttcacaaagacagtgatcagaagtcaaaccatgttactggaaactcatctggcaattttttcctgtgtgtatgatacaagaactgattcttactatcctatta

SEQ ID NO: 7937 - DNA, 622 bp, Canis familiaris
  misc_feature (1)..(622): n = a or c or g or t
gccaaagaccatcatcaaccaggncntatcacagactcaggtngattttgccaaccacctgcgcaagcacctnnagtccagccctgctcctgaagccagatgttaaggaccagcctgctgctcccaactgttcctagctacactggcttgcatgcttgtcaggaagatccctgctagaagcctacaagtctgtttaagatcttcatctggggactgagaaatgaggtgggagtgtatttatagagtatgatactgggactccgattggtaaaattttaggaccaagaaaatgagggcaaggcttttaagagctttatagcttcaatgattagctgtgaaatgaaggtcaagggccccagcatatttttaaagtttctttctggcccttacatgtctatttaagagcatctttaaaatgctactagctgatacagggtgcagagggcactaaatacagggattgggacctcatactttatgggctcatgaactcctcttccctgcaggcagtgtttgtggacacagctgggttttataaaaggtactctagcaaccctctgctcctctaccagataggtagtgagctgnnnnnaagaccaagcaactnnnnacagcagcaggt

SEQ ID NO: 7938 - DNA, 640 bp, Canis familiaris
  misc_feature (1)..(640): n = a or c or g or t
gtgagnntctgccgggnnngcccaacaagaccaggctggtcacgttcttccagactganntcagcggctacctcccgcagagtgtggtnnactccttcttcccccgcagcatggccggtttctacaccaacctggagaaagcagtgaagaggctttatgactgatgtcctcacctgctggccgagaactccagagactccccacagagctcctcttgttcgggttctggagggctcgagggccagtgttcacccttcagaacccgcttgggagcagctcatctccaagaagccagccagagtggcccctgccaccctgctcctcctcccactcggggctggtttgggggtactgctccagggccctgtttgctggctgtccacaccccagcttgggccagcagacgccagcagatgagcctctttgtgcgagtccctgccagagactacctgccgctgctcccccgccatccctgccctcctttgtcagagtcaccattgatgctgaaaaccaagctctgctgcctttnnngcacccggggctttcccacctatgccactgacctcgtatctatttttctgcaccagattctcccctcttcaaaaggtaatgacnnnnnnaatattgttttaacaaatgg

SEQ ID NO: 7939 - DNA, 541 bp, Canis familiaris
  misc_feature (1)..(541): n = a or c or g or t
tccatttngatgggcctgccttaacattgtttgaaatgcagcgtgagtagctcttttgtttactgtttacttccttgtgccatgtcaatcccatacttcctttattctgttgcctttgcttgagatggtcctgctaactcacaaacctgtttggaaatggcctcaataaacgtggaagaaaatctagcaggttcacttttggaagacgacaaatcggtaaggctaattcatggctgaatgctaggagcagatatgctttttgggtcacttttatttttgaaatggcctttgttcattgtattgtgatccagtaatactttatgttatattgtttagcagccatttctgttctgaagagatagaagagctgaaacttgttttgggattggactcatctctgttccacaatccatatgtattccttcctctacctctccctttcccaagttattatctccaccatagtgtgatgttttgggttgtacattttgtttaaaagattaaagaatttttgagttggcttggacaagtttaattttat

SEQ ID NO: 7940 - DNA, 531 bp, Canis familiaris
  misc_feature (1)..(531): n = a or c or g or t
cnnnngacatcaggtgacttccctctataaatgctagagagctggagcattagacttggaggacacttacaatatgcccctnnaacaccaccaaataaagacctttgtggggggagggtctttttcttctgaacatatattatgaagtctcattcccttggtcctcctcactcccaaagaggcatggggtaaagaggtttgggggcacagtaaagcaacctagtggggactagcaacccctttcccactttatgatgtgtgtggacctggccagtgcccctctgatcataagtagtgtaattattatttactttgtgtatttgttacaccacgtgtgtgattgcctttgtttgttaagggtgattgagaagtatgggggtgacaggggtactggaatgccgggaaaggacttcttcactgagatcaaggcttcctggagggaaccattgcaaaaaggccatcaagcagttttcaagttatgtgacagagggcaaagatggccatagggtgctctgagttttgggatggtca

SEQ ID NO: 7941 - DNA, 497 bp, Canis familiaris
  misc_feature (1)..(497): n = a or c or g or t
tttgttgataaaactcttggcttatataatattccaatttatagatagnncccaaattatatagtatgatatatttttctagcttcaaaatttagcaatatactatttatgataagccatttctgtgtgtttgctatatagtaatacctggtttaaaaaatctctaaatagaaccaaagcattcttagacagggataaacttgctatggcaagatagagaattttttttctcatttctaaattcagtgttgatatgagctcactaaagtgaaactagatatgacaaaattgttcaaggactattccctgttgattactcaaatttcccaaggtattacaaaatccaagaatagtcaacttccaacacttttcaaagggagctaaggagtgaactattttatcagagctattttgctctatgttatagtagatgatgtcaatattttcaaagccacannnnacatcttattttacnnnngtagtctatgtgaaatttt

SEQ ID NO: 7942 - DNA, 437 bp, Canis familiaris
  misc_feature (1)..(437): n = a or c or g or t
gcacgacccacnngcctttctccntggacaaagccatggccctcgtggtggcggtgccggccgccggcttcctggtgccgctgtccctgctgctgctgatccaggcggcgtcggtgagcgcggccgagcgctcctacgagggcaagggccaatacctgcagggatacaaccccttcgaccgcggctgtgccaacaactggtatttaacgatttgtgcaccgctgggacccaagtacatggccgaagctgtctggctgcagaggatggtggggtccgactgggtgcccaagcagaacctgcacgtgccactgtgcccctcggcgctccgtcccccagccctcccagggcccgggcctggcccccaggcccaacctccgggtcnctgcaagccaggnnngggtcccccagggagtggtgngnnngnggccctccaggag

SEQ ID NO: 7943 - DNA, 336 bp, Canis familiaris
  misc_feature (1)..(336): n = a or c or g or t
cgtctgctcccttgatngccgccacctggctgtcatgcctcaccctgagcgggctgtgaggccctggcagtgggcatggcgccctcctctgtttgacactgtgaccacctccccctggctccagctcttcatcaatgctcgagactggacccggaaaggaggctgctgagcaggtggggggtgggagggggttctggggcctgaccagggcctgtgcccagggtcctctgtcctccctgtcctcaaattcagaagcatctcacccgatctccaaatatgccttggacagacaaagggcctaaatgccaagaaaaaactcagctgggatccctgggt

SEQ ID NO: 7944 - DNA, 502 bp, Canis familiaris
  misc_feature (1)..(502): n = a or c or g or t
tttcaatactggnnaatgtaagtgattgacaattcatctctttgccagttgtacatttacagaaatttgaagttgctttaatgggaatttaaaccattgttttcataatcaaatataccaccttctgattctgaacatactttttaaagttaacttcataatgtaccagaccttgtacctgtcattttcccataaagatgatgggatatgtcagctttatttttgaaaactatgtaacataactttcattaatattttttatagttttcagaattagaaatacttaggggaaaatgtttttgttagataattctacttttatgtgtctttagtgatgtattataaaatacaggcaaaatataaagcataaagcattaatatttatgtctttaatttcacctatactatgagtattatgaattatctaattaaaataaagtgtgttgtatattttttcattgcgttgtttgaatagctgaaagcatcctagagtattgatttt

SEQ ID NO: 7945 - DNA, 534 bp, Canis familiaris
tgggggtatgtgaggaatgtgagtcagttcaagaatgaggtcataatgttcactgaggacaactccatgttagcttggagcttaagagggcagactggctgtgtgtgatgggtcatgtattaatttggggcctatatacttgttatggtttggtaatttttttaaattaaatttaaaaattttaatttttaaagctattgtatatactagtaaaatatattaatgaccatatggcttgtatatatattctataacatacataatatataattgtcaaatgtaatgaatgttatataaaatatagacagaattatataccaaggtatattattatattctagcattatgtaatgtgtattatagaatataaatgtggacgtccattcacatttttatattattaaagttaatatggatagaatgctgtaacctatatgtaatgttatattattatgttacaattataaaatttaaaaaatagagataatttatatataaatttatgattacattttatattatataacatgtaat

SEQ ID NO: 7946 - DNA, 558 bp, Canis familiaris
  misc_feature (1)..(558): n = a or c or g or t
aagtatnnaaaataatgaatgtaacacctttttagttcactgattctgaagtgttctctaatactttcttttttacttcacaaaacttcataaaaacaaagggctcttttcaaccaagaacaaagggttttgtcaagggaaaagttgatttaatacccataaatctccccctcaccctcaagtaattacatcctaagatttccacttttcttccaattctgaatccttgtttttccctcatctgagagcaaagttaaagtagacttaaggccattgaaaacaaaaatgttggccaacagctcatcacttgtttgtcttatatttttttactgccacgaaactgtccatgtttctgtgtgtcctccaatccaaacacacattcactgccacttataaagtgaaggatgtaaagtaggatatattaactgtttcagtgaacggattttgtgaagtgccttctgttttagcactttaagtttatcacattttgttgacttctgacattccactttcctagattataggaaagatctgtttatgtagtttgttttaaaaatg

SEQ ID NO: 7947 - DNA, 617 bp, Canis familiaris
  misc_feature (1)..(617): n = a or c or g or t
ctgacgctanggnntctacagaatctgattttatgtacaccagcactcaggagtgagagtgcnntagttcaagatcacaggaagaacgagtagaagtagaaatgatcataatgtgagataaatacaaaaggaacaaaatggatatggttatgcccttgagagttacaagaagtagcagccaatgggaaagatccagaaagacttaactatggattaaggagattctggctctcaagaagacctcacagcccctctagggcaggaatggccccgtcagggagccctgccaagcagtccagcagtcagaggggccccttcctccaggttcccacagcactgctgctcactccctctcaacagactgaatgctaatgaactgagtgaaacgattctcctcttcaggcacttgttcaggctgtgaatgccatcctgcagcacagggacaactccctgctccgagccctgcagcaactgagactctccattcaggacatcaccagaaccttaggacaaatgcacagtaagaggctcttgaagactgagggctctgcctgggacaaaagggcctggaggtttggcgacatccacaagatggtgctggtgcattagcttttttt

SEQ ID NO: 7948 - DNA, 328 bp, Canis familiaris
  misc_feature (1)..(328): n = a or c or g or t
tgcatttacaggctattcattaaatgaaattgtgncttgnntgagtgagttacataaagcatgccttgntataccccatcganctcagcaagcaattagggagaagtataaggcttcaaagtacatgcacnnnnnnctcatggaaccacctgcagttctccctctacaataagtctcttgctgaagtagttccagaacttaacctccacatcaacagaattcatcttaacttttataggtttctgcaggttgggtcaactagtgttgctacaatatagatgacatattttttaaaatgtaaatgtagtcaagttcnnntagattttag

SEQ ID NO: 7949 - DNA, 284 bp, Canis familiaris
  misc_feature (1)..(284): n = a or c or g or t
gtgtctgtcactgtgaggnnaggggtctgtctccatttctgtctctgaatgtgtctttccatttcagagagggcactaaagattctcgttttcgatctttatcaaactcttctcacacaatttacctccttctgttactctgtataaacaggggttggattagatcaggggtttccaaactgaatttcttggctacattctaagttgccaagcagaagactccatagaggtatgtgtcccccccactttttaagattctatccaattattcatgagagacccac

SEQ ID NO: 7950 - DNA, 252 bp, Canis familiaris
  misc_feature (1)..(252): n = a or c or g or t
ctcaataagatggtgacctcctgaanntttnnngattagccccaagtagtccaagctaaagtcctgtggttttatgtttaatggtaatagctgatcgtgtatggcatactttcccatctggcttcctactcagtcattataaacacagacttaaaatagtgttttatgtgtccaaatacctgaatatgctcacctggaggcaattatttcaaggtagttaaattttggaagtagacaaattttgaaaatgat

SEQ ID NO: 7951 - DNA, 457 bp, Canis familiaris
  misc_feature (1)..(457): n = a or c or g or t
gtatttgccaagcnnggtgctaatattatatgaactatcttcaccnataacttaatcctcacttcaatctggtaaattggtttgaaaacctaggtatacagtatttaagtaatttaaatcttcttaactggtaagataaaataatattatctttaaaattttcagccctgtttcattaagtgagagagtcctccaagcacttcataagtggaaaacagaaagtatcaacttatcactaactactgctgctttaagagaccaactaactcgggcactaactatgataggagcatatgaaattatggacaaaataacagctttaaaactttttacatgtgcaattaaattctgaacagtgtacccataataaaagctgaaaacttatgatgtacttatataattgaaactgggtataagagaactgcatgttatgtctcttttcatgcattcctaacag

SEQ ID NO: 7952 - DNA, 120 bp, Canis familiaris
  misc_feature (1)..(120): n = a or c or g or t
gtgttggtcaaannnnnntcataaggccagcccagattcaagagagtgatggaacagactacatatcttgatgggaagaanaatatcgcattgcaannnnnnngagagaaagaaaagtgt

SEQ ID NO: 7953 - DNA, 467 bp, Canis familiaris
  misc_feature (1)..(467): n = a or c or g or t
cacattaagatttcttatactctaatactctagaattatactgaacacattaaacactcattaattcacactgcttgtcccacatttctaattattccacttggactaaattgaagtttattttgctcaggaaaattttgttatggatagctcaaagtgaaaggtggggggaaggggtaccaggctggctcagtcagtggagtatgtaactcttgatttcagggatataggtttgagccccacatggtgtgtagagatgacttaaaaaaataagtaaaatcttttttaaaaagagaaagcaaaggaatgattgaaatattgatgtgaacaagctgttaatttaatgtttgtttaaaagtatttatttaaaaatcacccaaagaacttctgttacattgaatgaataaatattgttaatctttgtgttttttttcaacaaatattnnnnnntcacagaagcatggaat

SEQ ID NO: 7954 - DNA, 522 bp, Canis familiaris
  misc_feature (1)..(522): n = a or c or g or t
gtatattgtctagttctttgtgaattctcannggtgtgagtgtagttacagnnnngtccctcgacatgtgaagacagtagaaaacagcacggctatgccgatngcgggtctgttcttcatcagctcggtgacttgtccgcactccagcctcatagcacttaggtctcaaaaacttgccctgaacccttggagtcattcccaggtgatagaactataaatgctaaatccccacatgccaacggtctagtgtgttcttgtgggtttccttaacagaggagaacatgaagatttccaaactgttgtgggtttttggatggctgagggctcctgggctatatgttcatgtgcgtttgagcagcccctatcctgtactcagagctagaatgccgtggaccacgtgtgaatgaaaacacttctctgtagttacttaaagcccatagtcacaggtggttaaaagaaaagttagccttttcaaagtgacactcttcattatcttgtatggtggcttttttatggctttta

SEQ ID NO: 7955 - DNA, 627 bp, Canis familiaris
  misc_feature (1)..(627): n = a or c or g or t
actgcactcggtgnactgggcagatttgggacaccnnnctgtggagcatatgctgtgaaagcattacgaatgctgctggactgtctggttgttggcagatgtctgtgatgaaaggtttgctttctgatggtacaagttaaaacccagctgctgattggctatttctggtgcagacttgctgcattcctaattgagactcctgcccaaaacaggaggttgggcgagggcatgtcacaaggactgtgaccctcccacccactcctgacagatgggggacatctcagggctgtggattgtgtatttgactttttgtttagctctaatttccatcaataaactcatggcctgactctcctttctggctttctcctgcacgcaccttagtggggctgtctgctaaatgcagctgtcccccaatagacattatcttttctaggggactcatcagatccatgctcagggcaaaaggggtggagagtcatataagtccattttgaacatttttgaaaaaaacatttttgccctatttcctgaacctaatgagtcttcctggataagttgcattaaaatgttgtgggttttttcctgtgaannnncttttgtctttctnnnnnnaacccttccaga

SEQ ID NO: 7956 - DNA, 422 bp, Canis familiaris
  misc_feature (1)..(422): n = a or c or g or t
ttttccaggcgggtnctgatttggggtggattttggttttgtttcctccctttttttttttttttttttttaaaaaaaaaaacgtgttttgnnnnngattctccntnnnnnnttgttcctgatcnncatctnncnngannnacatctttgccttcctnnntnncnnnctttcctccaatcnnnnagtnctcctccaacctgagggggcagggggagtgtggannnnnagccccaggcttaagattccatccactcaccttcctggatcccagaggggggggcannagaagagggtggcatccccagcactgannnagaacagggctnntagggcctgagctctgatccccacctancacctccctttcttccctgctcccagnantgggccacttctgggtggggcagcgggttccagctcg

SEQ ID NO: 7957 - DNA, 596 bp, Canis familiaris
  misc_feature (1)..(596): n = a or c or g or t
gtgtgagtttgttttannagtgtgaaatctcntactgcacaccgcnnngtcatttacccaccaggtcgaggatcatgtgggaaacaaaagttaagaacatacagcnaggcccgtgagctattaatggtgtgagattctcaagttaaaaaaaaagaaaaaaannnnaataagaaccaaatgtgaccttgtgcatattttggcagctgaaattcttttaaggctactgatgggtgaccccttaaatcagtctggtcttagctgcttgcagggaaatgtttctcctttcatgctgttttgctgggtgaagagttattgcaaaaatattccttttgacattacagggattcttgttggagctcctctaccacagaagttaataattgagcaacagccacaagtattgattgtgtccactcaccgttgacaatggcattgaaggtagctagcttccttccatcactacgttttttttgagcttgctcttatgttttaagaggtgccaggggtacgtttttgcactgaaatctaaagatgttttaaaaacacttttcacaaaaatagtcctttgtcattacattatttactcatgtgtttgt

SEQ ID NO: 7958 - DNA, 568 bp, Canis familiaris
  misc_feature (1)..(559): n = a or c or g or t
gattgctanncctcacgtacccggattcagccaaggnccgcgttcaatacttgattgctgttgttacgtgaaataatcagcatttaaaatagtttacagatatttttttgaccagttccttttagagcttctttcagagaagaaaccagatctgacctgtttattgttggcgcttgttgaaaacgagctttctttccaatgataaagcttcatttttgaagtgttgaagctgtgctcccattaaattgtggcaggagaggagattaaggtaattacaacactcagttctttgtcttacaagcactttgtttggtctctgcgagaaaatgccattcccgtcatttcccacgaaatacagacgttttaccgacatactatgctttgatcgaggcagcgttatgctttgggcagtattacaaaatagctggcaagtgctttctgtatttaaatattgtaaagagaaaataagttataactgttataaagcagaacttgcgttgcatttttttaagtgtcgaagtcactttgtatgtttgtttggtcaatgtttccgcagtatttattaaaa

SEQ ID NO: 7959 - DNA, 544 bp, Canis familiaris
  misc_feature (1)..(544): n = a or c or g or t
ttcaatggaaggtgtcactttgacagctttgagtgannnnnncnttgactngncngcagccagtgaagacagcatgtctgtgccctcacctactggcactatgaagaccagcccagtgactggcagctctcagggcagaaatagtcctgttcctactgtaatggctgcatctgtgaccaccgtacaagttactgaaatttccttgcaacaagtgaatcccagtgaaagcttagggggtgcatcgagtgaaagcattcctcagactgcctcacaactagcccttcctccaccaccaaagcccacagttgccagagttgtttcttcagcacgtctggtaaaccatccacccaggccttcagggagtccngcaacaaacatagctaatcctattgtgggagtctaggggacgttctcacctcataaaggaccaaggaaacttgaaaaggaacaatctcataaagagacaagtacaactccattggaaattactcagacagtgctggccttgtggaaaacacccaggacagaactttctaatatcccg

SEQ ID NO: 7960 - DNA, 472 bp, Canis familiaris
  misc_feature (1)..(472): n = a or c or g or t
acccgcaaaattctgtctgcctgtgnnaagaaccccacggatgcctaccanctcaattatgacatgcacaacccttttgacannngtnnngcatcctannngcccatctaccgtggaaagccagtagagaaatgtccgctcagcggggcctgctattcccctgagttcaagggtcaaatctgcaaggtcactacagtganagagattggcagagacgtcattggtttaaggatcagccctttgnanttccgttnnggcccctttggtgtgtgnnggtnnnnnnccatattttcctccggagaagcagcatntnngtccttcnnnngccttcttcctcaattacccttcaaattattgacatttagatcacctgctctaagtcctagtatccctttcnnntcttctnnnnnctaatcaaaanntctacactatttgtcattgtctcaagnnnnntacagttatgatcacagtt

SEQ ID NO: 7961 - DNA, 333 bp, Canis familiaris
  misc_feature (1)..(333): n = a or c or g or t
cttcaatcgggagtgatgaagtgtgacancttctgtganaccacaggatgnnaatgcaaagaggatgtngagatgaacnnacaccaaaggagggctgctgtggtgaccctgagggagtgggaggggnctaggagtcacgttccccaggttcccagttcttggtatctattgttcctctggagggcctgggacagtgataaacagatttgtcgctaatttctaagtataggcagcacgggtttgtggatacgtaaatttaagcattgaactaaaacctttcttggttgtatggttaccttttttttttttttaagattttatttatttattcat

SEQ ID NO: 7962 - DNA, 618 bp, Canis familiaris
  misc_feature (1)..(618): n = a or c or g or t
ccaggtnngcgnctcccgcccccggctccccntggctcccccagtctcccccgattcttcacactgacttcccagccctgtaagtaccannannagaggctccgtcctcccgaggccgcacgtttcgttagactcatagctggatcgagcctcactggaagtgcagtgcctggagggaccagggcgtgtgggtcccatcgaagcagctgcccgaggctgagggggacgaggcccgctagccaggtgctgctgggcactcgcgcctcagctcctcccgtctcatctccaggagcgactccgatgtccggggttagacgtggtgtagacatgaatccagaaccgagagtggctcagaacgaccaatttcaaccgagcacattccctttccttctgtgccgcaggccaacgggtctggacgttgattctgggagtgaccaaactgctagtcttgggtaaatttaggagccgctgaatcccccgttagcacccgtcccgatgctgttgtaaagcttgcgagttacttactcccttgcataaaaaatgctgaaccagtggccctccctttgtcctcgtcctggcagcgatgggcggtgttcctcaatggcaatgatgctgaga

SEQ ID NO: 7963 - DNA, 655 bp, Canis familiaris
  misc_feature (1)..(655): n = a or c or g or t
aggtgtgctaaaattnntntgggaacggngtnnngaaattnctaatagatgtatagttaatttagtgattctgtcgcatgaggtgtaagcttccattatgctggttgtttaacagacttgctgtataagtagaaagaacttggttcaactagatattttgatatgtacgggcattactcttagtggtatttgttgtcctttgttgctcatcctatgtaagtgcaggctgagacctagtctccttgtaagtggaataaaataagccacctgtttttgcaaaccctttcatagggttaaaaaaattaagattgccttttactttggaaacatttaatatttagattcaatgaagttgctattttgagtgtagtattgatattgtgaaaataaatggaatttggatttcatgtttcttgatgttcattcttatttcaccaaatggatgattaaggaattatgcatcataaacaggaatttaagtgagctgtattatgggtgcactgtctttacacacacttttgggtatattctgaatacagggattactcatattttgcttcctaatctttttgttgtacagggccagatttcttgttcttaccacgtgattgtttatatgtgaagcacatcttgctgttgccttattttttgttgc

SEQ ID NO: 7964 - DNA, 634 bp, Canis familiaris
  misc_feature (1)..(634): n = a or c or g or t
gagctcacgcagagcttcatcatccccntnnagcactacatggncagtctcatgccnntgcagaagagcatcacaccctnnaagactcctccccagatccgccccttccgccaggatgacttcctgcgcagcctggagcacgcggggccccagctcacctgcatcctcaagggcgactggctgggcctgtacaggcgttttttcaagtccccacacttcgacggctggtaccggcagcggtacaaggagatggcccacaagctggaggctttgcacctcgaggccatctgtgaggcgaacatcgaggcctggatgaaggacaagtctgaggtggaggtcgtggacctggtcctgaaacttcgggagaagctggtacaagcacaaggccaccagctcccagtgaaggaggcaacgctccggcaggcacagctgtacattgagacggtcatcggctctttgcccaaggacctgcaggctgtcctgtgtcctccctaggacagggtcaagcggccggggccaggggcctgggtctgatcacgcttccttttcctctgacgtggccccagccaagcacaagctccccaagccgagctctctgctgctgctccctcaccttggcgccctgtcagcaccc

SEQ ID NO: 7965 - DNA, 413 bp, Canis familiaris
  misc_feature (1)..(413): n = a or c or g or t
tgtttcatatgaaaagatnnnnagacacatgactgactctagtacacttacaattgatttatataggtncttcatatatcagcancagaactttataaaactgtattctccactcctacccccaaaatctatgaccagatgttgttcttgatggttcttaaaggatccctattaagattcattgaaatgttcccaaccattggcttcccacataaatctctctaacatggtgctaacatcattcctaatgcatcaggtgcatcaggacatgagggcataggtgtagagaaagtaaaatgtaaaaaaatcatctttnnnnnntagtaaattagggatgcctgggtggctctgcagttgagcatctaactttggctcagggtatgatcctggggtcccaggatcgagtcccacag

SEQ ID NO: 7966 - DNA, 554 bp, Canis familiaris
  misc_feature (1)..(554): n = a or c or g or t
cagaaatggaagnnnggtgcanctgaagtgcttgaggctgttcacgacaatttaatatatcctaaccaataaccagaaagttggggccnggcagcctatagaacctcgagagaccctggggagaagtggtcagttcctggggacccaacataagggggaacttttttttccaaacaaggactacatcttggagttgcagatgctcataaaggggatcataagggagatggccagcccttcatcaaaatccctcctctcctaccgtgtccagcagccaacgggaaactgcagattggacaagccttctgtttcccagcctctcagcctccaccccagaaaatgggccaggacttgtgagagaacaaggtatgggccattggagaagaaccccatctcctcgggcacctagctggctcagtcagttgagcatccgactcttcattttggctcaagtcatgatcttggatcatgggatccccgcttaggctcagtgtggagtctgcttgacattctctctctccctctccctctnnnnnnntgcctgctctcatgct

SEQ ID NO: 7967 - DNA, 419 bp, Canis familiaris
  misc_feature (1)..(419): n = a or c or g or t
tgtcgggagcctgnntctttctccctctttctgtgtctctgcctctctctgtctctcatgaataatactaataataaaaatagccaacttttctgagcactcaagttactccctacctataacacaagcacatgtaaaaactgaaataattcctccaagcctttgggcacatcatttggcaagtaactttcaggctgtgcttagtctaagttttcatttcctacagaataagtgttttgagcattaaggagataaatggaggaggtaaatgggttgaggcagaattattaggttaattatttccttgtagaaggaatgcttcaaacttgataaaaggaaataggtgaagatgaccaagggttgactcaaaccactatatcattttcttgataggcttctccnnctgactttcagttgga

SEQ ID NO: 7968 - DNA, 477 bp, Canis familiaris
  misc_feature (1)..(477): n = a or c or g or t
tcaggcgacatctgtcttgacttacttcatattgagaactaatactgtgttatagctgtcacaaaaacacaaagcaggttacatcagtgaagcttttcagtatcttatagaacttccttcaccacatatgaaacaattctgctcaaactgaaatccactttttttttttctgtcttcaggacagatggaaaatacctagactcttttctttaaatttatcttgtaaattttttcatttgatcatttaaaaactgtaaccatagttatttactgtgaacttttcatgtaactgactcaaaatgtaattgtgtttttcttctgagtattaatcttcgaactatgtatttctttggtatatacatattttttttagtgcataaggccccaaaggatatctaaagctactccaaatttgtagcttataatgttaagagtgttaaggtcatttaaggtttcttaaatcttccnnnnnntgtt

SEQ ID NO: 7969 - DNA, 121 bp, Canis familiaris
aagcattttctttccccatattaaaagagaatattgacacttaaattctgaagttctgaaattaaaattacagtattttttttaattgcactgcagtgtacacacattaagtaggctattt

SEQ ID NO: 7970 - DNA, 126 bp, Canis familiaris
  misc_feature (1)..(126): n = a or c or g or t
ctctggtcagtgagggaagggctgggnaccaccctctactcagcgtggacaaaaagttgccacccacttcgagcacatgtgatcnnnaagtgtcagcccagggccagggatnnacacatntntttg

SEQ ID NO: 7971 - DNA, 488 bp, Canis familiaris
  misc_feature (1)..(488): n = a or c or g or t
tcanatagagnnnnnacaatcgcannagctgttgtannaattttgcttgctctagtgctcattgggtnnatcgtcttttgctgtcgtaaaaagcgcagagaagaaaaatatgaaaaggaagttcatcatgatatcagggaagatgtgncgcctcctaagagnngtacatccactgctagaagctacatcggcagcaatcattcatccctgggatccatgtctccttccaacatggaaggatattccaagactcagtataaccaagtaccaagtgaagactttgaacgtactcctcagagtccgactctcccaccggctaaggtagctgcccctaatctaagtaggatgggagcggtgcctgtgatgattccagcacagagcaaggacgggtctatagtatagagcctccatcctttcatctgtgctttccatgtttcttttctcctcttcnnnnaggaagaccattccgttttaaattctgctaccag

SEQ ID NO: 7972 - DNA, 533 bp, Canis familiaris
  misc_feature (1)..(533): n = a or c or g or t
tcaaggagaagatngaaagaanannntaaagannnggacaaannnngaagganannnngtttnctnntgaagctatgcatgcttcnnncgggagaggcatttgtgaggcagnnnggtgnaaatgtggtagtaagaggagtgtctctnnnaggtcatcttaggatnagannnnngccaaagaagtttcaagtngnnnnntgtcacatgtcaaaagaaaactttgattccaaagtgcttttgtaccgtccggnnntatgtgtagcnnngnnnnnnnnnngattgcctccagtnnngggtgaagagtttgnnnnnnncgctcaaaaggggaatctgttgttttgaaagaccctctctttaatagttgttttttttnnntagcantnnnnnnnatgttgtnnnnnnnatgttaataannnnannngcatttnnnnnnntacccattnnnnagtctttnnntncnactaccatgnttcactnnnnnnnntatnttatccttttnnnnnnnnnatttttacnnnnnngctttatgtgtg

SEQ ID NO: 7973 - DNA, 493 bp, Canis familiaris
ttacgagaaaatccaaataaagagtatggcacagatgacataagtttgttaaatttactgaaaggtctatgcctgaaacatttaggcagatattcgacagctgagcattactttaatcgtgtcattcaaaaggagaagttgttaaaatatgaccactatttggtgccatacacttattacgaactaggaattcttcactacctaaaaggagattatgagagtgcaacaaaaaacctagacaacataaaaaaactacaaagactattccatggaagcccgattacagtttaggactcacatagctcttgaacaaatagctaaagaaaagcgatggtcttgacacaaaccaaacaaagtgtggttttgtttattatgagtgaagtatctgcaatcagcaaggtaattagcagtcaaaaaattatttctttgttgaagaaatccaagaagaggcagctgctaagaatctgatcagtaacaagaaaggaattggcca

SEQ ID NO: 7974 - DNA, 216 bp, Canis familiaris
  misc_feature (1)..(216): n = a or c or g or t
acgcccacatctccaatctagctcttcccccagcnnnnagtaggtagaaatgggagctctggatcagnnnnnnccttccagtgtggtgctagcaggcaagttccctcctgcacctcctaaagctctgggggtgggggtnaccatgccgacctgggcctgatgtccctcagtgctcctcnnggtactcccctcccannngacgtttgttcaagtgtt

SEQ ID NO: 7975 - DNA, 376 bp, Canis familiaris
  misc_feature (1)..(376): n = a or c or g or t
gaaggcttcaatgaagggtttttcaccaagtggtgncnnngctttcccgaacggtggttcccatttccttatccatngagaagacctntaancagnnnnnnnattttacgcgagctttttcctgttttnnncnnnntaccatttccaaaagntgcctccttaaaaaagtgcttccttcttcaaccggaacctattgtgggtagtaagatgcataggatgcatgacctgtttatcattggcagcggtgaggccatgttgcagttcatccctcccgtccagtgccgaagacattgccagtctgtggcgatgccactagagccaggggatattggtaggtggggcccccagagggcannnncagtcacaagatctttgt

SEQ ID NO: 7976 - DNA, 576 bp, Canis familiaris
  misc_feature (1)..(576): n = a or c or g or t
aaaagtnnaaacaggaaaactaagaatttttaagtagttatnnaatctttccaaaagcccatgaatttaatttctggtgcagaagctagatttgagggtgataaaattactgtagaccgagacccagcttagcccaggagctagaagggaaagataaaaatcagattaacagcgtttgctaccaaaaagacttaagttacttaagtagaatatttctggagttaaaaatgtgagggtctttaaatatggtagcttttagtgttcttggagaatttaaagaactttgataactgaagtaatgcaagatcaagaataactaccaacttaacattctcccattggactttgagctaagatggttttttaaatcctgaggactagcgttaattggcagcagacccaggtactacgcagaagtggattcagtgaatctaggaagacaggagcggcagacaggattccaggagccagtgtcggtgaagctaggactgaggagcgagctgcagttcgtggtgaagataggaaggaaggcgaagtccgggagccagtgctgtttggtgaaggaagaagctcttg

SEQ ID NO: 7977 - DNA, 574 bp, Canis familiaris
  misc_feature (1)..(574): n = a or c or g or t
aaatggacagtgtggtngacagactgcttacccttnacagaatctatcagaaaatggcgttttttttctatgagattgtttgtggtccatctaaaagaaattctgttcaaatgtgaaatcagggaaaatgagcgagtgctttttctaactacagttatgaagtgacgactgaaagaagaggatgaaaaatataagacagaaggaatgcagaaacataaaatctgaaaaagacaatttccttaggcaggatctggctctttgtctataaacaggagagtgatgaattggatccatatagtcagagttgtttttgttttcttcaatccagtgatttttaaaatagatttttcactagatgaagaagcccaaacaaggaaatatatttaaattnnnnnntatgggaaaatggtagcttccatgatttttacgtattagtttaaaatataatgaattttaggggtgcctgggtggctcatttggttgagtgccttcagctcaggacatgatctccaggtcctgggatcgagtcccaagtctggctccctnnnnagtggggagtctgnnnnnccctctc

SEQ ID NO: 7978 - DNA, 625 bp, Canis familiaris
  misc_feature (1)..(625): n = a or c or g or t
gtngntaangatgtggcatanctgcaatgcaattnacagacagnnatnntggcatctgcaccaacttgagggnannntgtganncttatgcaaaggagataaatcagagaaagaccagggctgtatgatatcaccaatgtgtggaatctgaaaatgccacattctcagaaacagagagtagagtgtggtcagcaggggctggggttggaggagtcagggagaaactggtcacaggggaccagcccgcagttgtaaaatgaagaagttgtgaccaggtgatgcacgtctccgtgactagagtccacagaactgtactatatatggcaaagttgatcatggcttttaggatagtgattttattgaacttcttattcctggtagtcatggacacatagtttgggactgtacttaagtaaatatcggtgagtatcttgtaaaatataaaactataggtccatgttaagagcttatatttggcgtctgaggctcatattcaaaagctactccaatgggacacctgggtgcctctgtggttgagcatctgccttcggctcaggatgtgatcctggggtcctgggatcaagtcnnnnattgggctccccannnnnngcctgcttttccctct

SEQ ID NO: 7979 - DNA, 660 bp, Canis familiaris
  misc_feature (1)..(660): n = a or c or g or t
acacgccagaatatactgaagagatggtaccntggcanccttgcctgaaacnnannagcaactgtgagcagaagctttccagtcacacatcgaggcgcttgataacaatggaaaaggtgaagaaatttgaggaccgggaccagtattcacatctattaagtgatcactttctcccataccaaggtcataattccttccgtgagaagtatttcagtggcgttactaaaagaattgccaaggaagagaaatctagccaagagtgaaaattaagattttgacagtggaaaaagtaaggatttaatggaaaagacatctggatgtgaacttccatgtatgatacacaaaacatagttttaaatagctttatatagtgaaataaaagctacaaagtaaattgaataattcttttacatttagctttgtttatagatgattttgttgtatgtggtctttgagaccttatttaatttatatttgtacttccaagtattatggaaattgaaaacagttatattttttgtaattaatttgcaaggggaactgatattgttgactttttaaaacagataacctgccgaatatgttttaagcaactaactaaccttggttaagaatttactcattcggtaggttcgtttaatttggtttctgattgtaact

SEQ ID NO: 7980 - DNA, 542 bp, Canis familiaris
  misc_feature (1)..(542): n = a or c or g or t
tanntgatggccattccaatagtgataaattaanctttgggcatttagaacttccaaactcgagctttggatattcctatgtatctgacaggttagccctcaaaagcataagattatattctaacttttttcatgtttgtcttgggtgaataacatgtcttttggagaatagctttaagtggcttagacactgataaaactcagtgtgttattttttgtacactcatgtcaatattttatctttaaccatatttaaatctaggatttaatagagtctactggaagaattagtggaaagcgtaaatataaaaaccaataaggaaaaggggaaagttaaaaaaactatttagaagaaaatgaaactatttataactaattttattatatttctaacatttcagaatttattagttgcttacaaattgatgtggctgtgtagtttataaatgtttatgtattatatttaattaggagaccgtagaacattacaacagattggctaatgttactgtttttgtttttgttttttttttaaaccagag

SEQ ID NO: 7981 - DNA, 595 bp, Canis familiaris
caggatgcagcaggcaggacaagtggggggcctttgttttaagcacaaagatacaacagaaccatatttgctggccatgatgtatgatcagaaacagtttctagaacatgattagtgaagaggacctcaggagaggtaggcggagaggcaaagctgagaaggtggtgggaaggagcctgtggcacacatggccttggtataaccttgcaactgtcaggtctccacccttgccgccccgccaccgactggaccgcaacacccaggcttctcgtcattttgctcatatggtgtagcatatgaaaatctgaactttcaacttggaattcatttccacctctctggtggatgatgtggattaattctttcttcaagcagcaggagtccctctcaattagggaaggcaatttgatatgaattatcagggggttggtgtactttctatagtggctggaaacacgttgctgtaatctttggagctcccaagactggcagcggccagagcaagcagccatacagtgtgtccatttatttccttttactgtcttccaggaactcaatgcagtgttacaaaacaatgtagagtatatgattttaa

SEQ ID NO: 7982 - DNA, 439 bp, Canis familiaris
aaatgtgccccctttgttttgccatgctccaattagtcttttgaaccactttttcttgagtgtagatctccaatgttaatactcattgcagactcatcactgtgcgtaagcatgctcgtctcgtcagaatttcagtaaattcagatgttttgtatagaccaaggtaactgtccttaacatccggcaatgaatgaaatggtatctggttcctgaaactggtttcatgtgctttatatgtataaaactgtatctgcctgtgttgctttgcatttcaaatgtgtggcgcacaagcgttttgttggtgctttgttctcagtacagtaactctgtgtacaaacattctaatgtagttttgttgttttccaacacgatgtctctgtaaaaatgatattggctgagctggtgcgttggtttctctcatagaggcattaactatact

SEQ ID NO: 7983 - DNA, 490 bp, Canis familiaris
  misc_feature (1)..(490): n = a or c or g or t
agtcacagcccatcggttatgagaagatgggctncnctaaagcagacaaaaagtactttccagagattgcctgttcagaacaacaaatagttgggttgtcacaagtttaatcttgaacagagccctcacatcccatatagtgaacacaagaggttagaatggggtggggaagattcgggcatttccttctgcaggaacagcctagtcagagagagaaagggaatgagaggtgattgcctaggcttgcagccaatttggaggaaatctcatctggaactcctgggtcaaactggcctcaggctagagttgattgccatgaatccctgaaggagagaagactagcattggaaagatggggtagggaagtgtgaagaaatcgacaatttgattttacatgcctagatcgttttatttgttcattgacattttgactactagatcttttcatttgctttgcaaggaagacttcagaggactctggcccaggcct

SEQ ID NO: 7984 - DNA, 641 bp, Canis familiaris
  misc_feature (1)..(641): n = a or c or g or t
acacagcaagttgcaaaaggcttcnngtnnnnnagntccaattgcctctcctgatgtatcagcagaacttcaaaagaattttatagagcacatctcttttttacatcaatatgatgctaggaaaattcccaatgagcccatccggggaaagcgacatggagcttttgtgcaggcagagataaaaccagggagtaggccaatagttcctaagggaacagaggtattacggaatgctccggggtcatgctcatcagaacagtccaaaaaaacagagaaaggaaactcagcggaaagcaaaatgatctcaccaggtctctgccgacaaaattccccagagctgctagagactgaaactcacttatcagaaacagacgtcagagaggcagccaaggcatgccccagaagtcctgagagaagggagaaggttgcagacatcttccaaataactgcagtaaatgctcttctccccaggcatgatcgtttaaatccaccaataaaaagtcaggataaatcaggataaattaccttcttcaagacaaaaatctaatccttggaatggagagaaatttcagaatcatacaaaccctcacaggttgctttctcttatatcaataacctcaaaaattctatttacataaatg

SEQ ID NO: 7985 - DNA, 473 bp, Canis familiaris
  misc_feature (1)..(473): n = a or c or g or t
ataatnnnaaatctccctccctgtttaaagatttcaagaagaaatcagcatcagcttacattgttcagacttactcttcaagactgccattaccaaacaattccacctcctatccttttagatatggggttgatacaacctcttgtgacttggagatgaatagagtggttnnntncatgacactgtnnnngtatcaggnnnngaaaacccatggaagagtgaatgcttttggaatgtagaaattttcannnnntgnnnntatacatcaaaaatgaatcatccaaaaaagaaattaaaaaaaaaaatcctagtnnnnatagcatcaaaaataaaatacctcagaataaatttaanaaannnagnnnaaggtttgnnnnnngcaaaacccannnnnttgatnnnagacannncagaacannnnnatacannnaaagataacccatnnncatgggtcagtagaattaattttatta

SEQ ID NO: 7986 - DNA, 582 bp, Canis familiaris
  misc_feature (1)..(582): n = a or c or g or t
gtgggtcaattnnngatgaggtangagtgnntnnagctccagnnnngggctgggatgtannnnnnnaagtcagaaactttccagagcactnnnaaacnnggtggtnanancatgagaataaaaggagcaagaagataantggaaaaccctaggaatcataaatttaaatcataaaattaatgaaataggaagaaagagatcagggaggcagactgggatgggaaagggtggtcagaaagggcagaggagatgcaaacaagagaaatgtcacgaaagctagcaagagagattgccaaggagagaagtcattgaaagtgtccatcagacagggaggaccccatcactgggcttgcaaacctgaagtctctggggaactttgggtgagtaatgtctatggattcaagagtagattgaagggcgcccaggtagctcagttggttatgctttcgcctcttgattttcactcaggtcatgatcttggggttgtgggattgagccccccattgggctccatgctcagcagagtctgcttgagattctctccctctctctctgcctctccccgtgcttgggtgctccctt

SEQ ID NO: 7987 - DNA, 625 bp, Canis familiaris
  misc_feature (1)..(625): n = a or c or g or t
tccattatttannctaactaaagcagtaaagaactgccattggtcaataaactgtaaagagaagaagcaaactgtgatggaatattttccatgccatggaaaatttaaatcacatttgttttgattaggagcaatacactttattgattctgtgccaaattttaagtatattttttacaaagatagagtgccataacaaaactagactctgtgcataaaggtacctgaaccatttaagttttacgtgttgtgcatgtttgtttaataaatgtagcattgtcttgataaaaatgccatattatttaaaagttaaatgaacgtttctattgacaaaaatgtgcttcatttacaaataatgttaccaaatgaggggagtgattacattaaatctctacacagttttcataaaacatcagtctaggaaatgtgaactaacatgaatgtgaacattttatagtagtttttgtgaaagcatacttttgaatatccacgttaatgtaccttgaaagtaaatgttaagtacatcatcaatttgtctaatatatttgtgaaattttctcatttatatttatgtctaccatgttataaatatgcttgtannnncatttgtctaaaataattgtta

SEQ ID NO: 7988 - DNA, 243 bp, Canis familiaris
  misc_feature (1)..(243): n = a or c or g or t
taggaacaccccaaatgaggttgaaggtcacgttattcagctggagaatgatgagatatgaacnnngacaacagagattcgnncccctagaagtctcagtaccagaacacaagccccaaagagtagggtgggaatgttgggacgaggaccacctctttgtccgcttcctggccccaatagtaggggcaggtctttctnnnnnnctcaggtagaccctaagttgagggggcagctttagggccc

SEQ ID NO: 7989 - DNA, 605 bp, Canis familiaris
  misc_feature (1)..(605): n = a or c or g or t
cctgcntaagcattgcagttcntcgtgnctcagccacgtctgcnnnnngagccctggcntagcctgtctgctctgcagcaccttttctggggtcatctcagtgacaccagtggcttctcactctcaacagcaaccttccacatatcctactgggattataaaggaatgcctggatagaagagcttcctgaacaagagccaagaaagtttgaggcctgccatcacagaatcttctttggcctactcacaccatgccaccattttactccgtagtagtcctgtgttgggtgtggttgtcttgcagtgttttctcccagaatgctgaacaggaaaaagggcaaactccttaagctcctctgctttcagtttctgacattatttatctgggttttcattcttgaggcgatagaaccatcaagtcagacctcatgccttcctttctctcccttctccttttctagaagtattctgtttttctcttcctttctctgggaactcatcgactctgtcataccctcccctttcttgaggaggtattttccctctctaccagttggaaaaagtcacgactaaggggttctactatgcaatcagaacttggagatt

SEQ ID NO: 7990 - DNA, 608 bp, Canis familiaris
  misc_feature (1)..(608): n = a or c or g or t
gcattgtttcctttctgcttcttgtttttcaatgttatatannggtctatatatttatgataaatctttttcatttgtgtaaaataaaatgccatttcattgtgaccaacctcattcataaatgccaatctgaagaattttgcattttcatagcaatatattgcattttggatgccatttgattgtataaaaatgtggcaccttacttttgaatggcagcatgatcttgttacttctgtgctctactaatgatgtatatatgtatagcaaacatactgctttaggaataaatgaaggataaccatactacataaaataaaatccaaacagttctcttcagttagtgtaaattgcaaatacttcagaaaattctgataacaaaatgatgtgcacgctggatcctgttatgatcacccttctaatgtatgtagtatttcaaatttacttccttgtaactttcagagaaagccatcttgtataattttagatggtattatcacagattaagcaaaattatattacatattgtttaaactttgtaagtagaaatatatcagctataattatgtgggctnnntggagaaataaagttcaaaaaattnnnnnnn

SEQ ID NO: 7991 - DNA, 645 bp, Canis familiaris
  misc_feature (1)..(645): n = a or c or g or t
tgcaaatggtgatgttgaaatnnatgctagtatcatgaatnnnaaagacnngtctgcannagctgtgtcngcagtccgttgcatagcaaatcccattaaacttgcacggcttgttatggaaaagacaacacattgctttctgactgaccaaggcgcagcaaaatttgcagcagccatgggggttcccacgattcctaaagagcagctggtgacagagagaaacataaaacgcctagaaaaagagaagcatgagaaaggtgctccgaactcagactgtcaaaaaaacctgggaactgtgggtgccgttgccttggactgcaaaggaaacgtggcctatgcaacctcgacgggtggcatcgttaataagatggttggccgtgttggggacaccccatgcataggatctggcggttatgctgacaatgacattggcgccatttcaacaacggggcacggggagagcatcctgaaggtgaatctggccagactcactctcttccaggtagaacaaggaaagaccctggaagaggcagccgacatgtcattgggttatatgaagtcaaagctgaagggtttaggtggtgtcatcttggtcagcaaagcaggagactgggcggtgaggtggacctccgcctccatgccctg

SEQ ID NO: 7992 - DNA, 209 bp, Canis familiaris
  misc_feature (1)..(209): n = a or c or g or t
cttcataaaagaggaatcatttacagggannnnnagttagacaatgtcatgctggatnnnnnagggcatatcaagattgctgattttgggatgtgcaaagnnnacatgatggatggnntnnnnnccaggacnnnnnnngggactccagattacattgccccggaggtagggccccccgattctccttgttttctagaccagacctttca

SEQ ID NO: 7993 - DNA, 225 bp, Canis familiaris
  misc_feature (1)..(225): n = a or c or g or t
gancnngtgaggannnaataaggggacactggtgttggnnnnnntnngagaaagnnntgagnnntgaggggaaagnnnnnnntatgaggtcacagcaaggggctgggaatcaggagagaccagcagagtgggaggatgttctgcaatgtctagtgtttaaaaagacacaacaaacccaaagggagtaatttacttccatcnnnnnnncaaaccaagacacagttg

SEQ ID NO: 7994 - DNA, 472 bp, Canis familiaris
  misc_feature (1)..(472): n = a or c or g or t
cgcatnnnactcctccatttcaccaaagcctcacacctcagcnnnnngggaggacgaatggctaatggcaccatcgtgaggctgtgggctggcgggggtcaaagggaagagacactgggggtacagaaggagactcgagacgtcccgaggaagtcgcaagcagagcaaactgctttatagcctgaactacttaaaattgtgtgatgtgcaataactgagcttagagttaagaattgtgttcaagtgcttggatttccgtctgtatatttaagtgctgaaatcgtatctttcagtaattttagatgtcttaaaaaaaatcgaaaaannnnnnnntagnnnnngtatgtgcattgatgggcactcaagcgtcctgtgagtcaccccaccctctccctttcccctgtgcccccaggcccttgcccccagccccccctccacttggggaccccgcctcgtgttgtctttatctgcc

SEQ ID NO: 7995 - DNA, 633 bp, Canis familiaris
  misc_feature (1)..(633): n = a or c or g or t
gatgcgatacttggtttgcattaaaatcccannaactcccagcttcggtttcgtnnaaaagcgtacaaggagctttgtaaatacaacagattttatttctcctcccttccttgaatgtaaagcctctgatcgtgtatccttcttgggaaataatttccattaatgtatgttcattatgtctttgaatggacctgagatgcacaccggaggcctgagctcctcgccgtctgctcaggccacagcttcacctgccgctccgccccggtcaccgcgtggtcggaggtgccctccgttaacgtcctgggcaacgtcagtgaatcctgcgtttgtgagggggtgggggggtggggggaaggcaggtggggggtgcgcacacaaaaagatttgtgactaatttattattttgttgcgatggggctgactgttaactctcctaggagtccgggcctgcctcatgagtaggtcactacgtgtgatcctcaccaggacagcgtttgtcattagagggaagctctggtccaggatgctttaatttagcagggactcccagatgatttaaattctcgatcctgtgatgatacacatgtgatcctgcgtgtttctgagcagttctcctttcatnnnctgccagcc

SEQ ID NO: 7996 - DNA, 490 bp, Canis familiaris
  misc_feature (1)..(490): n = a or c or g or t
cattgttaatactgactcagtgtctgccnntaannataaatgacatgttgaaagcttaagnnngcaagtgctacatatatgcaatatgatagtaatgtgatgttgatgctgttaaccaaagggcagaataaataagcaaaatgccaaaaggggtcttaattgaaaatgaaaatttaattttgtttttaagatattgtttatctttatttattttgtggtaatatagtaagtttttttagaaaattttcataacttgataaattatagttttgtttgttagaaaagttgctcttaaaacatgtaaatagatgacaaacggtgtaaatattttgtaaggcttcaaaatgtttatacgtggaaacaggcctacatacgaagcataaattggttgctgttttgcttcttttcccctcttatttttgtattgtggtcatttcctatgcaaataatggagcaaacagctgtatagttgtagaattttttgagagaa

SEQ ID NO: 7997 - DNA, 371 bp, Canis familiaris
  misc_feature (1)..(371): n = a or c or g or t
annntanatgtgcaggatgctgccagaaactccagtgtataaattcaacatttgctgnctgtgacagatgaacttttgtgtgtgtatataagaatcannnnggacctttgtctttaaaaatctatttttaagtaatnnnctaagaattccatttgcctcactactctcttagcgcataaaaattatagtatgacttgtttgagctcctgagctctttccacagtgctctgatttgttcagtgtttgtttacagtattaaatttattgcagttatagaattgatgagggagcatactggtttgtggggtttgtgcttatttctgtagttttgttatanngtgttgttcaagattannnnnnttgtgttctgt

SEQ ID NO: 7998 - DNA, 175 bp, Canis familiaris
tgatacaggtgaaaaagattcccactgtatgcttacctttattatctagaaagtagatataagtagaatatcttattcccagatgactatggataaagtattattcatggaaattagtattatttctcaatgttatgcatttagatataaaacttgtttttttcttactttcttc

SEQ ID NO: 7999 - DNA, 554 bp, Canis familiaris
  misc_feature (1)..(554): n = a or c or g or t
actgcatgaagaaaagatactactaccgggagaagaaatataagtatgtggaggattatgagcagggncttggtnnagagatggaccagtgatgcttactccatacctgggctccccacagtcctcatcagagcacagcacggagaaaaggctgctatgtcacctcagggaaggttccagagtctgagtccatctccattgcacaaggacatcatggtcacccagctgttttgtgtgtaggatgtgcagagtaaaccaccctgcacagtgggttgcctcaacttggggatgttcaggtgacctctggcccaagggcagtggtgagtgctactgccactgcaggggctggggcctcacctagggccagccttcctcaggggctcccagctccagctccctgcaagacaggcccagctgtggtcaggcagccttgttcaagcactttacaagggaaggaaggacagctaggtgtggtcactagaccttgagcacacctgggctgctgcttccctcccccatccatgctgtcacaagacagagtctgtatatcctct

SEQ ID NO: 8000 - DNA, 555 bp, Canis familiaris
  misc_feature (1)..(555): n = a or c or g or t
ttttaaaattaagattgagggagtttaagagctnctgattctgtaccaactgtgctatacacgatttccctcacatagttttattatttatggtgcttctgaatgaagtctattcagagattcaaccaggtattctttagggaagcattcagtttgcattattcagttactgaaagagtttttaataggtgtaagaaaacatcagttatgaataacaaacccagctttttaccagtcttcaggtcattttctgggttatttatgctgatgtgactactataattttgtgggatgagttgagcttaggatcctcactctatcttcccagcctcctcctttgcttacaaaaagcaaagccaggttttaaaacccctcttctggtatagcctgttcgcagtttattgtagaatctttatggccttaaagtattggtcttgtctcacattttgtattttttccttaagtgaattttgctgataaaacacaggatgtagcattattgagaggaggtgtacaatttctagtttggagatagttttattattgaaaatgtcc

SEQ ID NO: 8001 - DNA, 618 bp, Canis familiaris
  misc_feature (1)..(618): n = a or c or g or t
attctgaatacaatgaagagttanntgaagatgactctcaatctgatgagaaagaccaagactctatggaaactgatggaatgatcaagaagaagacaaaatcttcaaagccttcaaaatcagaaaaagataaggagtccagaaaaggaaaaggaaaaagttcaaagaaatgaaactgtttttcactactgacagccactttttactcaccctgttgaccagtctagcttgtctagataatgccttgttttttccaaaggaatcatattttagcataatggggcaactcagttatcccattataaataagtggtggtacagctagagggatgtaaccagtaggctaacatacacctcttatagaggttgataggactgcttgggtcctccactgtcccctgttaatctacttggattgtgcttcaaattgactgtgtataatccaaaactacatgtgggctttggagtcagattttagttaacaataatatgcctgggagcattggtacttaaggcaacttttgtaggcttaagcatttatcctaatggcctttataggaccggtgctgatcttttttttaaaaggtagttattattaatgtggtgaaattttgtaaa

SEQ ID NO: 8002 - DNA, 559 bp, Canis familiaris
  misc_feature (1)..(559): n = a or c or g or t
cacctnnatctttttntgtgttcnncacattcaggaagaaattaaagcnnnaatcnnngatccaannnaagtnnnaccntnnnannntgctaaaaggttcctagntcctccaacaaagaggttcctgggagtatagtccttctgctgcctagttctccttcatagatcagcccctcctacccctccctacattccttcctacctgactgggagatgatagcaagtcgggacgtgtaggtagggatgaagcgcaaaaaggcaggatccacgtgtacttgaagtggtgtgatggcacgcatcatacgcagatcatacaccttcaggaaacggtcacaggccaggccagtgaggcgactagagaagccacaggcggccagcaggttgccatgcacatcaaaatctgacagactccctgagaaagcgtcgaactcatgctccaccttaaaagtgcgaaggtctcgcagggaaacctgaagaagagatgcctcagttatcttccaacactgtcatcaagaaaagtacnnnccacctacctaaccctgtgaggcccctgcccaaa

SEQ ID NO: 8003 - DNA, 512 bp, Canis familiaris
gggcccagctcttccacgccgatgctctcgatgacgtcatcgcgacaggtggcacccgcgctgctgttttcggggaccaccgcgaggtcacaggggttctcaggccgaggcgtgctgggaatctggctgcccacatgcccccgggggtgctgctgcctcaggaccacgttcgcaaactcccggcagatgcggcacgagagctggtcgggtgaacccccaggtgcctcttcaggttgcgcttggtggagagaaggccggaccacagcgcttgcaccagaacgggctctccccgttgggggggcgggggcggtgatgcatcttcgggagctctggcagctcaagaccccggtggcagatgagacattccttggggtcggtggtggccttgtcaatgttctccaccagcttctgtaatttcagggtctccgaccctggctgggggggcccactcccatggaagccaccaacccttgggacagtgtggtttgacccccacccccatcccccaaccc

SEQ ID NO: 8004 - DNA, 64 bp, Canis familiaris
  misc_feature (1)..(64): n = a or c or g or t
ctccccagcctgggcagtnnaatcccccatgaagccaccctgccatacatgatccagtgtgggg

SEQ ID NO: 8005 - DNA, 188 bp, Canis familiaris
  misc_feature (1)..(188): n = a or c or g or t
ataccctcagcaagctgatgccatggaactcttgcncngctnctacccagagtttgtgagagtaggggacttgccctgtgacacagtggaggaccagctttccttggcaaccatgttatatgacaaggggctgctgctcaccaagatgcctcnaacctgaactagtttcttgttatttgctgggtgca

SEQ ID NO: 8006 - DNA, 486 bp, Canis familiaris
  misc_feature (1)..(486): n = a or c or g or t
tctcnnnatcccttctgtgttcatgtctgcagcnnaggctgccctgtctggttactgctgcgtggctgcactcactctccgtggggtggggccntacaggaaggaagggcttcaggagcaggtaaggaggacggacaagaaagtccattcagcaatgactggctgtgtgggaaaggtgctgaactggaattcagagcaggagtagtaactccatccatctcgacagctggaggaactgacagaccttgaccttcctaagtgtacaaggcaggaaaatgagcagctactggatcaaaatcagnaaatccaggcattgcagaaaagctgggcttaagacaggtaatccatgaggagtggggcctgggagagggtggaggcagggaatcactcttagaactgggtcaggtcctctgctgtcctgcttgccttatgacccccgttctcccttcaacggagcaggtgccgatccagaggctcagttcacaa

SEQ ID NO: 8007 - DNA, 576 bp, Canis familiaris
  misc_feature (1)..(576): n = a or c or g or t
agagcaaccctttcctccaagtccccttggaattttnctgagcgttcggnnctcgcagccgccactcgttcgaaatggaccccgccagcccctcctcaagccttcagaccgcgtcgcgtagcccgcacgcgcgttccggagtggtctttccttcctcgcaaatgtcgcacgcctggactcggcttcgggggctctgagcgctcatactttctcttagctatctttgtgcagtcccgagcccggacgcgtgtggagagacccctggcctggggagggtgggatggaggatcagaaaagaagcctgtcggcggccgtgaagcctcctctgtgagttgagtggaggtgtgaccggggtttcaacctggttgtgctactgaccttttaaatgatcccagacaagtgacctatctcgtggggcctcagtttgttcctcttttataaacaaagcatttccctccggcttgtgccctgccggattttttggaaggaccgagtgagatggatcacaatgtgaagcacctacccgcccacccccacctcactcctcggaagtnnnnnntatctttgcactgttgt

SEQ ID NO: 8008 - DNA, 524 bp, Canis familiaris
  misc_feature (1)..(524): n = a or c or g or t
gcnncatcagatgaatgatttatgcnnngaaaagannaaacnngattctcnnactgaatacattacagaaccagcagggcaatgccttncagggcnntcngaaagcagacattgtggcaaaagagaaggtcgctgaactgatccaaccccaggcagaaangattttggccttaaaggaagagattgctctcttgcgtaagaaaggtggtcttatcctcccgcccattcagcctccacaagagaaggagatgaaccccatgggtctttaagtttgcctcttgctgaaatccatccaagattaacgacacagaacttaccggaagttgtttccttgccacctgcagcaatcctattgtcttaaacttatttaaaagtctaagaccagatccagtcatacagttttaataacttttctccaatttgatcatcttagaacagactctaacacccaacatctatttcctcttgaacttaaccattttaggtttgtttggaatccactggattgagtatggagcctcaga

SEQ ID NO: 8009 - DNA, 477 bp, Canis familiaris
  misc_feature (1)..(477): n = a or c or g or t
agagtcaattctttggtattcaccaacgtnnnnngcntcaccggaacaggcttttgctttgggctctgctgtttnnnnncagaacacccaagagcgagcaaacatgctctcttcacagcagtannntagggttttgccattgtaaatgggtctaatgtgatatgacaagaccagagaaattggatgtaaatttacatttttgaatatgcttgttgtttcacatgatacatttagggtatgcagctccttttgtagtttttatttttactatttaagtttggaaatgatgccaaatttttgtatttctttaatcaatgtgttctctttggtgatatatattgcattatatattgatgtgtgtatcaatatatactgatatgtattacacttacacatacaaacacataaataagagggggtgaaaaccgtagcctttgcattctctatagcctctacagagagatcctaagcagcgaa

SEQ ID NO: 8010 - DNA, 468 bp, Canis familiaris
  misc_feature (1)..(468): n = a or c or g or t
cttaactattgtttgtaatttgtaaaaattaaggggattatattcttctgctanagtttccagttcacatcagaatgaagctagaatgaagaatctgttagaaatgatgtggctagaaaataaaaccagaatgggagcatacctaaatctcaggtcttggttccaataaaaggaaccaggggctccttggagaaatgataaattcaagactggggcagtaaatatacaagatgagcttgaaacatgtgccacaaggaaagtgcaaaaacaaacacacaaaaacctataaaacataattattgggagtgtgtcaaagggacaaaagagccaactgaaggagcttccagtgactgaagttagaacagtttgagcaacaaaataaagtagtattgaattataacccaaatactaaatatccattaagtccttactgataggggcacctgggtggctcagttggttgagcat

SEQ ID NO: 8011 - DNA, 194 bp, Canis familiaris
  misc_feature (1)..(194): n = a or c or g or t
gtgnnnnnngnggnnnnnnnncnnnnnncctgccccaggnnngggttggattagaaaaatgcnnatttttcttgtannnatgtagaaactctattttctcccaaagacactatttttgcagctgtttgaagtttgtatattttccgtactgcagagcttacacaaaattgaagaagaatnttaatgttcaagtt

SEQ ID NO: 8012 - DNA, 419 bp, Canis familiaris
  misc_feature (1)..(419): n = a or c or g or t
taatantggtctcagaaaaaggccaagttaaaaggtcaganaccagnnnagcccaagganntcagaagcaagaattaacntagtgccactgtaacaatcacaaaacaccaactgatttctctgtttttaggacacttaagttttcaaagtctagaagagggtcaagacctgattatagttcttgtaggactatacaaaatgggagaggataattctttaaagagaaattgggtactgtaacctaaagaagagataatagccacaatagctgtgtcaagggcaaatacctatttgagacaagaaggtagagacttctgttgacatagcccttagacaaataactggtagaatctcagttgggaaacacatccattatcaaatctattcctcacaaaatgtgctccttgggacgcctgagt

SEQ ID NO: 8013 - DNA, 576 bp, Canis familiaris
  misc_feature (1)..(576): n = a or c or g or t
cacaaggacaatatccnnnnnnttatcttggtgctaatgctctatagctgggccagcatccccttcatctacctgaccagcttctgctttcagtacgaaggtagtgctttcatcaagctcatcatcatactcaccttcttgagcattggcccctttattctcgtctcagtcacaagtgaaaaaggtgaggacgaggaccgtcatatctacataacacgcggggggttcattcttccactcacagccacagaagatgtccccccgagaatcaggctgttcccaaaagctgtcttctgaagagccccaaaccatgtcccaaaacacacatctctaggagaacggagagatgtggtggttatgttcatccagtggattatgctcagcaacagaaagggagcaaagtgcctggtgcacacatgcggcagtgtgaacaatatctgaccccactgacctgacaaatcctgacgacagagtcaggaaagcagtggcctcggagtttgggggaggggagttgacaaaacagagacatatcccnnnnnngaacctcctggaannnnnntgcatcttgagtgaggt

SEQ ID NO: 8014 - DNA, 475 bp, Canis familiaris
  misc_feature (1)..(475): n = a or c or g or t
tcgcagtgccnagtgccgngtcagggtcgtgggcgcagggggcactgctgggggtgnctgcgaggcaactgggtgtgcctggggaggccgagaaaaccacataatagctctcactgttcctatttatcaatagctactttttttagcatagatgccagggccacacactcacatggcttannnctgacctgtcgttgaattctttctgaatagaccaactgttgtgttctggtcctctgacgggtcagtcaggaaatcagcctttcatcctgcatggcatcacagaagcaacaggagggggatgggagggaactctgacactgagccactaaaacacggactaacttttcagacaaatgttcaaatggactgtgctactgtttgtctcaagctaccaagtttgtgcaataagtggaagggatgtcatccctgttcnnnnnngctgaatgacattcaagttgattttctagaccac

SEQ ID NO: 8015 - DNA, 632 bp, Canis familiaris
  misc_feature (1)..(632): n = a or c or g or t
catattgtgtcgcccgtgtgtgtgtgtgtgtgtgtgtgtgtgtgtgtgtgtgtnngnnnnggtggcnnnnnncccgacaccagtggttttcagtgtcctgnnngccccaaggcatgctcaaaagtgtaatccaaatctctgattcatgtgtttaaaaaaaaaaacaaaaaactgggacttcagcatcctgagccaaaccagtcatataggagatgaccagaatattgccttgtgttcataaatgaacttggattttgtacaggtctgcagaaggtgttttctgccatctgtttgcatacagccaaactccttagaagtgtggctgatgacaaaggttggaagcgggagacactgcgtcctgcgtcctgcgcatgccctgtaacgtaacgctctggaagaagtttccctttgtaattcacatgctctaattcttcggtgagtctcagctttatgatagcacgtcagcgtattcacaaggcgctgaataatagtattgtcattcagagttttagccctttatgtgtctgggggcggctctcttctgacttcagtttttgtgtctgagaacctgaacagttgttagatgttgttaccaattctgccttgaaaataaacatcttgcatcannnnnn

SEQ ID NO: 8016 - DNA, 544 bp, Canis familiaris
  misc_feature (1)..(544): n = a or c or g or t
tgtctagctcttcagtgaagaccaacgggnnncttgcaaagttgggcttaatttcaaagaggttgctatcttcaccaggggaacagttacccagagtggagaccctgccctgaagacacttggccatctgcaaccagagctactgggctcaggaagctcagcttttgtcagaacagggattgcctcaagtgaagaaatctgaagagttccaatgtctagtgtttagtgttcagaaccactgggcaaacacgttttgcccaaagtctgagagnnngggatcttctatatccttttccgaccccagatacctcacaaacactgttggctgggagtttatgctaatctgcactctctcagagacactaccttcttcttgtggggacactgactctcaccaaaaagttgtattctcccctgcctggtgttttccagcatacaggtcctgccccctacttctagaaagagcttctcttccatccagcttcctgcacatctcactttccnnnnnggttcatgtttgtnnnnnnntttgggagggaaagat

SEQ ID NO: 8017 - DNA, 536 bp, Canis familiaris
  misc_feature (1)..(536): n = a or c or g or t
cactcaaagatatattcataatcaagccccttcatggattnnatatatacacactngattttgtccttatgacataaaaagctttcagtgtagtctgnnngaatcatgtgacttgaaaattatgatcattattnnagatttaccataagcatctttagttattttagtaacctttcacagttccctcatcagagagattttgggtcaaagtatagtgattatcagactgatgataataatcagcttccttgttatactcatcacctgtttattatgcatcaagaatgatcagtttttcaaatatgcattaattggcgttacgctaaaggattgaacaagaagagctatctaacctcatctttattcagttatacttgaaatattcctgtcatgctcctccctggaaagtagaacttaatggtttgttcaccggtagttattgggagttcatggctttttagttactatttttacttttatatataaattctcnnnnnnaataaataaataaataaataaataaaaatnaannnnnn

SEQ ID NO: 8018 - DNA, 547 bp, Canis familiaris
  misc_feature (1)..(547): n = a or c or g or t
atatannntnnnaaatttaaaannatagaaatcatacatctgatctcacaccanagnnnaattaaactagaagccagtaacagagagataactngaaaatcctaaaatacgtggagattaaacagcattcttgtatataacacatgggtcaaagaagaaatctttaaaatattggtgaagatgtggagaagttgaaacccttgtgcattgctggtgagattgtaaatggtacaaacattatggaaacagttcagtggttcctccaaaagttttactggttcttcaaataaagagactttactgtatgacccagcaattccattcctagatataaacccaataggggtgaaagcaggaaataaaacagatacttgaatgccaatattcatagtggcattgttcacaatggccaaaaggtagagtcaacccaagtgtccatctatagatgaatgaataggccaaatgtggtatgtggtctatacatacaatggagtattattcagccataagaagcaatgaagttttggtgcgtggtacaacatggatg

SEQ ID NO: 8019 - DNA, 117 bp, Canis familiaris
  misc_feature (1)..(117): n = a or c or g or t
gaccgctctactgaaggctnnncaatcccaagatgaggcatgtgtagatannnnnctgaaacatggtgctaatcctgatctaaaagacatcaagggcaacantgctctccattannc

SEQ ID NO: 8020 - DNA, 495 bp, Canis familiaris
  misc_feature (1)..(495): n = a or c or g or t
tgtgncnctgccatcaccctcnnnggggtcctggnnnnnncnntgcggtgnnacggccctgccccagctcagcccctcccannngcccctcgctggccgtcactgccccttgtccctcccacttgnnngccagccacttgttctcctccnnnttggggtctcagaggccctgctgctgcagggggcaagagtgggggtcctggccggacctgggggatnncaaacatggagagactggtgggggcctgtgggggagctctggccaccccggcgggcctctggcaggggcaggagccgtggcagctcgggcagtggtggccaaggacnnagccagtgggaggaggtgtgggcccttggtggggttggggggaagagaggttctggctggggcctgaggcagcgcgnnntgtgngnggtnnngggtccctgggccggcctcctgcttcnnngnnnnacccagcctcgttcctctttctgcttgaataagtcatcctg

SEQ ID NO: 8021 - DNA, 608 bp, Canis familiaris
  misc_feature (1)..(608): n = a or c or g or t
gtacctgtgtgtnctcagtcctgagcagctgggctctgtgcagcacagtgttatttgggtggncagnncccaggacctggatgcatgccgcccaccacagatggatgtcctctaccccaaggcccgcactgccttccagaacctgagcgggtctgaatactttgagaggatcaagccctacctgggtggggcccgcaccgaggacctgcgggctctcagtcagcagaacgtaagcatggacacagccacgttcaagaccctgcagagggaggcggtgctgccgctgactgttgccgaggtgcaaaaccttttgggtgcaaacctggcgggcctgaaggcggagcaggggaacagccccgtgcgggactggatcttacggcagcggcaggatgacctggaccgtctgggcctggggctccgcggtggcatccccaacggctatctggtcatggacctcagcttccgagaggccctctcagggggcgcccgcctcctccgaccgggaccagtgttcaccgccatcctggctctgctcctgggtttgatcccgaagtgagcccactgctctggacgctggacctctcctgctgcgaggctccctggccacc

SEQ ID NO: 8022 - DNA, 548 bp, Canis familiaris
  misc_feature (1)..(548): n = a or c or g or t
gtgtgcataggggtcnnngcnnnnnncannnntggtaggnnagtggggcagnnngagttgtcctgtacccccnacnngntgcctgcaacttcatacagnnattagggcaactcttaaccaaaaaaaaaaaagcaatgtctcctggctatggttgttttctttctgtttgcctttccaactccctctgagcctctttttggggtgctgtcctgtctgaatgcgctggtatgtgtctctggggaagaagcaggtccctgccctggtggcgcaggtgggggcagggtgaggccccagggtggtcaagggccacttagcgtgcccaggcctcctctcgtgctcctgatgtatgtctgccatgtcatgccgattaaacacgcttcctgacttgtccttggctcccttgtgtggacctgttgctttgtccgtttctgttctttttcatttcatctttaggtttcttcctcctcctgtgacaccctttctcttgctttgggtgttgtctgcccagtttccccaagacaaagactgtgcaaaccctgggnnnnnnn

SEQ ID NO: 8023 - DNA, 590 bp, Canis familiaris
  misc_feature (1)..(590): n = a or c or g or t
caagcagggtggnngcggggtgggatcacnnnggtgtgggtcnctgctgccccaacacctgccctttnnntcacattttcaacaaggattttctttatcttcccccacaaatcaaggcaagggaggggcacagagtggggaacgnnacgcangatgctggtctccaaggggactgtccatcagcagacactcagaatngacactcacctgcccgtnnacggctgtgctcaggacagctgtccccacccatggacacagggtaaacatccgcagggctcaccgtggacagcgtgtggcccagccaccctcccctccgggggacccctccccgtcccctcacctgttgtctccacggagctgcctgtctcgggtaatttggggatttttttctgggggatagttcttttgcatgacccctctcgagcaagccacacctgctcctctagctagatgtccaaggtgtggtggcgccggccggcccgctctgtggagggccggctgcccgcagtgctggccggcaacctccccttctctctttttgctgagttccattgtcttttctttctgagccttgtaagtgtaaaaaaatc

SEQ ID NO: 8024 - DNA, 561 bp, Canis familiaris
  misc_feature (1)..(561): n = a or c or g or t
agaagcacacaacggaaaccacaggccccgccaggctcccacggctcgttcgtagtatcctggtngaatgtgttcttggggtccccgtgtgctacccccagggtccccaaggacgaggggagggcatttggccaacacgtgtcagaacatccaacgggtgcaggtttccaaggcaagatcttggtgtgtccctcattaccacttaggtgccttatactcagatgacagacccctcgtcttcatgctaaacgggggcagctccagagagatcctttagagcgggttctggtgtctcagtcagggtcggggtctgggggggcctctggagcctcagggagcaggggtgggctcagaagagcaaatgcaacgtcccgagtcacgttaaccaatagcgattccgagcaattagaggactaggactttaatttcaagaaatcttcggtcttattctgtttcctgctaggaggttgaactgatcacatctgttgatccaagtcctgagttgatgggaatgtacgtatctggaatgtcctgtaagactgatgaatgtaaggagttaat

SEQ ID NO: 8025 - DNA, 656 bp, Canis familiaris
  misc_feature (1)..(656): n = a or c or g or t
tcttgggttagngagatgnncacatatacatannnaattacatatatatatatatatatatattaattttagtaatctctacaccagtgtggggcctgaactcatgaccccaagatcaagagtctcaggcgctcctgactgagccagccgggcgcccccacataaatacatattcattaggggttgcttgctttgtttctggcgtgacaatacttgctgtggataacaggacagttctagcgggaccgtgtgacaggaagtcctttatgaactggcttaggagcgcggtcttcactgtcagtttcatgtttctccccaaattggcactcccctgacttgtggaagtccacctacgaactccgtcctctgtccttctgcaacactcagcaaaacatgttttcttacccctttcattaccttttctcttggattatccagaatagaaatgtcctaacattggatctgttttcgtagtaattgtgctttttacgatttaggccatttatttgaggtgatgttctaagatagagctaaattaagatcgtttgtgctttttagaacccaattgccgtattatatacatatatgtgctttgtaaaactcggaaatacaaaaggagtctgaacgataccaagtaagaatgcttgttaagcaaa

SEQ ID NO: 8026 - DNA, 202 bp, Canis familiaris
ctcctcagattcttcttgtcaggcccagctgctgggcatgaaatcggtgccccccacgggggcagcacacttaggagatgctctggggcgtccagatagctcatgtgcccatatgcacatctgcagaccacgtgtcaggcactggactggactggagtgttctagcatgggggtggggccccgtctcccttaatgtaccgca

SEQ ID NO: 8027 - DNA, 462 bp, Canis familiaris
  misc_feature (1)..(462): n = a or c or g or t
acccagccggcgtcaggggcagtgcacacggctgggnntgagcagacttgtcaccatcgctcacctcactccgaaccccatcaggtccctgatggtggggagcatttggctggtgggactggagccttctctgtaaacactgctctccttccaagctgagtctggtgtcctcgagagccaagtcagggctcccacggatcagctgcagaacgtgtgatccacttacctcactgcctacagaagccctactgccaaaccgggcccggaaaattctccgtgcagctgttttgagtccacggtgatgaacgttgagaccagcaggttggctgctaggaactgtggtgtggtgagaccgcgctcatccggtgacattccagaaacaccttcctctggcaaaactggaatcgtagatctgaccaaaaaagtgtctgttttgctttggagttctgttgcctatgattt

SEQ ID NO: 8028 - DNA, 575 bp, Canis familiaris
  misc_feature (1)..(575): n = a or c or g or t
gatgannnagataaagaaaagaaaannnnnnngggattcttcaaagttaataagannagcagcagtaaggccgagcggaccgcgcaggccggggtggacagcgatgaggacgcctcgcagtccgctttgggaaggggctcgaacggctgcctgacaacgcccaactccccatccgtgaaccctcgttccgttccgttgggtccatcgctgtcgctcagcaacatctcgggggtgtctgtgaagtcagacctgaagaagcggcgggcccctccgcccccgacctcgcctggcacggggccaccggtgcaggacaaggcctcggaaaaggtatctctgggctcacagattgacctgcagaaaaagaagaggcgggcgccggcccccccgacgccgcagcccccgacgtccagccccctggtgccgcctcgcactcaggacagggaggaaaacaggaagagcgccacgggtgagtgcgccgcgttgccgtctgcacgcctctgagccctgcnnnncgtggaatggtagcaccgctgttaactcctgcagccgcctcgcggggccgttcgctcgggcag

SEQ ID NO: 8029 - DNA, 231 bp, Canis familiaris
  misc_feature (1)..(231): n = a or c or g or t
tgccatctccnnnnncatgattttcaccacactgtcctttaattgacacacttttttttcctttaaagaaatatgtttttatattttgctttacatnanagtacattttagaaacttgctatagcttactgtaaaaaataagaggatgatgttattaaagtggaaatccaanngtnnnnnnntgccaacagcnnnnngnntaaganttgctctctcttgggatccctgggt

SEQ ID NO: 8030 - DNA, 470 bp, Canis familiaris
  misc_feature (1)..(470): n = a or c or g or t
gaacagctgaggaagtcgttccagactcgctgcggtnnnnnggagagcgtggnngagggtgagagagagacggccggcggggcgcgggagtggggatgagaagcgccannnncctccgctccctctgccgtctcagggctgaacgtgccgcgctccaagcggctcttccgagacctggtgagcctgcaggtgccggaggaacaggtgctgaacgctgcgctgagggagaaactggcgctcctgccaccacaggcccgagccccgcccccaaaggagccacctgggccagggcccgacatgaccatcctttgtgacccagaaacattattttatgagtctccacacctgaccctggacggtctgcctcctctgcgtcttcaactccggccccgcccttcagaggatactttcctcatgcaccggacactgaggcgatgggaagcctagatgtggaggccctcaggattgct

SEQ ID NO: 8031 - DNA, 590 bp, Canis familiaris
  misc_feature (1)..(590): n = a or c or g or t
gnnacngcagaaaagaagagagaaagaagagaatcattgctctactttggatttcagaaatctatcccacatccaggatacagcagagattggagcagcaaagcaaaaaggcagggaatgacatagagaagacctgagacaagcctcttaactctaatggtctgagagaaccttcaacatttcccaatgatcatgataggacagagtagcagatggcccagaagaagccttgtagaatgcggactgtctggctctgaatattggctaccatgcagggccatgagtatcagcagcttccagaaactggattcaggactcagtggccaagagaggcagggcatattaaacctcaacagggaggtcaatgattatggactggacttggacccactccctgtaccctgcaacgtccagaataccacagtgttctgagccttctccaagaccagacaccacccaagaagaagggaaggacaagcagagaatgagactcctgaattaactgatttattaacaataaaaatattaagttttaagccagagatatctcaaattggcaagattaggctttccactactgaactggatcc

SEQ ID NO: 8032 - DNA, 612 bp, Canis familiaris
agggcatgagtagtctctatttttgatgacggaaggctctatttttgacttgttcatgagtatttgtgaaacatgttacaatatcttaaaccaatacagtcagttcacattagaatttcatagttgatttcagtgatggagatttcagaaagactgggttttgtttacttatttgtgtatttttaagccgtggatcattaggagaccttcaaatttgttataatgtgttacttagaactaagaatttcttaccagagtgctgataaatggctaaattttaagccgtgtagtagtaattgaggaatctgagtttaattctgactattgttaaaaaatgaaacaacgatcccttttccttaaaataaatttaaggaaataatgtgaacatgtgtatgttttctagtagagcattaaataattcagtggttacccaaatgtctttagccattaaagggttaatgagggaatgttaacattgtatagttttcagtatttttcttcacatgatgcatacctttctctgttcttttttttaagttgtgctttcatcctttaaaaatctatgtcctcctttgaaaaacgtaaacagtttcacacccctgtttaatgtaa

SEQ ID NO: 8033 - DNA, 536 bp, Canis familiaris
  misc_feature (1)..(536): n = a or c or g or t
ttcccntnnngctcctcacccacctcatcatcnagtngctgcccagcccaatggcctctctcaggagggccctatctatcgctgccaggaggagggcctgggtcactttcaagctgtaatgatggaacagattggcactggaagtggaataaggggacctttccaggaaatgtataggccttcaggaatgcaaatgcatccagtccagtcacagtcctcgttcccaaagaccccaacaccagcaacatcacaggaagagctgacaccacataagcccccaacacttcctcttgatcagagttagtccaaggacgaaataaaccccaaggaaacagaaagctgcacatgaagactggaacatggagaatttagggaaatgatccctgcccatctctgttcctgttagcctgccacaccccttcacagtgcatcacgtcctgccatccaagagctgaagcctttcccagagccttggaagcatacttcttagactaacaccaatttacaggggtccttggttggggatctctcgtatg

SEQ ID NO: 8034 - DNA, 484 bp, Canis familiaris
  misc_feature (1)..(484): n = a or c or g or t
acgtactacattatgaataagaatagaaaagtgacataactctcttcacccagatatgcaaaactgatgaagcaaaagtgatcaaaactaagatacagggaaagttgcttacccttttcagattttagatgacttttcagattttaattttttactaatttttcacgttatccttctttttacaaggaactgcaagccagcaggtgataacctttctgttcctagagctctatcttcataataaaaagttttcactcaagcctttagaattgtgacagcatttataagtggaaaggaatattagatcaggaaagacccctttgatgtcctatacactgttctgttattttctgttctctatcttatcgatagagaagataattttaacatgaattgtcacttgtattcacttgctgttaatactttgctatgttctgctttaaagcaggannnngatctttatgttcccaaatagtttcttctc

SEQ ID NO: 8035 - DNA, 422 bp, Canis familiaris
  misc_feature (1)..(422): n = a or c or g or t
accaancatntatggcngggctgtgttagnnnttgaaggttggcttgctgnnnnncagatgagttttgnnnnnnncaaatcnnnnntgtcanannataatttcgccctgggttacaangnnncnnnnntccannngcacacncntgtgaatgatngnnnnnnatttnnngggtctatctaccagaaggttaatgagaagattgaaacatcaatannnnntgcnnngacagccggcagtaacaatacccgttttggcatcgctgctaaatacaagctggattgtagaacntnnnnnnctgctaaagtaaanantgccagcctgntnggnnngggttatactcagactcttcnnccaggagtcaaactgaccctatcagctttaatcgacggaaagaacttcaatgcangaggtcacaaggttg

SEQ ID NO: 8036 - DNA, 615 bp, Canis familiaris
  misc_feature (1)..(615): n = a or c or g or t
ttgccgggtgnatgggattccttgtcaccnnngctgtcagaactgccactagctgannatggcccagtccccaggctgactcagccccacatccccatgctgctgtgggacagggctggtgctttggcttggatttctggcctggggggatgcctttgcgcttggctgatacaggccttgtagagaccaaggcccctgaactgtgtggatggctttgtttgcaaggggtgttgcaggggccttgcctaagcttgcggtgggtgttgtccatggctctgtctgccccagggcctttgcccctcctctggggctctcagcttttctctgtggctctttcctctgcccgacccagacttaaacacagccctgctggatggagcctcagagagccctgtgtgagtccacactcaccccttccaccaccctcgtccgcttaacgttgagcacccataacccacgacttccccatcagctttctggggctgactgtcctctgtctttgctgtcggaggcctggggcctcttagagagctgctgctaatcctgttgggatccaggaggagggagacctggcagtgtctgaagcnnngcccatcaggtcagcttccatgtctc

SEQ ID NO: 8037 - DNA, 571 bp, Canis familiaris
  misc_feature (1)..(571): n = a or c or g or t
cccctgcttccagccgtacggttccccagtnnngnnntaactcaccagctgcccacatcctcaggcatttccaccctctcctgccctttgctgtattccacctgctgggaacagcctttatgtcctcatgggggccacattcctttaggtcctacagatggggatgatgttcccccccccgccccccgtggctgcgcagcactcacgatgcccacatctctagattctaagccccttcctggcgactgcttttcctccccgcccagccccagcacagatgttaacagtaatgctctgaccgctgcaggcacttctccatctgtgtgctgactaccaaccaggcaagaggatggagctacttcacaaggggcaggctgacctccagccaacagcataaaggtgctgctacgtgtgagctcctcagaagatagggggggttctccaaaagcagaatctcaggactcctgggtggctcagtggttgaggtctgccttcagctcaggctgtgatccgagggtcctgggatcggatcctgcatgaggctccccacagggagcctgcttctctctgc

SEQ ID NO: 8038 - DNA, 478 bp, Canis familiaris
  misc_feature (1)..(478): n = a or c or g or t
acagtacataactcccgtgaaaaagaatnnngctaaaaaagagttgactttgccttaaaaggcaaatggaacccaagccccatccattacctaatgtgtgatatttcatcattatttggtgagaatcaccaagttctcgccaataaattggtttagggtatgctgctttttaaatggtggcacttatttttacagattgctactccaaggaagaaaactggccacttttcatgtaaatattttgttaaaagatttatatatctctctaggagttttcccttagttcctaggatagtccaggagtagattaacaagaaaaaatctcccaaggatgtcttggttagatttactctaaggaactctactgctcattcatttgggccaaagggaagctatgaatagagagtcacatgagccagattccctacttcattgttcatagcaccccgagggtagttgtgggaaatcctaataacac

SEQ ID NO: 8039 - DNA, 570 bp, Canis familiaris
  misc_feature (1)..(570): n = a or c or g or t
gagtcccccagtgtctgtatcacacatagtccagagcgagcgtnccattcttnngcttcanncagaaaactgcctcgctttgtgtcccccctaggattctattacatatgcaattttaggtccgacccatctcttcccctgccagccgaccccgccaccctaagataaattttagcttatatatgatggtatatttacaagagagagaaagagaaaacctggtatttgcaatgacctgtgccttctttttaccaccctcttgattggagcttttgtgatgcagctaccatgattcaaaggaaaaacaaacaaacaaaaaacaaaacacctttttttaaaatcgacttctcagagtccactagaggccactgtcttcgaagcttctgtcacctagccaaaggtcccaggaggagacagctgtgaagctgggcgtgctctgtggtaccagctattacgtcgaagtcctcctagttgtaggttgttcatggaactagaagtgtcacccttgcttgatttttcatcagccaagttaaacccctgcttcctgnnnnntgcaccttttgcgtgaac

SEQ ID NO: 8040 - DNA, 584 bp, Canis familiaris
aaaaatagaagaagagaaagaaaagaaaaaagagaatgacatggtatttaaagcatggttgcaaaagaaaagagagcaggtcctagaaatgaggagaattcagcgagcaaagcaaattgaagatatgaatagtagacaggaaaacagagatccacaacaagcttttcgattatggcttaaaaaaaagcatgaagagcagttgaaagaaagaaagacagaagaactacgaaagcaagaggaatgcttattcttccttaaaggaacagagggccgtgagcgggccttcaaacaatggctacgaaggaaacggatcgaaaaactagcagaacaacaagctgtcagagaaagaactagacagctcagactagaagcaaagcattctaaacaactgcagagccacctatacatgtcagaagccaaatcttttcgttttactgatcattacaactgaaagtatctattaaatacttcagttggaagctgctatcctcaaaattttggatattatttcttatggtctgtgtactttggtcatactctaaattatggaaatgctatttatcttttggtgatactgacagtga

SEQ ID NO: 8041 - DNA, 546 bp, Canis familiaris
  misc_feature (1)..(546): n = a or c or g or t
cacctgccccaccctggcgnngccacagcagcccntcacggcaannaacccntgcagcctggggnctcctcttcaccttggcacagaaatcatttggggggatggtagggagggctggggggagggnnnngctgctatctttgagacagaaagacgcgggagagcgtttcatatgtaaccattcgggtgtttttgctgtttttagaattcagaactctcgttgggggtgcctgggaggtggggtgagaggagcttccatttgtcccataggttgcacggtagggggtggttgtgtgtggggcagctgctgacaagtttgcaacaaccagccctagtctgtgttgcctgggtgctcactgagaggggctgttgtctgggagcccatgcccctgggtccctgagggtcatggcttgtctccagccagtccgttctgcccttccctgccccatccccacccttctggccagagctcgggcccattcttaaccctacccattgatcatttcaagaaacctctgtttactgtgcagcacccaggcaaaaca

SEQ ID NO: 8042 - DNA, 498 bp, Canis familiaris
atgaagaaatgtagaatttgtgatcttactttctccatacaactgctatcatctttaaatacagaactataaaatcaaccaaatgttcaaagttttggtaggtttattttgatgtaacttgctttttactcttttgcataacctatagctcagatcttataagttttcagaagttttatgggaattcagagagaaaagaaacatctgcattggcactaaaactttttgtttacataattgatttttggtattaacatcacttttcccaaaggtaactttatggagtattttcacaaaagaatcctattctaaaactctttaagaatgtgcatttggttaaatccagaaattcactgggaaagactcctcaaccatatgtattttaaatatatgtaattagagccattataataaggctaatgttaattatcaaactttaatttcatcttgttaaaatatgattgctaagagccttagattttataaggcatattataa

SEQ ID NO: 8043 - DNA, 604 bp, Canis familiaris
  misc_feature (1)..(604): n = a or c or g or t
gaccatatcnncaacagcagcctgttccaantagtgatgctgtcttgaattgccctgcctgcatgaccacactatgtcttgattgccaaaggcatgaatcatacaaaactcagtatagagcaatgtttgtgatgaattgttctgtcaacaaagaggaggttctaagatacaaaatcccagagaacaggaagaaaaggcgaggccataagaagatgaggtctaaccacgaagacgctgcagagcagacagaggcacaagcagaagagatctatcaccccgttatgtgcaccgaatgttccacggaagtggccgtctacgacaaggacgaagtctttcattttttcaacgttttagcaagtcattcttgaatagttcagttggcatttaattgcccaatacagtataaggcaaacacggacagttattaccctcttgcctattcatatcaagtaacattctgagcggttatctgaggatacagtgtttatctttttgaaagagaatggttgtcagccttcatccctccaccccctttaaaaatttttcccccagctctgatgggactgataattcattccctctttgatgggcatttggaaactat

SEQ ID NO: 8044 - DNA, 508 bp, Canis familiaris
  misc_feature (1)..(508): n = a or c or g or t
actgctcctcgaaaaggcactgtctnnagtctttcaggatccgactggcttgggacaatagncgcaggagatatatctggggagctcattgcagctatattgcctgatatggcactgaacccaataaatgtcaagcgacctgtagagcgaagattccctatatataaagcagatctgatgccatatcaggacagccctgaaggtcgagatcattctgcttcatctgaggcccccaaccctcctaaggctcgaacttatgctgaaactgtcaaccatcactacttgctctttcaagacacagatttgagttccttccatgatcnnnnccacagggagccaatgctgcgcatgcaggaannnnnnnngcattcacagctctgcttggacaggctgcagctcgaggcaattcacaaggtccgattcagtcccaacctggattcttatggatggctggtatctgggggacagtcagggctggttcggatccattttgtccgtggactcacct

SEQ ID NO: 8045 - DNA, 269 bp, Canis familiaris
  misc_feature (1)..(269): n = a or c or g or t
tctcttgggctttatccatgtctttagatttgtgtttgcnttttttttttttctctttttgtttttttttttttaaaccagcacagttcattggccactctgcacacattcagtattagcgtggagctgggattcttgctggagcccctggtggcgacagcagcagcactaggcagccacctccatgggctgccttggacccaaccattgaacatttggcaccggaccctcgtggagagagtggggactgggcacctgcagtcctcctt

SEQ ID NO: 8046 - DNA, 515 bp, Canis familiaris
  misc_feature (1)..(515): n = a or c or g or t
gagattgantnagtgaatggnnnaatatgtgaaactggtgaacctgnataaaaaaaaagannagttccttgtactattcttgcaacttttctttaagtttgaaattctatctaagtaaaaagttaccaggaaagaaaggtgtgcagtggaggaagcagatgtgaggtgtgcgcatagccaggatgacctgctcagacaagctggaagcaaatgtggacttgccatttatttttcagccactacgtattcattgtccctgtttgccttaaagtcttaaaggctggannttttccttgaactgccctggtgcttacagacaaaagagggaggaggtcagtcttcattccacacccaagtgcccagagcccgctgccacttcttcctcctgccatgaggtgtcgctgtggaagatgcgtctttggtatcagttgtgtgaggtgcctcagacctggccggctgccttggacttggagggaaagctaccctgcannnnnnggtgctgtggagaatgcaca

SEQ ID NO: 8047 - DNA, 522 bp, Canis familiaris
  misc_feature (1)..(522): n = a or c or g or t
gcactttgtgacgtgagattgtcctggcatcttgagttccatccccgnnggatcaagctggtattttttaaattttgagtagaagaggcaactgggtggctcagtcagttaagcatccaactcttgatttcagctcaggttgtgatcttggggtcatgaggtcgagccccacattgggcagggagtccgcttgatgattctccctctccctggcccctcttgctcacccacacactaataaatacatctttaaaaatatttttgtgcagctaatatctaggattaggatttctgcacacacataaggagtctgtaatctcgtctccttgtactgtcctcacctgattttagaaccaggttataccagcctcannnnatgaggatgagccacttttcctgcttgtagggtttccaacataattcctattaaacggcttcaccgtgtctggaaactgtggcacaagcacccataccagccgatgtctcaggcactcctgcgggtggtgaccagctccaggtcct

SEQ ID NO: 8048 - DNA, 541 bp, Canis familiaris
  misc_feature (1)..(541): n = a or c or g or t
anncacagaagtacctgctgtctcccttcactgtgagtncnnnntnntcnagtgtcnaggctanntggtgnntannnnagaagacagctgctatcactgtcttcttcctggctctgaactagtttgagggnctcttgggatggaagatggagaagcattgcatggagtcccaaacccctcttctcccccgtggtcttcattcctcccccacttggtggtcaacgatgggcctgccctcgccctcatctgctcaccgagagttggccttggagcagggcctgctgaattggaagggcagccaggttcaaatagactggtccaggtcggcagccttggccaggaaggacccaggccgctcgggtgcctgatggcaatgtggtgatggggaaggagcagccacccagccagcccaggctctgcttcccgctcccctcctcactcacgttctccttctgccacccgtccctggccctttcctcccttacggcccgagagtgttttctgtgctaaaccttcttatttacactgtggcatcaaaatc

SEQ ID NO: 8049 - DNA, 122 bp, Canis familiaris
tttcaacaaggagaggtgtggtttgtaatttctttaaatttttctcttcagctggaaatattgcactaaaacactgaatctgtactttatggttggtgttcattgacaccttgatggctctt

SEQ ID NO: 8050 - DNA, 597 bp, Canis familiaris
  misc_feature (1)..(597): n = a or c or g or t
tgggngtgaaatgtgnaatgtgaatttaccactgaagtttgctcagaaggactttggattactgccttcagtttgttggaaaaacccatttcaaaaacttttttttttttttttaattattggataagaagtgctttcttcgtaaatgtggtattttgttaaagccaaaatagcaattaaaaaaatattctgccctccagatgggttcttttaaacaatttatgtagtgtgacaaagaattgttttctctgtttaatgtgtcatgaaatcttaatgacatggatcttgttactaatttaagccattgctagatctcatccttttagggaagtttgttgaggtacgagaaaaccttccaaatagcaccttccaattagagtttagcagctttctttgtcagaaacgtgctggagaaacaaaggctgacatacggcctttgaagttagcatagaatgagaagaaattataaataaggtgtatttcggcaactatcttgcagatatctttgtactaaactaaaaagataaaataagttaacttcttcatatgtaattatgtacaaaacgtttaatttattttgatctctttagaagtata

SEQ ID NO: 8051 - DNA, 183 bp, Canis familiaris
  misc_feature (1)..(183): n = a or c or g or t
gagatgaataggtttggnagcaaaaccaggctgacaaagacatttttatgaagtgcctggacctatttgatttaaaccaatcagaggcaagtttggacgagtcaggccttcagcgnnnnnnntncattcacaggcattgtaccatnnnnnntatgccttaaataanancacccattgattctt

SEQ ID NO: 8052 - DNA, 438 bp, Canis familiaris
  misc_feature (1)..(438): n = a or c or g or t
ctccatattnnnctcctccctcaatgtggtcaccancttctatgtcatggtaggcttcnncggctacgtgagcttcactgaggccactgcgggcaacgtgctgatgcactttccctccaacctggtgactgagatgatgcgagtgggcttcatgatgtcggtggccgtgggcttccccatgatgatcctgccatgtcgacaggccttgaacacgctgctttttgagcagcaggtaaggttcttgaggctcttcaggcggcattttgccaggaaaatgttactctgctcatcttaattatgttctcttctgttggcttgcaggggttctctagttttcggggctgtggcagggggagcttttcctggttaaaaatggaaaagctggaaaaataaataaataaataaatggaaaagctgggatccctgggtggctcagca

SEQ ID NO: 8053 - DNA, 531 bp, Canis familiaris
aagctgaagtgtgtcacataccagctgacagcactttattttattgttctccatgagtcggtattcattataatccctccagtcaaaaaattactgctccatctggcgtggttttctatcacaaatatgtatatgtgacattgatacatagctatatatatattgccgttacacacgaacaataaaataaagtgtcatattaaccttatttctttacccttttgcgatgtgtaggaatgagtgagtggctggcttccaatgctctgtatgtcagactcctccctggcacaagaaattccaatcatgtgaagcaaactgccctttgtcctcaaagaaattgtttcaaaagaaaagttttttaaaagatttgtttgatattatctgccttgttcttatcaacttgaaatgttggcattttctaactatgttttgttggctacagtaattcagtattcctgtcaaaattgaaaagtgccctaattgaatgtgtttgaatgttatccttgcacagttctttaaattgaaagacaa

SEQ ID NO: 8054 - DNA, 531 bp, Canis familiaris
  misc_feature (1)..(531): n = a or c or g or t
cntaagncntagaagtttgagaatctctgagaattttgccaattgagttttacatgttctttcttcctttctagagcttgtgggcaatatgagcagtaaagtttctaagtggtgggattttgcaaagctttttaacagcagttacagtaaaatagatacttttgtcactagagagatagataagaaattcctcggtcaggaacacaaaattaggtaatatttttatactgtttctatctctccaggtagaaaatgcttcaaaagtcctgagaataagcaatgaccagaacatattaaaaatctactgggccatgtggtaaaagagagagcagaaataaactcatgcatatacgatcaaccgatctccaataagagtgtcaagaatacacaatagggaaagaatagagtcttcaatgaacagtgttaggaaaggctctctgctttccactatgtgaggataagaatagaagcagcggtatgcgaccatgaggagnnnnctccctggaacggnnnntgcttgcaccccagtct

SEQ ID NO: 8055 - DNA, 587 bp, Canis familiaris
  misc_feature (1)..(587): n = a or c or g or t
ccgccggggnntcngatcagagctttgttccctcaaggctcacactttccaacnnncnannnnnctcccacaaagatttatttccagaaaaaaaattggcgagtgccagtgttcccactccttcagctgagcttctatgacagctccaagcttcgcgttgaatgcaggcgttacgtgccaaagtcactcgttcaacaaatacggttcttataatgacagctaccatttactgcgtgttgacaacgtgccaggcctgtgctgacgcttcaagaacatgttcatgtgatccttaataggaactctctgtggtaggtaccagtggggcctccagttttcaaacgaggaagctgaattacttgccagagttacagagcaacttgggactttgaagggaacacacctgcctgatgaaaccccatgaatttaacccctgccgtaggccataccaaaataacgtttgctacactttgcgcacagtgatgcctctggatggggagacatcctgggttccattcctgccttgggcactttactgggggttagactggccaggttacctgacttggctgaacctgggccacttttta

SEQ ID NO: 8056 - DNA, 225 bp, Canis familiaris
  misc_feature (1)..(225): n = a or c or g or t
ccaattatttgtaaagatgatagtggtcaatgagcattagattttatagatccgataaggcaaatatttttattattaattatctcaaggtaataaaactttttttaccttccgagtgcctcatgggaccaactattacacnnngggtttttgtttttgtgagttttttttttttttaaccttactgagctaatgttgactaaaatccttagatctttgcctctg

SEQ ID NO: 8057 - DNA, 602 bp, Canis familiaris
  misc_feature (1)..(602): n = a or c or g or t
gangcangagaagaaaatgggagtgtgagtgagtgtgcatgtgnnngagactcaccnttccccccannngtgtctaacaaggaacaggcatttaatgtattttgctcacgactgcagcgtgcatgtatttttttttaatctcctccatgttttcttaacttacactaaaaggattcatcaaatcatctgttcagatggctcaggattgtatttcttttgcttacgctgtgctcttgggttctatagtatttctataattatgtaacaagaatagtgttgcactgtaatctatcatatagagctatatgtatggaaaattttgatcagttttttaagaaatgtatcctgtttgcaaaggcacaataaagttgcatcttatagactataggcaataaagctaacaataaaccttatttaacacaaaccatattcatactctctgttcatttgattttggaaaaagtccaccatatccagtagtttcagggattttattttgacttaaaaagttctgatatacttaatttataaatttcagactgatataagagttttggaaaactataacaaatgctttgttaatgtgtgtattcctatgtaaa

SEQ ID NO: 8058 - DNA, 620 bp, Canis familiaris
  misc_feature (1)..(620): n = a or c or g or t
cactgaagagcatgcagctgtcaatgtcatctgcagagnnnnnngaagaacacnnnagnnngaagcatagaaacagnnngagnnnnnncagcgtnnnnnnaaggactgccatggtcttgacctgtttnnaaactgctgggcccggtactgggtaatacctgtgactctgcagctgtttatatgctccagggctggagcgtctgtgtgaagtcatacatgcaaatctccttcccactcctccctaaaatgaactggtgtctggaatttggtgcaggatatcacccaggagtgaatctcatggtactcgtcagcatgaccctttacaattccagttttgctcaagaaggggaaggtactgatcatggttctattttgcatctcattcatctcagcatctgctatttgaagaaagctgttgagaaaaggcttagtgctggcaaagtgaaattcagagttgagtaatcacatacttggcccatttagaagcaccacactactccctgtagggaatttaggcataaaagctctattttcttggaatattacatatccttttctagctctcctttattgaacatgtctccaatcccagtttcttttgtgactagcataaaatgtag

SEQ ID NO: 8059 - DNA, 426 bp, Canis familiaris
  misc_feature (1)..(426): n = a or c or g or t
tcagagactgacatgntaactgaagaagacaaaagtaagaaaaaggggcaagaagaaaaacaanntaaaaagcagcttaaaaaggatgaagagggccagaaggaagaagataagccaagaaaagagccagacaaaaaagaggggaagaaagaagttgaatccaaaagaaaaaatttacctaaaacaggggttacatcaacctctgattctgaagaggaaggagatgatcaagaaagtgaaaagaagagaaaaggtggaaggaactttcagactcctcatagaaggaatatgctgaaaggccagcatgagaaagaagcagcagatagaaaacgcaagcaagaggaacagatggaaactgagcattttgctctgtaaagcatttcagatgcancttgtgtgaaatgcatnnnnnaaataaagtttatt

SEQ ID NO: 8060 - DNA, 527 bp, Canis familiaris
  misc_feature (1)..(527): n = a or c or g or t
ggctacgcnnngcagcgcnnnattcacgnnccatccagctagagaggggcagagcctccttgagaacaggnnagggattactgctgtcgccaaggacactagagccagtggccaggctcattggtggatgcagagaacccaggctcaggggagcccaggcaaggcaaggccatgaacacaggaccttcagtgatattgggtgccaccatcctactctgggagcactggaagggagagcatatccctccttcaaatctcccagccttgggtcaacctcaggccagggaatgactgctcccttcttggcatttcctgggtgaggtggcctcgccctccttctccgccctccccctcctccatcctctcctcctcctcctcctcctcctctggcactccagggccctagcccagctcaaggtaagactcaggtctggcttcaaatcccaagacatctccttgctagctggatgacctcaagtaagccacttgtccaccttgggcttatttcctcatctataatannnnca

SEQ ID NO: 8061 - DNA, 399 bp, Canis familiaris
  misc_feature (1)..(399): n = a or c or g or t
tctgcccccgcntngatggaccnngagggnnncgggctcagggaggnnacncagacccagaaggacacctnnngcaggaccccactcccaggaggtccccagaggaggcctgtccacagagacagagaggaggtggtgggagccagaggtggggcagggggcaggaggtcagtgcttcctggggacggggtctccgtgtagggagacagaaggttctggagatctgtttcacagtagtgcaaatctacttaacactacaaactgtatgcttaaaaatggttgagatggtaaggttatgtatttttttacgtatttttttcagcaatcaaaattttttattttttttaaagatttatttatttatttgttcatgatagacagacagagagagagagagag

SEQ ID NO: 8062 - DNA, 464 bp, Canis familiaris
  misc_feature (1)..(464): n = a or c or g or t
cactcaannnngcattnngtntgcnnactccttcattcccaagttcatcacccacctcttcaagtgcnagnnaattagcatggtnggagcagaacagctgctgctagacactcatnnnnnnaagatnntnntgctcgatctaccgtccannggctcacaggtggtgagnnaagcanntgccagnnacactaagattgttgtgaaaggcatgacccnnnnagaaatgatactcaaggtggtgannnnnnctcatgnnnngttggtggtatttgttgacaactacatcaaactnnnnacagactgcaacacagannnnnnncagaagatattggacatgaagggnctgaagagaagtgagcagagcagcatgcnnnnactcnnnngccagaggctccccannnnnnnnncannnnnngaaggctccagctcattgtnnnncnnngctccgacaccagaacnnnaat

SEQ ID NO: 8063 - DNA, 587 bp, Canis familiaris
  misc_feature (1)..(587): n = a or c or g or t
cttaannnaggtgtcatgaagaanannnnnnaatttcattctgnagcttgctttaaagaaatngatgtgcctaaaaactcccctcagaaaactgcaaattttgncttgnnntttttaaaatcttgtntttttatgtaaaatagcgtagatgcatctttgcatattttcacgttttttatcttgctatgagagcatatgtcgtgactgtcgttgacagttttatttnntggtttctttgtgaagctgaaaaggaacattgaatggggtgaaatatgccaattttatttataaaagtgggtacttataaatgagaccttatactatgcataaannnnnaaaaaaaaaaagtgaacttagcagtattgtcaggtgggtgacacaccgacatctattcttcaggcggataaaagaattctgtttgagagctttatgtttcttttaattcagaatttttccaaggtctagtttttagttgcaaacttgactttgaaatacttctgttggttatcacgatcaaggatatttgaaatcactactgtgttgtgctgcgtatttggggtgggggcggggggacaaagttaacgtat

SEQ ID NO: 8064 - DNA, 243 bp, Canis familiaris
atacaaaatcatctgcttctgaaaagaaaagaaaaagaaaaagaattcggaacagatctatctcaaaagtactttctgaaaagcagaatgcagaatgataattctttgaatactttttaaagacactcatgtgaaaaccaaatttctttttaaaactggaagtatttacaataaaagactattatttttataaatagatattgacccataggcctttgagtaaaattatttatattaaaaaac

SEQ ID NO: 8065 - DNA, 591 bp, Canis familiaris
  misc_feature (1)..(591): n = a or c or g or t
cgagaaaattcaannnnnngaaannaaaggnngctgannaggnnagnctggcatgtggggttgcttctgtctggggatgtgtgctgattctgcaggctgctgaggtcccgtgctgtatttttagaagctagaaatgaagtcccaggccccaaacttcatcccgagctcgtttaaggaactcttagactgctactgtcaaaaacaaaaatctttgcaggaagaaactaacatcattgcaggccttgaattatcctacagatacgttaccaaacacctagttcgcaagcaaagatcgccaggctccccacggagaagagaccagcaataagagaagcagatgcttcagacactggagtttctggtcacagacaggagagggtggggggcagcaacgtagatgccacattgaaggaagaaaagctgagctgggaagacctggcagaaaagtaggaattataacaagtggctccacagatctggggttgggaggtgaggaggctgagatggtgtcaggcaccaagtccatgagccctggaagtggaaatgtcatagccatttggagcgagtagctctctattttccaggtcagct

SEQ ID NO: 8066 - DNA, 107 bp, Canis familiaris
  misc_feature (1)..(107): n = a or c or g or t
ggagttggagtgaccgttcgatattttctggcattgatggtctgtcttctgctgatcccagctctgattggaatgcaccagcagaagagtggnnnnnttgggtagat

SEQ ID NO: 8067 - DNA, 637 bp, Canis familiaris
  misc_feature (1)..(637): n = a or c or g or t
agctggagaaagaagaacaaattccagatggaatgtgtatcgatactgaggggaagcnnngggtggcctgttacaatggaggaagagtgattcgtttggatcctgagacagggaaaagactccaaactgtgaagttacctgttgataaaacaacttcatgctgctttggagggaaggactactctgaaatgtatgtgacctgtgcccgggatggaatggaccctgagagtcttctgaagcagcctgaagctggtgggattttcaagataactggccttggggtcaaaggaattcctccctatccctatgcaggatgaatggcaggtcttctttcctactgggagaaatttgaagacacgtagaaaattctagagctgaaatttcaatctagttacaaaacaaattaaagaaatggtactattaacaggcaaaattaacgttttttttttttcatttttaagaggtagagcattttaataaggggtgacaggtagttttgataacacactaagaggccttctacaaaggtattacagaaatataaagaattgttcaactgtcaatcagcctctactctttgcaaattgctagaaggggactgggggtactatatcttttatgcattccatacttatta

SEQ ID NO: 8068 - DNA, 547 bp, Canis familiaris
  misc_feature (1)..(547): n = a or c or g or t
anntgcagcaccccaccccttcaggtgtcgtnctgacacccttctagaaaagtgagtgcaggtgnnnnnngctgcccaccctccaggattgggtattttaactaaagaaggaaaatcttcaccacattgaaaaatagtgtctagctttaatttgcatcttttgttatgatgagtttgaattctttttgcatatgcttaccatttttatttctatttttaagttctcagttaatatttgtctattaattgcattttttaaaataaattatacagattccctaaaaaacctgagtatgtgctcatgagaaaaacaaacaaaaaacttcatttactgtgaatatttttctaatttgtttgccatctacttttggctttttcattaaacatgcaaaacctatttttcattattctgtagacaaattttgtactttttatttcttcttttgcttgtaagctttaaaatgtttttcttcattctgtattctagtattttatgttttgctttttttattacnnnnaaaagctaatattcnnnnttatttcccat

SEQ ID NO: 8069 - DNA, 533 bp, Canis familiaris
  misc_feature (1)..(533): n = a or c or g or t
ttgtacgaagaattcnnnnnnntnnnannnagctctgtaccattncagcaagttccagtgtgggggtgtcctggtgcacccagagtgggtgctcaccgctgcccactgcataaacacaattaccagctctggctgggtcgctacaacctgttcgagcatgaagacacggcccagcttgtccagatcagggagagcttccctcaccctgaattcaacctgagtttcctgaagaaccatacccgcctcccagaagaggactacagccatgacctcatgctgctgcgcctcgcagagcccactcagattacggatgctgtgagggtcctggacctgcccacccaggaaccccaagtggggagcacctgctgtgcctctggctggggctgcatcgaacccgataagtgtatgccagggccagaccctgcagcctttagtccagacatttggctgtcgggaggagggggctggggtctggactctggacctgagggaggacgggctgaggagtcacctggggtctggccaccgccctt

SEQ ID NO: 8070 - DNA, 595 bp, Canis familiaris
cagacatggccaagtccaagaaccacaccacgcacaaccagtcacgaaaatggcacagaaacggcatcaagaaaccccggtcacaaagatacgaatctcttaagggggtagaccccaagttcctgaggaacatgcgctttgccaagaagcacaacaagaagggcctgaagaagatgcaggccaacaatgccaaggccatggctgcgcgtgctgaggctatcaaggctcttgtcaagcccaaggaggttaagcccaagatcccaaagggcggcagccgcaagctcaatcgacttgcctacatcgctcaccccaagctcgggaaacgtgctcgtgcccgcattgccaaaggtctcaggctctgccggccaaaggccaaggccaaggctcaaaccaaggcccaggctgcagctgcgaccccggctccggctccggctccggctccggctcctgctcctgctcctgctcctgcttctactcctgcagcgcaggctcccaaaggtgcccaggcccccacaaaggccccagtgtagaggcttctgcctgccagtgtgaggacggaaggactggtatgacccctgggcttctgtctgcatgg

SEQ ID NO: 8071 - DNA, 534 bp, Canis familiaris
ccacatcctccatttgcaatgagaaatgtctatccaccgagaggttttcctcattatcttcccccaagagctggattttttcccccacccccacatcctgaaagtagaagtgagttcccatcagggttgataccaccttcaaatgaacctactactgaacatccagaaccacaacaagaaacttgacaatatttttgatctctcttcgaaagtaattttgacttctctctcattttcagtttaagtaactgctgttacttaagtaattctactttcgctcaaattgaagcttaatggaattataattctcaggatagtattttgtaaataaagatgatttaaatatgaatcttacgagtaaattatttccattttattttattgtagatagtataattattttaatttgattaacaaatccactatcacataaataacaatgggagttttatatatgtaatcttgcagttggggatgttttaaactccgaaggctgtgtctttttgccaagagctgtatctactatggttgtag

SEQ ID NO: 8072 - DNA, 340 bp, Canis familiaris
  misc_feature (1)..(340): n = a or c or g or t
gtgaacaggngtttgctcctcctacatgcctggnnnagaagggagaatttggaagtatagatgatgggcacaaggctccatccggtaaaagcaacttgagggaaggaaataccactctttcaaaacaccaatttcaactcattttctacatttctctacctgtgctcatcatcactgctgttgtcttaataaagcataaaaaaataagagagctgtgctacagaggggaaactgaaagtgagaggtctgtgtcagaagaaagcagtagtaacagcaagttatcacccagtgtaagtctctaatgaccttggcctagaagaaggacattaccaaataaatc

SEQ ID NO: 8073 - DNA, 564 bp, Canis familiaris
  misc_feature (1)..(564): n = a or c or g or t
agcaaatcgnnntctcccatccnnntgggcctccagatctccatcagcaccccctgccttgcggagaactgcccccagctataccatctctctacgatcagcagcatcgatggtctgagtctctggcctggattgctagaggacgaaagtcctaatcgccaaacagagcattccgagtgtttacagccaatcctgtctcttctctgtctttcgagatcactgggacaatttaaatcttaacttcccatcagtcttcagtgtttttaatctatggaataattaccttcccgtattttgagttcttagatcagaattttttaatgccatcctcattaatttgccaatatgatttaagttgaaactgtactataatgtatattctaactttcttgcaagtggcagaaagcaaggttatgtgcatggccaagtgtttgtagatgcatgtgttgaaataggaagtatcctagtatgtatttagataagaaaaacgttatgtgctagtgttgactttgaaattataacatgtatacctannnnnnttctgtttatttaaaatttnnnann

SEQ ID NO: 8074 - DNA, 451 bp, Canis familiaris
  misc_feature (1)..(451): n = a or c or g or t
tgagggcttgttgcgaatggtttaagaagnnnnnnaagtaatgcnntttcctcttagtatngggagttagatannnnngtnncatatattttttcattccnnntgnnnnatgtgtntnnnagtgtgggctcctggttgacacctgnnnntnacaacttnntgtgatnnngcaaattcagcagctagaangctgattatcagtggacacatcatannnnatatnnngcantgtcatnnntgttgtgttgtttgctttacantaaacccngaactgaaatctaaaacaatgttaaaactttaaaagtaantnnntgnnnnngcagtctttgnnnnnngttttcaagctaacgcttcaaagaagtttgttcaggatagggaaacatactttaggttatttgtaaaatagaatttaaaaatgtgtttatatttaatgaagatacttaatttcatt

SEQ ID NO: 8075 - DNA, 564 bp, Canis familiaris
  misc_feature (1)..(564): n = a or c or g or t
ttccatgcttannagntgcnnngagatgcaattctgacnncgcactcctctgctgaaattccatggggctaantgcggacttaagtgtaccgcccacatggtcaatgtggacctctgtaccaacccagcctgtccatcacttctgaatagcatttttctggcacatggcttttttggcctccttgaactatctgcagttccttgaggtttccacagtcctgcactttttgcatcttctgtcactgaagtgtctgtgttccttgttaatgcctgtccacactttatgaatctgcacacgtgtctgtcactgtgataatataaccgtcactttcttttccattagaaagcttctggaaagctgggactgcccttcattgtatagtttgagagactgaagctgtaacatatacacatggtaactctccgtggtttccccaaccatgtgggggtgcagttagaggccagaacaaagccatggaagctcgtgctccaggatctggttcttctggtcctgatgtccggggtcacctctgccctctacccttttcatgccttgattgttgc

SEQ ID NO: 8076 - DNA, 596 bp, Canis familiaris
  misc_feature (1)..(596): n = a or c or g or t
gaggactcagaggatgaagtccntgctgagctgcgcaaacggcaggctgagctgaaggcactcagtgcccataaccgtaccaagaagcatgacctgctgaggctggcaaaagaggaggtaagccggcannagctgaggcagcgggtccgcatggcagacaacgaagtcatggacgccttccggaagatcatggctgcccggcagaagaagcggaccccaaccaagaaagagaaggaccaggcctggaagactctgaaggaacgtgagagcatcctaaagctgctggatgggtagccctcacccctgattgcaagcctcctctccctggcctgggggaaggagggatgaaaagcccacttccttcttgctgcctgaacctcaggcctgtggctgcctattaaatgtcaaatcgcgacagtctctagaggactatggccattccctgaggtctcttggcctagctctgtacagtcaggacatgggaggcctttctgggctggcctggagcccacactgggcttcccctctttactgtcccccactcctactcctctctcccccaaggacttctcccttgtggttttgtaaagtgcaaa

SEQ ID NO: 8077 - DNA, 538 bp, Canis familiaris
  misc_feature (1)..(538): n = a or c or g or t
gtagttttatattctcctctgtttcagtacaagtcgagtnnaggtagatgtttttctattaagcagccannnagattcataggattatagaacattagaaccagaaggtgtctttgagatttttgggtccaaccctctccttccacagatgaagttgactaagctcaaagaaattgtgatgtttgtaacttgtaagtggcaggatttaatctcaaacacatgtcccctgattctcagcccagtgctccccacgaaataccacactgcctctctgcagcctagccacacaccttctggttaatatttggcacctggcaggtgacaagtaggtgttcgatgtttttgaattagactaatgttactctgaaacaatagttgactatctcttctaggcactgtgggttttacatattttgtagtaagtcttaactcctgcctgtgagaaactttgcagcctgataaatgcatacatatgtatttatttcactgagttgtgattatcaagtgaatcaaattgtgtgtacaaatgcctgccata

SEQ ID NO: 8078 - DNA, 491 bp, Canis familiaris
  misc_feature (1)..(491): n = a or c or g or t
atgactttcctaaagccagccaattnnnatattaaccatcctctgcaaataaagcctcctgtttattttaaccttttaatggttaattgaaaaggggaaaaagactcaaaatacttatccagccagtagatggaaaacaattccgtcttcagggataggggagtgatgagaattagcannnnnntgccattatgcgtcagacttaaagaatttaatctgttttttcaagccaatgaagtttttcatttaaaacatcttccatccacaaaaatttcctttaactttgtaaatatccagtaagnnnnnntgatacttattttatatattcctatggaaaaggtaatggtattgtaatgttctgacatttgtgattgctagtctttactttttaacttattaaggtttctctaattaaacttgataagttgtcttggtttttagggaaatnnntaaatgtgggaagtttacaacccnnncttactattgggtta

SEQ ID NO: 8079 - DNA, 600 bp, Canis familiaris
  misc_feature (1)..(600): n = a or c or g or t
gctaaagtgttgttcatgaattctgannngctgagtgtgtgcattatgacacttagcaaatgaaagtggctatccatctctttcttaaattaatccatctttacagattttccacggacttccaaatctcataagtaaggatcaaaaggagggataaaggaaacctattggttgggtaggaagatgtttcctttgtgatgttgagagactgctttctcctttctgaatttcactagttctctaaaataaaaagcaggagttcagtggtacccttgctcatcaaggaaagtgatccaaactctctatctagtatgcattgtctttgcatccacagatcttctctgaaagaaaatatgatttttcccttcctctttctcttcatatctactcttttcaactcaaggtagacacaggaagcaaaccaagcccatttggcatcttctccatgctaatagaatagtcacatccacacgcacaatctgagtgaggtaaaaaagaaccccatcaggtcaactcggaacatggccttgctccttggattagctccttcaaacctgaaaactttcctggtcatggaagaactggatgtatcctttagct

SEQ ID NO: 8080 - DNA, 670 bp, Canis familiaris
  misc_feature (1)..(670): n = a or c or g or t
agtaccaatgatctgcannagtccannnctctcgtnnagcagatccacaggnanctnnatgcaaggcacgtcattgacacagctgtgcgcaagatggtctccttgatggcgagctccgacgcggaggccaagtggctgctgtccgacagggccgagcttagggcctatgactgtttccaggcggccgtgacccacttccgcacacactgcttcaactggcactccgtcatgtacgagtatgcgctcaggcagctacacgtgctcgccaacctctgtgagaggcctttcccgatcgacagaatcaagctgtccatggacaaggtgtgcctccgctactactgacacgttggcctctggatcgcctctgcgcggacccacacccgggaggggccttggggctcctgggtgcaggctccctcccccacctccctcaggtcccatgtgccttggggcctgcctgcctctgagtgtgcttccagtcttgaggtgtaggggggcatcaggctctcgctgccaccacggtctctgtcccaaggggttggaggccgggcctgcgcatcctcggaatgattttacccaagatggatgcacagcccccgatgaaaaatgatctttagaaaatgctaggatctttgattgtttttatatctttatttatcaataacgggta

SEQ ID NO: 8081 - DNA, 462 bp, Canis familiaris
  misc_feature (1)..(462): n = a or c or g or t
cccactctgaccagacactagtgacnaggtcccaggccctgaactggttgcaggaagttgggcatagccaacagttgtgggtggttatgcctggttgcttagctgacactgtgtgcctggtgcttcagggagtgagcgactggttacgtggccattctaactgggaggatcttgttctcttcgcttcccaggggctcttgggaactttttggcaaccctggggtgtcagccagattctgaggcagtgaagaagcaggacattaagtgttggcttaggatctccttcccccccccatcttaggacaggttgaggttttgatgggcttttctgtctcttaaggaatttctccctccctgacttaccacacccaagcttcctgaccaccatctagttaactgcccccacacgtatcacagaatgnnnnnnnactttcatgtcaggccccctgcccctgcccccag

SEQ ID NO: 8082 - DNA, 531 bp, Canis familiaris
  misc_feature (1)..(531): n = a or c or g or t
gaangagagtcttgattctttttgtgagttgttnnnnncgggctgaccagtgctcatcaactgccacactgacagaactgctgggacctcaactccttacnnngtagaaacaaaagtctcttttttcttnnnccttttatgaggtgaaaacctggagggtacatataaattacaagcatgggaaacggatttgtgagaagattctggaggaagtgtaaggattccaagtttgagatgtagttggatataaactgatgctggagtgtagcaagtgtaatgcagaatgtgaaataaaaagtaactaaaaaatataggaaagaaaggtcagtagcaacatatcttctctattcttatcagaccaggaaaaagtttacatcaaacctattgtcctggggcaactggacgactcagtcagttaagcgtctgacttcagctcaggtcatgatcctggggtcctgagatcaagccccaagtcaagctccccactcagcagggagtctgcttgtccctctgcccctcccccccacttgt

SEQ ID NO: 8083 - DNA, 598 bp, Canis familiaris
  misc_feature (1)..(598): n = a or c or g or t
accagccnntgacccagagggacctgngctggnntggcccnaggctctgtgagnncaggggcgactcgagccacccccaggcccagcgctaatgggatccagcgccccagggccctggccaggnntgcgnnctggccccgggctgagctagccctcaccgccggatgtggcctcctgggccctgggcatgccccacagatccaggtcgctgacctagggcagccctggggatcccaggacaccccagggcagggcagcaggggcaggcccgtgggccccacccgcacccacaccaggaggcaggctcctccacatgctggggctctagcagtcagtcaccaggccccagggggcccgaggctggggttcagctgccttgcggggacccagtgcaggagcccatgggccgcaggtctacatcagccctgctgtccccagaaccgcctctcaacgccccaacctcaggacatgcgcccccacccggagtccacacaggctcccaggtgggggactccagcacccgtacccctgtgggattcccactttcctctaaggacaggaaggtctcccaggggaaggcgcacaccctcggctctga

SEQ ID NO: 8084 - DNA, 421 bp, Canis familiaris
  misc_feature (1)..(421): n = a or c or g or t
catgaacagnnntcnnnnnnagttgtnnnnnnngtaaatgctcacaattgtgcattcttagggtttatccatnnctggggnnnnnnngttgttnnnttaaaacattcttaaaatggtnnnnnncttgtttgnnngccagcnnatatgnnnnnnnccaannnttccagtgtttgagcnnnnnnaagannnnncctgcttannngtgctagaaatannagcannnaaagtnannannnangaaaaacntagngncnactagattatccttaggactctgcattaannnnntaatgtnnntggtattaaaannnnnnnagcatatttgtcacagaagtttagttaacatcttacaactgaacatgtatgtatgttgcttagataaatgtantcactgtaaacatctatatgatctgggattttg

SEQ ID NO: 8085 - DNA, 509 bp, Canis familiaris
  misc_feature (1)..(509): n = a or c or g or t
atttcagttaccnnnagcaagacagactaagaactctctccaagaggctttactcctacccaacctagaggnntccagggcccagggcagtaaaggnctgaggagctctgagagtggctgggagagaactctggagacttgggtgctagtcccagctctgccacgggatacctctgtcacctagggaagctcactgggatttggttacctcatctaatcctgggttggatgacttctgacacctttccagttctggcatctccttggtgtgggagtgccaagagtctccccaagaagcccccagaataacctcaccaaagggacttcctgtcctgctcccgcttcttgattgcagcctaggcagtggatgagcccacacactggtcctctgctgttccctctgggctgctttggcccctccaaacctgcatagagtacccttgctacctcctgccttgctgagggctgagatgagattttactcagtatgataagatgttgaaagaatg

SEQ ID NO: 8086 - DNA, 510 bp, Canis familiaris
  misc_feature (1)..(510): n = a or c or g or t
tgcagatnnngctgnanngctctgtggggccnnnggnnnnnnagggtcccnnnnnnntggccnaggtttttnnggcagagatcccagaagaccccaaactcttcaggcatcataacaagctgcggctctgtttcaaggactnctgcaagaagtgtgaggatgccctgcnnaagaacaaggccctgataggaccagaccagaaggagtaccaccgtgagctggagcggaactactgccgcctgcgggaggctctgcagcccctgcttacccagcgcctgccccagctgctggcacctaccacagcaggcctcaggaactccttaaacagagcaagtttccggaaggccgacctctgaacctgcgtgacctgaagccacacccagaagaaccatcaccctggcttcacctgtctatgcctccctgggactttcccccactgagccctgggctgtggggtgatcatattgcacaccgggctgggccctctattcctctgttcccatctgtgtg

SEQ ID NO: 8087 - DNA, 444 bp, Canis familiaris
  misc_feature (1)..(444): n = a or c or g or t
aaggcattgtnnnctacgagtagagcatttgattctgtgtnngccatgcaagattatctgcttcactgtttcntattcccattgctctgtcctccctgaatctttcgatcaaatagatatgcacagggctggtggctgagccacgctccagagtatttcattatgaccaagatggaaatgtcaccccaacaggtagatgagcataaacaaggagacatatttccactcattcagtcctggagggggaggtgctttacagcccnnnnnnntcaatctatgtagaacaaggacactattacctgctagcctttccccatgttatgcggtaaccaccttgctgccttacgtcctctgttccaagtggtggtggcatccaccctgaagtaatccatggttttccttttgaaactgctttgttttactaatttaaactgttttgtactg

SEQ ID NO: 8088 - DNA, 463 bp, Canis familiaris
  misc_feature (1)..(463): n = a or c or g or t
aatctgtaacatccccaagtgagcatccagcacagaccagcaggctccaagcagctgccctgggcctaccgtgctcccccccacatgtccacacctggattgcgactgtatgttcactctcagacacgtcctgtgacacttaaaacacttaaaacagccaacatcgctcaaaatgaagaagccagacctggaaatccagccccctgaccagctcctgaccagccatcgtgtctgggaagtggttccacatgcttcatatgcaggtggttgtggggaagagccagtgtgtgtgtgagctctgctaggaaggccccagcgtctcctctgggacccgctgcagcagccagcccttcctgtccccccacacggcccaggcatgcttctcctgtcctgagtaccaggcaggctttccgaacaccagtgagaagtggtagagtgnnnnnnatgtgtactacatcgtgtg

SEQ ID NO: 8089 - DNA, 493 bp, Canis familiaris
  misc_feature (1)..(493): n = a or c or g or t
catagatgataccaggaaatctattaaggnnngagangacttcacagggagcatgtgacctacganngtagggagtttcccagttnnaaaagaatgggaaggcacatcagcagctggaatagcttgaattcagaaaccgagtggccaatccaaagtgtccagtacagtatagtgaagctagacccgaggcttatgtggagagtgaaagataaagctgcaaaggtaggttgggttggggccagactgtgagtctttaccattgtgattagtctaaaaaaatgggagagtcctccattttgtgtgtacatgtgtgtagagtgaactgtgctaagaatccctgtcccagaaacaataattatcaagattggccacgtgtgctcgctttttatttccttttttttttttcccttgctgaagttactttagaggaaatccaagatattgtatcatttcactcctacaaacctcagtttgtgtctgtaagaaatacaga

SEQ ID NO: 8090 - DNA, 525 bp, Canis familiaris
  misc_feature (1)..(525): n = a or c or g or t
tctatnngttcactagactgataatactggaatctacagaatttgagcctttacaacttatgtgaagaagtgtctcaaacatttctggacaaatcttattttgtatttctggaagaatgtaaatcttcttaggccacttaacaccaatggtcccaagttgaatattcttgagaaatctgtttcttgttatgccatttgacatttcaaatcagtgaccatgttcatgtaatattcaaaacaactatgttaaggttgtgatagaaactgtgttttattgctttttggaatatagttcatacacatatattacttgaatattgtttgagatcactaacttgccagggcagttcccactgatctagatggtccaatataatctcatcgaggaggcttgaaacattaatgggttggtcttgtgaattttaacagttccctgtcatcatttaacaaactcaacaactggcacaactttttaagctgtgatttcagtctctgctagttcatattgcatgtttattttggaca

SEQ ID NO: 8091 - DNA, 599 bp, Canis familiaris
  misc_feature (1)..(599): n = a or c or g or t
gctcacaaaagccaggtatcctcactcatcacannagnngcctcagttctcgctactcacagaagcagcattacccctgtaccacatggcgacaccaactngagagagtggactcggggccttctaacactgcagtggcacgtgcacctgaaatgatcctacagcattccctttggcgaccagtgagaaacagagaaggtttaaaaactggatatgtatctaaaacaagatgtaaatcactgaagatttttagaaaaccaagcagactgttcatgcaatcagtttctacaaatgattctgaatcatacatgaatgaagaaaaaaaggaagaagatttactaaataaatgtatgcagtcaatgtcaattgaagaacaaggagaacatctgatgtgacctgacagtcttgtgaattgatgaggtgccaaaggggggaaggggttgtgaattgtgtcctctctttttaggatagtattgttattcaccatgaagtcattaagtaattttagtttgttcagaaacgtttgcaacagtgtaattggtttgatgtagttccatgtactaacgatatttgtgtaataaaagttatgtgtaatatat

SEQ ID NO: 8092 - DNA, 568 bp, Canis familiaris
  misc_feature (1)..(568): n = a or c or g or t
actcatgtggctgtatctcaaatactgnnagctaactgttgagctgannnngtgtcagagagtcgagaaagccatcctggagaagtagggtaggagtgaagtacgtcttctgtgacgcattggcgtgtnctcagctgcttctgccacacgcacccccaagtgttcttccactctcgccccccgtctgagcaggacacggggtctcttcctggccctcttcagctactaaggatgcagtttctcaggaggatttttttaagctgtaatattttattaggctgaactgtataacctcgtatctctgttgtagggtaagattgtttttaagaaagtcgaatacagtattgatcctcactgtacattgttttctgtctgtttttattactccctaaataaattgttttctcctcaaatgttttctctcctagaattataaatagaagttgtcaggtgatggatagaactgccgaatgaagacaaaatagtaacatatccaggtttcctgcggccatgagcatccctcgtatgtttttgggatttggcttgtgtctgtatttagtaagcacat

SEQ ID NO: 8093 - DNA, 579 bp, Canis familiaris
gctcaggtgcctcccctaatgattttgattcagctggtctagaataatttctggatatctgtatttcttttgaagttcgaagaatgagcctgataagcacctgtggatgaagagtagttctacaggttagaaatagagcactgttacattcttggggtacaattttatagctcacctttcagtaccattgagcaaaggatcaacttccttccttttattagaaacctcacacccaagaacacagcaaaagctaagttatatttgagttaagataatcaatagtacaacttgtgtcggcctctgccctaatatgacctaattcatttgttatcatgtttagcttggggaactttaaaaaaggataatatgaacatcctaccccaagagattcagatgtaattggtcggtgtggcctgaacattactacccttgattctgagactcagcagagcttgtgaatcacctagttaacttccaagcctctgttcttcatccagaaaatgaattactatttttgtgaatataaatatacatatttatatatataatctagagtttatacagttggataatagtatt

SEQ ID NO: 8094 - DNA, 397 bp, Canis familiaris
  misc_feature (1)..(397): n = a or c or g or t
aggnnngagnnntngcaaannnncaggtctagttttgatcatttttnnnnncatgcaataaaaanactagcagatgagnaccacaaaggatgttcagttttacaatngnnncttaatgaatgaacattnnnangtttatggtccnnnnnntnctgttttnnnnnnggatcaccatnnannctgtancagttnnngatnnnnnngagccnnnncctnnncaaggaagggacnnnnnnattttaaaactcactnnnnnnnnnnctggttgtggggcttggtgcaaagttcctgtttccacccctacctacaaaataagtataatgatctggaattgaaatagtgtgtttaattataaccaagttnaacagaatatccttgtctttgtaataaannnacc

SEQ ID NO: 8095 - DNA, 620 bp, Canis familiaris
  misc_feature (1)..(620): n = a or c or g or t
gacnnncgggagactgncagcaggccactttgatggcaaaggggaggtnnnncagtatttccgnnncattggagttcccatgancagcgtgcggctgtcctgctattttgagaacctcctctcctacttcttgcccaagaaagcccccgatggaaagagctacttgctgagcttgcccatgggtgatgtgcccatggacggcatatctgtgaccgacctgggccccgtggtgctcagcctgctgaagatgccagaagaatatgtcggccggaacattgggctcagtacctgcaagcacacagcagaagagtatgccgctctgctctccaagcacaccgggaaggccgtgtgtgatgccaagacgaccccggaggactacgagaagcagggcttcccaggtgcccgtgacctggccaacatgttccgtttctatgccctgaagcctgaccgtgacatcgaactgaccctgaggctcaaccccaaggccaggacactggaccagtggctggagcagcacaaaggggactttgctggactctgaccctgccacctctcagccccatctggggagacggggaggtgcagcacagtgatcccttgttttacaaaaaaattatttt

SEQ ID NO: 8096 - DNA, 606 bp, Canis familiaris
  misc_feature (1)..(606): n = a or c or g or t
cgggagcaaggggcaaagtactcnnnngagactggnaggctcatccccacttccacccgagtcattggtcgccgccactcccgccagggcccacggatgtattcttctggcaaagatgaaggagtccagactgttttcctaaaggatcatgagctgctggtcctggagctcctttgtcagatcctgcagacagactccctgagcgctatccagttctggctactttacgctcccccaaaagagaaagacctggccctgggactcctgcaaacagccgtggctcagcaatttccacagcccctagcctctatcccgttggaaaaacttctccatcagctccaggaattccaagagccatctcaagagaagaaacagccgccctacagccaatccccgaagaagacgaagaccccaccactacccaaaggcgaccaaccagagtacatcgggagagcacaaattctccggatgcatctgaaccagaacacagaagacagaaattcaaagccaaaggcagaatgcggagtctgagtccctttggccaccttgctcaggagctgtccccaggttcggggctgctcccagttcacccacctcaacagcaac

SEQ ID NO: 8097 - DNA, 620 bp, Canis familiaris
  misc_feature (1)..(620): n = a or c or g or t
tattatcaagctaatgnnngagtcaaggatgncagtnngaacnaggnnncagaaaaggtggnntncagaatcgccgagggcttcagcgatactgctctcatcatggtagacaacactaagtttacgatggactgcgtggcnnctacaatccatgtgtacgaacaccatgaaaacagatggcggtgcagggacccacactatgattactgtgaagactggccagaggcccagaggatctcagcgtcactcctggacagccggtcctacgaaacacttgtggattttgacaaccacctggatgacattcggaatgactggacaaacccagagatcaataaagccgttctacatctgtgctagggaggggttttagtgactggtctttgggcatttccactacaccgaagaagaaagctattttttaatgtaaataagatctctcctagcctgtgtggaaagccgacagtttttggaggtggcatatgccctgacaaagggcagaatgtccatcagccatcttttaatgcagagtctctagaagaggtgcagactttcccatctgaccggccctgtggagtcctgcccagttgtatgttgctctaatcctccaaaacaaagct

SEQ ID NO: 8098 - DNA, 539 bp, Canis familiaris
  misc_feature (1)..(539): n = a or c or g or t
atttgcttgccctttgcagaaaagaaaggcaaagaaagggtgatctcgaggtcnctgactgaatcacatctgccaagttccttttgccatacagagtaacaccttcacagcttctggggattaggacatggacacctgtgaggggtcattactctgcctaacctaaaaaagagatttttattttcaagagagctagttgttaaatacttagtggcacacactccccgtgaccctcttaataccttggtagacttgtggggaagaccctaatccttctcacggcgctaccactttgattttaatgctgtcataccttctgtcatttagggacacctataaggtttctgcctccaaaaaatggggcacagctgctctctagcccccgagcttctctgggtgtctgtgaagacccaggctgaggctgcagggtgcagttacaccctcctgctattcagatgatcacttctcctctctactttcctctcctttctcagtcattnnattttacttttttggggatgggaaaacttgcttttatg

SEQ ID NO: 8099 - DNA, 697 bp, Canis familiaris
  misc_feature (1)..(697): n = a or c or g or t
atttgtgttnnggcttttttttttcctttttgtttcttaagagtataaggtttacacaatcattctcataatgtgacgcaagccagcaaggccaaaaatgctagagaaaataatgggatctcttccttgtaaacttgtacagtatgtggtgacttttttcaaaatacagctttttgtacatgatttagagaaattttgtacatgaaaccccagatagactataaataattctaaacaagtaggtagatatgtatgtaattgcttttaaatcatttaaatgcctttgtttttggactgtgcaaaggttggaagtgggtttgcatttctaaaatggtgacttttattctgcaagagttcttagtaacttcttgagtgtggtagactttggaacatgtacattttttgcttgtaatgttatcctgtggtagggttttggcaggtacacactgccctattttattttgagtctaagttaaatgttttctgacaagagatacatgcactgaactctttccactgcaaatcaagatgtggtaaaacaaaaggatcaagacaaatgagatctaatactactgtcagtttaatgtccactgtgttttatacagtatctttttgttcactttggaaatttttactaaaaattgcaaaaaataaagtattgtgcaaagatgtaaggttttttgaaacttgaaatgca

SEQ ID NO: 8100 - DNA, 197 bp, Canis familiaris
  misc_feature (1)..(197): n = a or c or g or t
cttaagacggtcaggagatgagagtggttcagcctcccctcgcccagctcactgccnnnnntgtgtctgcagagccacatgcttgcaagagcccacggcagtgcacgtgccccatttttacgtgtgaacacagacccgggcgactggggggcccagttggtaaagcacctgccttcagctcaggtctcgggatcgcg

SEQ ID NO: 8101 - DNA, 452 bp, Canis familiaris
  misc_feature (1)..(452): n = a or c or g or t
ggggatgggggaggaaggtttactcaanctgaaggttcttctccccgcccccccccactacccaggcctttactccatgcccatgcagaagaaaccagacccactccacatcctgtagtcccttgaagtccccctcttccacactttgagggtggagtctgtagtttgggaatgtgggtcattttcttggaaggagccttgaacccatcaccttctgtccgcagtgccctcccagctgtcaccgaaatggcattattcgtcagtgtctttgggctgaaaaagaaacctttctgataccttcctgacgcgagcacagggatgaaggctggaggagcaggggaccactcagcattgccagaacaaggaaggcagtctacagttctccctctgaccctgcagttggaagatgtcagtgttcgcgttagggtaattatcactccaacctgcgatga

SEQ ID NO: 8102 - DNA, 586 bp, Canis familiaris
  misc_feature (1)..(586): n = a or c or g or t
tcactggagatttcctggattcaaagaagtacagaaactgggaaaaatgagcttttaagtaggtggtgggagaaaaccacaccgataaaaattataaacaatactgcatgggcccttcatgcagcggactcnnngcagacccagtgaagcatgtttaccagaagaagaaagatggagttggctggcgcctcttaaatgtgcatactcaggagtttgggacacacatgtgcttttgtgtgtgttttctcaaaggacatttgcagacaccaatctttttctaatctcgcttgtgttttcaaattgaggcaggtatgggatttctgtagaggacacagatatgtaaagggccattaggaagttatctgatattgaattagaaaaaaatgcaattaaaatcccactacccttttcatggtttgttttctttatttgaagcagtcaggaattaaaaacaactgattttttttttttgtaaacctttcaagaacttcacttttggactaagcccaaacctgcagttactaagccaaaaatggactattttcacaaagagttgagtgatggaaagcagaagctgtcatggaaa

SEQ ID NO: 8103 - DNA, 681 bp, Canis familiaris
  misc_feature (1)..(681): n = a or c or g or t
ctgccccaggggtggtgtnnagacgcacngagcgcggcccaccgggcggatgagnntcccggcccaggtggtagcgagcgggcggaggccggggggcgggggggctcacgtgccgcccgagggtgcgccgcgggctcgcgtgtgaggacctgccttccacctgccggtggcgttcggagccccagcctggaggtccgcgggagaccctgtcggcgcacgaggagggatccggaaaggccaggccggaggccgggagaggccctgggagatgctggagtccgcggacgtgagcgtggccccgagtggaagtcggtgcggaaagtgagaaaggacctgggcgatccggttaacatttctagctttctggcctgagcctctggagtggagtgtggttccgtttactgaactaatgaacacaggaggaggagctttggaccgacgataatacgtttagctgggtttgcttttaagatgtaacttaccgtaaaatttaaagcgtataatgaattttcacacattcccaaggtcgtgcagtcatcaccacgtcattcccgaacatcttgtaaccccaaatagaaatccctccccacccaggagcaggtactccccgttcccctctgcccagcacaccactgttccggggattggcctattnnnnnnattttctataaatgcnnnnnn

SEQ ID NO: 8104 - DNA, 154 bp, Canis familiaris
  misc_feature (1)..(154): n = a or c or g or t
tataaaggcattttcttcttttgttaatgttattagcatatctttgtgctttattatcctggtgacagttaccgttcaatgtaggctgtgacttgcgctgcttttttagagcnnnnngcaaatccgaaatnnnnntagctgtatttgtatgcac

SEQ ID NO: 8105 - DNA, 422 bp, Canis familiaris
  misc_feature (1)..(422): n = a or c or g or t
angannnngtnctatgtatnnnncattccttattntnnnnaatcatnnanncnnctcactnnaaattcaattaacgatttnacgacgtaaagtagaatggannnnngaataattctgtgtaatataaatggtttataactgcttttgtaccnnnnnaggctgcagttatnnnnntaanaaatgaataatnnnnanagcctnnnnngnnnntacattcttcttacggtcggagcatgaggacaagccncnggaccccccggganagcgcattcccaggnntcannngggnnnnnactgttctctgcctccaaggactgtctggcaatgacttgtattggccaccaactgtagatgtatatacggtgcccttctgatgctaagactccagaccttttttttttttcggctttgctttttctgat

SEQ ID NO: 8106 - DNA, 604 bp, Canis familiaris
  misc_feature (1)..(604): n = a or c or g or t
aggcacattcccatcgtncnctacgtggtggtggtgggtcagnacgcgccctacntgnnnnnnntgctcacgctgnngtgccaagtcaacatngacacgggnnagccccggaacgcgctgaccagtgaggcggtggctttctgccggcacctcaggagccaggccaccaggctgtcggacatcgtttacgacggagacccagtggtgctggagttcatcagtcaggggatcgacgccgccaacgcggaggtcagctcagacagcgccaagatcgtcaagtggaccatcctcgagacggacttctctgtggctggaggggagctgggggccaccaccaaactgaagagggccatggtggccaagatctaccaaactgaaattgagagattttacaaggaggacgaggagtcctagcagccaggagaggccccggggttcctgcttggtcacggggctttgatccccctccctccatccccctatctgggatgattggggatgatcgggatgatcggaggatggaggagctgattgtagagggagggaagctgctctgagtgccaagtgcccatcgggtggttttaactaaaatgccccccctcta

SEQ ID NO: 8107 - DNA, 634 bp, Canis familiaris
cagagatggcttggacagctcatacttcaaggagaagccactgccttgtgagccagagctcatgcccaccttcccccaccaccgcaacaagcgggccatcctggccacatctgagggccagagcaagcgctgtaagccgtgacaagttggcaggaggtctgcgatggacagccatggactggggacgcctttgtaatccaggcttgcagggctgctgacatctgctcctcccttggttgagagccacctgctactcctgctgattacaccccttccccagaagagtggggagggggacaccctgaagggctggcactctcatactgggcacctgctgtcatgtcctcagctggtaactctaaccctcactttccagggggaaatgcccactgggcccagttcagtgagcattgctagcttgggatggacagacccccatgatcgcctgtgcccctcccacccccacctccgagcaccagggtctgtccgggtcagcaagaggctgtggtgaacagccccctcagaccccaggtagggctggcggcactcaggatgggaaggagagattgagcgtgggtcacatcccacctgatggactggggtccaagccctgctgcccctgcactcacactga

SEQ ID NO: 8108 - DNA, 579 bp, Canis familiaris
  misc_feature (1)..(579): n = a or c or g or t
taaagaatgtgaaaaactcacctcagaaaaccaaagagaccccagaggggacagtcgtgtctggnngcannaaaactgtggacacagactccagctccacccaacagctagctctctttggaaataacgagtttatggtctgaactggcagctgtgtgtcccttcatggctacagagtggtaaacacatctcatctttggggcctcttctcatcccctcgtccacaatagtctatcctaattgtggtcctgcctcttgcccaagcatacaactgagaacttgtgtgctaatttcttgggcctcctgccgaagcagaaaggcctctttgaagcctgctggggatggtgccagctgtgccttggctgctgtacttgactggagatttcactaaacagagccacctggggcgggatttgggtcagttgtggaggtcttcatagttgtctctcctccatcctcttttccttcccagagatgggtgttgaacttgggggggtgggcaaggagggacatggtgggcctgagagaaccactggtttttgacatttgaagaaaacatataaatcttcnnnccgnnnn

SEQ ID NO: 8109 - DNA, 634 bp, Canis familiaris
  misc_feature (1)..(634): n = a or c or g or t
gaaggtaatgtnnntagtnntaattttggtttggttggtgaaactagtggagaaagggtatattcaaactccaccaatttaaatgtgcctctaataagnaagccttctaacagtcagagaattgctactacaactgaccccatgaaaagtgatttttctcctacatcaccaatgtcagttagaccatcagaacaaattggaatggagcaacatgctgttttaaaccaattgaccactttccacatgcattcacatagcaactacactcaagcaaatggccacattgtaaactttgttacaactacaacttctacatctcagtatggcatcatatctcctttacagagcagttactttggaacaatggtggagcctcccacttttgcagctagatatgctgatttttcaggaaatgaggctcattttcctaacatgcaaccagcaggcaacccatggttcacgatgccaatgatagctgatacttctgctgcctcactttcaaggtcaactgatcaaccctctccatcctatgtacatcatcctaattacaactgatttatcaaaggactatctatatccaagacaacaaagattaacatttgttggcaaatgaccacattctggcnnnnntctt

SEQ ID NO: 8110 - DNA, 420 bp, Canis familiaris
  misc_feature (1)..(420): n = a or c or g or t
tccctttctnannctatggtggnnnnnttgatggtgtttagtgtnnctgttnnagaatttccagtctgttgcatgttctcgtcacttctatatatcaatttcaaattgatctgcctaaagcacacctcagactattcaaaggcaccctactgcctactgcagcagaaacaaactgctctgataattaaggctatccataatatagccatgaaacttcctttccagggcttttctcctaatgtagctattctcaaactttttggtctcagaccccctttgtagtcacagatattgaagattcctaagaacttttgtttgtataagtcatttctattgctattctaagtattgggaaataaattatcatattaagcattnnaaaaatgtaaaaccctttgatatacatttagaaataactat

SEQ ID NO: 8111 - DNA, 577 bp, Canis familiaris
  misc_feature (1)..(577): n = a or c or g or t
agaaagttctnnaaagaccatgaaattcatnncangagtcctacttannnnncagtattttgcacaggcttcttcctacttgcagattngcannnctgctacagaatctagaaagtctacgtgctctactgtggggtttcagtccaagtcccccaccgcccctctccgannnggcctctcacccggcaccggctctccagttcctgccgaacattgcgctctgcctcgagtcgcagctcttgctgtttgttctgcgcagacgtctcatattggctcttggccagcagctgcatctccttctgtaggttagtcatttcagacacgaacttctggatactcaaggactggtggggcacagagaggaaagcagttgtcagcctgtcccaggtggagattttgtgtgaaaggtctttgactacttaatactgagaagactggattttcttaagagctaaatttatccattcacaagagacagagaggcagaagcaggcttcctgtggggacccaacgctggacctgatcttggaccctgggattacaccccgagctgaaggcagacgctcaaccactgaac

SEQ ID NO: 8112 - DNA, 137 bp, Canis familiaris
  misc_feature (1)..(137): n = a or c or g or t
tgtgagtatgaggacccaggggatgtgtttgtatgtggatagncactagatggtcagccatgggggtgtctttcatagtacattgtcccttaaatttaaaactttcctttgtgtaaannnntctgccaagaanagtt

SEQ ID NO: 8113 - DNA, 600 bp, Canis familiaris
  misc_feature (1)..(600): n = a or c or g or t
cagatctgagggaggtctactgcagggnagtgggggcannagcctcaggtctgctgaggtccccaaagtctgagagccccagagctgcttgtcccctgggttccaggnntctgggcctctgccaagaacttggagctgccctgtgacccggatgggcgagatcaaactccttgaaggtccccgtttcactgtcacgctgaggctcctactcacttgacccatttcacccccacttctactgccattgccagtctgccaacagcattactccccggatgccagggggctgggaagaggagggggctccctcatctccctcatttccacactcttccctaccccaaagccagagagacccagactgcgccagctgcttcagatgtgcctgcccccaccctgcccgtgtcgggggacagggctgggactggggtctgatccccaggctccagctctgcagcctctctcctggagtgagggggctgtagtcagaccaaaggaagaactcaaaattgtcttgtttatttgtgtttgtgaccaagtggcccctccccacacccaggtttatggcctcattttcacttgtatatttttccacactgt

SEQ ID NO: 8114 - DNA, 493 bp, Canis familiaris
  misc_feature (1)..(493): n = a or c or g or t
acggctgggnnnggtacttgctattaatttttgacaccagaaagtcatctttttaaaaattttttaaaaagctgtttttctgatggagagtgaaactgccacatccttgtcactttaacccaagagatcacttgcaacaacagtagatgtctgggttttgtttctgtctgtctttttattgtgaaaaaaacaatgtnaaggggtggggggtggggaatgtggattaccaagagggattcctagccttgttttccttagaagacttgtttagtgttttatcagacatctcttgtagttgttgtagatggaaacgctcatgagataaacaaacaccacatggagcctgtaaatgtttttgcacaacttgtaaagcattcttggaagtggccagtaaaaaagggttttaccgttaaaaacaaaaaaaaatgtaacgtgtcattgtttacatctgtaactttttcctcccgtgttctcattacatcttggcaaaaat

SEQ ID NO: 8115 - DNA, 173 bp, Canis familiaris
  misc_feature (1)..(173): n = a or c or g or t
atggggccgatgacctgaaggcccacccattcttcggggccattgacttctcaagtgacatccggaagcagccggccccgtatgttcccaagatcagccaccccatggacacctcaaattttgaccccgtagnnnaagaaagcccttggannnntgctagtgaagatagcacg

SEQ ID NO: 8116 - DNA, 240 bp, Canis familiaris
  misc_feature (1)..(240): n = a or c or g or t
tgcatnnngggnnnttgttnannnnnnnnncannnnnnnccctccctcccccccttttgtccctttggggccatcccacttcggtggtgtcccaggtatcacgtgtcctccggagcancttcactggccngccntgcgcccagtgcccttcggaggggccttcggagcaccctccgcgcctcgcggcnngacgttgtgctgcacgggggcgctttttacattcaactttactatttttac

SEQ ID NO: 8117 - DNA, 527 bp, Canis familiaris
gctttgaggttgccaccactgcaacctgaggaggacgaggacgatgaggatgaagatgatgatgatgatttatctcagggctatgatagctcagaaagggacttctcactcattgatgatcctatgatgccagccaactcagactcaagtgacgatgctgatgactgaagccccagcatggtccccattgcttgggtggctgctgtattttcaattactctggcccttggactatggaaaagtgggaggggcagggggagatgtggggagacccaggactccaggaggtgaaaaggaaaaagaaaactcatacctgattgcttccaaatttgagaggattgggtgggcagggggaactcctaaaatactacatgaccacttcctcatttctggggaaggaaaggagactagagcagctgatgtgctcacccctccctaaacccctccattaaccacagactatgtagcgctggccctcgcctctggcagagcctgttcctggccgaactgtggatacagctggaggg

SEQ ID NO: 8118 - DNA, 552 bp, Canis familiaris
  misc_feature (1)..(552): n = a or c or g or t
cctgatgtgatccccatgcctattcttggncnttctctgctgttctgtgnnnngccagcttgctggatcagaggcagtaacccacaggacaaggtaaaattgcttccactttcacccacttggtggaagggcctccctcaggtgcagtcacaaggagcttagacagtcacctatttgcatttttatctggtcatgcattcagcatgtttgaaaatggtaacagcagtgctaacttacgccagaataaaatcacaaggctgaaaagagactgtcacaagccacccagtttgtacatagccccccacccccaagcatgtaaataagcaaaccttctcaaacaggtagggcttcaagaaggttctaaaatattcttcagggggtgcctgggtgtctcattcagttaagcatctgactgttgatttcagcttgggtcatgatctcagggtcgtgagatggagcccatgtcagcttccatgctgggcatggagcctgcttaagattctctctccccttttcctctgaccttccccccccaaccccactgcccccctg

SEQ ID NO: 8119 - DNA, 273 bp, Canis familiaris
  misc_feature (1)..(273): n = a or c or g or t
ttatcccatcctctccagagccccctctcacatgctgacaannctgtgtgcccaagtgtgccagctctcctggctagcaatcctgctctgccgttcnnnnnnnnngctctctgctctggcacagagcacatgctggggtctctcacactctctttgctcactcatctcatgtgtctgtgtngcagattcctagggatgaaagannnagctatggnnctgaggataagaccatttctactcctgcagctctccctggcagcattgggagcttag

SEQ ID NO: 8120 - DNA, 461 bp, Canis familiaris
  misc_feature (1)..(461): n = a or c or g or t
cctggctccacctcccacctgccccctgccattccccggctccgcaggatcagaagagaatnggacaaagcngnntctagagccctttcagttctaatgccataggagtcactctgtgacgtgggtcagcctcagaggccagcctagggcagggtgccccccctccgtgcccagagcccccaccctcatgaagatcacggcagtggggcggggggaggatgctgacagggccaaagccaaggatgtcatcatcactcaccttagggagactcaccccccgtctggggagagtgggaccgctctggcttccaattctcatctctgctggcacctaggagaagggagtgcccacaccagctccgtgcctggaggaacagagagagcaaagccacaggcccggtgctcagaggagaaggcagagacatttataaatgaccctcttagctgtttacgagacacct

SEQ ID NO: 8121 - DNA, 469 bp, Canis familiaris
  misc_feature (1)..(469): n = a or c or g or t
cntgtgtccacatnnnccaccgacagatttagnactcaaattatagcctcggcannaatcttcacaaaggactcaaatnaagcnagacccagatnnnnacgaacaggagagagacagccttaagtcacattgtaaagtgaactgcagttctagcagagtcagagaagaacttgttgaaatgctaaaccaaacagttcagcctacatttcagaactccacttcaagaacattctccccacgtttttagcctgagacttgtgcatggacacgaagtggttacaagttactcaggtttcaaactgagttcattcctgtcctttggaccatctctcaatgccagcattcatctacttgggctccagagagctctgcgtttggcaaagcagataaaattagctactggagtgaatttggaatccagggtgggccattaaaaaaagtacatnnnngatttgtaaaagtcatgtaa

SEQ ID NO: 8122 - DNA, 517 bp, Canis familiaris
  misc_feature (1)..(517): n = a or c or g or t
ttttgtcatgcttgttgacacgggnaccnnnacagatacacgagctacagggtcgcccaangtggcactcacaatgcagcatgttgctgactcaccaccttggatctcttggggccccaaacgcccttggccataacattaggaaggagaaccaccccgacggtgaccctgtaagccgtgctcggtcccagtctcagagaactggattgcacctttcagctacaaacggttaccaaccataggctctctggcttgaaagtctcctgggaacgtcctagcccagcctcaagacccgaagcctcttgcagtgcccctaaaagatacttcagctcctgcctgcacccctagtgatggggaactcattcccttccaaaggctgtgccttcccttattggtaaagctattgggcggttctagccactgggaaagctatctgcctaagtgcctcggtgctcttggagctgctgtttgttccaacgtgagaacatcctgaagaggctccatctnnnnnnaccaa

SEQ ID NO: 8123 - DNA, 556 bp, Canis familiaris
cctgctgggagtctgcttccaccatctgcttatccagaactggagatgggagtgggactcagaatgagggaggtgagagacaaaggtagagataagaggttaagaggtggagggtaaaagtacaatatagaaagagtaggatggttagaaatctcagcgcctgaagaaatagtggtcctagaacattttgcataacaaggaatattctaaatacctgctcaggtgaggaacaatgatttttaccttgtttggtattattgaagatatgtgccttcaatcttaataagattgtgtactctttattttttaaaaattttaacaaaataaatttatacaatattgattttatttatttttctgcactgtttcaccccaatttattaatgtctacctagttccaaaagcaaaatgtattttatgtataattggttttttacatagtaacctattacccttataactggtagatactgattcagaggaagttggtttctggtccaagttttgacataagctttgtccgtcttttgttactagcacttaaaagcgccttgaa

SEQ ID NO: 8124 - DNA, 654 bp, Canis familiaris
  misc_feature (1)..(654): n = a or c or g or t
cttctgtgatgtctacaacnntcagagcaagacatactgtaaacggctccaggtgctgtgcccngagcactcccgggaccccaaagtgccagctgatgaggtatgtgggtgcnntcttgtacgtgatgtctttgagctcacgggtgacttctgccgcctgcccaaacgccagtgtaaccgccattactgctgggagaagttgcggcgtgctgaagtggacctggagcgtgtgcgcgtgtggtacaagctggatgagctgtttgagcaggaacgcaacgttcgcacagccatgactaaccgggcaggattactggcccnnnngctgcaccaaacgatccagcatgacccgctcactaccgacctgcgctccagtgctgaccgctgagcctcactggcccagaagtcctcacgccctgcattccaggcccgggagctgccccgaattccccgtttgtctgttctgccattcatctgtttctccaatggtccctgagtttctccctgtgcccatccaccatttgactacccagatgccgttatcagagggtctcaggattttcttctgtccttgtctgtccctctgtctctccattctctgtgcctgggtgggactgtggagtttgctcactgttgcctcannnntccctggttttg

SEQ ID NO: 8125 - DNA, 672 bp, Canis familiaris
  misc_feature (1)..(672): n = a or c or g or t
agaccccgactgannacagccaggctctggttcccccttcagaactggtgctgcttccagagatgtccttgggactgtgacccggnnaaaccatgtccctctccagctcagagatccctctctctctttacctccaaagttctgttaatgatttgtttctggtccggtttcttatctttaggactgtgagggtctggtcctgctgcgactctgggaactcagccttgatttctactgatgaagtggcctcgggtgtatgccaagaggatgggggcagaggctgagtgtgggcacacccaagcatgtcccagtctggcatgcctgcctagagcttccacagcaagcaagtgctgcagttcacaggaaaagagcttgccagaactgtacacactaaggacagaaacatacatccaaggtatgcgctgctacttctgtccccactgagctcaggactggtagcctcttccgcatcctaggtcctcgctcagccgtctgctctagtatccacagcacccaagcgctcaccgcttgtgacagtggagtcctgaccttcccactggcgtagaccataaatacatgaggaaaatgtaccttgtaaaaccctaagtctggatttctatcacgttccacaaagcatcctagaaacaccannnnnaataaagagttcannnn

SEQ ID NO: 8126 - DNA, 610 bp, Canis familiaris
  misc_feature (1)..(610): n = a or c or g or t
caccaatctccatgtgtnctaccagaagtacttcaagctnnagcccctcnaggnntaccatcgggttatcagcctagaggacttcatggagaagctggcacccactcactggccccccgagaggcgagtggcatactgctttgaagtggcagcccagcgaagccctgataagaagacatgccccatgaaggaaggaaatccctttggcccattttgggatcagtttcatgtgagtttcaacaagtccaagcttttttcaggcatttccttcagtgcctcctacaaagaccaatggattcagagattttctccaaaggaacatccagtgctggccccccgggagcccccgcccagttccccgtcctggaggagcacagaccactccagaagtatgtggtatggtcagatgagatggtgaggacgggagaggcccacattctcacccacctcatccggccgtacgtgggcattcacctgcgcattggctctgactggatggataaataaaatcaagctagactccaagttaggcaacaagccagagaaagacccacagcccaggagtcctgtggtccagctcagtgttcagccagtagactctttgttgaaa

SEQ ID NO: 8127 - DNA, 598 bp, Canis familiaris
  misc_feature (1)..(598): n = a or c or g or t
taaantagttttgagatattnatctacgtagannccatgnnaaaaagagagtnannnngnnaaacatagctttaaaacctgtgtgccatttttaagagttactttatcttggtaactcttacgnnttctctttagaaattcaggccttggaaaaagtatctggaaattttctgcaaaaaagtccttaatttagcatcatttacataatggccttaatttacatataatacgtgctgaattgaggacctttgggcgaatttactttattccttgtattttgtttaaaagcctggtgctttttatcacctcttctaatcatttaatgtatttgtttgcaatttgggggtaagactttaccagtactttttctttggcatttcagctgtaaatttgccttcttactgaacatgtgaagttgtcctgtgacttatgccatagctctcacttaagcacgtccccctttcagccagcgctgtaataggccactgtatattcccttctcactgtttgcccgttttgtttcatcctagtcacattcttgtgttaagtgcnnnttaattttaacagttcactttttacatgctgtttactgaagtna

SEQ ID NO: 8128 - DNA, 506 bp, Canis familiaris
  misc_feature (1)..(506): n = a or c or g or t
cccaactgcatttggtacccttggggaagaaggagaggaaagacagtgggtgaggggcttcctggtgcannnntcagtgggncnctgagggttggggggtcactggagaaggaggtggcttcctgccccattgttcaggacttcattgtttctcaggaatacttattgtctgtgaattttcaataattaacttggaaagctgcatgtgttcccatcattcagcagacccctagcatctactgtgtacagaggtggccgcagagcctctcattcatggaaaggggccagaagaaccactgggccagggtctccaagttaggctttggacattatctccaaatgcggttatacattatgtcagctccattgaccaatttgatcaaagaccctccttctgtgtccttaagcttgtttcttattaacaggctgctctgcctgtggagcactataaattattatattttaacaagtcctataatcatcttgtaagcagcacaattacggtg

SEQ ID NO: 8129 - DNA, 456 bp, Canis familiaris
  misc_feature (1)..(456): n = a or c or g or t
tgccttgctcttttatttcacctcttntaatccagacagcanancagttnngactttgggtctaactaccaattgtctttcattaaataaacaatcnngcagatgatgccgatactnnaaaactaataatctttagtaatattgccttaatttaacagctctacattaatcatactcctccaccantgtccaagagtaaggagagagaaatggacaagaaagatttggacaagtcaagggaaagatccagagaaagagagaaaaaagatgaaaaggacaggaaagaacggaaaagggatcattcaaacaatgaccgtgaagtgccgccggacttagccaagaggcgaaaagaggaaaacggaacaatgggggtttcaaaacacaaaagtgaaagtccgtgtgagtctccttatccaaatgagaaagacaaggaaaaaaataagtcaannnnttcag

SEQ ID NO: 8130 - DNA, 165 bp, Canis familiaris
  misc_feature (1)..(165): n = a or c or g or t
ccaccaccaccaccaccaccaccaccatcatccttaccatcatcacagacacggccgcgacgacagagcnnnnnttcacggttggtatcacattactgtttatctactttctcnnngctgctgagaggcaagnnnagcctgggaaaaagagaaatgcantcttca

SEQ ID NO: 8131 - DNA, 700 bp, Canis familiaris
  misc_feature (1)..(700): n = a or c or g or t
aggaaatacaaaggantttataaaagctcaagacttgaatgacnnnnaaaacacagttgctgctttgaagagtgagtttcagaagacactaaacgacaagacagaaagtcagaagtccctggaggagaatctggcgacagccaagcatgacctactcagggnncaggaacagctgagcatggctgaaaaggaattagaaaagaaattccaacaaacagcagcttttcgaaacatgaaagagattctcaccaggaagaatgaccaaatcaaagacctgaggagaagactggccaagtacgaacctgaagattaaaactcaaagaagatttcttctggaagctgccacaacgtgaaagtacaagctgtttcacacctcaggcatgtattttgaagcagtttgttaatcttccctctctttatttttctaatatatagactttgcttctaatatttagaactagacttcctatttcagttatgtaattgagaagaggggaccttctgactgattctggccagccgtcctctgccgagcgctccagagttttagtttcaatgcaatgagaattctttatagtaaaaaaagatgtttagagtgggaagaagagccttggccttttacattagtagaaagagtatacaccgtttcattaaatgttaaagctagcatcatctattcttgtgcattcccccagtgtaa

SEQ ID NO: 8132 - DNA, 586 bp, Canis familiaris
  misc_feature (1)..(586): n = a or c or g or t
gaatgggtgatacatnnattaaatgctgagatcgaagaattnncggcttcggcgagagngagcataangacgccgatggcagcggcagcgtttgtagngaaatgaggctgaaaattggtgctccacatccactccccaggtctctgcaaaccggcagtatatttatttgttatttaaaaaataaaactgtattttaggtagagggtttttttttttttaataagctgaagaaaagctataggacttctgatcaaaacacagaggtataggatttctaaataaaagggatcatctgaagtattgtttgaaatgaccatctgattttgaggattccagtattttgtgaaaattgaacagtttttgaaaagtacttggaaaatcatattggcatattaaatctcctttaaggtagaatggtaaagcttttcatgcattgtgaactctacctggctttggaccaacctcagaacaaagcagagccacctaaatacatagaattaccctgctgcaataaactgcaagagcttgcacaagggaatgctctctaaaaggagaaattatatagtttgaaaagacatattgtata

SEQ ID NO: 8133 - DNA, 557 bp, Canis familiaris
  misc_feature (1)..(557): n = a or c or g or t
agctgggtatcacccagctgcgcttcaagccggcctacaacccctacacnnagcccagcatnnaggtgttcagctaccaccaaggtctgaagaagtgggtagaagtcgggaattctgggctcttccgccccgagatgctgttgcccatggggctccctgaaaatgtgtcagtcattgcttggggcctctccctggagcgcccgacaatgatcaaatatggcatcaacaatatccgggagcttgtgggccacaaggtgaacctccagatggtgtacgacagtcccctgtgccgcctggatgctgaacccccccacggacacagggcgctgcatgacatgggccactctggatacctgccttccctgggccccagctgtccagcccccttacatccctaccagtgacccccttgtatttataaggcctccgtgaggccatccccccacccctgttcctggtatctcctcttccccacctgccccaaggtcccaggggcaagggagcaggtagcaggcttgatctatgaaggtgggagccctgcaggccagctnnnnnnt

SEQ ID NO: 8134 - DNA, 588 bp, Canis familiaris
  misc_feature (1)..(588): n = a or c or g or t
cacnaacagcannntgggcgctcaggataggcagctgctctgcttctactacgaccagtgcgagacccattacatctccctcctcaacgccatcgatgccctcttcagctgtgtcagctcagcgcagcccccacgcatcttcgtggcccacagcaagtttgtcatcctgagcgcacacaaactggtgttcattggggacacgctgacgcggcaggtggctgcccaggacatttgccacaaagtgatgaactccagcaaccagctctgcgagcagctcaagactatagtgatggcaaccaagatggcggccctccattaccccagcaccnnngccctgcaggagatggtgcaccaagtgacagacctgtccaggaatgcccagctcttcaagcgctctttgctggagatggcaaccttctgaggggaggaggagaaaagggggactgagtgcgctactaaggaaaactggaaatgctatctggtttttgtacatgttatctatttttgtagataattttatatgaaaatgaaatattttaacattttatgggttagacaacattcagnaattcagggagctagaggggg

SEQ ID NO: 8135 - DNA, 582 bp, Canis familiaris
  misc_feature (1)..(582): n = a or c or g or t
gtttaaaaatgtgatcntagagagccaaaatccagcaggggaaaaaatcaatgctttgaacacagaaagaaagttttattggcaacagaatcgaggcctaaaagctcagatcaaggctctcagagaacaggagaaggcctttcagactgaggcaaaagctcttcaggaagaaataaggtctctccatgaggagataaaagccttgaaacaccaggagagagcaatcaagatggaggaacaagccctgatgaaagaaggaatagcaatagagatggaagaaaaagctctgtgggaggaggcacaggctcttcgtgaggagaacatggctcttagagaagaaaaccgagctcttcaagaggaggaaaaagcccttctggaagaggcaaaggtccttgaggagtggaataagattcttcagttcacacttgctggaaaaaagcacaagaataaaacaaagcaaaagaattgatttgaagatgtaaccagcgaaccaagaaggccattgacattccagtaaaaacaattaaaacttttgaaggtgaaatactattgttgggattgaagtcaaaagcctggaaattt

SEQ ID NO: 8136 - DNA, 172 bp, Canis familiaris
  misc_feature (1)..(172): n = a or c or g or t
cgtgacatctgtatgtggctctagctttggtacctcaacacgccaatcctccccagaggcagggggtgagtcggggacccaggcccaggtatttggtcctccgagtgtatgagggggccctacctnnnnctgcttnnnnatttccccatcnnntgccagcttccctccacac

SEQ ID NO: 8137 - DNA, 647 bp, Canis familiaris
  misc_feature (1)..(647): n = a or c or g or t
gtacctgtaaccnnnnnnnnnnctgcaaggacagaggaaaatgactatgtacattcggggatcctgagtgccnctctcttttcacaaaagaggtgaaacctatgtgatcctgtgagggtacaaagcacattaattttcagtggcttctccaatgattggagtgaggggatacagatggtggaacaggcacatttttcctaaaaaaaaaatgtggcttctttaatgcctgtcagattcaggatgaaaaccctactgaaagaaacctagcctgtaggcagggtttcctctggagattcttgtgggtccagaatgaaagataagaataatggtttccctcaacctcacaatccccgttggtctaaagtcatgtagcctaaagcatcaatagcacataatgtttgaagactaatgattgaaaaaaagataaaaacttcaactaattttggggttgtttcttcagtatggtactaggagatgccttgttggcaaagcacatttggagtagagtagttgagatctttcattttcaccttgagctttcttaccatgtggactgattactgtagcatttcacatgtaaaataactggatattctttatatactggaagcaatctgtgaatccaatatttcactaagtgttttaac

SEQ ID NO: 8138 - DNA, 372 bp, Canis familiaris
  misc_feature (1)..(372): n = a or c or g or t
tggggagnnagatatgggnnncctcctccaatctgtgnnnnnagnntgctccggcctttggacccagnnaaaggcttnnnngcccctcctccccaccaggcaggggtgggggctncnnnnggangctgccttcccccacctctgcccatttgtccctccctcccttgttttcctttagnnncnntggttctgtttgctcactggccgctgtgttcatcccagggggttcccctagaagtgagggcctttttcttccatcccttgcggcacagggtggctgtgccctgccccagagcagcgtctcctgcctgnnnnnacacacacaggagcctggctaggagcacaccctnnnnncctccttgtgttgccant

SEQ ID NO: 8139 - DNA, 632 bp, Canis familiaris
  misc_feature (1)..(632): n = a or c or g or t
atctgaccaagatcnnacaaaannntcntactctgtttganatctaagggctattaatttgctctctcccttatttttcctttttggctatgtcaatcccatggggaaagagtctnnaggttttctcctaaatcagtttgtatatttaggtacataataaaattagtccaacagtgtgtgctgtgtacacagaacatagaggatctcttgtaaaagcattctccagcccactgtttcagctccagaaaatggagttgtctgccctaggtttaaggccttaatttgttggttcttccatgctactggctgttcatctcctggctgccatcagtactcggagaaagaaagtaaggcgaagggaccccgatagatgcgtcccgtgcacacctctgagggcactgtagtgaagctgtggctagcacaagccacctaagagactccgcgagcaagcagactagataagtgtgcgtcgaggcccggtgggatgttgagaaaacaagcatgactgttggtatgaagaatagtctgttcacaagaggtgttcttccccgatatggagtgaaagttcagtcctcaggctctgagatttcaaaaattgaataaggaatggttttctttggcattttgtaaat

SEQ ID NO: 8140 - DNA, 540 bp, Canis familiaris
tcccagctccctgcgaagagagagttaatatatatttttatttatttgctttttgtgttgggatgggtttgtgtccggtcccaggggtctgatgtggccgagacaggttgggtgtgtgcccagcagccctggcgaggggcctgaggccctccccttgtcctaggctgtcacctcccgcctcctctcctcccgccgccgtcttagtttgccaaccgctgtttgaggtaccatttgcgctgagcatgttttacggatttgtcactgactttactctggagcaggtggctagaaaaagaggctatgggtggaaaaaaaagtacctatttctcatttgtaaggctggttgctggcttttctgccatggattctccccgcgaactctcccctcagcaattcctacaaagagttaaaaatttaactggtttttaactactgatgacttgacttaaaaaatacaaagatgctggatgctaacttgatactaaccatcagattgtacagtttgattgttactgtaaatacagtagggttttgtgtttg

SEQ ID NO: 8141 - DNA, 149 bp, Canis familiaris
cctccccgcgtctgatgagcctccgagccaccgcagaacctgctgaggtgcgggtgcccgccgcggctctgagaggcgccgggagtctgcacccccacgcgcggcaaggcggtgctgggagggggtccgggaccacatctggagagcaa

SEQ ID NO: 8142 - DNA, 194 bp, Canis familiaris
  misc_feature (1)..(194): n = a or c or g or t
ctgtctgtgccatgaggattcccggtggtgacaggctgnnnnnnctcaggggctcggggttggggagcccactnngnnncgtattttggtnnnnnnnnngaagctnnnnnnaggcctcccctgggagcagatggctgtggannnggggcgctgtgcccttggatatagtttannttnnntacgtttgaattctc

SEQ ID NO: 8143 - DNA, 342 bp, Canis familiaris
  misc_feature (1)..(342): n = a or c or g or t
ccaactcaatcggtacctgacccgctggtctccccgttcagtcaagcccatctataataaaggcnnncgctggaacaaagtacgcatggctgtggggtcgcccctnnnnaaagacaanannnnntactcaagaaggcctctgatactgtatcactgactggggcagggctccccatcccaccagggtgtcccagctcctngggaaggcacagcagacagtgggcctnnngaaagacaacatctcctactcaagaaggcctctgannnngtatcactgactggggcagggctccccatcccannagggtgtcccagctcctcgggaaggcanagcagacnnnn

SEQ ID NO: 8144 - DNA, 228 bp, Canis familiaris
  misc_feature (1)..(219): n = a or c or g or t
aattatatggtaatgataattgagaatgaaaattgtataattttgtgcatgttggataaatcagaataaccatgtttgggaccaaataagttattcctttattatttttatatgactactagaacaaagtttaagtaaactgctaatagggtcagaattctttttgatggtttccagctgttanantattgcatttctaccacactcctatggaacagctagtaaaaa

SEQ ID NO: 8145 - DNA, 515 bp, Canis familiaris
  misc_feature (1)..(515): n = a or c or g or t
aattactctaaggtcnnaaaaaggcataatccagcagcccatcttcagtgatcacttggtagggcttcgttgtctgggaggcagtattgactcacagattggccagattgccttatcctctacacagtcttgcgatgcttttttttttttttcaatcactgtcaatatttaaaaatatttcacgtcaaaggactctcagcctgtttaaaggcaggccccacgtgtctgtaagcgcatagacactcccatttccctccacaagagctaccctttatacacgtacacttttcatgtggatactttattattttgcttaacctaacatctagtgttcggattcttatggtacttacctgaaatgttggcatttgttttctttttttatgttaaatatatattctagatgagccaataatgtgtattcctaggaaatggggcacaaataggctagatcatgttatattggcatttgaagaaatnnnnttttattttgttgttctgtgtaaaccatattc

SEQ ID NO: 8146 - DNA, 483 bp, Canis familiaris
  misc_feature (1)..(483): n = a or c or g or t
cctgagctnnnctgannannnnncggagnaggtctgtgagnaggtctgccannnngtccgccaggaggaggannannaggaggagaacacggctgctgctggtgctgctgccggagcagcctctccctgaagcccctcnnagggcccacggggaaggaggaggaggggagcgtgactgcttcccccagacctctgccccgagagcnnnaagcggtggagagagccaggagcatggtctccacagggctggtcacctcccatcccacagggccattctccttccccgaacaggccgcacacgtccaggctcccttgctctttgctctgtagttcctgctgcctgggatgcccttccccctctctgcctggcaatatcttatttgtcctgtgaggccccactcaagtgtcacctcctttcccagctcccccaggcagaaatagttgtctgtgcttccaaagcccttggttcatgcttctactgtg

SEQ ID NO: 8147 - DNA, 598 bp, Canis familiaris
  misc_feature (1)..(598): n = a or c or g or t
tcctgncgctnntcctggtcccccgtgcggtggtttcgnnnncgctggaggatgtgggccnngnnncngatgtggtgcccaatggacatctgctctagcccactgnctgagtcccgcacggtcctccgagtctcccggatctgggatgggggagaacacagccctcagccaccccttccgaagccctggccacaccacaccaggacagcaaaccacccccagcccagtcctgagaaaggaaggcagggctgctgcctgcagccttcagtgctgccttctctgggaggtgagaagctgcccaactcaccccgcctggtgccgaacgcatctctgatgtctcctggtagaccttgggggcgccatcacccgtattggagtaggagatgacagtggaggatgaaaaggtctggcaattgcctcctgctgtcatatgttcctgaggaggaaaaggtaccacaggactgaatggtccctctggagaaggaatcccacaccacacttcagctgcctgttcttgtccctttctcacagcacgggggagccaagaaaatgtcaggactcatcagtaacccccaaattccttggagcccaacaataa

SEQ ID NO: 8148 - DNA, 144 bp, Canis familiaris
  misc_feature (1)..(144): n = a or c or g or t
tcnnaggggtgttgtgaggaataaacaaganngcacgtgaaggcactttgaaaactgttaacgcgatctagaaaagtaagggatgatggaaacatctttcatgtatggttccatgacgttcatttctttttttgggggggagga

SEQ ID NO: 8149 - DNA, 654 bp, Canis familiaris
  misc_feature (1)..(654): n = a or c or g or t
actccannagagatgctgtgcttccagtgtgtagcgagcatgtcttggnnctgtgataccaagtgccagaagtgccctctgtactatagaaactaccaggactcttggaaacaagagagatgaataaagagtttaattcttatgactgctatttgttttgttgaggtcaaactgtgaggtgattatcatcctaatacttatatctagtttgtacccaactacttttgaaaaatagatttgaggccttttcttgcttttcatcagaacttttacttccagaaagctttattgatgataatcctttgtacttttatacattgacattggaacatagttgctttttgagggaagcagggcagagattaccatgactggttagattgcatattacacatgagctataaagtaattaagtgagggaactgggatacacagaatcttcccatctggtaccatccagtctacctaccctggggcttgtcactgcacatcttctttttacacaacaccctgaggttattcccaaattgtagctagtgaggccacaaatacttacctcagtgatacggggtgatagccttcactcatgacttttacttgactttgtactctgctttcttaaaacaaattgttaaaaagttttacatgggcatc

SEQ ID NO: 8150 - DNA, 660 bp, Canis familiaris
  misc_feature (1)..(660): n = a or c or g or t
ttcattnctcttccactatgtgcctactccccactgccactaaaattacgtggcctgtggtgaaatttgtcttttcaagacattattgaaacagccagcagtttggttttctggttaaaaacgacaactaacgccaaccatgaaagatccaagtcgcagcagtaccagcccaagcatcatcaatgaagatgtgattattaatggtcattctcatgaagatgacaatccatttgcagagtacatgtggatggaaaatgaagaagaattcaacagacaaatagaagaggagttatgggaagaagaatttattgaacgctgtttccaagaaatgctggaagaagaagaagaacatgagtggtttattccagctcgagatctcccacaaactatggaccaaatccaagaccaatttaatgaccttgttatcaatgatggctcttctctggaagatcttgtggtcaagagcaatctgaatccaaatgcaaaggagtttgttcctggggtgaagtactaaaatatttgagtagacggggccctcttttggtggatgtagcacaatttccacactgtgaaggcagtattagaagacttaattgtaaaagctctctcttgtcactgtgttacacttatgcattgccaaagttttgttagtcttgcatg

SEQ ID NO: 8151 - DNA, 592 bp, Canis familiaris
  misc_feature (1)..(592): n = a or c or g or t
acaagtanngcatatgntagatactattaaaattataatttgtatttctngagnnatgctnnaaaaaaaaggttggctaccaacatggatcactcactttattgctatagtgccttggtttggcttggttgtgcattttccaacaaatgattcagatattcagatgtgacccaaagcccacttttgtagcctacagccaagaatggttttacatttctaaatagatggaaaaaaataaacactattttgtgacctatgaaaattatattcaaatttatgcccataaataagattttattagaaaactaataaaaaaaaaaaaacatctgtctctgttttgcctgaggctgcctttagcactaaaagaacagagttgagtagttctaacacagatcataaggctcagagagcctaaaatagttactgctggcactttacaaagtcaaatttttctgttacctagagctgaaaacatcagaacaatgtataggatgtacttttatataggttatgtgtttgagatgcacacagcaatttgtgggtgggtggtttttgtgcagtgtatttattttgtacattgtatttatatgtt

SEQ ID NO: 8152 - DNA, 675 bp, Canis familiaris
  misc_feature (1)..(675): n = a or c or g or t
ggggtgatgtgccccacaagacacatcaggcnnctgcttccgnntcgtcactgnnaggnnnnngggcnnagnnacccccccaaccccgatgccttggtcgtcccccatcaccaacctcaccaccacccccnnagctgatnnatgtgagcctggtgggcggcnnttcagactgctccccacctcacccagcgcctgccccccagcacccggctgcctcagcnctccggactcggatgacaggaggtcgtccacccctcccaccccctgataaccctgccactctggggcctcgcttgggcctccgtggtgtaccccagagcacggcagccagctcatgacccagccccctccctggggnnnctcctgaagccataccccccatctgggggccctgggttcccatcctcatctctccccttgactggaattgctgctacccagctggggtgggtgaggcctgcactgattggggcctggggcagggggtcaaggagaggggtctaggcgcaccctccccattaaggactggacccttggccccctctcccccccttgttttnnnttattgtaccaaagacagtggtggtccggtgttggggggagacccccttcaccctagggccctaggagggggtgggggcaggtagggggagatggccttgctcctccttgctg

SEQ ID NO: 8153 - DNA, 163 bp, Canis familiaris
ccaggggctgctggcagccagatccaggcactcgttttctttttcctgtggacctgtgcgttttgcccaggttctttttgcccaggttctcttctcaaatcgcattattttcttagttacgtgtttgttggtcagcattataacgcctacattctacacaact

SEQ ID NO: 8154 - DNA, 543 bp, Canis familiaris
  misc_feature (1)..(543): n = a or c or g or t
tgagaatacaggtnnnaagtctttccatggagactgttaaanctgaggtcnnagcttcgtagtaggtggtgtgggcgtcatgtgcccactgacagaacaaggcaagcagttggctattcaggtatctaacatcctgggcatggacttctgcggcatcgatctgctcattatggacgacggctcctttgtggtgtgcgaggcaaacgccaacgtcggcttcctagccttcgaccaggcgtgtaatttagacgtgggtggcatcatcgcggactacaccatgtccttgctgcccaataggcagactggcaagatggctgtgctcccaggactgtccagtcccagggagaagaaagagccagatggctgcgcttcagctcagggagtcgcagagagcgtctatnnnnnnnacaatgggtctacctctagtgagagtgagcctgaactgggagagatccgggattcctcagtgagcaccacgggggcctcgccccccatgctgcccgaccccggctacaacattaacaacaggattgcttcagaatt

SEQ ID NO: 8155 - DNA, 644 bp, Canis familiaris
  misc_feature (1)..(644): n = a or c or g or t
atccaccannngaatgagcngcactcctanctcactcggcttattgtnnnngagcgngagagnnagctagaagaatgnnagcnnnnncacgagggtgatgaggatgatggccacgtccgggcccagcaggnntgcatcgaggccaagcacgacaagtacttagcagacatggatgagcttttctcccaggtggacgagaagagaaagaagcgagacatcccggactacctgtgtggcaagatcagcttcgagcttatgcgggagccgtgcatcacgcctagtggcatcacctacgaccgcaaggacattgaggaacacctgcagcgtgtgggccactttgaccctgtcacccggagccccctgacccaggaacagctcatccccaacctggccatgaaagaggtcattgatgcattcatctccgagaacggctgggtggaggactactgaggccaggcgagtgccagagctgcctgccttgcctagtaccctggcccaggtgggctttggggcagtagctcccagttcctgtacatagtttgtgtccctagatccctgccctggtgtcccttatcccaccctcatcagttctgctgctggaccatgagccccacctccacccccttctgggccagaaacagcag

SEQ ID NO: 8156 - DNA, 436 bp, Canis familiaris
  misc_feature (1)..(436): n = a or c or g or t
tgcttgagtgtntgtcaccacgaggaaatgcaccgatgagcacctttttgcnnngnctgctgcagtccccagccttgcacagagctgcctgaggaggcagagagggtgctgggtcccgtccagctccgtgccagggagccctgtctctgggcaagtgttttcggcgcttcacctcagcgttctctgccaaaaagaccctgaggggaggcctttaggatggacgagcgagcactgcacttgtttactgccccagggagcagagccgggcgcctggtgctgacggccaccaagggcaaacgtccaaaacgtctgacacttttagagctagaaggactgcaggcgcgtcagggaagtggtgggcgagcgggcgtgggtttttctgcctnnnntgtgaggctttgggttagagtaagatcctgacgcgataataaagacc

SEQ ID NO: 8157 - DNA, 536 bp, Canis familiaris
  misc_feature (1)..(536): n = a or c or g or t
anngcanctgcacnggggactgnngacacaagtgtactgaccgcacgcatctctcctttgctgcannnnnngctgtggcatctggggactgcacagggacaagncgtgcccggagatggggannagctcgcctgggggctgcctccactagcaaaccagcccacgtnnagctgcatagcggcctctgccgccttcatgtcccctcactgcgcccaccctgctcacctagcaccagctgccagacatcccctgtgcccagaacccgctgaggtcactcacacagctactcccaaacctgctacactctgcctcacctgttccttcccacggaagttacagtaactggccagctgaccctggtgctcccgtgagccccccaaccccggcaggtccaccccttggggactgtgggtaacgagctgccttctgatctgatggccgcctcccacacccaagtggtaataaaacctacattctcgggcagccctggtggcgcagcggtttagcggtttagtgccgcctgcagcctggggtgt

SEQ ID NO: 8158 - DNA, 628 bp, Canis familiaris
  misc_feature (1)..(628): n = a or c or g or t
tgaccngtnntctctgctgtggnactctcccaagagacnnnctgaattttagnacaaagtgncttttctttcacacctgccaccannnnaagaggaattttgtggcatcagaaaaatgtggaggttccatactaatgcattaagatttttgataactctgaaagcatcatttgcacctctgtggtaattttgcctatggcaaagcgtcatggccaagcgacaacagggagtccgctttctgccagtcttgaggttaagatcgacttgaaaggaacgtatgtcctggcttagccattctgaaaagaaaaatgggatatcagagttacagtaaatgaaactgctttgagtttcaacgtcttagaggaaggagaaagagagtaatagggaagcattaactttggttgaaggtaatgtttgccctttaatctttcactcatggtctgctagtgaaaaggaagtaaatgagattcttttgtgtaactttgtcatttcattgtattaccaaatagctgaggttttgatcccgaggtgttttgcaagtatgtttggtaagcacagtaaagagaagttagcaggagtggtgatagtctgtgtgtggggactggcaggggatgatttgttttagggg

SEQ ID NO: 8159 - DNA, 566 bp, Canis familiaris
aaccaactcgcattaaaatccaagaacccatgaaataccagtaagtgtctcagtactgaaatcaggtggttaaacgggtaaaccaaacatactgtattttgaacaatggcacaaaaaagcaggcagtcatcttttaagggctacgcctaggcaaacaactaacatgcattgtgagaatgctgtgtatacctcacgtactgtgtactttgtatatatattttaccttttatacctattgtccgatactacgtttttgtcgttttggctctgaggcttgttttgttgtctgtgtctgtctgaataacctgcgtgtctaaagccacgtgaaatgtgaatgattatcggcaatatgaccttgacagaatcatgggactcggagaagagggaggacagaggccctctgtcatattcaacgcgctcgtggttgctcgactgttgtatctgtgatacattacccggcggaggactcctgggctggctggggcttctgccgggaaagctcgaaacactagatccttcctgtacatgtgtatatacgtgaacagtgagacgaccgtttctgactt

SEQ ID NO: 8160 - DNA, 356 bp, Canis familiaris
  misc_feature (1)..(356): n = a or c or g or t
ggtatttttatatgaaaatggtgcgctattggaggatgnnnnnannnnnaatnnngagaggtgggagtatannngttttatatgttgggatgtganntttattttctagaattggggnnnannnngttcnatannnnnnnnatgttttnaaaatgnntagttgtcannnnnttcttgtaagcatcatcatggttttgtacaaataggaaatctggtgtcattcttcaacctttgttnnnnngtgtgnannnnnnnnntttgtacagcttttttttttttaggctttctgtnngttttgctataagtactatggcttatttattgttcnnngttttctttaatatttgngnaagtct

SEQ ID NO: 8161 - DNA, 587 bp, Canis familiaris
  misc_feature (1)..(587): n = a or c or g or t
gtgaaaaacgcnnattngtcntgtncaatcttgacacttgtaacnngtcttggnannaagcttacattttaatttaaaagaaaggtcagttatatccatgcttaaaagaattagcaaaagctttataactgatgtcatagacactaataaggaatacggtcccttttttgttacggagacttttgaaatgtggagcttacatgcaaacatgttatctttctctgttgttttgctttatgtgttgtatttgttgtattttcagattcagagtaaatctgatgtagagttttttttaatgaattattttgcgtggacagacgaaatgggcaccaagggaaatcttgccaatgaagaagaaaattctatgtgagcacgtgacaatatgtacagcgtatgtgtaaacaagctttttaatccttaaagcacaacagagttgaatatgagtgttttctttttcaacgaggcaaacactgctctttgaggacttaatgctgcagtcacccattcacgcacacttgggttttcgctctctctgcatttctccttgctgtaagatgactgttcctccttgaaactctcaccttgca

SEQ ID NO: 8162 - DNA, 665 bp, Canis familiaris
  misc_feature (1)..(665): n = a or c or g or t
atcatctctcgggaggtgtacntcctaatcctgagtgtgaccacactcagnntcctgctggccccagtgctgtnnngagnngcaatcatgaggtgtgtgcctcgaccagagagacggttaagtctctgagggcaccgaccaacagggatacacggcttcagaaagtgagacctgtgtgcggaacgcagaagcttgggacacgtacatgactgcacatccctgcgagccctttgccttggggacaaagcacaccattgaagggattccctgtctgcccagtgatgacttttactgccatagtttcgggtcttccagagtaatttattgcattcatttgatcctgcacagtttaaacataatgctgcattttacagatcaccttgactgttttgcctagatgtgccttttttctgaagttaatgttagctctctattgttacttcatcagttcattattttttgttaaaaaaaaaaattcgaaggattttttatttattcaacttctgtattataagctgttggtcaatatttgtcattaaacatttctgtgaggtgaaatttaaattctggcagtgaaatcggaaagttacttagtcattactgtctgttttctaaaatgacaaatgtcttctaaatgtctatttgtttttattataataatttta

SEQ ID NO: 8163 - DNA, 468 bp, Canis familiaris
  misc_feature (1)..(468): n = a or c or g or t
cttccacctcatatncgtctggtgctttacagtnngcaaaatgctttcaaagtcaggtagatctaaggcacagacatctgctgactaacgggtgaagacttactgccacttcacagacctcaatgcacctgcacgttgttctctggagcaacatggtgcatcacagaagctctgtcctgcctgtggcaccgaggagcccttctcaccccgaacagcccctccgagcagaggctgtggtcttcccaggcagctcccaggctgagaagagcggtggtaggaggggcacaggggaaggccctgactgtttccacatccacccagacttggcaagaattccctagaagccttttccatgacacaatagaaaaccagcagagtcatcgctttgatggttcccacaaatacggcttcgggttgaccttcgcaaagttcctttgaacccggcttccagtaactgaacccctccag

SEQ ID NO: 8164 - DNA, 581 bp, Canis familiaris
  misc_feature (1)..(581): n = a or c or g or t
agncttacagctgggtcagctggcatcagctgcccannnagggtcccccntcctgggctcagcatggtgctatgtgtgtcctctgtcaccccagaggggccccagctctgaagcagccttgtgaaggcggtggtagaaggaaaggcctgggcaaccagcctgctgagggtggttggtgccaggagtgggggttgtcagcacgggaactcacgacagctactcatctgggcacagaggagaaactgcagtgaggcggtgggggagacagatgtacagaacacaaccaccaccctttccacccactccgcaccccctggggaagcctggcctgctggcttgctctaccaggggagccaggatggaggagcgccagagccccctgcaggacttcaccctcccctccgtgtgggagcaggcctgtgtgatgtcatagcctctggcctggggctttatgacatatctgagaccctgaatcctgaagcttccctgctcctggctgctgattatgaaggtccaggctgtgggtagggggtgctccaacacccacagggtttggggctgcaggaaagcagctaccagaa

SEQ ID NO: 8165 - DNA, 588 bp, Canis familiaris
  misc_feature (1)..(588): n = a or c or g or t
taagnntncagatgggttncantaaatggtatttagggctgatgaattatcatccttgaacgtctttctcagtatgccacatttaggacacatgtttaattttctaaaacactatcctaatctggatgactaatttgagccgctgtcccaactctgcaactcagcatgcactgccagtcttctcacccccccatatcctttctccccctaatcccccaccacaccttacaaaattgagatcaaagaaatctcattctgcgattgttaatttaaggatttaaaaaccaattttaatactgtttcactagtttcggcctttgaagtaggtagacttacgggttttattctgcaaattgctggtggtcatgaaaccattcatgttatgtttgtattatgttatcaaccaaataacgtttggaaaaaacacctgatttcttttaataagccctcagatctgttaccacatctctcatttgtgatgcaataggacactttgcctgtattaaaagggccaagagtaaatgccttttttgttgaacatgtctatagagttggcagttaatgctgaaatttgtcaaatagcccttc

SEQ ID NO: 8166 - DNA, 549 bp, Canis familiaris
  misc_feature (1)..(549): n = a or c or g or t
aagtcgagaggttctaattctctcctgtttgctctagnnnnngtgctgtggggcttttnnagctgatgattggaanctaaatatttacttcaattgcacagattccaacgcaagtcgagagcgatgcggcgtgccattctcctgctgtactaaagacccagcagaagatgtcatcaacactcagtgtggctacgatgccaggcaaaaaccagaagttgaccagcagattgtaatctacacaaaaggctgtgtgccccagtttgagaagtggttgcaggacaatttaaccatcgtggctggtattttcataggcattgcattgctacagatttttgggatctgcctggctcagaacttggttagtgatattgaagctgtcagggctagctggtagagccctgccacactgctgtgagacactggacagacccggccttcccgaccctccggcgtgcccagctcaacccacgctgcacggaccctgatcacaggcatcctgcaatcccaccggatggagctgccaagaacttggtttggggcgggtaccac

SEQ ID NO: 8167 - DNA, 164 bp, Canis familiaris
  misc_feature (1)..(164): n = a or c or g or t
gtagaacatcagtgccaaaagactattcagcnnnnnnnnnnnnnnnnnggagaaccactccnnnnntacttctaaaactttggggtgttggtgtttcttactctgttcagaggtcagannnnnttttcatatttttattttgggtgtggtnncatattactttt

SEQ ID NO: 8168 - DNA, 506 bp, Canis familiaris
  misc_feature (1)..(506): n = a or c or g or t
gggtaggactgtagggctgcgtgctatccgtgcccactagacnnaagcaggnnctggggctgtgcgtgtacgtgtgcgtgtgcgtgtgcatttctgggtctagggctgggggtgtggggtaaaggactttcccttctgcactgactacccctcaccctaagccccagctggccccctcatggctttcaggcctccctcctcctgttggatcctcaggagcccagcccagccctgcatgggattctgggggcctctgccctcctctgccctgaggccctgttgcctcctcccacccccacccgccccagcccccggcagctggagaagcnnntgctgagccagcccctttcctcccgacctggggcccaatttcctttgccccagagtcctcctgtgccaagcaaacggggccctgtgtgaacggatgctcaggagcccagcctttgccccacgctcttcccagcttctgcagtggttcagtaagggccaggagaggaggcatgtgc

SEQ ID NO: 8169 - DNA, 629 bp, Canis familiaris
  misc_feature (1)..(629): n = a or c or g or t
ggaccagcagagcagcagtgagcggggtnnncgcagaggccagcgtgnngacagnngctcnnnnngccacnngcgcaggaaggagacacccagcccccggcctgtgcggcaccgttcctccaggtctccttgaatctttctggggctcattctatcataccccaagttccggagctgcagggagtgtcccctttccccagcagaactgtgggaagggtccttgtctgcccccctttgagccccggcagcatcttgggggcgggctctcccccccccctttttctttgttcctgtgaaatgttaatctctgtgagtttttcctggttcacgtttttggggggtttggggtgggtgggaatgagaatgggagttgtgggaggggaggatacagttggggacaccctggtcttgagttagaaagggtctgggaggccatgatgccccctcctttacccctaagttcctgggggggcggtggtttggaacttgggaacttgtgtgaggtgttcccagagggaaggggcaggagtggaaattagttggcccctactgccccccagtgaggttgtggcccctcccccaacttttcttcacgtttcttaaaggcattttggttttttaaaatctgt

SEQ ID NO: 8170 - DNA, 681 bp, Canis familiaris
  misc_feature (1)..(681): n = a or c or g or t
cttcccagagaagctgtgattataccagatgctctgtactgaactaaatttgagnnggtnaaattaactcatgatatctgggttgtttgtattttcttcctttgaatatatttatgaatatattcataagaattttaatttcagggaaaaatgccttatgtgctgtctttgaggtttcctagagtagtctcttaggatttaagaagaatgttaactaggatttcatagtttgtactcctgtttcatagtttatcacagaacatttgtttcaagctatgaattataaaatagtatttagaatccagcatgatttaaatagactggtcatagatctttgaatttgtgtatttgatgtgtaaattgtaaattgtgtattatgtatatgtatcatataagtttactgtgattatcgatgaacctattgctattgttattagtgttgatggatttcttttattactttgaattttggaatgttctataattaaaatatatgacataaactattttgtacatttaaatacgatgccacgttgtctaaatctatattaaataatattgtaaatattgtttatacagttatgaaagcttctcctcaaaatggttggactcttctccctgtactaaacaatgacatgttataaaatatctgattttaagctttgagatttttagcttgtg

SEQ ID NO: 8171 - DNA, 647 bp, Canis familiaris
  misc_feature (1)..(647): n = a or c or g or t
gccctgaaaacagannnnnctggcaaagggctgaggttctctcgannaggcatgatcagctttgacgtcttccccgagggctgggacangcgctactgtctggacagcctggaccaggacagcttcgacaccattcacttctttgggaacgagaccagccctggtgggaatgactttgagatctacgctgacccccggaccgtcggccacagtgtggtgtccccacaggatacagtacagcgatgccgtgaaattttttttcccagagacagcccatgaggcgtgaccagggcccatgcctgctcctagggactgcttctagggatttcctgagaactccacccaggcctaaagagagcccctgaccctggtgttgggtggggtgccagggcccctctggctcaggatgcctgcctcattacctaccgcaaggcccaccttgatggggccagggtccgcgtggataaccgtccccagccggtcagcgcccagcgggaccagctccgccctccaacccgacagccctggctacagctgctgcttgtacttgtaaacagaacagatttctgtctatgccgggagtaggcatgtgcttgtgttcgtacgagatagagcccaccctgcttatctgtcccaggcagggtgca

SEQ ID NO: 8172 - DNA, 571 bp, Canis familiaris
  misc_feature (1)..(571): n = a or c or g or t
gtaatgaggtanannatgatgatctatttcacagctacacaacaataatggtactgattcatcttgggtcatctaaannnnnnngcctgtaaagtggctttcacaatatatgacttccggctctgcctttcctagaaaatggaaacagatgtatatttcaaaaaagaaacaaaacaagaacaactttatatgtgtatcagttttgtagctttgaatctctaaagattatattaggggtggtttttaataagtttggtgaaggacagctttgtatataacataccacaaacagatttgggagcttttgcatcatgcacaatcctaaccgacgatggctgtattgtaccagattatgtagctgctgtgtaatgtgactttatagtcttcctaaagcataggaagattgagagaggattcatcagtaggatgaagatttaagacattccatgactacctctgcattgttagatcttttagtaaaatcatgaagacctttttttctcccttactgaaggagaaaaatacatggatagcttgagaaatctttctctgctttacggttttgcctatt

SEQ ID NO: 8173 - DNA, 461 bp, Canis familiaris
  misc_feature (1)..(461): n = a or c or g or t
ccatagcaggtnnacaagaactcttggctcaaacccagaaaaaatactttgcaaaatcccaaagcaaaattaccagggtaggttattttaaaaatagataaactataacatttatctgattataaaagcaattcattcttacctaagataattgaaatacagaaaacagtaaagaacaaaaacctactcataattccttaaatcagaaatagttactgctgatagtttggcattgttattatttttattttttggactttgtgtatagaactttttaaatgaaaagtacttttcatatttttatcnnnnnaaagttagaagatagaaaaatttaaagataaaaaatttaattttaaaattctanntctgggtagcccgggtggctcagcggnnnnnnaccgccttcagcccagggcatgatcctggagaccctggatcgagtcccacgtccagctccctgc

SEQ ID NO: 8174 - DNA, 542 bp, Canis familiaris
  misc_feature (1)..(542): n = a or c or g or t
aggtgtaccaacccnagcaataaccaggggaaggggannagtcaccacccggccagttggagttggtgtaccacgagggacgccagcttccaggggagtcctttccacccgagggccagtgagtcggggaagaggacttctcactcccagagcaagaggagttcccccaactgggtacagacctccaccaccacccccaacacaagagacctatggagattatgactatgatgatggatatggcactgcttatgatgaacagagttatgattcctatgataacagctatagcacccctgcccaaaggaaatgtcagccatcgtgggaagtcagagacacaggttgtgcccgaggagcaagcagaggggctttccttcgaattctggacggcctacgaatcgtcaactcaccaacgtgcctagtcagtacatgaattcacttgggagcttgaaaatcacctgaaattttttttcccacaattatatgtcctgtgaaatgttttataaaatggtatgctttttaatttggaaagcctgttttaa

SEQ ID NO: 8175 - DNA, 604 bp, Canis familiaris
  misc_feature (1)..(604): n = a or c or g or t
agatgtcccagtnngntctctgattctctaaaaagaacgtttggttttcctgtgtagggataagattatttcctagtcaagtcttttttaantctggaaagcaaaacacctaaacgccacacccaaagccaattttcctggcatcctatttggatggcaatggggaggggggaatgctttggtattacgattagccaggggactgcagatggtgacagtcacagcccgggagtggggagattgcattttgtttccattctcttgctttaagctgcaagatagttgagggaaaagggcagtgagttatgtgaatacctatgctatggctgttctataattgctgagaagtgattcccaggctttgggagctcttgggaatctgaatacatcagtggaatttccttcccctgtgggaaactcgtaggatcatttgctatgttatgcctaaactgtatggattttttttctccacatacctaagtaaacccactgtaaggatggtcattcttattctttcattcagataagtttttcctttatctgggcactgaagggatacgcaaaacaatgttaacaatatttttggtaatgccttcaactaggg

SEQ ID NO: 8176 - DNA, 599 bp, Canis familiaris
  misc_feature (1)..(599): n = a or c or g or t
catgtnnagaccagggacagaacacagcnnngtattggggtgacagacntgcttcaccccaagttgttccagtgccacttcccaggtatgggcagtggcccctttgaccctgcgtggccaggcagtnnagtggctaggggagctgtcacacagttgggtgccaagggaagaaaaacacaaatcaggtagagaaagcagagaaagcttggctgtaaacnnnnnnnntagacttgtngccagcttctacccagtaatcatcaacttgaggacagtgggaaggctccttggacgaagttctttctcaggttgagtctgttctgttgcctggacggcaggcagggagctgacctgcacggatcccacatttcagcgccacagagaaccttttgcactaaatcatgctatttcctaaaagttttgttttgtgttaatgaactcagactcccctccccccgccccccacctcctgtcactgaggtggacacatgtccgcacagtcaggacagcgggagggatctggccgggccacctccagtgttgttggggccacggaggagctggcacattgaacacagagatgctcgttgtctcgagtgcct

SEQ ID NO: 8177 - DNA, 398 bp, Canis familiaris
  misc_feature (1)..(398): n = a or c or g or t
ggttctctttaccagcacatnncnatgcatctgtttttggaaaagannnnnnnnnnagaannnnactgcctgcctngnnngggtcacgtgagggacacctgtgcctgatttcattaggnaatccannnnnntatnnnnnggtgctgtnggnnnntntatcaaaaacccttnnnnagcatccttannngaaaaaaaaacaaaaaaggaaannnaaagtgannnnnnncgtaannnnnnnntcgtcatagatnnnnaatcttnnnaanattcnnnntccatctnnnnnnntgttttacaccttcacaagtcagcattaatctttctttcttttaaattcgnttcgttgacggtcacacttagagccannannnggtctgcagttcttttttgaatgtgaa

SEQ ID NO: 8178 - DNA, 562 bp, Canis familiaris
  misc_feature (1)..(562): n = a or c or g or t
accttcctgacatcaccagaagagctctatagagtctnnaccacccaagagctcgttcaggcctttacccatgctcctgcgatgttagaagcagacagaggtgggaagtttcacctggtagatggcaacgtctctggggagttcacggatctggtccctgagaaacttattgtgatgaaatggaggtttaaatcttggccagaagggcactttgccaccatcaccttgaccttccttgacaagaatggagagactgagctgtgcatggaaggcagaggcatccctgcccccgaggaagagaggacgcggcagggctggcagcggtactactttgagggcatcaaacagacctttggctatggcgcacgcttattttagggctggcagcaggggggctgcccgctacttcgggccagccctctcctgactggggcttgggactcccaggattgcaccatcccaaccactaacttggggctggggccccttccctccacatataccttgggtttgtgcatgttttctgctgggtgggatcagagggggatttctcttttatgtg

SEQ ID NO: 8179 - DNA, 582 bp, Canis familiaris
  misc_feature (1)..(582): n = a or c or g or t
gctaattacatnnnnnnntttttcagattcagaaannncagggatctttaatgcctctccagcttctgcagtgcattgttgatgaggattcgcccgtccttccggttggagagttctccgagccatttgtacatttcatcactcagtgcatgcgaaaacaaccaaaagaaagaccagcacctgaggacctgatgggccacccattcatcatgcagttcaatgacggaaacgccgccgtggtgtccatgtgggtgtgcagggcgctggaggagaggcggagccagcaggggcccccgtgatgctgcagaggggccccgaaccggtcgccaggggacaacctacctgttgcaccccctttctgtttgctgtctgcgccagaagagcttcgctgggcccggcttccctgctctcacctccgactctgctggcagatggcctagcctagggagccctcgggagtggccagccctcgcctcctctggtctggaggcactggctggggtgggcaggggggtgggggtgtcgagaatggaggcttctgtacccctgcccctcttttttcctaacatttttctttgtaaa

SEQ ID NO: 8180 - DNA, 593 bp, Canis familiaris
  misc_feature (1)..(593): n = a or c or g or t
cttctgcatnnnacacttccagcttcccgccctgcagcgcatcctnncagcacnnnncaccgcagagctggagcccttgaccgacggacaggtgtcccagactgacgaggaagacatgggcatgacgtacgcggagctctctgtctacggcaggctccggaagatcgccaaggccgggccctacagcatgttctgcaagctcgtcaacatgtggaaagacgcgtgttccccaaggcaggtggctgacaaagtgaggcagtttttctcgaaatacgccatgaacagacacaagatgaccacgctcacgcccgcctaccacgcagagagctacagccccgacgacaacaggtttgacctgcggccgtttctgtacaacagcagctggccttggcagtttcggtgcatagaagatcaggttcatcagctggagagcagaggccgtcaggacctggatggcgtggactgatgccggctcctgcacgggagggccccccaccaccagggtccctggtgttacgtcggcctcgccagtaatctgcccagagagtgcaccagcatcctgtttcacgtctgatgggagaggggtcttttca

SEQ ID NO: 8181 - DNA, 424 bp, Canis familiaris
  misc_feature (1)..(424): n = a or c or g or t
catacaaaaaaaaatgcatacagctatagaatatacnnnntcgcattaaangcgttcatagactcttggtnnaagaaacccaaacccaaaacacgtggaattttggtctcttgctttaaaatttcccttggtcagttttgtagattatatctaacatagaaaatgtagattatagctaacaccatttggcacatttgatttcaaatagaagctgaaaattaaaccacaatttagtagttaagattttagattcagcacctgacactgttctgctcgtagtattggaattttgtatacttacacacttgtagatgtttttaaaatatatgcatatgaaccaacaagaacactattcttgaagaggccttttaatcactaataaaacaatttggtgggattcctaggtggctcagcggttgagtat

SEQ ID NO: 8182 - DNA, 545 bp, Canis familiaris
  misc_feature (1)..(545): n = a or c or g or t
ccctccatgtcctccttgtaacgcgggcacaggnnnnntgagactgatgtgaatttgaacagtaacaggggaagacggatcttgagaaaagtccttcgaagagttttgtacaggccaggagttgcctcctgaattatggttaatacgggagtgaagattttcaaagcatcagattgaatgaaatgaaaagttgtcagattctgtattttttaccaatcttcaataatgtaaagattacttttaaaatatttaagttaaaagtacttgaatagtattttgccgaaaagcaagatatgcattaatcaccaattgtatactgtcccaaatgaagcattaccgtgacccctagggcggccaggagccttgagggctgttgacagaactccccaggctctggccccgtctgctcctctcgcaccggggcttcgtagtccctgcgggccacgcccggtcgcagagtgggagccactgcttgcagccttccacctgggcccgcggcgctgtcccgtccccgtctccccagcatgcacnnnacggcgggtgtg

SEQ ID NO: 8183 - DNA, 345 bp, Canis familiaris
  misc_feature (1)..(345): n = a or c or g or t
gtcaagactgtgcagaatttggggctnnnggcntgtnnnagctgaggcntgtgggggncttcttgtcaagctgaaaattggtgctcaaggggcgccatcagccctggaaagattaagaaggggtgtggtggggcctcggtctatctccatctctgcctgactctgagcttgtgactctctgttcccatctctcctgtgtccagaggagatcaatcccagagggagtcagggctagcggggagtgggtaaggaattctctggtaggtggagatttgaaagacatgcacaggcttgggtcttgggtcgagtgtgcacgtttgaacccagagacagggatccctgagt

SEQ ID NO: 8184 - DNA, 532 bp, Canis familiaris
  misc_feature (1)..(532): n = a or c or g or t
atgttaaataattcaaacagttgtggatcttaancagatgaaacacgtagctgccacttctgaatgcagcttcctggtcctggcacctgctgtcgcagagtccgagtctgcagactcgatggggccctgggacgcccggagcacagtgggtacggctctggagggggatgggcagccacctgcccgttccccgtgacccagcgtaggcatctgccctgaaactaaaccctccaggcctggagatctacgggtccgtgtccagtaggagacgcctgaaggaagcacaggccctgcgtgcaggcaaggggggagcgggccacggggcttcctggctggagcccagtgtggcttctcaggatgaccgcggggggtcaacaaacatggggattcctgggacgtatggtttcctgacgaacgggaactggagctgggcagtggggcaggacgtggagggggcgggccagcctggacgcgggccttcgggcaccaggggagctgcccccatgggtaccattgagccgagctgaacccg

SEQ ID NO: 8185 - DNA, 558 bp, Canis familiaris
  misc_feature (1)..(558): n = a or c or g or t
gtcccccnntatttatttgaggttggtgtttttgcacaaaattttgtaaggtaattttgagaattgannnnnaaagacttttccaagagannnnnatgtaatgatgttttattgtattttaannagattatttaatttgtaaaaactctgtccacgnnnactgcacatagaatatcaggtaattaagtggaaggagaatggaggtcactcctttgatgagagccctgaatgcctgatnnngattccttgtgactgtttggtgggacacatgccgggggcacttccaggatgacgtgctcaggagctaaaccacgggtactgatttagccgtnnngctgcgcgaggcctgggctgatcggagaagttcatggcccctctctgtgggtctgtcttctgccagaagacttacaacaatcaacaaggggggagctgtcccgggtgtccctgtttgggaaggggcacagaagacattttctgtgtcctctgagtatacaaagccagcttgggctgcagaagccactgtcttcnctgaaaanntgacaactcttgaattncttg

SEQ ID NO: 8186 - DNA, 600 bp, Canis familiaris
  misc_feature (1)..(600): n = a or c or g or t
ggtgcacctgcctttcatngnnntcntcgctccacctggaccctttctgcctttaaatttctgtctccccatctgccacagacccccggtctatttattaaccagcaagacggcaaataaggcgttttctagggttgatttttgcttctttctgtggaggacgctaagccccactttgccatgttttattcccttttctggaaagccctaacaggattgagtggtctattaagaatccggaagaaaaacccaaaccgaccaaaccatcagttaagggtcatgctccaataagaaaataaatattccagatggaaataaaatttaatgaaacaataaaagtagaaattatgaaacggttcagtaagaatgagatttttaaaagtatgtttcagctttggatcctgcttgggagatggggtgggagggacggagagaaaaccccacagggaagcagaagtgattcagcattcctttggccaaggtgaatggttcctcactccctcagtcacttggggcgaggaggagtcctttattaccagccttggaattcacctctgcagcttcccacagccccttggagttggaaaacaccttgtctgt

SEQ ID NO: 8187 - DNA, 622 bp, Canis familiaris
  misc_feature (1)..(622): n = a or c or g or t
aaacnnctgtnctgggtgatgcanccgttgtgattgtgaaagcttagaattcaatttcaactcaggttgttgatgagggagaaaaacagttgcatagagtatagctctgtagtggaatatgtcttctgtatgactaggctgttcacctttgactgtaaactagctgtaaggatttctcagtgaaataaaattttaaaagaaagaaagtgttctccaggatgcatagattcatggtttttctcttcttttgaaatgtgggcattttagtctctacatgctctatagacctgtcttgtccattgtatatataatccacatattaaagaaaaagtaatcagacaagcttgaatattgtttttgcaccggatgaacattgaggaaattcggagctatacatatgtgcagaaggttactacctatggtttacatttaattttaattgggggggggaatgaatgcttattgtaatggagttaattttattgataataaattatacactatgaaaccgccattgggctactgtagatttgtatccttgatgaatccggggtttccatcgggctgaacatacactgtatattttgcaatatttacctcaaggcctactgaccaaattgtt

SEQ ID NO: 8188 - DNA, 462 bp, Canis familiaris
  misc_feature (1)..(462): n = a or c or g or t
gccagtgntnctcanacgtnnggtgcacagctcagaagcacctgggaatcntgtgnaaaggcacattctcaatcagtaggnctggggtggggcctaagagcctgtattctcaacatgcccctgctgcttgccggaggaccactctgagctaagaaataacaccggcacttttcttggcatcctcttccatacacacctcccttcaccaaaaacaaaataaaacgaaacagggagactgcattgtctagaagagtcttacataattccaggtaattgggaagggactgccatactgtatttagaatttcaatcagctccctctctggccaagaacgggcttattcttgatcaggtcagagggtcaggcaaaggatgaagaaagttccatggagggacacctgggtggctcagtggttgagggtctgcctttggttcaggtcgtgatcccggggtcctgggatc

SEQ ID NO: 8189 - DNA, 680 bp, Canis familiaris
  misc_feature (1)..(680): n = a or c or g or t
atgctgctgcgttcagacgntgttcccatgacagcagagaatttccgatgcctgtgcacccacgagaagggctttggctttaaaggaagtagcttccaccgcatcatcccccagttcatgtgccagggcggcgatttcacgaaccacaacggcaccgggggcaagtccatctacgggaagaagttcgatgatgagaactttatcctcaaacacacgggaccaggcctgctctccatggccaactctggccccaacaccaatggctcccagttcttcctgacgtgtgacaagacggattggctggatggcaagcacgtggtgtttggggaggtcacggaaggcctggatgtcctgcggcagatcgaggcccagggcagcaaggacgggaaaccgaagcagaaggtgatcatcgccgactgcggggagtacgtgtgagtctgcacgccccgtgtctggaccgccctgcgtcccggagcggtcaccccgtctcggggcatcggtcccctctgggcaagcagggctttgtgtcccggctcctggggtctgcttggagcagctcttgtgccgaggtggcccgggcttcctctggctctctccctggggcggccgggggccgggagggcagaggcgctgcgtcttccaggcctctgctgccacggctgctcctgggcccacccgtg

SEQ ID NO: 8190 - DNA, 535 bp, Canis familiaris
  misc_feature (1)..(535): n = a or c or g or t
gttgcatgtttatnactacatggtttacatagaaaaatttttgaatttttgggcaggtaatatatacacagtctataattcagaggcagatacacatctgnaagtgaccacagacatgaccactgttagcattttccatgaatccttcacttatgatgttactgaatttcatattttgagtggtagtatgtcatcagacagcacgccagttctatagagattaggaatatgatatagtctctcttatttatgttactggtcacagtttccctgtttatagggaagttcttcacaattgtctttgtcccatcttcacagttgacaattatcataacattgactgcaataactggtgtatacatttatgcttcaactgatggttagaatccaacaaataaaacgcaaaaggagatttaattccagactcaagaatgcttctctatacttgaaagtgaatattcagacacccaaaataaaatagatatatccaagtctcagttgaagggacagcttcttctggcaaccaaaactgagg

SEQ ID NO: 8191 - DNA, 545 bp, Canis familiaris
  misc_feature (1)..(545): n = a or c or g or t
ctggcgagtgccgtgaannagcagtatcctggcattgagatcgagtcgcgnntggggggcacaggggcctttgagatcgaaatcaatngacagctggtgttctccaagctggagaacgggggctttccttatgagaaagatctcattgaggccatccgaagagccagtaacggagaacccctagagaagatcacaaacagccgtcctccctgcgtcatcctgtaacgacatgggattctgggttcctgctctgttctggggcccaagccttggtctcccctttggtcctgctgagggccccccactgcctttttcccctcacttgggtcccagtaagctaagagactctggcctccactttgtccatttgggtaccaggatggaatagaagctgctgtggtcttgggggtgggagagagagacctccatggacatttccacagccgccttatacccccttccctggatcagtgcccaagaaagtctgctccccgctccagctgtactgatcagatgccaccagggttctaacctcccttccacta

SEQ ID NO: 8192 - DNA, 572 bp, Canis familiaris
  misc_feature (1)..(572): n = a or c or g or t
tcagaacgaagactcccagtgcgtcttgtcatccgtcgctagtttnagnagtgggtgcttctcgcctccgcctgcctcttgctgcacctgcagaacccaagactggaattatcgactactgaatctactacatggattgctgctacttcaagctattaaacttgaaacattacgattttcctgaggggagatgggatatcatctaactattcagaatctttggcccttctgaggaaagatctagtcatggaaccatgggaaccccagcttctagagggttgtccgtggatgtgtgtggatgtgtgtgtgtgcgcccatggtaagtgtttctcaggattcctaacttgattcaaattacagttgagtttctataaagaatgagtctctgtatagaagaacaaatgtgtgcattcaccctcggttagaatggtctccatttcatttcaaaggagaggatcaggctatctgaatataaacacaatttgatgttaatttattctaagtgnnncctaattttgattttcctaaagaattctgcctttgttcatactgtgttaaattttttaaaaatt

SEQ ID NO: 8193 - DNA, 450 bp, Canis familiaris
  misc_feature (1)..(450): n = a or c or g or t
tggtaagtttgaggcctcgtgtccagaaacggggtgaaaacctggctnnnnnntgggactgggcttttcacccgacagtggctctgctcaatctcaatatctatctagactttgaatgcctctcacatttatgaaagctatggggaaaaatgcactggagtattccccaggggctccgaagaatgacacaaccagattcccggtttaaaatatcacagctgccccctgacccaggcagcatgtctctccctttctcctttatttttcctttttttgggcaaaatctagtcgagggggttgcctttgctgatttaacacaatgtttccctgtggcccaacagtgataattgtcagtcaggaagccaatagatatctgccctaccttcaggttgtgaaactcaattgtccnntattactagttcagcagttctcaaagtgtggaaccctgac

SEQ ID NO: 8194 - DNA, 531 bp, Canis familiaris
  misc_feature (1)..(531): n = a or c or g or t
tcatgagncagcccagtcacaaaacatctgcataactatgatcacctacatcaaaccctggaccttttctgcaaagcagcaatnnatagccatagctgattattatggaacactgcatatattggaaattccttggacatnaagtcacccttccaccaatgaggtatcaagcatgaactactacttcgaaagagaagtcaagcatctggaatatatagaacaacgcaagaaaattcgcgaccaagaaaagaaggaaatggagctggagcttgagaaaaagaaaactaaaacgtatcagaagtcaaaagaacagctggaggctgaattgaaaatggactatgagagttacttagaactggaagagaccaccctcatcaaccttggcttcctcaaagtggcagagaagatgtcattcatggacttgtagaaagatttccacaagggtgttctggggactttgtaggactttctttttatttgttattttttagataagatgaaataagataagacaaactcagcatcaagtag

SEQ ID NO: 8195 - DNA, 562 bp, Canis familiaris
  misc_feature (1)..(562): n = a or c or g or t
ctattccccntgcgccttttcccagagggcccagcctctctcccctgcccagtnnttggtcaggtactcaagcgagcagtgcccctgtttggggagcctgtggatgagggctcagtggacctctggtgactgggtctcttgcctcccagccctgatctgagccagagtgtccccattgccccagagtcaggagcacaaatgaggtctgacctggtgagattatttttgatgaccttgtcaaaaaataaacaattccagtgttccaggtgagggttttgaaaggccttccaaacagctctgttgcccctagcaaccccaccatcgggcactgccacacagagacatggctggcccagaatggcctgttgccatagcaactggaggcgatggggcagtgaacagaataacaacagcaacaatgcccttgcaggcagcctcctcccctgagcgccgggctagcaatggccgttggactctgtgagacagagccaatctcacgttcaagtgttcaccaaccactgacatgtttttatttccttctatatgattttaagatgtgttt

SEQ ID NO: 8196 - DNA, 465 bp, Canis familiaris
  misc_feature (1)..(465): n = a or c or g or t
gagnnaggcaangccaggtacgttcnnnnnctgnnagggtaccnnnagcctnntgagactctgctgatccagaaccaggggggtcaggccttcantgtgggtgaccaggnnngtgctgggnntagcccatggcagatgattcatttctcagaagggcaaacagaggcccagaggggagtnnnnncaggttcantggaggtgttctggctccnnnnagccccttctcttctgaccctgctcgagccccttcatatcccctcccctgcagatctccttnnnnnactacaacctgctggacctgttgnngaatcaccaggtcctggcccccggctgcctagactcccaccctctgctcttggcctatgtnnncgcctcagtgctcggnctaagctcaaggcctacctggcctcccctgagcacgnnnnnnnccctgttcacggagnnnnaaagatatgagcctgctca

SEQ ID NO: 8197 - DNA, 507 bp, Canis familiaris
  misc_feature (1)..(507): n = a or c or g or t
actcttaaaagttattnngannnctaatgnnnnntggcacgtnngagtaannagtgacattgacatcctttttgttttaagcacttttaaggcttttccttcctaaaaatagtttcatgtattggactagaaatttacttagccattgtatctttgtgtctttgccaccctttttgttctcctttttttcagtgcccatctcccatttgccttgagctttctttctctgtttacttaaaagctagggttcaagtcatactttgtggaaagcccccccccccgaacagtttctgtacttgaatgtcaaaatttacataaacatttttataattctcatttggattaataaagattttaaatatatttcggtttatttttatgattatacacacagcaaatgtattaataactagtttgttaaatatctttaatagcacaaaagttttatatttgaaaatgctttatatccttctaaatttgtgtttaggttatatactgtagatagct

SEQ ID NO: 8198 - DNA, 657 bp, Canis familiaris
  misc_feature (1)..(657): n = a or c or g or t
caaatacgactttnnnctcagcctcccacngtctaccannnnntgcaagctcaggctggactaccgctcaggccgctttctctcaatccaattggtcctgggggtgcaacgggaagacaccttggtctatctggtgagtcaggctcctgaccatgaacagctaaccagtgtggattggcctgagtcctttgcagcctgtgaacaccttttcctgaagctggtagggcgttttgctccagagaacacctgtcacctcaagtgcctccagatcatcttaagtctccgggaccttcagagtttaccccagggagcatcccgtcccatcctcacctcttaccacttcaaaacagccctcatgcacctgttgctgcggctgcctctaacagactggcagcacagcatgctctcccagcggctccaggacatcctctggttcttgggccgtggcctccagcaaaggtccctccatcatttcctcatcggtaacaccttcctgcccctgaccatcccgatccctaagacatttcggaatgctgagcctgtcaatctcttccaacacctggtgctaaaccccacggcacactcacaggcagtggaagaattccacagccttctgacccaagtgaaaatgctgccctgtgccccattgcctgggga

SEQ ID NO: 8199 - DNA, 550 bp, Canis familiaris
  misc_feature (1)..(550): n = a or c or g or t
aaggtgaaagaaaacttggtnngtttcaannnagttgtatggggnnatgtnnngaccctggtgcctcccactcagnntcttccctccaccccacttcaggcatactgtaaactacttctctgaagttgtagggtgccaggaacacagtttaaaaattcctggaaaaatggtccttatggttcttttccctttgaaaatactctgatttgtgaccaaaaatgaaaagaaaggcttttctttcctagttgtaagattggaaagcatagataatattacatagaatattttgaattatctcagtgagactttaacatttgccatttttcaaaaaagattaaagaacaaaagagaagagtgatctctttgcaataaatccaggctgaagaatgttatcaacaaggcttatatcagtgatagaaatatgtgtgtcctggggcacctgggtggctcagtggttgagtatctgtctttggctcagggtctgataccagggttctgggatctagtcctgtatctggctccccgcacgaagcctgtttctccctctgcc

SEQ ID NO: 8200 - DNA, 420 bp, Canis familiaris
  misc_feature (1)..(420): n = a or c or g or t
gctngaaaaaattccaaaaagaaaggnagcaaccaagaagaaaaagaggagttaatgtttgcaaatgcagaggaagaatttttctatgaggccatcctgaagttcagctactcggtgcannaagagagcgacactnnnctgggaggcaggtggtcctttgatgacgtccccatgaagcccttgcgaaccgtgatgttgattccaggtgaccggatggacgaaatcatggacagactgaaagagcacctctccgtgtgacccatttcccatggacagtagttggtgattttgtgtttgtaaaattatcagaaaacagctctctgatttactgaaaaactcacgactttattcagagtaaggtcctctacaaaagagtagggttctgtcccctgtgtctgtgacacatttacaaaatagttt

SEQ ID NO: 8201 - DNA, 562 bp, Canis familiaris
  misc_feature (1)..(562): n = a or c or g or t
acccagaaccagaattttnccacagcagtgancagccagnntcagcaaagatcacaggnnnnnggcaatcagcctccaaacattttgggacaggcnngatctgctcggaacatgggccccaggcctggggctccttcccaagggctctttggccagccttccagtcgcctggcacctgccagcaacatggctagccagaggtctgtgtcttccacaggtatcaactttgacaatccaagtgtacagaaggctctggacaccctgatccagagtggccctgctctctcccacctggttaaccaaaccacagcacaggtggggcggccccaggccccaatgggatcttaccagaggcattactgaggctaatctctcaactacccccagtcccctcatcccctggcctcccacctacttcgttcaaatagttatttggaggatgttctctgcgcctctccaggtctacatcgaatgtttctaccacctgctctcttctgcctgaggctgtgttgcttattccttccagagtcagagtttatactgcatttgggggtgtatcttt

SEQ ID NO: 8202 - DNA, 592 bp, Canis familiaris
  misc_feature (1)..(592): n = a or c or g or t
aaatgtaatgcttgttatagatttccaaagcatactntatttttgtatannnctcagnatagtgatgttttgtataaagctcaggatagtgatgtttctttttactnntaaaatatatttctttttaaaatttaatcaggaatgggattgaatttaatcacatgcctttgtagcacttattgaaattagttaatgaaattagttaatatttttaaaacaattacagcagttaaggtatgtagcaattactctatcagaattggctgcaattatttccataatgctttcctccttcagtctattagtgtggtgaattacattcattaatggacttatgttgcttttgcacctaattttaccagattattttctcatattgactaatttgggtttgtaaaaatttttggagtcaatatggtcattcctattttctcagcattttgcccatatattctagaacacattttttgctaataattttgcacatatccccttttatctgcatgttttccctttttcctctcagtctgacttgacaaatatttttctattttattaatattttccaagaacagttttgatttgttttttg

SEQ ID NO: 8203 - DNA, 566 bp, Canis familiaris
  misc_feature (1)..(566): n = a or c or g or t
gcagaactcccacatgtatacacacaagcangaacccccccagtattcccatanntcccggtttccatctgcgatggtggtcacggataccagcagcatcagtacgcttaccaacatgtcttccagtaaacagtgccccctccaagcctggtgatgcccactcactgctcactttgtgcacggcaacaaggaccccattttccgcgccgtcaccctccgggccgctgtcacagaaaagccctggggcctgacaggcacctctgagaggtccctgcctacctgacatcccgctggcgcctcagacaaggacaatgcgctcggaggcacagcccagagggcagcttcccttcccttctatgcagtattgtcgccacacctctccgagatgtcaggtactgccactcggcctccgggtagcagacaagaagccacggaggcggaagagagaaagctgtcgtgtctacactgtactccttcatcgaacaaactgatgcgaaaaacttgaatctgttactgaaatgaggaggacacatgctattgaactgagccacacattctgtaaatat

SEQ ID NO: 8204 - DNA, 577 bp, Canis familiaris
  misc_feature (1)..(577): n = a or c or g or t
gggagaccaangcannnngagcnnaacaccaagatgatngacttcgacaccttcctgcccatgctccagcacatctccaagaacaaggacacaggcacctatgaggacttcgtnnaggggctgcgggtcttcgacaannaaggcaatggcaccgtcatgggcgccgagctccgccacgtgctggccactctgggtgagaggctaacggaagatgaggtggagaaactgatggcggggcaggaagactccaatggctgcatcaactatgaaggtgtgctcagcaggaggggggctgctggtggtggtgagggcactgggaccctaggctcctgcccgaggccgcccagggctcaacccctgccactcgctctgcccttctttgcagcatttgtgaagcacatcatggccagttgaacctctcatcccagggagcccaggaggccatgctggggacagctcatctcccacttatggtgcaaacaccagcgacctgggattcggggagaaggggagcacatcgagaatcctacggcagcccctctgccggccctgcagacctgtgtgcctggcatctctc

SEQ ID NO: 8205 - DNA, 543 bp, Canis familiaris
  misc_feature (1)..(543): n = a or c or g or t
cccatgccaccgaacagaaagtgttggntgttttatggcatctcttagggaacatgacaaatagtggctctttgcctnnagctnnangaaatatacgaacagccacagctaaattatcaaaagcactttttgcacaaatgggccagaatctattaaatcaggctgcatctcaaccaccacatatcaaaaagagtttagaagaattgcttgatatgacgatatgaaatgaattatgcatctttgaaatataatatgaagaaaattgtttacataatgacaaatggaacttttttaaagttacattttcagtgcctgcacttcatctagtaaattaaggcaatggttatttgtatttgcagccagtgagtacacatctgccttctatcaaccctaccatttgcacccatcacgtaaaaacctaaagtaattaatataaccctaatattcatgaaatctgaggcacatagaatgaatccaattatattatttttgaggaaagtcctgctcatttgcactattctatagaaatcacaattcattgcc

SEQ ID NO: 8206 - DNA, 586 bp, Canis familiaris
  misc_feature (1)..(586): n = a or c or g or t
catccacgtcattgaccacagtggtgcccgccttggnnagtatgannatgtgtccaaggtggagaaataccagatctcacaagaagcctacgaccagaggcaagactccgtccgctccttcctgaagcgcagcaagctgggccggtacaacgaagaggagcgggcacagcaggaggccgaggcctcccagcgcctgaacgaggagaagacccaggccagtgccatccccgtgggcagccgctgtgaagtgcgggcgcctgggcagccccctcgccggggcaccgtcatgtatgtaggactcacagatttcaagcctggctactggattggcgtccgctatgatgagcccctagggaagaacgacggcagtgtgaatgggaaacgctacttcgaatgccaggccaagtacggcgccttcgtcaagccatcggttgtgacagtgggggactttcctgaggaagactacgggttggatgagatgtgacacctgaggaaaggcatcccccagctccaactaactggcctactcattgcccctccctgtgtgtgcccatggccctcttccccgagcccatttttattttat

SEQ ID NO: 8207 - DNA, 107 bp, Canis familiaris
  misc_feature (1)..(107): n = a or c or g or t
ggggggggggggtctctcctgggaaggtgcgtgggtcgggcagcacgtccccgggctccggtggggcctgcggttgccttcccggttcctnnnngggccggcgcggc

SEQ ID NO: 8208 - DNA, 632 bp, Canis familiaris
  misc_feature (1)..(632): n = a or c or g or t
ccctgctcctttgtgtgctnntancgccccatgtataannnnttccnnngtgacagttcattcaatttcnncgttttcttcttcattttcttcgtcnannatgtgctttttgtcctccaggccattggcantccaggttgggggttcagtggctngatctctgctctggtggtgctgaagaccaacacggctgtagctgtgctcatgctcctggttgccctgctcttcactggcatagctgtgctgggaattgtgatgctaaagcggatccactccttgtaccgccgcacaggtgccagctttcagaaagcccagcaagaatttgctgctggtgtcttctccaaccccgcggtgcgaactgccgccgccaacgcagccgctggcgctgccgaaaatgccttccgagccccatgagccctggcagggatgccctggccctgccactggagggagcgcacttagcccccatccctgagggctctggggcttggtgagacatccgtcactacttggggtctcctctcatgtccccaggtccgcagccataactgctgaccctgacttaagggtgtggggagcccactgtgacccagtcccgctacccctgccaccccatcgaataggccacannn

SEQ ID NO: 8209 - DNA, 664 bp, Canis familiaris
  misc_feature (1)..(664): n = a or c or g or t
ggcttggtgtccgcntcgatgcccgaggtgtgggaactgctgtggcnnnnngtggagtgacgggacaggcgcttgtgcttcacgctgcccgcgctgctcccgctggcccgagaccgcttttccagctggnctacgtcaaggtccaggctgtcgctgatgtaagactcccgatactgcttcttctctgcatggtgaggacacagcacgtcatatattcaaccgagacagaagaaagggctggttagctttagtgagtcactgggctaagaactagggcgctttcacacccagaatccagggactggagagtgatgattctgacaggagctcaacttaagactgcaaatgcataaaaaccaatacaacagatttgaggttgtatttaaactattcagagagtcttaaagcttcaaaactatagaaaagtgctcttccatgtagaatcaccagaccacctcttgtctgcaaattgctattggccaacagtgacataggttcagtatgtgagaataaatatttagaagtctttagagcacttggacattgccatgacagccactactgtgattttgtattatgcagaaggatcagtccacaatggatgagaaatcttaaaaatctggtccttccccacaaataatttcagaagtactgctacagaaga

SEQ ID NO: 8210 - DNA, 473 bp, Canis familiaris
  misc_feature (1)..(473): n = a or c or g or t
tgaggtatttgnnnnnnacaaagccaagctagagatgagctatatggagtttcacctgtcctcagcnnaannagtgcaggtcattacactcctgttctcagttggtccttcccgtggtcttccctcagaaagtccactctgacaagggcctttcaaatgagcaagcggtggcacagtgtgactggaagacattggnnnngaaccaggtgtgcaggtggagggatggagtggtttacagaggctggcagtgtgcctgatgctggaacggtgcgggaccaactctcctcgagagtggggtctctgtcttctagtactactggtgtttattctagttagtaacttgtttactataaaatacctatttggtaacatacttgctcaagacaaacacatcaactgatactttattgctacagaacaagacagtcatacagnnnttgtaatatgaaagtcttttcttactcatcttcctg

SEQ ID NO: 8211 - DNA, 580 bp, Canis familiaris
  misc_feature (1)..(580): n = a or c or g or t
tnnaangttcaaaggctgttgctgagcangcagatagactgaagctgcaacctatggctttaagctgcgtgctgaatattggtgcttgtaaactgaagatgtcaaattggcagggagcagttgacagttgtttggaggctcttgaaatcgatccatccaataccaaagcattgtaccggagagctcaaggatggcaaggattaaaagaatacgatcaagcattggctgatcttaaaaaagcacaggagatagcaccagaagataaagctatccaggcggaattgctgaaagtcaaacaaaagataaaggcacagaaagataaagagaaggcagcatatgcaaaaatgtttgcctaagaagaaactcggttttacttaaatttaaatatgcattggttgtgtataaaggcaataagaacatttaaaggctttgtctgttgatgtatgatccctgatgtgtttcctttgatacttcagtttcccattgtttacagtttaagaatactgaaaagaattcactcttaacagtgttacagaaacagtgaagtggatttttttaaatgcctatttgcattaatcac

SEQ ID NO: 8212 - DNA, 449 bp, Canis familiaris
  misc_feature (1)..(449): n = a or c or g or t
tgaaagaaactcagcncttatgaaagaaagaaggacaatnnnnnttcacccccttgttttcatgctttcgaacgtaagaactcgtgtgtaggtatgttctctacccgtggcactccttctcaaagnntgcatctcattctgcaaacacgtctaataatgctgcatgagtaagtcagggttatccatttattcagaactaaacaatacctgtgtgtgagtcaacttctaactaagctgatgaaggagttantnacagcaagagggtcggttacttntgtgccgtctagtagctgaaaataannnnggtttnnaaagcaagggnnnnnnatgagaagnnnnaaannnaggtcacnnncatccccgtgtgtcttccctgctcatnnnnctnnnannnnnnnngcgtctctgggaaggannntgngancnangatcccgacatctaacaatga

SEQ ID NO: 8213 - DNA, 537 bp, Canis familiaris
  misc_feature (1)..(537): n = a or c or g or t
gtgcttctctgnnatgtgaggcacagngtcgctgggcgtnttgctggnnnnnnnngtcccannnnnntnnnnnnagnnacttcctcccagcccgtcatccgacgtcaccagttcctgtgttagtctccatcggtgacattttgattgaaatcaactatttagactcttaaagaaatgcaaagtcttttccattattgggtcctgtaatctttgtagaaataattttttctgtttcaaaataatttaactccagaatattgtgacagtttatactaagaaaaagattaatttattatgccttaagactgtaagcatttaatgtaaaagcaaggtagcatttgccagtttaaaacttttgctaatattttttgcataaattgaaattcataatattatacatttattattttgtatcgtttaggtaaactgtgtaattttaacgtttagcttagtagtcttaacagaaaatttaaaataatcagactgaattttcttattttataaattttgctactatttatacataattagcatgat

SEQ ID NO: 8214 - DNA, 624 bp, Canis familiaris
  misc_feature (1)..(624): n = a or c or g or t
ttagagcagagcattttttaagtctnnnacntccaattccaatacaaatnnnnctannggtgttgtgtcgataataatgctatttctactctttttgaaacntngannagttcacacaaacggatttctttagagtcttaatgcnnngccacataagatttacaatgagtttctataaaattttgaccatttggcatgaaaaccttcccaatatattacatttccttttcttgatacccagtgtaactaaatctccagccttttcttaatagctgttttgtttatgcaggtctccacagatagagagctgctgagatacctaggactgcttgctgaggcacttagtgacctcaggtggccatacttcctgcactgttgtggctactctgtataggatttatctcttatatacagccatgagaacacaataaaaacatttactctcattttaaacataattaaaattactcagtcatctggatttcgagcctacaacagataagaagctgtggctgccccagtgtctgttcctggcagccatcccatctaaacctctgctcaaaatccatgtgggctccatgcaaggcaccgtgataagcacaacaataaaggtagtagggttct

SEQ ID NO: 8215 - DNA, 601 bp, Canis familiaris
  misc_feature (1)..(601): n = a or c or g or t
ctcccancatcggtgnagttnggcgtgcnnnangnnnnacacannnnnnnnnccactgtaaagctcaagaacgtgggagtngacttctgcagatttagggtgaagcagcccccacccagcacaggactgaaagtaactcacaaacccggacctgtggcagctggtttgcaaacagaactgaaagtggagttatttgccatggctgttggagaggatggtaccaagggatcaacacacatctcacacaatattgagattatgactgagcatgacgtcctgttcttacctgtggaagcaacagttttgacaagcagcaattatgataagagaccaaaagattttcctcagggaaaagaaaatcccatggtccagaggacttctacgatttcttcctctacacttggagtcttcatgtcccgtaaaatttctccacattaggtccatctcctctcggtatagctcaacagcctccatgatcctctcagcctacaatgatggcaacaaaggagagaagtcattgccacatgccccagcatcctggaaccctgcaattggaaggcctgactggaaaagcactacctagcttgaactggtttaataa

SEQ ID NO: 8216 - DNA, 297 bp, Canis familiaris
tgggggaagtgaatttttctttgtcttggtttatgggtttgaaaggaaacaaatgtgttgaaaatttgaccatttagatcagttttgctggatttattcataagagggaaaaataactgatgaatctttcactgtaaaatgtttctgttcaatgaggccattgtctctaaggagggaaggccgaagccctgtgtcatggcagatctatattggtaatcagctcaagtaaatgttgactattacgtgaactgtttctggccagtggaaatgaaaattgaaaaagattgtaaatagata

SEQ ID NO: 8217 - DNA, 553 bp, Canis familiaris
  misc_feature (1)..(553): n = a or c or g or t
caagtcccagccggtgcccaagnncaacaaggggcctgtcaaggtggtggtggnnaagaccttcgactccgtggtgatggaccccaagaannacgtcctcatcgagttctacgccccctggtgcgggcactgcaagcagctggagcccgagtacgcggcgctcggcaagaagtacaagaaccgcaagaacctggtcatcgccaagatggacgccacggccaacgacatcaccagcgaccgctacagagtcgacgggttccccaccatctacttcgccccccgtggggacaaaaagaacccgattaaatttgaggacggaaaccgagatctggaacacttgagcaagttcgtagaagaacacgccacgaaactgagcaggaccagggaagaactctgaaggcccgggcggccgaggcgcgcgcaggagggaccgcccggagcccggagcccagcagcggggcctcggccagggcagggtctcttggggcttaggggttttgtactctggtatctcacctcatgctctgaatactgagtagagaagaatgactcc

SEQ ID NO: 8218 - DNA, 597 bp, Canis familiaris
  misc_feature (1)..(597): n = a or c or g or t
tgtgctggagttggtgatctgcttcttctccatctggtccatcctnngnnnctcagggtttcatacttacctcgtcgcctccaacctgacaactaacgaagatgcagtgctccactggaagtcatgacattggccagcatgttactgtttccagagttctttggaggtcctgttaccaactctgaggcagaaggaaaagggatgctttttctcccgattgatggctgagtgacttgccatcactcagaggtcacacagctggaaagggatggagccggtgttgtaacggaagctatggctctgcttgctgggcccccatcgcactgtacttgtaggcagaagagatgtgaccattctcagggtgtccttggggctcctgaaggcacccttattgagggggacagtgaagacaggatcctaaggctttctggcagacctccaccagcaagcattgtttgagcaccactgtatgcccagccctgggccagacctgacctctccttcctgttctcacaaacaataaaaaagcaaatgatggcatctgtgccggggccgccatcagatcctgctcnnnggcccatgaccaacagaaaatac

SEQ ID NO: 8219 - DNA, 383 bp, Canis familiaris
  misc_feature (1)..(383): n = a or c or g or t
tgtaaagataagtatttaattctcactgttcacttttaactnacaaagagaaaaaannnngtgaaaactacagaaactgtggtagaacttactnnncgtactggtcctggtcctggtggcgccacctctggccagtcacacacctgcttgagaaaccttctccgtagattacaaccggatgagaatctgaagtcacttttggtatcctgtactaggtattgactgttatatcaagtagtaagttgtaaaccttttaattgacaattagtataactgtggatggcttctgattttgtttttaattctgtggattgtgtttaaacaattcaaaagtatgttcctgattgtgagatactaagtggtattgcacagttgtcacttta

SEQ ID NO: 8220 - DNA, 530 bp, Canis familiaris
  misc_feature (1)..(530): n = a or c or g or t
atgcttaaatataaagtnnattttgagtgcaacaaaaaaaactgaaagttgatagccatcagttatgaccatgacaatnctaagaaaatgtaagattggatattaattagtcaaaaaattttcaatatcctgcgttcattctttcttagcctgtttttgaaaaagaatatcccgtaggctaatatattcacctgttgaagcacttgatatgtatctattaaaatctttttaaaacttttgaaattgagatcactttttataatttatttctagaaaaaggaaaaaagccccgacattgagtgcttttgtgttttaatgccatagattcaaatttcagttttgtttgttgtgtattttttgtgggtattaaatgatcagtgggatggctcttccagtaaccatgtggtaaagatgtcattttgaactacacagcagttcatagttacaggttctctctgattaatatttgcactgtgcatattcataagtaacaaacacaaaagagaaaagcagcctgattgcttataagc

SEQ ID NO: 8221 - DNA, 604 bp, Canis familiaris
  misc_feature (1)..(604): n = a or c or g or t
ctnnccattgtcccaaggcnntcagcnntgcagacagacacactgggcccaccagtgttgagggacccggggagcccctggtggccttgtttcttgccttcataaaatgtcatgcagctgacacccgtgtcccttcagtggcaaccttgatgtagggaacgttcagcaatttagtgtcatctgcttggaagctccccaccccaagtaatctcagctccttcctccatccctgagagaaactggatggattttccctctactcctcccaccccctccaccagacttttatggtttcattcatgattgtgattttttttccatggaatttttttggggggtgacatttccatcatggaaataggaagatttcggagtgctttgtaaagatctcaattgtctgtctattttctctctttgacttgtatgaaggagattgttacgttgcctggtatctctttgtaaatgagaaatatcgctaacatccaagcattctgaagtcttgctgatccttccgagttttagtttttatttagtctttcatttgtttgggggcttggggcaagctatttattagagttttgcaacagagttcttgtttgaagtc

SEQ ID NO: 8222 - DNA, 558 bp, Canis familiaris
  misc_feature (1)..(558): n = a or c or g or t
gctcgagctcagcgccccccannnnnngcgcggcacggcgctacnnnngcgagctccgcaggatgagcgacgagttccagggctccttcaagggacttcctcgcccgaagagcgcggggacagcgacgcagatgcgacaaagccccagctggacgcgcgtcatccagtcctggtgggatcggaacttggggagaggaggctccgccccgtcccagtgacccgtcccgcgtcccgaaactctccccttctctcggcgccgccggcggccatcttgggtgtgggcggaagtctttcccgcaggctcgatgtaagaaagaggttcagttctttccttctcgaaggaggcgatctgacccaaagccgatccccttccggtgtgcaccaggagcacggaggggtttggccctgtcggaagttttgaagtttacgcgcccttggcggccggaagtggccccgtgcccccgccccggcccccgcccgggctgccccgagcgtctgcgccaagttgcggggcaggaaaaccctaacttctccagagccctttcctccgcggcgtcg

SEQ ID NO: 8223 - DNA, 471 bp, Canis familiaris
  misc_feature (1)..(471): n = a or c or g or t
ctgaggggacatgtgatgatatagtaaaatattagaatgatcgnnatcattagttgagagtcataatcataacactggtgagtctcacacacactggccattcagcccagggtctcatgctccacctctgctggnnntctcctggctcctgtgtggccttgtctgcccgtgagcagctggaccatccagcccgtggcagtcaggctccgtgcagagcaagcagacatgagcccgccccactcacccaggtcgcagccagcaggcaggccacggtgggctcagcccacggtgctcacagcagcctgtgaaaataactgtctcacctctctctttctcttcctacaggaagactgtatcgctagatacaagttgctggttgaactggtccaaaagaaaaaacaagctaaaagctgaatattctggaagatgatgttcactctcattttccaaaatggttattttgaaaatctt

SEQ ID NO: 8224 - DNA, 377 bp, Canis familiaris
  misc_feature (1)..(377): n = a or c or g or t
agcatcctgctccagactttccccatagctncatggttggtagggtctccttcccctcctggagagatagtgacactcaagactagagaagaggctcacatgcttctattcatgtgctagcaagtccattctggagagccaacttttcatctgcccaactgtgtagccgctgcatcgccctgtcgtccacatgtgccaagtttgatgtagcattaattctttccnnnnnnnnnttccaagagacctaaagagttgctgtgtctctgtcacactcctccattcaaagttctgttatgatagggtgcgacgcttttaccgaacttatttatcctagcacctgcttcaattgtttgaggaactggaaagatactttttct

SEQ ID NO: 8225 - DNA, 472 bp, Canis familiaris
  misc_feature (1)..(472): n = a or c or g or t
gacggtaggacnagtgaggagatctggccaaagattctggtataaccgaaccaagatgtaaaacgaaaggaatacttcaggatttcctgtgttccttcacgnnnaattnnnaccttnnngacgcacacttctcactttgctgtcacaccctctcggggctgatgttgtggcttgatgggtgctgcccccagggaccgcatnnngacacgcatcacagcaacattcctttcttgtgccctgggccaaaaccagtgctgatgactttatcagcattcccccttctcccacacccgcacaccgactgcaaaaatgtcttaatgcaagttctgtgatttcttgataagcctaaagaaattgaaaatnnncaaaatctaggactgcagatttgtgcccatttatgaccttgtgctctgaaaaactaaatcggggcannnnnngttttaaagtagaagaggaatttgcacagtaatat

SEQ ID NO: 8226 - DNA, 612 bp, Canis familiaris
  misc_feature (1)..(612): n = a or c or g or t
cgaggtgaataatgctacagcacgtgtaatgaccaataagaagatggtcacaccatatgcaaatggttngaaattaagccccgtagnnnnagctgtatatggccctgagttatatgcagcatccagctttcaagcagacgtgtccctaggcaatgatgcagcagtgcccctatcaggaagagggggtattaacacttacattcctttaatcattcctggcttcccttacccgactgcagccaccacggcagccgctttcagaggagcccatctgaggggcagagggcggacggtatatggtgcagtccgagcggtacctccaacagccattcccgcctatccaggggcggatacgcagcctacagatacgcacagcccgctactgcaaccgcggccacagccgccgccgctgccgctgccgcctacagcgacggttatggcagggtgtacacagnnnnnnccctaccatgcccttgcccctgccgctagctatggagttggcgctgtggcgagtttataccgaggtggctacagccgatttgccccctactgaagtgacgtgagaccctgcaaatgggaccgccccccagttcatgaggcctggctattgca

SEQ ID NO: 8227 - DNA, 149 bp, Canis familiaris
  misc_feature (1)..(149): n = a or c or g or t
ggagctnngtcagatgggcaaagcattttatgtggagagactctgatggcagctgagacaaagctggctctcaaaggctcgactgtagacatacgctcgttcttcagccctaaatcttcattgtttggacaatgtttattcatagctgt

SEQ ID NO: 8228 - DNA, 609 bp, Canis familiaris
  misc_feature (1)..(609): n = a or c or g or t
ccaaaaaaaagtcactgttttgatanntatatcaatggtatactataaaaacattaataagaattaaaagcacattgattttgaaagggaaaaacaaatataatatacaatgcaaatgatttctaccaccctatcctaagnntctatttttaggcagtngaattatttcttcaaacaaaagcttctgcacagtctttgtgaaatactgatgaatgaagagctgccttagtagaagcaggaagcctttctgccttactgccttggaaccaccaggactcaagttgagtatctgtccaaagaatgtggtagcttctctcatctactgacacctgggcttgcaacagatttcatgccactttcattcataggagaatatgaaataatttatcatcctatagttcaatataatgggatatttcataggtttcaaacagtgacttttaggagcacttgggcagctcagttggttaagcatctgcccttggctcaggtcatgatcccagagtcctggaatcagagtcccaggatcagagttctgggatccagccctgtgtcaggctccctgctcttgggagtctgcnnnatcctctccctctgccactccccctg

SEQ ID NO: 8229 - DNA, 589 bp, Canis familiaris
  misc_feature (1)..(589): n = a or c or g or t
cctggtggcccacgctccgtgttgaacnnaacgggattcgactgcaaaatgggatttgttgcccacatctgaaagcagcggagncgacggagcgcgagataagtattcttgcttttttgtttgtcccccgatggcctttacaacggagcatcccagcaaccagagatgtgctactagtacagacgagaacacacagccccgtttgtcagttttgaggcttgggggtttttaaatataaatcccaatattctctttcccctgtgttcggttgccaataactgaacaaatgaggtgttaaatttgacacagtgattagatttgagaaaagccacatgcatccattccacttaacgcagttttgttttgtcttctgtttctttacagtaagcattgcccactgggaaaaatacagcagaatagggacagtgaaattcccttatcatgcactagtgataatgaaagcaaaccatttacaaggaagcacagactaggaatttgctgctgcagaccaggcactagaactgaaaacaaatttcttattcagggaaatgcgaatgaggaagatctacagtgggggtcttttactttg

SEQ ID NO: 8230 - DNA, 417 bp, Canis familiaris
  misc_feature (1)..(417): n = a or c or g or t
tggnnnatcnnnnnggcctccanncnnnnnncnnnntggccaacattgtcaactcnannaaacagaggcccctcaaggnnnataagccaggtnnnnngacgttnctcctggncatggggagaaatgacggcgtgggccagatcagnnncttctatnnngngcggctcatgnnnnngnnngccaagnnnnnagacctgtnngtctcctccagnnnnnagaccannnnanagnnnccaccnnnaagcgnagnngggnnnnngacaggatnnnngcccnnntngagnnnncacccannnctcccttncngtggnnnaaggccaaccaggctcccctnntngaaacaggacctgctgccacccgagaggcgcaggccattccatgctgtnnnaccnnngggccnagcagggnnnnnggctc

SEQ ID NO: 8231 - DNA, 541 bp, Canis familiaris
  misc_feature (1)..(541): n = a or c or g or t
cttcatgggttactcgatgactgncttctgnctcttcacatgggacaaatggtnnaaggtgtataagtccatctattttctcggccacgtcttcttcttgagnctactctttatattgccttatgttcacaaagcaatggtgccaaggaaagaaaagttaaagaaaatgggataatctattcccctggtggcctagagcagggctggtgcagaaatgactcgtatccctttccacagcactccttcgcctcagagcacagagaacagagaagccagggagtgggaagacatggtactcctagctgtgcctctgctgccagccaactcttcatctggggccaaaggggagactctcgtgggaggagtagagggcccatgtctcccctctgggctcccccatgcacgttgccttatctctccccctctagccaggaatctgttgtgtttttcttctgccaatttactatgattgtatatgtgccgctaccaccaccccccccatgggggggaggggaaggtnnnnnngccccacctgctccac

SEQ ID NO: 8232 - DNA, 514 bp, Canis familiaris
  misc_feature (1)..(514): n = a or c or g or t
ttcctctnngtgagggcttgggacacatgctgtcacttgtccttacagtttctgaaaccatgtgtgtgactggtgacctggtgactcgccaggtgggtgtggtcgtggctcccagggagtgaggcctgtgtagaaggaacctcgctctgtcctgccttcagctgagggcaggagctcgtttccacgacatgcagaccacacggctttggggggcgggttgcgggcagagtgccggggttcaccaggcttctgtggtgaggggcctaggctgggaagcactgctgttagtgtgtacgtgtcaagtcttgctttgtcagtacccccatttcttggccccatgctcatcttgtcttaaaagccctgggttcagagtgacctgtttttggctggcgtgtggggtttccgagtgtgtgaccagggtctctgttgccggggatgcagtgtccacactgaccaggcctgtagagtgctcagccttacttataatacatttgtaactgaatacggtgttttc

SEQ ID NO: 8233 - DNA, 261 bp, Canis familiaris
  misc_feature (1)..(261): n = a or c or g or t
agcctttccctgggcttgtcgacaactgccttggctccgcctcgtcttgaaatgttgctgtttaggaactggttnacggacacgcgctctggagggtgaagtgtgggataggaagggcccgtggggggcgcctggggggctcagtgggtgaagcctctgccttcagctcaggtcatgattccagggtcctgggatcaagcccctcattgggcttcctgctcagnggnaggctgcttctccnnnnnnngctccctgtgctcg

SEQ ID NO: 8234 - DNA, 536 bp, Canis familiaris
  misc_feature (1)..(536): n = a or c or g or t
cccggggagtngagtccacgcagtgaagacgtcactcagtgggatggttcacagggaggtgacctgcgggaaggtgcctgaggggtgtgggcagctgcacttggtgattagggggcctggggccggtngaattttacttcacaccttcatgatacctggataatgttttaaatcttgaccatgtgttagattcataattaaaaacccaaagaaccagttaatgttttgaaacatttgcaagacagatgttccccttggcactcggacctggcgtgcgtggctgggggttgggcgttgccacttgcagtctcctctgtttccgcgggctctggccccagccccaggcccaatcccattcccaggcacagggatgctttccctccgccctcctgcagggcctcggaacttgagctgctcgcttgcccctctccacgggagactcagcactggccctggggcactccttccccacgggcacccgtccccgggggctcccgcggcccccacctcggcagtgggtgaggggagaacnnnnn

SEQ ID NO: 8235 - DNA, 587 bp, Canis familiaris
  misc_feature (1)..(587): n = a or c or g or t
gctgctgctggaatcatttctcnaatcagtgtttggtgtannatcattttgtgaatttgggtaggggnnngggtagggataatttatttttaaataaggttggagatgtcaagtttggtccactngnngttcagaaagaggcccggtaggtggcccaccgggtagtggtaccagcgggctccctgtagagtgggggtgccgtgactcgcctgtgccccgctcggggctacagggaggtgggcagggcctcccgccagcgccctccagctcatgatactggcctttcttgaggagaagatggggtattcccattcaccagcccctaactactgcacagggaaaccctggagccatcacttaagccaacaagacagaccctgggttaagcagagaggacttcaaagctcgggaggtgaggcccggcctaggcggtgggaacgccccccctccccagcagccgctgatccataggacagtgccccagcctgaactgaccaacttggcagctgttctggatttcagcaatgaggccgtcaggtccttgggctctgcctttagcctggaccagagggaagcgaggctcaagg

SEQ ID NO: 8236 - DNA, 536 bp, Canis familiaris
  misc_feature (1)..(536): n = a or c or g or t
acaatcancagccaaatgggacaaccaactttcaacaccatagaaggctgatcatatcctgtctnnaaccaaattcattatttagactgtcccacctatatgatggtcactaaaactgtagagatagaacttgcccctattatccccgaccccactgtcataggccagttttataaatatatgtcatgtttttgagtgtatttatttatttgactctaaagaactctgctaatttgaatgtgtctttgttctatgtgtagagctgtgcaatctggggcaatcctaactcctctggggctggggctgggtttcagagggagcagatgcctgggttctcctttttaagggctcatgagggatattaataactcagtgccactgaaaagttgcttttcttcccctcccatggtgcctggagtatctgtactcaggaaggcttatgtgttcagaaagctgcaatattggtgtgggtatcatcgtatcattcgcgttaccatnnncacaagaggctggannnnnttgtgagtatgttcaaa

SEQ ID NO: 8237 - DNA, 590 bp, Canis familiaris
  misc_feature (1)..(590): n = a or c or g or t
acgtcctgccctccaccatgcagccaggagatgacgtggtctccaannacntcaccaaaggcnngcggggcaaacgcttagggatcctggttgtcttctccttcatcaaagaggccattcttcccagtcgtcagaagatatactgaaccccttggggagggcatgtggagccccacaggagagtcgggccctgggcctgtgcgctgggcggggccgtgagcctggaaggcatctgccccgagccccagcccttgctccctcgactctctgaagctctcgtccccgccttcctcgaagggctcagcttggctcagatctgacnnngctagaggctgtgaccccacaggaccccgggaggatgccagagcctgcctggccaggaggccggggtccacctggttatgtggaagctgagctccctagggccctcctgcccacctccgaggtgggccgggaggttgtggcccagccggggcaggcagggcaggggccgtgaagctggagagcagacagggctgtttcctgggcagacggccgtggggaggggccgtggcttggcacttccaagagaaagagttttcgctgttgaa

SEQ ID NO: 8238 - DNA, 666 bp, Canis familiaris
  misc_feature (1)..(666): n = a or c or g or t
ctgaaaagaagtcagctctagccccagnnataaaagaactacgacagttgcgtcagaaatgtcaagaactaacccaggagtgtgatgaaaagaaatcccagtatgatagctgtgcagcaggccttgaaagcaatcggtccaaattagaacaggaagtcagaggactccgcgaagaatgtcttcaagaagaaagtagataccattacacaaattgtatgattaagaacctagaaatacagcttcgtcgagctaccgatgaaatgaaggcatatgtctcttctgatcaacaagaaaaaagaaaggcaattagggagcagtatacaaaaaatattgctgaacaggaaaaccttggcaagaaactccgagaaaaacaaaaagctgtacgagaaagtcatggtccaaacatgaaacaagcaaaaatgtggcgtgattttgaacagttgatggaatgtaagaaacagtgctttctgaaacaacaaagccaaacttccattggtcagaggaatcttttaggaactaatatctcttgttttgaagaaacatttatctgaagttcagcaattcctacagtttcacttcagtttctctttcttctgtaaaattcaagaaaatttactattttaaataacatatttgttctgtctgtattatttaaagacaaannnn

SEQ ID NO: 8239 - DNA, 493 bp, Canis familiaris
tggtccttggaagtgcatggcacccagcagacagctgcacccggtgccctccatgacctcacctgccacagatgcagaaacaaagctgcctgggagtcacccctgtgagatgcccacttgaagataaggttcattccgggcaatgcataaaatagaaaacaatgttggacggagcacagatgttcttaagctgtttttttataccctttctttcttttcttaccatgctgaaggcttcaagacaggaagctgtttgcctacagcaaatactgtttttaataggaaaacgaaatgcatacttttctcactaattttttttttaatttattccttgctaaagaaatggtcttctgaggtcttaagatgtttctgatggtgccttgagtgagtggacgagtagccaagatgcagccatcttgcggtgggatttcactagtgagcagacctaacggaaaccatttacccccacacacacccaccctccacctcagtg

SEQ ID NO: 8240 - DNA, 613 bp, Canis familiaris
  misc_feature (1)..(613): n = a or c or g or t
gagaagaggaaggaaaannncaagatccattatcggaagaagaaacagcttatgaggctacggaaacaggncgaaaagaatgtnnagaagaaaattgacaaatacacagaggtcctcaagacccatggactcctggtctgagcccaataaaattgacttattcatcatgcttggcctggcctgcccttcctccatcgccgccctaggatatgggggactcccaggggctgctgccctcatgcctcaggcaacctggggcttacagtactgggaacacaaggctttagtcactactgttaagaaaggtcttctaaaaagttaaaaaaaaaaattcttaagagttctgaggcataagtgcctgtgactcattcctgagagttattagtgccatttcactgtaagcaagaaagacctggaaaatggaggggagcccttcgttgagaatggggtgtatttaaacttgtcatgcacagtcaggcgctatactctgtagctgttagggtgtgaggatgctgggggccaagcctggtgtacagaggtagttccagatctgtagatggggaacagccaaggggtcacaggctctacccttgtgctatccctgtaattctgt

SEQ ID NO: 8241 - DNA, 554 bp, Canis familiaris
  misc_feature (1)..(554): n = a or c or g or t
accgaaagcaatagtgctgtcagacccggatgccccgctagtccagagctgaggaggctgtgcaaaaccacccagttcccaaccaggctgatctcagtaatgaaggcgctgccccagcaaggatgctctccttgcttaaagacaagtatactgtgaccttcaaaagaagcaagttgcagacatccaaagagagaaaggcactgaggaaatatatattttaaagtttattattattattattattattattattattattttaacaatctctacactcaacttggggctggaactcaccacctggagatcaagagtcgcatgctcttctgactgagccagccaggcacccctattttttttttttttttaatgattgattgattttagacagagcacgcagggagaagagcagagggagagggagacagagagcctcaagccgactccactctgagtgcagaggcccatgaggggctggatttcctgaccttgagatcaacacctgggaagaaacnnnaagttggatgctcaaccaactgagcaacccatgcgcc

SEQ ID NO: 8242 - DNA, 772 bp, Canis familiaris
  misc_feature (1)..(772): n = a or c or g or t
atgatgtatgctcangaaaagggaatatattatattcagcttgaagatgatattattntcanncagaattacnncnncactataaaaaatnnnnnacttcannnnnnntctgaggaatggatgatactagagttctcccagctgggcttcatcggtaaaatgtttcaagcaccagacctgactctgattgtggaattcatatttatgttctataaggagaaacccattgactggctcttggaccatatactctgggtaaaagtctgcaatcctgaaaaagatgcaaaacattgtgatagacaaaaagcaaatctgcgaattcgcttcagaccttcccttttccaacatgtgggtctgcattcttctctatcaggaaaaattcagaaactcacggataaagattacatgaaaccattacttcttaaaatccatgtaaacccacctgcagagatatctacttctttgaaggtctaccaaggacatacactggagaaaacttacatgggggaggatttcttctgggctataaccccaatagctggagactacatcttgttcaagtttgataagccagttaatgtagaaagttatttgttccacagtggtaaccaagaacatccaggagatattctgctgaacacaactgtggaagttttgccttttaagagtgaaggtttggaaataagcaaagaaaccaaagacaaacgattagaagatggttatttcagaataggtaataacctcctgccttagtaaaacgtncnnnnnttcg

SEQ ID NO: 8243 - DNA, 199 bp, Canis familiaris
  misc_feature (1)..(199): n = a or c or g or t
gggtgggtccctcacccacacctgccccatcagccagactgagcggccccaggaccctgtctggtacggtgaggacagtgcccccngnnncccccattcctgtgggtgctggggggcagcgctgccccaggctggcgctggtgctggcacagcgctcattgcttgcccaagaccagggggcgttctgtggactcagttc

SEQ ID NO: 8244 - DNA, 546 bp, Canis familiaris
  misc_feature (1)..(546): n = a or c or g or t
gctccnngcagccatacacacctaggtgggtgtccgtggtgtgtnnaacggagtgagaggggctgcttggtgagggggctgggccttggctcccgttccctcctggccagccttgggctacccatggcgccccatctctggttccctgggctgtaggcagagtccagagcagtctctcctgccgtggtgaggccgagcccccagagccgtggtcgtgagcccagagggcagtgtggcccctcgcccccgttccccaccccacccaggccccagcttgctgcctgtgccagttgcctgttttgcctcagtgtttgactctagcacttacatgtgtcctccccagccaagccctcctgtctcctgccgcctgaccccgacccccttcccatacagtgacttctcctgggaggaaaagggggcgggagctgttagccttggtttgcacagagtgggtgggccttggggaaagggggtgagctgctgtgtggctggggtccccccttcggccctccgctacgatgtatgaaatgtatgtacagcccagag

SEQ ID NO: 8245 - DNA, 679 bp, Canis familiaris
  misc_feature (1)..(679): n = a or c or g or t
agctcggctcagtcaaangaaaagaaaaaaaagaaatctgcnnncgacgaaatcatnnagattgaagaggaaaagaaaagaactgcccgaacagaccactggctacagccggaaatcatcgtgaaaantataaccaaaaaacttggagagaaatatcataagaaaaagggtgttgttaaggaagtaattgacaaatatacagctgttgtaaagatgattgactctggagacaagctgaaacttgaccagactcatttagaaacagtaattccagcaccaggaaaaagaattcttgttttaaatggaggctacagaggaaatgaaggcaccttagaatccatcaatgagaagactttctcagctacaataatcattgaaactggccctttaaaaggacgcagagttgaaggaattcaatacgaagacatttctaaacttgcctgagtttgaaaatcttttaacacattaaaatcctaaaacatcaaattggtgttcaccaaggcattatgagactctactgtgttagggtgtttcttttgtataaagcaaatggatttatttaaatattactgtatagttgttcagcaaagcttatagcaaaatctaattatgtctcacgaagtatcagaacaatgtaattttgttcgtgttttgtttcctttgtaatatttccttaatg

SEQ ID NO: 8246 - DNA, 529 bp, Canis familiaris
  misc_feature (1)..(529): n = a or c or g or t
tannctgatagnnacaaggatgaatttgaatataatgaagtggtaacttacagctgtgaaaagtcacaaggaacagatgaatattcacttattggagacaataagcttatttgttctggcgatggtgaatggagtagtaaccctcctgagtgtaaagtggtcagatgtccacttccagaccccgaaaatggcaaactggtgttgggatttagcaggaaatactactacaaagcaagaattgaatttgaatgcctttcagggttttaccataagggtaccaattttgcaatctgtggcagtaacagtacttgggagcctgagatgccgatgtgtcttaaagtgccgattcctcctactaccagtcctccgattttgagtcatacagtgtcgagtcctcccagtacaaactctccaattccgagtgtctcaggatctcccaagcccagtgatgaaacaccacctagtgacacttcaggcaaaggatacattgttgttgtgattgttcnnnntgtctctgctggcnnnnnng

SEQ ID NO: 8247 - DNA, 568 bp, Canis familiaris
  misc_feature (1)..(568): n = a or c or g or t
taagactttatcctatttcnnnngnagtagggggtnggcaaacattttcaatgggtnnnnnnnntagtaaatattttaagtttcacagtctttcttnnaactacttaactgctgttgtagcttgaaaggagccatagaggatatttaaaggaatcagcatagctgtgtactgataaaattctacttgtaaaaacagttgggaaatggaccattgtttactgattctctgcttttaaagcatgaagactcgtcacatggtttcagaaagtcattctgggattttcagaagagcaagttaaattttgtaactactaatggcatgcaggaaacgaagttggcatagtgtattttaggaaacaccatactccctaaataactgcttactagcttcattataaatattttaacaaaaatctgtgacctttagtttggccattttcccaacctactcaaatctcctgaaaccctgaagtcagttatcaagagccaatatgcattctgttattcttggagcaccagccaactgtacaacaactgttataaaaatgtttattgtnnncaaaaccat

SEQ ID NO: 8248 - DNA, 614 bp, Canis familiaris
  misc_feature (1)..(614): n = a or c or g or t
tnactttgttagcatgaaggactgcaaaaatgtttgtgtaaaagctttgaagaaggaaaggaataagaagatgacaaagctttccttggtgaatagaaggctgaaaaattggaagaagcaatcttaactttttcccttatatgtcatcttgtgaatgctatcgcctctatgattagatctgaagaataatatggcaacatgggtaaataaatcattaatgatttattcaccagtttttattgctacaggttacttttttgtgtatttttatacataactagctgctattcaaatgtgaatctactatttttaatttactgttcacctatgttttatgaagttgaattcttgctgtgcataaaggtatacaagcaaatatgactcacccagttcttggggttgcttttcctgacttcagaaggtgataataactgaaaagcataagacaatataatcatgttctcttaacacatgatcataaaaaggaccagcaaacacatttcattttgcatgtaaacgttggattatattttaggtccaaggacctaaaacttgcagatttaccaacannnnnnaaaatattacaannnntattatgcagacatgactaactt

SEQ ID NO: 8249 - DNA, 562 bp, Canis familiaris
  misc_feature (1)..(562): n = a or c or g or t
gctggctgttgcccactccatgctgagtnnacctgctgtcccctttccctttccaatgtgatgctgtggtgggcaagtggacttttcactccttgtgcttttgtcatgtctccacccaggtgccctgttgctgtcacatgttgacctggagccccacagtcattgtccatggcaccattatactccacctctggaatcccagtcctacactgcagcccttgtctttgggcccacaagctgtaccatgcaagaggtttctctccttatccaggaagatgacacaagtctctttcctgcttctggcaggcaccattgggctggatgtccccctacttccggtaaccattcctgtcattggggtggactatgaatcccactgacttcctacaggaattcctacacttagcttgtgggaagtttgattttgtggaaagagagcatagtttctgagagtgctaggaacagactccctctccttgccctgtcactccccagacggtgttgcacctgagcaagatggcttggcctccgaggcatgagttcactgctgtcatggtgaccc

SEQ ID NO: 8250 - DNA, 634 bp, Canis familiaris
  misc_feature (1)..(634): n = a or c or g or t
ctgcntgcttgcactctcnngcaaatcaatcaatcaatcaatcaatctttaaacnnataatctcagagggnngaggatctccagaaacacgcacatggaccctaaattccaggttaagaatacttgcttttaagagagatgttgtnnnnnttttgcaaatgaggaaactgggtccagggaagctaattaacttgggagctggatgggaaatagtggaaccaattggaccccacgtttaactttaaactctttgttttttccattgtccaannnnnnagatgctcagtaaatgactgagtgtatggaaggctaaaaagagaactttataggggatgtgtcccaaaatatgataaaacatccatatgatatcagattagacaagcagaaagatttttctcaagtattcgggtttagctgccaaaatcttttgtgttgcttgcaacttttnnnnagtgacaatctctcccctcctaccccatgataccagttccaacaatttttgcttctgatgccatttctgtttggctgcacacatttcttactcttgtgttgaattnnnttttctctggatgccaaggcagatggatggcacttttgttatgattctgatataaatagcatctgttaaaaactg

SEQ ID NO: 8251 - DNA, 66 bp, Canis familiaris
ccacccaggaacttcccaattgggaactgtccatcacgggcttctcccacccatgccctccagacc

SEQ ID NO: 8252 - DNA, 552 bp, Canis familiaris
  misc_feature (1)..(552): n = a or c or g or t
aagaccgcatgtaccagaaggatccagtcaaggctaagaccaaacgccgactcgtgctggggctgcgnnaggtcctcaagcatctgaaactcaggaagctcaaatgcatcatcatctctcccaactgtgagaagatccagtcgaaaggtgggctggatgacacgctgcacaccatcattgattacgcctgtgagcagaacattccctttgtgtttgcactcaaccgcaaggctctggggcgcagtttgaacaaggctgtccctgtcagtgtggtgggcatcttcagctacgatggggcccaggaccagttccacaggatggtcgagctgacgatggctgcgcggcaggcctacaagaccatgttggagaatgtgcgccaggagttggctggggagcctgggaccccagctctggccaacccgcccatgcagggtcttggctgctccacgcaggacagcccccctgctcctacagccgagaaagaagagccccattacattgaaatctggaggagacacctggaagcgtacnnnnnntgtgccctggagctgg

SEQ ID NO: 8253 - DNA, 532 bp, Canis familiaris
tgttttaaaaaaaaaattataaaaatagatccatagaatgtagtatgccaatacctggtataactcatgtgtaattggagtcccaaaacatgaagaaagagaataaggaaaaataaaattttgaacagataatggccaaaattatttcaaaattactgaaagacaacagaccacagatccaagatgctcagagaactccaaataaattaaaaataatagtaatacataaataaaaaatatatctagatacattatggctaaactgatgaaagccaaagataaggagattatcttgaagatagccaaagcaaaagaaagcatacatatggagggccaaagataaggacaaagatttcctgaaagaattgctgaaggcagtgaagggaaatctttatggtattgcaaagtggagaaaaccttatatccaaagatatctttcaaaaatgaaagcaaaatcaaaacttttggacaaaacctgagaaagttcatcatcagctgatttgcattacaagagatattagagaaagctctt

SEQ ID NO: 8254 - DNA, 459 bp, Canis familiaris
  misc_feature (1)..(459): n = a or c or g or t
gaaatactttgggggtagtcnnntgcttcatatggcaatttggctgaaaaggtctgcagtgactatcctttgccttagccataaacagacttttgcactttaaaatgtggtgacttggggcacctgggtggctcagtaggtctcagctcaggtcttgatctcaggggcatgagttgaagccccacgttgggctccaagctgggtgtgaagcctactttaaaacaaaatatatggtaactaataattgttctctttcttaggaacatcattcatggtagtgattcagtaaaaagtgcagagaaagaaatcagcctatggtttaagcctgaagagttggttgactacaagtcttgtgcttttgactggatctatgaataaaagatggacacagcattagttccctttggcaccactttatatgttcctggacatagctcttcattccagtgannnngaagt

SEQ ID NO: 8255 - DNA, 347 bp, Canis familiaris
  misc_feature (1)..(347): n = a or c or g or t
gtgatnnnnnnnncgtccacatcaaaatcatcaggagcacttgttaaaaataaagcagaacaactggtcacacggctggggaaggaatctgtattttgttgctccttcaagttgttttcacagatattaaaatttgagaaccactgccaataaacatcgatttcaaaactatagactatgaagagagaagaagaaaaaggtaaagatggacacatagtgatggaagatgatttggggctttttttttaaggcaaaagagacccaggttgttaatatactgagaaaagtccaataaacaagggaagggtataagctgaaagaaaaggggattcctgggtggctcagca

SEQ ID NO: 8256 - DNA, 518 bp, Canis familiaris
tctcagtggaactccatctaaccgtattgtctctctcctccacagcttcaagaccgtcctaaacaaggagatctgtgctgaccccaaacagaagtgggtccaggattccatggcacacctagacaagaaaagccaaacccaaactgcaaagccatgaatactcactctgaaatggaagaatctgaaactaatttattttcttctaaccttccctaaatgccctctgatattattttattataatttcaaagagtacaaactttgtttattgatatgcacacaatgccttaagtaatgttaatcttatttaaattattgatgttttaaatttattttccccaaatactagtgtattttttaaaatatggagacttggaaataaactgctttcctctgggggccccagttctacccctgggatggtgtgagggtccttgcaaggatcattaatgcaagactatgttttaaattctaaaggattaaaaaaaaaaattctaaaggattgctgaaaatactat

SEQ ID NO: 8257 - DNA, 501 bp, Canis familiaris
  misc_feature (1)..(501): n = a or c or g or t
gttgcctcttcacggtggaannnnntggggatcaagagccnnctcnnnngcagcgtcggcgnntcctgcgctctttctacaccttggtcaccgccacgcactttccaccagagccgggggcaccagaggagaaggtggaggatgcagtccagaggacccaggtgccaagagcctgctacctggtgtccgggcccgaggagcccggcacgggatggcggctggtggctctgcagttggggccacggcggttgctgctgctgctatctccccaaagtcctacccatgggctgcggggcttggccacccacactctgcatgccctcaccccactcctctgacccctgggtgtgagcctttaacacagacacagctattagcatctctctgtttattcgctcacaataatacacagcccctggacggggagagggcaggaggggctacgatggggtggggtgggaggggaggaggcgcccacttccctggcccctctcccctctg

SEQ ID NO: 8258 - DNA, 344 bp, Canis familiaris
  misc_feature (1)..(344): n = a or c or g or t
tgtggctttattctggcannngnngggggtgtgcaatgtctgggaggggacctaaacacagagggggtgcggttttttnnnacttccccctccccccatggtctgggggatggaacacagatgtaannnnnngggcgccagcagccacnnnggcccatnnnnnnnacttgggcctgggagtctcacgcagcagacctaagacagaagcagcnggcatcctcagtgcctggccccaggccttccctncgctcaagaagtcttnnntgcaaataagaaaaaaaaatcttatcttgttttgaggattccataattttggggggtctannnnacagctgattttgatt

SEQ ID NO: 8259 - DNA, 483 bp, Canis familiaris
  misc_feature (1)..(483): n = a or c or g or t
tgcagctgccaaatggctaaaacagagtctccaaataaataatcccgatcnctttggggtataaatcatcctcgagctgcccataagggccaaaaggtattttaattgctgtttccattttacagaagaggagagtgaggctcagggagatgaagtaacttgccagaagcanacaggagccaggaatggagcctgagnnngtttctcaaggtaccctttccactcattatcttgtctgtcatcacnncactgggctgatggtgcaggaacaacacccttagactgtttttgctcccccccccccccgggaaggtagtcagatatccaggaagaagcaggagttctcagctatgggaagacaatgagacatacgcagctcagcagttaacagcacagactctggagcccagctactcaagtttgaatctgggctcttccactacttagctgtgtgaccgtgggtaagttacttgatgtctctct

SEQ ID NO: 8260 - DNA, 535 bp, Canis familiaris
  misc_feature (1)..(535): n = a or c or g or t
atgatccaacgncctttgacatccaagctgagataacgctgaagacaaacttttttgcnnnaagaaatgtctgcaacgaattgctgccaataataaaacctcatggcagggtggtgaatatcagtagtttagagggttcaaaggctcttgaaaattgcagcgcagatctacagaagaagttccaatgtgagacactcacagaggaggacctggtggacctcatgaagaagtttgtggaggatacaagcaatgaagtgcatgagagggaaggctggcccaactctgcgtatggggtgtctaagctgggggtcacggtcttatcaagaatcctggcctggcgtctggatgagaagaggaaagttgacaggattctgctgaatgcatgctgcccagggtgggtgaagacggacatgggtgggccttactgccccaggactgtggaggagggagccgagacccctgtctacttggctctcctgcctccagatgctactgagcctcatggccagctagtccatnacaaagtcgtcctaaa

SEQ ID NO: 8261 - DNA, 637 bp, Canis familiaris
  misc_feature (1)..(637): n = a or c or g or t
gtactgacnngaaacctgctgctataaattggatagagggaagannnaagtctgtggtttgtgaagctgtcattccagccaaggttgtcagagaagtattaaagactaccacagaagctatgattgaggtcaacattaataagaatctggtaggctctgcaatggccgggagtatcggaggctacaatgcccacgcggcaaacatcgtgactgccatctacattgcctgtggacaggatgcagcacagaatgttggcagttcaaactgtattactttaatggaagcaagtggtcccacaaatgaagatttgtatatcagttgcaccatgccgtctatagaaataggaaccgtgggcggtggcaccaacctgctccctcagcaagcctgtttacagatgctaggtgttcaaggagcgtgcaaggacaatcctggggagaatgcccggcagcttgccaggatcgtgtgcggtacagtgatggctggggagttgtcactgatggcagcgttggcagccggacatctcgtcaaaagtcacatgattcacaacaggtcaaagataaatttacaagacctccaaggaacttgcgctaagaaggctgcttgaatagcccgacagctctgaactgaaacgtgggc

SEQ ID NO: 8262 - DNA, 595 bp, Canis familiaris
  misc_feature (1)..(595): n = a or c or g or t
tttttcctgtccccagtgtagantggcatttctctctgtattgcatcaaagtgatgtacagaaagcaatttctcaaaaaattaaaaacaaatgctgaaaacaacaacccacaatatgttccactagaattttatgctttaataaggaaatcactctcctagggacgaaagccatccttgtgttgtagagaaacccccttggttcagaggtttctcctctaagttagctctgcctcccactatactttcaaatctcagactttagtaggcttcagcaatatcttgacaaagttctcctttgtatgggaaggaaaagtttggttttgtgaaatacgttcataccctcatcttgcccataaccaacagattaaatacacacacatatcacttgctgagagttccagctgtttagattttcacccaaacatgtgaataaaaaccgcaggcaaaacaagtactgtctctcataccttttatggattaacaaatagcccttaccctgctgatgcccgttcttaattggactgtgctgtgaggagcaattaagcctaaatggccacttgctgagagctggagaaagaaatgccacagcttga

SEQ ID NO: 8263 - DNA, 587 bp, Canis familiaris
  misc_feature (1)..(587): n = a or c or g or t
tcacaaaatcagcaancngagtccagaacaagagcagggactatnnaaacagagccataaatnnncngcagcaattcagaatgaaactccaaagaaaaagcccaaattggaatctangccatctaatggagatagtagctctataaatcagtcagcagatagtgggggaacagacaattttgtccttataagtcaactgaaagaagaagtgatgtcacttaaacgtctcttacagcagagagaccagaccattttagaaaaagataaaaagttaactgaactaaaggcggactttcagtaccaagagtcaaatttgagaacaaaaatgaacagtatggaaaaagcgcacaaagaaactgtggaacaacttcaggccaaaaacagagaactactcaaacaggttgcagcattgtcaaagggtaaaaagtttgacaaaagtggaagcatactaacatccccttgagaaagtagttactcatgtatttctgctgaaaatgtaaatttgaaaaaaaattctgtgaagcccttaaattctgtgtagtggagaaatatttttgcacaccagatgaattggcgtgttnnnnnnt

SEQ ID NO: 8264 - DNA, 633 bp, Canis familiaris
  misc_feature (1)..(633): n = a or c or g or t
gtcatctggggcatgnnntnnnnnnagctnnncaggcacgcctccannnncnnnnncaacttcttcttcgagcgagtcatgaagtatgagcgcctggcacggatnntcttgcaggagatccccatccggagcatcagtctgannagctgctactttagcgacccagactggtccatgaggcccacgctgacagatctcctgcccaccttccggaacactctgcagaaactaacatttgagttcaataacaaccacgagtcgctggacgaggagctgcacctcctggtcttgtcctgtcgaaagctgttctacttcaagatctgggcttttcttgacgtcaagtttgtggagcggatcctgaagagtcaggaggaagggcagtgctccctgcgcactctcaaggtgagaatttacacaaaccgatacgagacaaatgacgaggacaggacgctgcgcgagatccacaggaagtaccgaaagctcatcgatgcggagctcaactacttcgtcatcgcgtaccccatgatgtagccagtgctctctgggagccccctcccggtccccggccccgccccgcccctttcctcctgcgggtctctgccgttcctcccctctgacgccagccccaaccca

SEQ ID NO: 8265 - DNA, 561 bp, Canis familiaris
  misc_feature (1)..(561): n = a or c or g or t
tgggtgaaggatccggggccntgcgggcacgagctgggctgtgctttgtgtcccctgggcggtccctgcagctctgtttctgttctagctaagccacgtgctccccgccactcagctgtcgcaccccaggctccgaggcccttaacctcccaagagctgagctcatttcttccattctgcccaggctagtgtccttccttctcctctaaagggaaagagagacacccctacacacacacacaccatccaaatctctaccccagtgtggaagtgtgcaaagcagggtccgtagttcctaagggcggggacatctcctttaggggagaatcaagatagtggagaagcatggggtcaagttatggtagagactggcagagagaatggggcgtgggaacatgggagaaagcaatggggtaagcctgttcagagaaaaggaatatttattaaaccctgatactagccataatcaggcaacacattgttcttatcataggatgggtagagagttcttagatggcgtataaatcaccccatactatagatgacaaaaatattgcttgt

SEQ ID NO: 8266 - DNA, 548 bp, Canis familiaris
  misc_feature (1)..(548): n = a or c or g or t
acaaaaagaaaggtgggccatctccaggggatgtagangcaatcaagaatgctatagcaaatgcgtcaaccctggctgaggtggagcggctgaagggcttgctacagtccggtcagatacctggcagagaacgcagatcaggccccactgatgatggtgaagaggagatggaagaagacacagtcacaaatgggtcctgagcagtgtggcccaagtatctgcaggatgcgtaatatgcctacttgggacaagtcctgtttttttgaacttggaataataaccttgtttgagtcagcaaagtggagcttataggcattgttgaaatgcttaagactgctgcccgtaattttgtaatactataaattttgaaatctaaatgccagttttctacaaatagtaaaaatgtgacattcactgtgctgccaagctgtctgtcatcgggcgggggtgggtgggtgtgcagtgctgtgaggtatggacatgtggaggttggaaatgacagaagtcaatgnnnnnagataggcttcccnnnnntctctaaaatgttt

SEQ ID NO: 8267 - DNA, 513 bp, Canis familiaris
  misc_feature (1)..(513): n = a or c or g or t
gtgctcccagcctccggccttccgctggggaccgcaggagagcccctgcctgccgacctgtactcagccttgctggcagagaactcccggctgcgggcagagctnnagaagaaccgccaccagccggcccccatcatcctgcagcagcaggccctgccggatctccttgccagcacttcggacaagttcagccttctggccaagctagaacgagctcagagccggatcctgtccctggagagccagttagaggactcggctcgacgctggggacgagagaagcaggacttggccacacggctgcaggagcaggagtacggcttggggcacccctcaaactccatcatcactgatctgcccaactccctggcccacaccaaggaccacagacgacccttgaagctggaccccttgatgcccagctcagacgctaagctcaacaagccttcaaactcccagaacacctgagtcttggctgatctgagtagctggagcaggcctccctccctgtgc

SEQ ID NO: 8268 - DNA, 430 bp, Canis familiaris
  misc_feature (1)..(430): n = a or c or g or t
gacggnccgcagggtgtgatccagtattctctacccangacttgttccannngcagatcatggatgggaacctgannnnaaacatccggnnnttcctgcccctcgtgggtgagaggggtctctgatctccttctggtctgctgtnctactcctgtcctccccccaaaatgtgtccatcgggcctcagctgnnncctgggtcccacacctgccacatctgtctgtctccagggcacgtgcaggtggcacaggtcccgggccgagggnngcnnnnnngccctggngagctgaacttcccctatctattccaactgctgnaggacgaaggctacaagggctttgtgggctgcgagtaccggcctcnangagacaccgcagagggcttgaactggcttcgttcctactgggagaggcggggccgccnnnnnnnn

SEQ ID NO: 8269 - DNA, 491 bp, Canis familiaris
  misc_feature (1)..(491): n = a or c or g or t
gttttcgtgcataatatgaaaaacaactataacagtttnaagtcctggnngnnataaagctgcctggcacctctgctggcaggacgtggtggcaanngaagtcctacgtgtggttatggacactgcacggaagagcgcttcacgccctttggccctacagccctgcgaacaagcctgtgcccacaggatgccacacaggcaccagacagcctgggactttctagtactgaacttaaagatgtacagtgtgttattttatgatggaaacggttttaaaaccaaaaatgtcttaactttatttaagaaaagtatattaatttgtgctaacaggggatgaaaattagtcaacaccttcaacaaaacctgcttgccntagcagtaacctcaagtagttagaacttgattttgagagaaaacgaaaacctttgtgcctaaaattatgacttgagttaaataaagtaggatgagcaggaaagacgagagatcttgct

SEQ ID NO: 8270 - DNA, 598 bp, Canis familiaris
  misc_feature (1)..(598): n = a or c or g or t
annctccgtgatcctgctgattnnnnnnnnncgcgtgcatgtgggagtgcggcccacggcctcactgcgcccctgggcccttgttaccctgcggggccgctgtgccgtgcgcnntagcccgtggggccctaacccgggctcagggcctggcnaggtcacgcgcaagggcacgctcccggggctggcaccgtgtcgctcaggacagccgtcccgccacctgacggatggagctttccaccagcagatgaaatgtagaaagcaggctcacgcttgggaagcttttgttttaaaatcatttgatttactttaacacatgcttgggcagagcgtctttactttcactgttttgtaccaaggagtcatttttacccagttgtagccgagactgttcataaatgtgtccctttcgaatgcctatgaggagaatggagggagagaaacacgtttcatggagttctagaagactgcttacagaactgctttagggtcctcgagccctcgtgacctgcgggccctgggccacccgcgtgcactttccaggaggccccctccggccgccagggctaaccttttccctgtcggatgatgtactgattcc

SEQ ID NO: 8271 - DNA, 595 bp, Canis familiaris
  misc_feature (1)..(595): n = a or c or g or t
aagctgnctgttcatacaaatagnanntcctttccttctcaagacttgctggttccctngnaccatcagggaaaccctggagaangcaagcctgggcatccagccnnagcccatgacccaggccctgtgtttcaccgatactaccacgtgttctgtgagggagagctggaagccacctgccagactctgaacagtgtcagcatcctgcagagctactatgatcagggcaactggtgtgtgattcttcaaaaggtctgatcatctctgtgaacatagatacagggaagaaatgctcagcttgtttttttaaagatgagatttactgtctttttcattaaagagagaacttgtggaaaagtgccaaaggagaccgcctgagagaaatttgggagtagagattaattaggatgcatccaggctgctactacgctgacttccttttgtccataaaagtggacttctcctaaatgaggaggaacggggatggtttgtaaaagtctgtgactatttgggatcccggagtaagaatacaatattttgaagataaacttttttgctataaatgttactaattgaactaaatcatgtagagtct

SEQ ID NO: 8272 - DNA, 521 bp, Canis familiaris
  misc_feature (1)..(521): n = a or c or g or t
tccactctgcggtcggccctatcgcnnngncccgccggngctgcccgggtgcggnnagtcgagcnnaggtgcggggcgtcgcgncggggcccgacgcgggcgtgcccggggcgccacatccaccgtggggctcctctttgttcaccgtctacacctacgtcttcggcgcacgtcatggtgctgtacgatctccaagatcccagccaagagggcagggaggcctcttccgtctcaccctggcggtggctggcgggactgcagccgctggcgggggacaaatgggggacgaggtagacttgtcactcgccgggttatctcgcgccgctgcctgttaaaaagtacacgtgcgatggcaccgcggaaagggcaacgcggtggtgacgaacctgaggtttttaatgaactagtcaacttctcgtaaaaactgatgtcacacagttgtagatgacacggagcgtcatctagtagagattcattcaatccatgaccatccttcaacctgacttgctattttgtaatta

SEQ ID NO: 8273 - DNA, 589 bp, Canis familiaris
  misc_feature (1)..(589): n = a or c or g or t
caattcactgtacaaactctcatctttnnnnnngaaaaaactggcgtcaactgccatggatttttataagatccatttgcctttctgggagcagaaagagccagtgcagccccaggaggggcactgagtcacaccagggctctctgtggctgagaatccgtagagctttggcatcctaccctggggaaccccacgaccggccatctgtagccatctgcacatacctccaaggcagtccagcaccaccttccagagcccttggctgtttagcagaacttgctctatccacggtcagctccttttccgttctgttctgctgggggttgggtgggggtgtctaaacctcttcctgacagaagagaggaccaagaccccagagcctccagctcaggcaccagcatctacactggctctgctgtgggttccctgcaatgagattgggcagccccaggaggaagatccagaaagcactttttggctgacttgtgttggagtctgctacaggacagagttcacaggaggcctgtggggtgggccaagaggggcaggggctctttttcatttcttcctcagctggttactcagggtt

SEQ ID NO: 8274 - DNA, 620 bp, Canis familiaris
  misc_feature (1)..(620): n = a or c or g or t
gtgaagagactctggatgagggtccaccaaaatatacaaaatctgtcnnnaaaaaaggagataaaaccaactttcccaaaaagggagatgttgttcactgctggtatacaggaacactacaggatgggactgtttttgatactaatattcaaaccagttcaaagaagaagaaaaatgccaagcctttaagttttaaggttggaataggcaaagttatccgaggatgggatgaagcactcttaactatgagtaaaggagaaaaggctcgactagagattgaaccagaatgggcttatggaaagaaaggacagcctgatgccaaaattccaccaaatgcaaaactcatttttgaagtggaattagtggatattgattgaaatagcaatgcttcagatataaagacattagcaacaataaaacatggccttgaagaaacttatgtaactagagctggttactattgtaaggggagagtcaactggaaaattcaagaactcagatattgtttacccaatccccaacttttaatatatgtaatccatcataattccttaaagtttgagatattttactacagctgtgtaaaatattagttaaggtgaagtgactttccttttacc

SEQ ID NO: 8275 - DNA, 514 bp, Canis familiaris
  misc_feature (1)..(514): n = a or c or g or t
gtttttaatgaaagaanatgtgcaatattgaagagagtttccccntgagtcaaacaggcccaattccattgtgatgtttacctttatagccagatgagtgcagtttgaacttgacgtaacagactggttgagtctttgctaggaccttaatcaacataaagataataatttatacctaattatgtaaattgccttgttaaggtgacatgtgattggtatgttagattgcttgtttcctatttaagtagaaatctttcctgcctcagtttccaaagataggtttggctggtacttgacagatttgttaagaggaacaattctggagttacatgcctggtagacaggccttgttaattgaaaagtaacttactgtagtttttcttcccaaaatatttactttcctaattcccagagaaattgttccttttctgaaaacatcaaaaaactaagttatgttgttgtaaagtaatataaagtagtttgtctcatttctagaggagaaggccttgttgga

SEQ ID NO: 8276 - DNA, 122 bp, Canis familiaris
gttgggggggggtgtcactgaggacgattcttgatgcaacgattcctatgcaaggggcattttgagtccccccatccttccctcggaccctaaaccctggtgaatcaggggtgaggggtggg

SEQ ID NO: 8277 - DNA, 606 bp, Canis familiaris
  misc_feature (1)..(606): n = a or c or g or t
caactctgaaacagacagcttcaagctggnctatgggggacaccagtatcacgccagctgtgccaacttctggatcaactgtgttgaacccaaacctcccggcctcatcctgcctgacctgctctgagaagttcctctatgaagtacccactgggttgtggtttttcccatcacaccccgtgagctgacagggaccagtagacagaatgcagggactgccctgtttacctccgtgaagcttcacgaagattccccaagcccagagcagggagagagccactgctgagtccccagccatccctacagacgacctttgtccccggggtcctgctgccagtctcgggggttggaggtgaagttgccttgcccagaatgcatgcggcaccagaagtttgctaacttatctcttagttctcttaagatgtttgaaaatacggatctcgattttatctgaggaatgacttgctgctgcagtagtgaaactgtgaagagtcgatgctggaagaaaaataaagtgctgttgtaggactggaatcggcaagcatgctgtgagccagtgcttacttgtttctagaacactgttgtcctgtgaagtagagggcactt

SEQ ID NO: 8278 - DNA, 600 bp, Canis familiaris
  misc_feature (1)..(600): n = a or c or g or t
ctctgctnnncntggactcttccccaaaagtcannctgcctctaggcnngaccaccagtgnctggcacccgtgagagnaggcagacagcagcatnnttaggggcctgagcccagcgagggaggcagagagactcaggcctgggaagaacctattgtgtgcatggagtgaggtgtgtgtggatgtgtgtacgcgtgcatgcctttttttttctttttgccatggggacagttgaatttggggtatttttctacaagaaacagccttctctcccccagtaaggattggctgtaaccttaagctcatcatagaacctcaccaagacagcttgtgtggcttgaggatggccaagatgggatccccaaattcagccggagccccagcaggagaggacggtggggttgccagggctcagaagtgcaagctgattccccaccccaccctgccttgcctttccttcatttccttggttgagtgctggagcagcagtggctgcccgtccaacctggacagtggtgtgtagcaagcaggctgggtgggtgtttgtggtggggcctcttggtgcctgggaggagctgaagatggggaggtttttccttact

SEQ ID NO: 8279 - DNA, 618 bp, Canis familiaris
  misc_feature (1)..(618): n = a or c or g or t
tcctgcagtgggttcagaccccgagtttgcacgctatgtggcangagtaagccaggcaatgcagcagaagcgccangtgcaacacggccgccgcccaggcaacccccggggccactggccacccatggatgatgcccatcggacctggcctttcccagagttcttcacagaagggtgagtgctgggtgtggcagggaagctgagtttgggaccttgttatcccccatggggccctcatgcaccatcatcaggcaactcaattccacaatccccctgtgagaaactgacacctggtcacatctttaagtagtcagggttctgtgacaagacttgaagatgccaggtggcatggtatgtccctgtgaacacaccgtttgtataaaccgatgattttcaacacatagtcttctgccctgaactaggaacttacttgatggtgtttgtgacgtaattgaatgtttaacatggtttctgtgctgaaatgggcatagttgtgcaacccatgcgattcggggaatgcgatccttatagcttccaaaaagcaaacgtgtatagttcagatgccagcgtattgagaaaactgcagctttgcatcctgnagacaactggagattgatt

SEQ ID NO: 8280 - DNA, 214 bp, Canis familiaris
  misc_feature (1)..(214): n = a or c or g or t
tgcggccccaggggactgtcctcctcnncgatttctgacccccctacccgcccccccccccccagtccgttgctcctgaccggctgcggcgtccgctctgggccgcgccctgcttggctcgtaggcgacatgactgacgccgcagtagatggaaggagcacaaacaccctccgttgcttagagctacttctnnnnnnngccagatgcccgggtg

SEQ ID NO: 8281 - DNA, 126 bp, Canis familiaris
  misc_feature (1)..(126): n = a or c or g or t
gtgtacatcactttcnnntnctnnnagcattaaagattagattcagaatcctcaattttcacattttcaaagaaagcagcattttcctcttacatttattgaagcgttaatggggtgctatcagat

SEQ ID NO: 8282 - DNA, 552 bp, Canis familiaris
  misc_feature (1)..(552): n = a or c or g or t
gccacttgcaggggaatctgtagcnngacaaaaggttcccagaaatnctcntgtgggacntctgtacaactggaaagcctgttcactagtcacacgatgtattctgagctacttcctgtcttactggctcctgggactactcctacattgcaacttcctaccttggacatgacctggaatctcaggggtctggaagtacaaatacacactagaactgtgtgtgctgccctgagacccttgttctttcctttaggaacttccagtctctctgaaggttgatcagggatgggaagaatgtgagctacgggagagcccccatctggtcctggctatggcaaattttagagcagtacctgttttctctgtaagggaagaaatcttactctaggtttaaagtacacttggatttgtcttgtcaaccaagcatagcagagatgattnnnactcaccactgacccacatgtaaatttaaatgtaaattatttgaatatgagtttcatcaatggctctagctgacaggctgataatannnnncacatgatggtggaggcc

SEQ ID NO: 8283 - DNA, 95 bp, Canis familiaris
tgatcttttctgttcagttttattattactaggtgacaggtaattctcatgtaagtgttgactaaagttaaaaataaaaagttgacgcctggggt

SEQ ID NO: 8284 - DNA, 627 bp, Canis familiaris
  misc_feature (1)..(627): n = a or c or g or t
tatttctgtacatcagggtnnnagactatagtnactngattatatccaagactaagaaaaccagccatccactgncntctttctaccacttggannattcgtttcctttcttcagctactcatcacatatcatcgtgacacagagaaaacattctgggctaggccagggtggatggtcccaaacatacacgcaaggacaaaaaagggtcgccatacattcatggccaacaaacagctttagaaagggtccagatgttggggagaaagggttaaaggaattaggcaagtcttctgttgcggccatccaacccatgtactatgactattatggtggggatgccagggatggtggtgggcctatttcaggtcagaacaggttacatcagccccaagaaattatcttgtttttctttgtgctggttttcttttgcaatggtatctagtcaaggacctaaacctctcaactgaagagtaagctcagaatgctgagtgccaggcagtcaccatgctattttggtgtctgtttttttgatagttgcacacctgggctgccatggacaggcccacagtgcataatgggtgggctctccctcctctgtcccactcctacatgcgggaaggtcactt

SEQ ID NO: 8285 - DNA, 291 bp, Canis familiaris
  misc_feature (1)..(291): n = a or c or g or t
cctttgtttcccnnngttannngtctctcatggtntgtcnnnnnnntttnntgccactcnnnnncntgccttcnnnnatggtccctttcactatttcttatatttcacatttaagtgagaccatannnnnnnngtcttttnnnnannnnnntatttcactcaacataataccctccagttccatccnnnnnaatgtaaatggtaggtattcatcttnnnnnntnnnnnntnnnncnnngtgtatatagnnnnnnatcttnnntnttcattcagnnnnnnnnnnnnnnnnnt

SEQ ID NO: 8286 - DNA, 510 bp, Canis familiaris
  misc_feature (1)..(510): n = a or c or g or t
tccagaccaaaatctgcaccttcatcacaacccagtgccaatggnntccagacggaggggctggactatgagcgcctgaagcaggacattttagatgaaatgagaaaagaattaacaaagctaaaagaagagctcattgatgcgatcaggcaagaactgagcaagtccaattctgcgtagagaaacaaaccaaggagaaataggactttagtctggagaaagaagaaagacccctgtgaacaacagccattaacaacaaacccctacattttgtgagctgtgagaagaaagtggagacaaatagttggaaggaggaaaaccaacatacttgcaagccttcagacgctattactctggcgataagctatttccctcccagtttgctgcttttttctgaccttttcaacaggatggaagagttggatgagagttcctatttaacaattaatgcagaaaatactaaacccatcaggcaagatcgccgtgnnnnnnatattttcatgtcaagac

SEQ ID NO: 8287 - DNA, 510 bp, Canis familiaris
  misc_feature (1)..(510): n = a or c or g or t
cccatccctgttgctccgctcaggnngctcaccggcncnnnnacgccggattacaaatgatctctgtgccgcagatgtnnnnngctccaaaaaggctgtaagtcctgtgtgagggtcggggtttcttcttttccaaannannaagtggtgttaaaggctcgggctagagagtctgatagggaaagtgcgctgcggctgcgcgaggagatcgccagtgcccaagctctccactttggccaacagcggcgcccacagtccgcactaggaaactgcagccttggatgcttcagtttaaccagctactataattataatcctgtgtctaattgaacaaatcctttttatatgtgtatatatttaatgacgattaattcatagtattagctacataaatataccaaatttccaggtttttaggttaatcaatatgttgacataattgttcctctttcttcaattcgcactgtaatagatgactgtaacagactttgcctaaaggatctcagagta

SEQ ID NO: 8288 - DNA, 336 bp, Canis familiaris
  misc_feature (1)..(336): n = a or c or g or t
actgcatccatctttgatatagtgttctggttcttccctgtacctcgcactgaactcacggaagggaagagaaannnaataagctttggcttttccatctcaaaagtnnnnnnnnncctcaacattttagtgttttgctttttacctttttttttttaatgtcctattgtaaatggttggtttacactgtacaagtaacactagtagctgttttgaataacataggtgctcttcctcatctcatctcctacacaccacggtgagcatatggagtgtcctccagattttgttgacatcagcagatgttaatcaattttaaaaaaggatcatggtttc

SEQ ID NO: 8289 - DNA, 594 bp, Canis familiaris
tttttttacagctctttttctctctggggctagcaataacttaatgacatttaaagcaatattttttttgtatgtcatactccaccatttatatttatgctatgacatcgagatatttgggggagtctcatgatctttccttaacaagctgattttgcgaatgtagtaaataccaaatgacaatcttatattctaacacaacctgcaattgtctgttacctgttttaactactatactgcatgtcagaaagaaattccctaggttgctctagtttcatattcaaacaattataccaccagatgcaacatacataataaacacataaaatatttttaaaatacctaatgaagtggcactcgatgaattcaaagaaaatcaacattccaacaagagggcccaaccatatctcgacatgtacattaacaacttaggtattttaagaaaaaatgtggcttctttagtttttataattccttcactctttcttttgagcccacaatttctgctgataggagggacatttaaatttgctaattaaagataattcagtccctttcccataaaaacagtttcttgtgctttgaaatggtctc

SEQ ID NO: 8290 - DNA, 655 bp, Canis familiaris
  misc_feature (1)..(655): n = a or c or g or t
ccaagctctgtctcctctgctttttacttttttctctnnataatccattcagttaagtacaattgtatcaaagagaaatgcagacgtaaacttgtaatgactctgggcttttctgtactcaatttttttgatttcttttataatactaatcagtctagctctcagagcctgtcctctggaattcagtcattatatggatttaaacagcatttcaaagtgctttcatctaaatcatctccttttaatggccccgcacttgggggatgctgttgatgctgttgtatgtaggagcccaaagttcagggatttgcggaagaccgtgaaatccgcggaaaagctgagacagaaatccagttgaactggctactaatccagggctttttccacttcaccacagggagcattttgaaagcaattgctttttgttattcccaaaagtcagctgttgggagaagcattagaaatttggaaatgcaggctggcaaaatgagagctctatctgcataatcgggctccttgttgtgctggggtctgacaagaccgagaaatgatataagagttttcctttctttctttcccatcttttaaatcactcttgcaagtcagaatattaagaatgtgctagatcatttaagactcactcattcctcctgat

SEQ ID NO: 8291 - DNA, 624 bp, Canis familiaris
  misc_feature (1)..(624): n = a or c or g or t
gnngcggncgggcntcgccgctcgtgcgcttccagctgcccaacgtgctgttcgcctatgcgcacactctcgtcttgtatcacggcggcgacgaagcactgctctctgacttctgtgccacactgctcggcgtttccggagccctgggtgcgcagcaggtcttcgcctctgctgaggaagccctgcaggccgcagcccaggtgctggaagcgggcgagcatccgcctgggcccctgggcacacggggtgccatgcgcgaagccgcccgcatcctgatgggtgaaagccccgccaaccggaaaggctacacgctggcagccctggggcacctggcacagaccctgagccaggcccggaagcaagctgtggctacggaagagcgagatcgcctctatcgggcgcggaagaagtgccagttcctgctggcttggagcaatgaaaatgaggcggccctcacatccctggctctagattgtgcaagggcccatcgagcccatgctgtggcggccgaggaggtggtagccctcaccgaggagttggagcagctttggggaggacccctgccacctgctccaagaattctcattgaggagctccctggctgaactggnnnnnctttgtcat

SEQ ID NO: 8292 - DNA, 360 bp, Canis familiaris
  misc_feature (1)..(360): n = a or c or g or t
agatctacctccatgattnnntaaactctgattatttggattaaaatcagaattttgccnncttttctnctcaaattatatatatatatggtttttttnnntgattaaatgggtattcttaaaatanttgtgggtncttcagaattttgtgctnnnntatttaannnnattgtttttatagcaaaacatgattcagtatgtgttttataagtctttaataatttataaataggtaatatttttgtnttgcagtgcattatttttcctctttcctncgaaaatatacnnnactttatttatcacttttaagagtgattgacaacaggccatatgacccttgatgaannnntatgtagcaat

SEQ ID NO: 8293 - DNA, 621 bp, Canis familiaris
  misc_feature (1)..(621): n = a or c or g or t
agggnncagaacaggaaaacaganngtgtgaagtccgtgccagttgctgggctagaaaatgctaaatgacatgtaataggctcaagtttttaagatttctttaaatgatttcttanctaaattcttacagaataatgttttattattgattatagaagacaggaataataactcttgccactccaaaaagcagtgctgcccagagtgctaaggctagaggccaggcgtcccatgcaactgccacagcaaagtgactcggtctgcaaaaaatgggaaaagttcaggaatggtacagtgctgcttagaaggaagccctgaatgaacacagtgtgagttttttaaagtttcctatatcaccagtcgtgtttgtattgaaaatatataatattattaagaaattatttgtcctatttataaattacataggtaacacaaaggagtagtggtttggcactgttaaccgacctgctgggtccagcctggagggtgagccccgcgtgcgtgcgggaggctctcaagcctagtatggggcacgaggcagtgacctggccacttgctgtcgggatttaggtagacgttgtcttccttaagtaacagatttcagaggcaagctcccctgac

SEQ ID NO: 8294 - DNA, 653 bp, Canis familiaris
  misc_feature (1)..(653): n = a or c or g or t
actgaatatttaacatctcagaaaaaatcttgcatgttctgtagttttgtattaagtcagtcattttgtatgcactatatcangtaaaaacaggtggttnacctgtttacgttagtatactnncaaagtctccccccctcccccnngcagcttcagactggtannnnnagacttagagnncnaannnagcanctgagnatacccangnagctcntctatgcatagnnnancttctccaccnagtggggcacagaggagagtaggtgggtacagggtgtacaagctgcaagtaaggccctttattcattgatttctttcccccaattaatggatctttaatctgtatgtaccgactttttttctctgaaaacttcaactgagctgctctttacttccatgcaatattgtatnctcgattgtgtntngaagaanntggtganngtgccctnntacataagcaattgcagtgttttgcatgcaaaattttaagaatttaaannntnntgatnnnattttgtnannngngaaaaanaatcatatcttnnnnnnnantaatggaggaagannnntgctttgtgcattttgnnnnntttgagtttcattttttccataatgnannacttttgannnnnttgagttnnncntattannnn

SEQ ID NO: 8295 - DNA, 612 bp, Canis familiaris
ggtgtagacagtttgaccttgtgaaacacaatgaatgctgtgactttttcaagtgtagaatagaatgatgatttcacttgcccccaacttgaaatactttcttactatttagaacttgtattgttttcccattagcagaatgttaatattgctaatatttcgtgtacatttctgtacagaacacatcaatacaacagaagtatcaagtgttgaataaattccagaatttcaaagactcagaaaacccttaccaagagtttcctctacctaatttctagttcacatagttaactcaaagaaattccactgagactaatgggatactgtcttgtgtagatgccagttgagtttacagtgtgacctaacaaagctgtcttttttgttgtgctgtatgattgttggatcatgctttttagggatacttttattgaaatgctcagtgtgcatccatgcaaaaggccaattggctttgtgaacaaaagatcttttctcccctttattatgttctcttgacacttttgtggaaattaactagcctgataaaaaacattttgtaaaaatttgtataatactgttataaaaatatttataatcccagaaaatgttgtgtta

SEQ ID NO: 8296 - DNA, 663 bp, Canis familiaris
  misc_feature (1)..(663): n = a or c or g or t
tacntcttcaagggnagacagtactgggagtatgagttnnagcagcagcccagtcaggaggagtgtgagggcagctccctgtccaccgtgtttgaacactttgccctgctgcagagggacagctgggagaccttctttgagcttctcttctggaacagaccctctggtggtgctggagagcccgggttcatcagccaggactggcctggtttgcctaggcaggtggacgcggccatggctggccgcatctacatctcagggtcggcaccccgatcctgggtcaagaagctgaatcctaagcggcgcaaccgtaaacgctaccgttcacgccgtaaccgtggccgaggccgtagccggacctcccagcggcaatcccgctcagcctggctgtcctggttctccagtgaggagagtggcctagacacctacaactatgatgactacaacatggactggcttgtgccggccacctgtgagcccatccaaagtgtttacttcttctcagaagacaagtactaccgagtcaaccttcgcacacggcgagtggacactgtgagccctccttacccacgctccatcgcccagtactggctaggctgctcagcccccagcccccagtaggaatctgagcctacacagctgatccctccactgcttcctcct

SEQ ID NO: 8297 - DNA, 552 bp, Canis familiaris
  misc_feature (1)..(552): n = a or c or g or t
acccaacatcgcngtgaaggtcaaccacagctactgctcagtcccgggctactacccctccaataagcctggagtggagcccaagaggccctgccgccccatcaacctcacccacctcatgtacctgtcctcggccaccaaccgcatcaccgtgacctgggggaactacggcaagagttactccgtggccttgtacttggtgcggcagctgacctcttcagagctgctgcagaggttgaaaaccatcggggtcaagcatccagagctgtgcaaggcgcttgtcaaagagaagctgcgtctggaccccgacagcgagaccgccaccaccaccaccaccaccaccaccaccaccaccgccaccaccaccggctggacactcgactttcctggtgctcacccacgcggatggggcgcaggcgggcctcggggtacagagggaggagtgattttttttctttttattgttcattttgtttttccacccctttccctggctcctggcacctgtacctctggactctcctatcggaggattaaaaaaaagtaaannnn

SEQ ID NO: 8298 - DNA, 108 bp, Canis familiaris
  misc_feature (1)..(108): n = a or c or g or t
ctctcggcacatgacctctcacagttagccgttggccgaggagcaaagccacnnncgcagtgacgcagagctggctcgccggtgctgcctctgagggggtggccagag

SEQ ID NO: 8299 - DNA, 649 bp, Canis familiaris
  misc_feature (1)..(649): n = a or c or g or t
cagcnacacagacccacagtgtggnctgcaaagcctgtaatattgactgaatacttacagaaaaggtttgccaacccntaatctggacacactgatgctgagggagacactgatcttcctgtatttatcaggcattattttatttctttgaacacctacataaaaagtaattttctgggcatggctccaaaaagttctccccaagaacttgccagcaataatcacataactcagatgaaattacccagataacagaagtcttgacctagagaaaacatctcaatttactttccccagctaggcaagcattccattgaaacagcttatctgtatctgttgcgtttatccctttgagtggcctgcaaacatgattttacatcaagccttgtttcttttttcctttattctaatggaaagagtcagtgaaaataaatatcagaagcacaatgcaaataaatcttattttactgttatactgttaactttagattgtgccgcatgcctgctttcctgaaggctgagcccagggttttaattattcatgtgcagctatgttagacagcattttacttgaatatctatgctttgatttttgtgtgtgtgctatattttttaggataaaacttgggaatacatgtagtaggannnn

SEQ ID NO: 8300 - DNA, 559 bp, Canis familiaris
  misc_feature (1)..(559): n = a or c or g or t
aatttccctcccntatgaaaattnngcaattcgtaagacagcacatgccaggtncagacgtnnaactccgtgcccggcgtaacctccagcaattcagacgcctccatacagtggagccagaggctggggcttcagcccaaggaaaacaccctgaagcagctcaggagcgcgtcccagctctgaccgtggggactgctgcccggttggggcctgcggggatccaggccgtcccggctgctggggctgagggctcggcccgcgctgaagcgcccgctggggaggtgaagcccctgcagatagtggtcactgctctagttcactgctcagccctggaggagccccctgcacccgcggccaccccagaggaggagcaggccccggcacctgcaatcggggtccccagagtgccagagccgccacctgcatctggacaactgacttcgacccctgagctcgccccagctcccaacgcagggctcgtggtggctgcagcccaacggaggcttgccctcccctggcatttcactgtttctatattttccatttttctttaaccttt

SEQ ID NO: 8301 - DNA, 572 bp, Canis familiaris
  misc_feature (1)..(572): n = a or c or g or t
ggtagtattgatagtggcccacccnntaagagagaaaagataaagaagaagtacttgttaatagnntcacttttttggttgcttcttttattatgttgtcttctttgtctttgtataaggagaaagaaaaaagaagttccggctcaacctgataaacaaccgcaaatggttccacctccacctgcaaagccagagaaaaaagtcccacctccacccccaaagccacagaaaatgattccaccttcacctgcaaaacctccacaaaaggctcctactcagcctgccaagccaccgcaaaaggctccgactcaacctgcaaagccacagaaaaaagctccgactcagcctgcaaagccacagcaaaagccttcagctcagttttcaaaatcacagcaacagctttcagctcagacttcaaaatcacagcaacagctttcagctcagtcttcaaaatcacagcaaaagctttcagctcagcctttaaaatcacagcaaaagctttcagctcagccttcaaaatcacagcaaaagctttcagctcagccttcaaaatcacagcaaactcttaagag

SEQ ID NO: 8302 - DNA, 483 bp, Canis familiaris
cttccactgaagctttgtttgtaataaagaaaactgaaaacaacctaaatacctatgaatagaagagcagataaaccgtatttttataaaatcaaatattatgcagcagttaaaaagaatgaaccagagctacaggtatcgatgtgaataaatctcaggaatgcagtgttgagctggaggagaggacagcaagttgcagtgtaccatttatgtaatctttctggacatgtaaactgatattttactgtttgcgggtacacacagaactggatagtagaggtgcaaaggcatgcacaggactgctatcaaaatcaaatatcaaaatcagtgatggggaatgctcctggggaggggggcgggcagcatctacaagaccaagaaggacactgggtttcaactgtacctgtaatatttcatttactttaaagaatctgaatcaaatgtagaacaatgttagaatttgtcagaggtgagtgatactct

SEQ ID NO: 8303 - DNA, 680 bp, Canis familiaris
  misc_feature (1)..(680): n = a or c or g or t
attgtacatattccccttattncntgtagcaatatttttaagtctgattattgctgccagtgttggggctagaaaggagatatcacagtgctcacaagaggctctagaagaaactgaagaagtagctgtacaaaaagaagtaggcagattagaggaagatgtcgagggaaaaaatgagtagtggtaggaagaagtctaatatagcaaataccagaatacttggtggaatgcaggttcagaacatgaagtccacactgatggttgcaatggccctataaatagggactctatagtttgtagacatgacatctgggcaaggagggcttttctcattcaatttagtcatggattatatatacatatatctaaaatattttgttaaaatattttaatactttcattatcacattttattaaacatttaatttaaacttttctcatgaaacattcagatcaatatcttatgttagtaggtctaattttgagatacctgatgtttagggaatgtcatcttccatctactatgcggacatacagataatatgtccacacatatatgtccctatatatattggggtcccagnnntttcacctcattcataactacacattacattgtttctatgttggttgttctaattgctctgtgaagtgtatccatgaaatgaaaagattttaaa

SEQ ID NO: 8304 - DNA, 422 bp, Canis familiaris
  misc_feature (1)..(422): n = a or c or g or t
tcacagcaggattnnatnctttaagtcaaataggatctcctcctattcctgataatgacattggaaagcttcatgctcattcaccaatggatttgtggaaaaaagtgtatgaaagagtctttccaccaaagagcaccaacacactgaagcatatcaaagaccctgcgagagaccctcagtatgctgaaggtgaagttgatgaaatgagaattcagaaggatcaggaactggaacaatacaaaagaagttcttccaagtcttggaaacaaattgagcttgattcttgaacctaatttgtatttaggttcaagtgtatttatttcttctttcccaaatacaagtaagtttataattagcataatggtaataaatgaaggaagcaaagatttgtaatttgttaaaagtggcatttcttgtattaa

SEQ ID NO: 8305 - DNA, 597 bp, Canis familiaris
gttggatggacacaagacccattgataggtcctggcagccaccagtggtgggtgggggcagtgctttgggggtgtgagaatgaccgaaacaggcacttataacaagagcctgctgttcacatgggcccctggcagtggcgggggagtgacggggagcatgattcctgcattcctttcaggaagagaggcattctcaaacatcatgtaatggacttggaataaagcaggaggctcacaggtaggtggtttctgaaaggatagaatcttggtgctccatcgttcaccacagccatctgtggggcagacataccattccccaccactgcctccactttggcccctttttttctgcttgcccctcagatggagcccagagtgggtgctgcttatcaaactcctgcacttgctgtttagtcaggaaagccttacagagttctgtactgggggtgggagagggagctgcctcttcatgaggccctccaccacctctgaaggctgggcctggccagcaccactcagttcccgcctgccctcagtggtctcggatcttggtgtgaatgtgctgtgaggacagcaccatctctttaatgttcattg

SEQ ID NO: 8306 - DNA, 528 bp, Canis familiaris
  misc_feature (1)..(528): n = a or c or g or t
aaaaaaagnncaaaatctcttcnagcgtgagaagaatgctccnnnnnagggtgatgcactgggtaggtggctgggtgangtcctaatcaggaccacttgggctcctgaaacactatacagttttgtgaaaatggcttactttttagccattttaagcctttcacaattttgctgttctttcaaaaatacacagtgttataaaagtaatacgtattcaatgtagaacatctggaacacacagaaaagtagagagacaaaaatcatctataattcaccactcgtgtgaacactgttaatacttttctatgtatattttaacctaattaagaatcaaactatttctacagttcatatcctgctatgataagttaatattatttggggattattgtcaggtttaaattttctagaaaccctattttaatggctatgtatttttctgtagatatatcataatgtaaccatcaactattgttgattatctagagtattcccgttttgctcttataaataatacgtgctatgcat

SEQ ID NO: 8307 - DNA, 453 bp, Canis familiaris
  misc_feature (1)..(453): n = a or c or g or t
aagtactctacatannnaataatatcatgggaganacannactagnnnagtccgcttcagatagaanntgctnctaacatgggctgtacataaccctattannnngagcanaactgtaagtttcccgnnnngcgcagcgcagccagcctagtagtagcctcgnnncgacgtctcccctagnnngaaggacagcattaaaaggtcattgcagagcctgtggatgaaacacaacgtatgttttattgatctgcttcagaacactacagaattcctggactgggcgaaggccttagacgctcgtttttaggtaaatcactaccactgnagtgctggggtgtccgcttgccgaatccgttcctgacggtgccatcgaggtctgttcggcgtcagtgctgtgnnnnctgctctgtccccgtgccccgcggcagtccggccccacgcgcttctgtggaa

SEQ ID NO: 8308 - DNA, 263 bp, Canis familiaris
  misc_feature (1)..(263): n = a or c or g or t
atgagaatagnnnatgattgagaataannnaaatatccatcatcaggaccactagttaaattatgataaatctatacattcaaatgtaacaaaagaacnnagagatctttatgttttaatactacagtctccaaaaatttttgttaaatagaaaagcaggaaaatggtgcagaataattaatgcattggcttgtaaatgcattaaactaggacaacctaactgttgaggcataagaaatctgtggatggaagacatgggaaag

SEQ ID NO: 8309 - DNA, 659 bp, Canis familiaris
  misc_feature (1)..(659): n = a or c or g or t
cacanactaacatactatcagctcgagtggggacagtgggatttatgtgaacannaggcanagccatgagatcaaaccatccaaagccttctaccaatgaggtacaatcacctggtttctaatcccaaatgttttcctgagacacgagcagatgtgaaaatgtcaaatactgcacataatggattgaggtgggagcagaaagccagagccatctttctatctggcacttcctatgtgctctgtgctttatataggcatctaaaatgctttgttaatctgatttgtattttgaggttgcgggcagtttcctcctctgacagccaaaacagaactctatcacttttgagagtcacgaccaagtttgctcaacattaaacactacgttatctcaaaattcatgtgacctttctttaatgttgccaactttattttgtgcatttgtgtcagaatctttagattataagtttggggctccccaggtatgtaatttgctttgagaagtactctttaaacacaattttttattgtttaaagctgcattcaacatcagaactaccgtggataacttttgataacatctgtggacaaagctaatagtggttttttaaacagcaccttgcctgaacaggactttaaagataaagaaactaatatattga

SEQ ID NO: 8310 - DNA, 525 bp, Canis familiaris
  misc_feature (1)..(525): n = a or c or g or t
gtcgtgaggnnngccccacgttggtaatagnnnncgaaaaaaaaattaaaagaaaagcttaacttttcagaaagtacagaagtgtccatccntggatctgggggagcagctggtcccctctcaccaagtctgagggtggaggcgtnntgagggttggccctccccttgccacgcaggggccacagtccttagacattccagacaccagggcgacacaccacccaccttgccaccctgctctgccccccactctttctttgtggtcttcacatagaagtggagtaatcagcttaaaaaatgcagtaatgcagccttgtcccctcatacgaagcctctgcattgaagggccttcccccaccacaccccagggcagcaccccaggcaagcccacctcacacacaccagcaacacagatgcttccatcctcccatgtccttgtgggggcatctcaccagctgcctgccccccagtgcacacagaggagccacaagtcattggcacctttttgaaccttcaagtgtggaa

SEQ ID NO: 8311 - DNA, 680 bp, Canis familiaris
  misc_feature (1)..(680): n = a or c or g or t
agatctgatttccgagttcttgtttcaggacttccaccatcaggcagctggcagnanntgaaggatcatatgcgagaagctgggnacgtctgttatgcagatgtgcagaaggatggaatggggatggttgagtatctcagaaaagaagacatggaatacgccctgcgtaaactggatgacaccaaattccgctctcatgagggtgaaacttcctacatccgagtttatccagagagaagcaccagctatggctactcacggtctcggtctgggtcaaggggccgtgactctccataccaaagcaggggttccccacactacttctctcctttcaggccctactgagacaggtgatgggaaatttttctttattttttaggtgaactgagctgctttgtgctcagaatctacattccagattgatgatttagtgtcctaggaaatttttttaattttttttttaaggaaatacataatttctaccagggccatattggcagtgaagcgttttaaactgcagaaattgtggttttggttcagaaataagttgtatatttttcaccctggattatgggaaaaaaaaatcagtgctgtgtctttgtgggttgctctactatggagatcagcagttactgtgactgagtcggcccattctgtttagaaatatattnnnacgtnnn

SEQ ID NO: 8312 - DNA, 571 bp, Canis familiaris
  misc_feature (1)..(571): n = a or c or g or t
ccaccccaggtctgtcttttgccctttcctgggtcatatnagcttctggatggnnngctatccttnnagctaatcagnnagccataaagggcatggctatttctcagacctgaagaccggggagcttcttgccagtatgtttaagacacttgaataattgctgtttgcacttactgcacggccagaccacagcactacatttctatgcaagggtgaggcagcgtggtggtcatggctcctagctaacctattcagagatcttttccagtcaattaatctattttcatatttatgaaggagtcttaatgttctgccccataagactttcagccttgtggttgggagtggggctggttttgtaggcctcagggtctgctctatgtacttgtcaacatgtgatacacccagttggttaaacggtttatccgtggactgattttcttcccctcttgctgtggctggagctacgggaacagtctgtccttacagagccgcaataagaaataaccaaagatgaagctggtcaaatattttcataacttgtttctgttgattttttggtaatactttt

SEQ ID NO: 8313 - DNA, 387 bp, Canis familiaris
  misc_feature (1)..(378): n = a or c or g or t
ccgnnataaatatgagctgtgagcacatcatgtgctgaccccagtgagtcctcnanagcctactatccnngaaacaggaagagccactgacctactgtacccagaatctcttttctacaacacattctcagcacaagacactgaattgttcttcttaaaagctgccaagaccttcccagcacctcccaacacacaggagagcnnnnnnnacatgcgctgacccttcaggtgctgcctaagcttggttctcacctccaaaacccaccacacgggcccaaggcacctccttttctaggggagatctggtaagctgtcacaactgacgagatcccactgtggcccacaaatcaacatcagggccacagagaagtcacatgaacaataaaa

SEQ ID NO: 8314 - DNA, 654 bp, Canis familiaris
  misc_feature (1)..(654): n = a or c or g or t
cagtttgaggggttgnnggcttnnnnnnaaggggacnnanntatggccaaaatgagactaaccaaaggggtttcatcagagtctnnnnnnagctgttaggcattcagggtttattgccacccacccttatttctctttacctgtctccttatccctgacctcctttctgctcttctttccttgcagcttagcagtttgtgattctaagatgaaaagttgaagagagaaacaagacctctcctcagcttatctgaggaatggagggaaaggtggtaggggaaagcctttgtgtaataggacatgcctccctcatcctgcctcaaagaaacagactctgttcctggatcctggcctttctaaaaacggatcccttctccattactgtaggaggtttcatgctggctttttggaagagagattattagctccttgtgtccccttgcccctggtgtttggtgcacaggctcctccatgaaggttgaggcttctggtggccctctcagggtgagcggtagagcagccaagtcaggatggctcctgccttcctcttctagcagaccctgggcattcccttgtctgctcagattaggatgaggatggcagattggagagcaatgtgtgtgtttttgcttctggcctgacctcaattcctgg

SEQ ID NO: 8315 - DNA, 555 bp, Canis familiaris
  misc_feature (1)..(555): n = a or c or g or t
cagggaccaatgnnngagggacttggggacaggtcagagagaggtgaggnncagcaggtgcaaaattgtgtaagtgttgggggcgtcctgagaatgtctctggattcactctgatccagaatgaggctggacacgtgggtatgaagcattacacctgagggatctgaatcccttttgtggtgagaattggcagtgtgggggaggggcagagtaggagaaaagcaagcagaggttctacatacaggggactgatgatcacggcctcatctaagacatcacagaataaattagggatgtttttttccaaaatcagtggcccttggtgtccaatcaaatgctaggggtgaggccgtgagagctggggattgctccaaggctggtgggtggacagtggagttgctctctaacctgaagaatgcagttgggggcggggagagccagtctgtctgtatgctggcttaaaggtagctgtggtccatggctaggtgggtgggaatggagggctgggtttgaggagngaggtgcagactcggannntgtatggattagggactt

SEQ ID NO: 8316 - DNA, 649 bp, Canis familiaris
  misc_feature (1)..(649): n = a or c or g or t
actcannngtgatggggtgttcacactttactcgtaccgggatccacgttcaacagagacgctgcagtctttctctgaggctgtnnagtgggctannnncgnnnnnnnnacacaacaggacattgacgaagcaaagctttctgttttctccgtcgtnnacgcccccgtggctccttcagacagagggctggaccactttctttgtggcctctcggatgagatgaagcaggtgcaccgnnagcagctcttcgccgtcagccgcgagggtctcatcaacgtgagcaccaagtaccttggcgttgggaagagcacacacgggttggctctgcttggaccagagaacgcagagatcgctaaggacccgtcgtggatagtaagatagcgagcaattctgactgtacgcaggggttgagcggcaccggcgggcacgtgaggctcctgaaaatgaagcctgagctcatttagttggaaaggtgagagaagttactggttccctgcacattttgctcacatcattcttagaattttgggtggcccagttagaccaagctcttctgtcctcgaaggaaagatcatgaagaaatgaattgaaatcatgtattaaatgctagagatgcacaaattattctaagaaatggatatgtttatt

SEQ ID NO: 8317 - DNA, 605 bp, Canis familiaris
  misc_feature (1)..(605): n = a or c or g or t
tggagacaagacnntnnangaccgattcttcgagcatgaggtgaaactgaacaagctggncntnntgaaccagttccactttggtatcttctacgccttcgtgaagctcaaggagcaagagtgtcgcaacattgtatggatcgccgagtgcattgcccagcgtcaccgcgccaagattgacaactacatccccatcttctagcgctctggcccaaggctccccacaagtgtgtgtctgcgtgtgctgtgacaaagcccatggttcacatgcctgccccggggggtagcacattgttccagtgactactggtttccctgaccctctctgagatggctcttgggcctgaaaaggggctgggcacctgctccccctaccaaggatggaccaaccccctctcccccaaaaggaggccccctcagccctctgtttacagccactgacatgtctaagaagcatgtggtcattttatgtccttccctgagaacccctggggcagcgtgagcctcctcttccgtctgtgggtggcccccagagctgtggcccaggggaaggagagtgtgtgtcctggaggcatagggcaaatagctctacaaccccatccctc

SEQ ID NO: 8318 - DNA, 607 bp, Canis familiaris
  misc_feature (1)..(607): n = a or c or g or t
catattgcattcttttattngcnaactaggaattgcagnnngaggatcatttagaagggcaagttcaagaggataatgaagatttgagaactttttaacttttcattgactaaaaatgagtgttatgttaaagacttgatttgagactttaacctgctggcagtcccaaatgaaattatgcaactttgataacatatttcttgatttaaattggcttttgcaattgagtggaactttataaagcatatgggcagttatttaattaaaaaaaaaaaggcaaaacatgaaccaccttctgcacttaaagaggtctaacagtacaaatacactatcttagatagattaaattttttttaatttttaaatattgtactatttatggtggtggggctttcttactaatacacaaataaatttaatcatttcaaaggcattctactggtttagaagttgattcccaggagtgccatatttcagctactgtatttccttttcccctacaatgtaagcagctcagacaccttgtgttactgtttttgtatcaagtttttttgcacaggatgtgaccactgtcagatcactgttcttttctttctttttgtgattg

SEQ ID NO: 8319 - DNA, 605 bp, Canis familiaris
  misc_feature (1)..(605): n = a or c or g or t
atgaatatgctgatctcccagaatatttcangcgnctgacatgtgagatctccacgcgggggagatcagggatggtgagagaaggtcagctaaatggctcatcagcggcacacagtgagataagagactgtagaacatgagaggactagagaaatcatcaccattagaccaagctgtcaggcccgactgtggagaatatttagcaagtaaacttacaagagcccaacacagctccatggaagtaccaaaacccagaggctgaaggttggcagtagagttgggggtcggggggtgttccagctcaatccttcatgcccactggttcttgatcttctgcggcctattccagttcaaggatcccccagtgacaacgggacccaatgcagcccccccatccctgggttggacatgcctgtgtccacacaacacatcagtgtgacacctccactgactatggctacagccctgcatgaaggacttgggagctagatgccgcgggatcaccatggcccttgttgctgttttgtactctatacttggtttttcaattaagcttaatggctttttttaaaacatgacttgaagctctagttttctagaccttt

SEQ ID NO: 8320 - DNA, 545 bp, Canis familiaris
  misc_feature (1)..(545): n = a or c or g or t
tgggnnagatggcaggtgacagggctgcgaggcactgctgagtggtnnnaggtgggcagcgggcacctcgnnaggcccnnnnntacacagctgttctcaccacctgggggccaggagcagcctgggcctcaagcaggctgaagtcacagtggggacgagcccggcaggtccaggccctcaggccgtgtgcccatagattccccggggaagggctgaccccagcctggccatgctcacagccactgcaaagctgttcttctgaaagcgagatccaggactgcaggagagagctttgcacaccttctcccacggagctggggttcacagtgttggtgggagaaagaatagcagccccccgagtgcctggtctgtgctggacacggtgctggctgctgtnngcatgaaccttggcatcatttggggattgggaacgtggaccgagacgtcggacctgccccttgcaggcggcgagcctccacgctcctccccgtcattcataacgtggaggtgatagtgcctgcaccgctgaccggttgtgggacctt

SEQ ID NO: 8321 - DNA, 550 bp, Canis familiaris
  misc_feature (1)..(550): n = a or c or g or t
cggtgccaccggttncagtcntctgcctaccgcagcaaccagtggcgctaccgtgggcgctgtgacagcatccagtttgccgtggacaggagggtgtttgttgcagggctgggcctgtacgggtccagctccgggaaagccgagtacagcgtgaagatcgaactcaaacggctgggggtggtcctggctcagaacctgaccaagtttgtgtcggacggctccagcaacaccttctcggtgtggtttgaacaccccgtgcaggtcgagcaggacaccttctacacagccagtgccgtcctggatggcagcgagctcagctatttcgggcaagaaggcatgacggaagtacagtgtgggaaggtgaccttccagttccnnnnntcctcggacagcaccaacgggaccggggtccagggtgggcagatccccgagctcatcttctatgcctgaggggccctgggctggcgtggacgccctgccctctgctgggcaccaggaggaggcctttctctgcagctggtccggccgggaagggannnnnnggacattg

SEQ ID NO: 8322 - DNA, 606 bp, Canis familiaris
  misc_feature (1)..(606): n = a or c or g or t
tggaagtgatagagggctgcaaggacctttgggggaacttcagaagggattagncttacagtggtngagcccaggtatcaggagatggagcagggcccctagtgggaggagattccaaggagagtgcagggggaaatcttgtctgttggtcaaacagggatggggggggggcgggggagtcattgccgactgagctgctgattcttgtaaatcgcatttaaaactcatctgtagggttggcactctgggaggggggtggttgggatccagctcattcattcttttctttttttcccctgagtccatccttggggcctggggaggcaggaaaatgccccctccccaagcctttagtgtgtgctgagctttctctttgatgctgacaggggagggtgggtactgggatggtgaatgagttccctatatcaaacccttcagtgggcacaagattgagtgcttggttttaggttttatttttttatgaatgtccaaatctgtgtttccccctgccttcccagacttgtgtggccagttggaaatgtctggtttgtgttcatctctccctcgtttctggagcaggggctcagaccccaccacatctcctat

SEQ ID NO: 8323 - DNA, 631 bp, Canis familiaris
  misc_feature (1)..(631): n = a or c or g or t
atcagaccagnnnnatgcannntaatgataaattnnnnnctagctctattgtaaattgttgtacagatgttgtatttcaattacnaagttnnnnnagcnnanncttgtacaaatgtttaaaaatatggctttnctaattggatattgtattttttttaagtcttcttgannggcgctttaattgctgctaaatgatgttgcttctttgctaaaaaatctaatgacctccttaaaggtgcaagttgactgtacatcgtattagagagatattaaaagctggcattcattaacaatcaaggcatataaaaatgatccatcttggacatgtagggttcactaaatcagattcttgggttctagggctgtggagcacatagataactagatttataaattgttcatgtttatcctacatttctagaaggttcttatcagaaaggtgggatggtggtcccataaataagtttcttgtggtttgtacagatttgttaaaatgtgaacattttctaactgccttgtatggtagaaaccattctttttcaggatgttgtattttactcctgtaagaattatttgtcacattcannnngctgatacttacatgtannnngtccatgttgccgaaaaagga

SEQ ID NO: 8324 - DNA, 681 bp, Canis familiaris
  misc_feature (1)..(681): n = a or c or g or t
caaacacagcctttgatccngcagccccaaccagacggcancgaagcagtnngnnntaccgttgtggcagacccaggtgtgactgtgcctgaagcttcacctgacctgcctgcagctgccctggtggtaggacccgtggtggtagcaattcccgaggcacccctaccagagcaccgggcacactatgacctgcgtcatgccttcatgggtgtggcctcagtggagtcagcctcaggagaagcattccatgtggggaaagtacccaaggtggtgcagcctgacgttgctgttgctgctggtccagtggtccatccttgcccagggagaatcagacatttcaagatctagatgtaggtcagagatgaagagatttggcccaggaacatagccgccattttgtccaagtctgggtatgggtgggggccttgtttgctatcgaagcaggtgctatgcaggtctagattaatatcaagtcttcaatcccaacttctcttcattcttcagagaatggaagcagaggggcaatgttatgtttcatggaaggtataataaggttggcaacttgattgttattgttttgatgctaagccaccaccattgtgttctctcccttctttgacctcacaaaaacaattggaactgtgactttgagaggtgctcttgccaacttcatattttctt

SEQ ID NO: 8325 - DNA, 590 bp, Canis familiaris
  misc_feature (1)..(590): n = a or c or g or t
cgctctgccattcagcttggaaattataaataattcccaagaaagcnnncgtttttataacctggcaaaatcccattaatatcattgctcaaaaaaaaaaaaaaatgaaagctagatactggaaacttaactgcaatgtggatctttttcccacatgatttataatacataaagctgaatatgcagtttaaataattgcctacaataaaaaaatattttgcctgccattttcagaattcttttttgaaggtttctgttgatgttaactgagctattgcagatattttaatttccctaaacgtaaaatttggagtaaatatatatatatattcttgacatatatgtgtgtgtgtgtgtgtatatatatatatatgtatatatatatacacatatatatgtcaacaattcagtaaagcttttgtttaattttcagaaggaatcaaataaaacaagtatccatcttctgtagttcgtagggtgttaggtcctttaacgtaaagtcaaacttcaaattccatctagctctgtgttaatccctgttattactggtaaagcttcatttgaatatnnnaattcagtttaggctatgt

SEQ ID NO: 8326 - DNA, 636 bp, Canis familiaris
  misc_feature (1)..(636): n = a or c or g or t
cttcctcctcgnnggcccagttgtttctttatgctttctgctctgttggtttggttctctgctgtgtgtatgtgttggtnnnnngcaggtctcttccccgggtctgggctcagcccttgggggtggtggnaggcctcatgaagatgccttccagggttttttcccatttgttattagggacccaaggccagctgcttcctgggtctcctgtttcagagaagggagtaagacagggcttgggtgggggtacagaggaaggaagaccatgaaccagaagtgagcaaatgtgaaaagttcctttttgagcctgacgagtcagctaggctctgcagtgctttctggagactgggagtgagtatgtgtgttgacatgtggattgggccaaaagaagctgaggggccaggcactacagaagtcacgagttctcagggcatgctgggggccgaaacagctctagcctgttgccccagcttgagagctgagcaggccccagtctggggtgtgcaggggtctggcaggcagcggctaactccccgcctcttgcattctgtttctagcactatggttggcctggttggggtgagtgccctcccaaacaccagaccacacagtcctccaaaaataaacattnnnnnn

SEQ ID NO: 8327 - DNA, 630 bp, Canis familiaris
  misc_feature (1)..(630): n = a or c or g or t
gctgantagttaaagttggatcttttcccgtgcccatgatgtgtttgtgaaccatgaagaaagtgagactagaagatgcccacacaagtcagatgataacagcagtggttgctgatgttgagattattgttaaactgcagtgaacaatttggatggcagtatttagctctttgttataaactcttacagctgaatagcttaagtacaatttatagaatttcaaagcagttaatttctaatggaaaatctgaaaccctaattgcagatttaaaaggtactgtacaaccattctatctgtaaataactttacttagcacctttttgtcacttagaatagtatgcagtactacttgagtgagctattttggaagtaataccaagttctagtgtttgcttcttagtattgaactgaatttacggttctgtgctagacattttgcactagtcgaatccattcttgtgtctttttgttaatgtgctctgtaccactggtgagtgctccttggttttcttacctgctgctacagaaaagttcttttacatcctgatggctattgccaaggctacaaaaaagaaaagctatatttgtatgcaacactaaccctttgnnnnctaatgtacgtttctgct

SEQ ID NO: 8328 - DNA, 607 bp, Canis familiaris
  misc_feature (1)..(607): n = a or c or g or t
ctacgnctgcatnncagccggggacgnnnnngtgatnnctgctgctcaggctgcaggcatccatgannncattatgagtttccctgnaggttatgagacgcaggtnngcgagcggggactgaagttgagtggtggggagaagcagcgtgtcgccattgctcgcaccattctcaaggctccagacatcattctgctggatgaggcaacatcagcgctggatacgtctaacgagagggccatccaggcttctctggccaaagtctgtgccaaccgcaccaccatcgtagtggcccacaggctctcaaccgtggttgatgctgaccagatccttgtctttaaggacggctggatcgtggagagaggacggcacgaggctctgttgtcccgaggtggcatgtatgctgacatgtggcagctgcagcagcggggacaggaagaagtctctgaagacaccaaacccctggactgagatatggtgaccaaggctgtggccacgtccctcccaaaggataatccagtggggaagaagatgtagcccttttcctggtatatttcaagccagtgttggggtatggtgctagctataggagggaaaagaaccttccag

SEQ ID NO: 8329 - DNA, 581 bp, Canis familiaris
  misc_feature (1)..(581): n = a or c or g or t
gtncagctgccacaggnntggggtntcctggcntgtcacacaagttgtnnnnaatatgaggtttggtcaataaaccagtgcacacttggccaccctcgccatttctgcccccccggggtctcaggctccctttttggtgtagttggggcccttggttgctttcctttgctgcctttccaggaaactgccccatctactagagtatgtatctgtttctttctctcctgaggctggggcttggctggatgtctcctggggtcatcatgcctctcagccagttggttgggggctagactggactcgttctttatcctctgctaagtgcagagcaggaggccagcagcaggctcaggctctcagcactggctaaccattgacatcgttggcctcactgggcctgggaaggagtgaggcaagcccttcaagttccctggaatagcttgccagccctgagcctgtcaggcctccacatcgcaaatgcagaaactcagccaaggagctttagttacgtatggacggtgactgagccaagctactttctgagctgattgcagatctccaagagccagaggtgaaatgtg

SEQ ID NO: 8330 - DNA, 533 bp, Canis familiaris
  misc_feature (1)..(533): n = a or c or g or t
atgttaaataatctttaacataatacagggatataaaattttaaattttctttttcaattattttaaattccttttagcctgtcttattctatttagcaannnnnnttattttgttttgtcaaggatacgacagcatgttaaatgcttactcttgtgtaagcatccaacctaaaaaatacatcctgtacataagtgttttcattcaatattagttaaatgctatgctactaactttattaatgctttgaaaaatgcaatcatataagctattgtactaaagtcactgtattaagcaacagtaatcataataaaacaatatatctagtgtaatctatatgcagtgttaaaaacagtactgggcatcatgaatgtaactgcttgttaaagtaattctgctatgcagctcttgtgtgtataagatgtacattttaaaatacagtatttgaatttattttaaaaagttttatttgccttggggcattttaaatcgggataggaatttaccaaagtagatgataccagtataataata

SEQ ID NO: 8331 - DNA, 604 bp, Canis familiaris
  misc_feature (1)..(604): n = a or c or g or t
gattcagactcncnnatacggannacannacaagannactctnnccacccagcagaccatnnnnntcctggccaaggccccnnnggtnnnngtgaaacccnnnnngacccccagagccaaagcggcgnnctgcggctgcgcggcccagcacggtgcgccggggaaggccaggcccagcgcagccgactgaggcccccgccccgccccagagaaagcttcagtcgtgcctgggagncgacggccagggagcctgtaaacctctcccacagggcgatgggattcaataccgtcaaggctgtttgctccaacaggcaacagagctgcgccgccaactcccggtgggccacactgggacctcggagacccttcgggcgatctggtgcttctataaagcctttgttcttttttaccgcccaagtgatttttcttgccaacaaaaatttttacccatcagtactaccgggggctaaaaaaggcttctcttcaaaagtttgaaacttgctatgtgtgaataccatgcacagtatctgtacacagagcctcttgtgtaggcctggagtcagattagaaacaatcaagttctgacagggaaaagcccctttta

SEQ ID NO: 8332 - DNA, 537 bp, Canis familiaris
  misc_feature (1)..(537): n = a or c or g or t
tccaacccattcccccccaataatggggcccccaatgagtcacctgnnngctggcctgtgtgtgggggtgaccttgggcttggtagggggctcagcccccaacctgggccccgctgagcaggagcagaaccactacctggcccagctgtttggcctatatggggagaacgggacgctgacggcagggggcctggcgcggcttctccacagcctggggctaggccgagtacaggcgctccgcctgggacaccacggacctccagctggccgggctgcacccccagctggagacaattacacgcacagatcacaggaccctgagctgagtgtggatgtctgggctgggctgcctctgggtccctcagggtggagtgacccagaggagccgaaaggcccagcatcaccccatgggccagccccttcgggcctggacctctttcacaggcttctgttgctggaccattccttggctgaccatctgaatgaggatgtgagtctgatgatctctaggtgcggggaaggaccgtgggatttaga

SEQ ID NO: 8333 - DNA, 599 bp, Canis familiaris
  misc_feature (1)..(599): n = a or c or g or t
tgnnagtatgtcacatnnnctgacctcacgcagatgctggacaaattggggannnngtatgagtgttatgaccttctgtccaccatggacatatctgattgttttactgatggcaatgaaaatggagaactgctttgtgattttttgacagaaacctgcaactttaacacaacagcaccacctgatcttaaagcagaaattatgaaagatctgcaagagtctgaattcagtgtaaagaaagagggaaaggttctttttaataataatctgagtttcatagtggttgaggcataaatatcaatcatgagagtgtactcaaaaaattatattttgaataatgttgatcatttatttctgtattaaaattacaaacacatctcggtataagtagaacattgtctcatatataaaatctagaaaattccaagacattctcagatttccatgcagaatcatataggatactctttgtcttatcctatccattctccctatcaaaaggccacattcaggttaaataccacataagctagagaaatgagacaactagtttcactggcttattgacaagaaaatcttttccaatttgttgattatac

SEQ ID NO: 8334 - DNA, 525 bp, Canis familiaris
  misc_feature (1)..(525): n = a or c or g or t
cagaataagaatattcaaattgagnngcaatcatctnntgacgtgcaaaacagttnattagaagataagacttatcaaattgattctgaagagagagcttctgttgctatagcatgctctgaannagagaacagcagtgcaactgaacaagattcatatagcaactttcaggtttatcacagtcaattaaatatgtcccatcagtttagtcattttaatgttctcactcatcagacgtttttggggacaccatatgccctttcatcaagtcagcctcaagaaagtgaaaattactttttatctgcttatactcaaagcttggatagagataaatctccattaagttgggggaaaagtgattcttccaggccgttttcaaaagagaaatagtcacttttttttgaaataggttgttactggactgtttcttataagtgaattaacaatttatatttcattctctaaacaaaaggtttcttgtccttcctcaaatgtttttttttcctcttatttaaatcatgatgg

SEQ ID NO: 8335 - DNA, 560 bp, Canis familiaris
  misc_feature (1)..(560): n = a or c or g or t
aggcaggcttcgnannncnnnaatcgggctgtctacaagccagcattttaannannaaaatcttaggaaaaattctccccagttagaacctacagatttttttctatctgcccgtggtattggaatgaatggaaataacacagcagcagggaagagagtaggagaatgtactcatcacctgccacctgtgaaagcccctattcaaacaaagaagaaagcagcaaagcattgtttcctttgtgggaagaaaactggactggctactagctacgaatgcagatgtggaaacaacttctgtgcatctcatcgctatgcagaaactcacggctgcacctatgattacaagagtgcagggaggagatatttacaggaggcaaatcctgtggttaacgcacccaaacttccaaaaatctagctcctgctctgcgcctaggaatcgtattacaatgacagaagaaatattgtttagactgcattatttttgttcgactcccaaaagatttgccaaatgacaaaaacatacaatgcatactgttggagaaagaatgctactgtatttg

SEQ ID NO: 8336 - DNA, 619 bp, Canis familiaris
  misc_feature (1)..(619): n = a or c or g or t
cctgactcttgctgtgtgtnnacgcggccccgatggcagaannaatgctgatgccacgtcagacaaactgtgnnnnnnnntcagagctgcaaaagcaggacaagctcgcagctgaacaagattttttagacccccttaaaaccctgcttatctgccatctcatgctcagccttcttgcttccctcccttaaaaacaaaaaaacctctcacccttgctgtatattaaagggagcgggttgagagtcctttttccttcctgctgcatgtccttaacatgagtggaaggcacagctcctgctgcagccgctgtgaatgctgctgagatcctccctctgacgggggcggcaattttatttttgagaagaaaaaaaaaagtcatgtacatatatacataaannnntatagctatatataaagagataggggtgtttatgaaacaagggagttacgggaaaattctaactttatctgaagcacggttacacccagaacctgaggcccgagcctcggcaaacagtctggataaagtatcccttcccccagaggtgggtatcactgctggtagtgccttctatccttgtgttgccccttgtgtgtatgnnnnnggatattttctttt

SEQ ID NO: 8337 - DNA, 583 bp, Canis familiaris
  misc_feature (1)..(574): n = a or c or g or t
tncagcatcagcaagaaagcagcgccaacatcaccaacattcagctagactacagtgggatccagatgtctttccataaggagcggnnctcagcaaacatcttatttgaatttgacattgacttgagactgcccttcaataacaagattgtaaagacacatgtgtgcatgaacctcgttgtggagttctggctggagaaagatgagtttggccggagggatctggtgataggagattgccatgtggagccgagtagcatctacatgacagtcctaactgaagatatctcaccaaagatgaaacattttctccacaacttcagagggaccctggcaaaagttatcccaaacccagtagaaagtcaggtgtgtcctctaatcggtgaaatcctcagacagctggacgtgaaactgatgaaaagcctcatggaacaggctgttgctcataaattcaaccaactatgagtccagccaaccctccacacgccagacttgaacgtcttccagctacctactgatccagaaggagattccacatcttgggacnnnaagtcttccttggagtgggcctcccactcccaaaa

SEQ ID NO: 8338 - DNA, 562 bp, Canis familiaris
  misc_feature (1)..(562): n = a or c or g or t
ggaaccctttttttttttttcccaaacaaaaagagataatgttctcgaattgatggttttttcctgtgtactcccctactgctttgcttgacttttttttttttttcatgatgtattggccacgttgttaatccccaccagaatctgcaatcaaacagccgtattgctttcattctgatttatagctcacaccacatcaaagagatgttacaaatgtatttgtaaatgtcttcacttgtgattctgttcatgcttgccaaagtatttgctacttactgttattagtaataatcttctctccccagctctttgagggctactaaaatagaaatttacttctgtggataggagtatagaattttaagccaaatttaannnnnnntttatttctgcctcattttattttcatgctctgaaattcctttccagttgataaatctaaagaaatgtggaaaaatctaccctattacttattttctggacctaaattgaggcttaactacaacaccatgagagaaaaatgggaagtannnctggctttagataannnangtggtcatta

SEQ ID NO: 8339 - DNA, 492 bp, Canis familiaris
  misc_feature (1)..(492): n = a or c or g or t
tgagaagaaactgggtcagtttttagtgacattgctaatcactgaattttgttctgtattaaattaagagaatgtttcacangccataagcctgaaggttggccctgtgcacgcgcaaacagagagcaagagagatagagagagagagagagagaactgatgcagaaaacaagctctgtcntcttaactgcccaagtgaaaatcaagttcaggaaattacaatagctgttaaggaagaaaataatggtacagattcttttttctgcctgtcaaaactatttgatccgagtgaaaacaaaaaaagctacagaacctgccattagtattgtggtgtatttttaaaagatgaaaggcacattgatggacaaacaaaagtaaaaaacatggcaaaacaaacaaaaaacaaaaaaactcctatactgccctcaaaatggagtttgcaattaatgtcnnnnnngattcttctttgcaaaatcagtgatttccacattc

SEQ ID NO: 8340 - DNA, 598 bp, Canis familiaris
  misc_feature (1)..(598): n = a or c or g or t
gagaacacttagnatctacncnnngcnaatttcaggaatacaatgcagtattatttactgcagtcactatactagacattagatccccagaagttattcttcttataactgagtttgcactctttgaccaatgtttcctgatatcccctggctcccacgaaccaccattctactcttcggttctgtgagttccacttttttagatttttacatataagtgagatcatacagtattcgcccttgtgtctggcttatttcacttagtataatgccttccaggttcatctatgttgtggcaaatggcaggatttcttttcctttccctctttatcataacagaaacatgttctttcccatctagacctagcctctgaacctcagagaccataactagtgtccaagggcaatgacccaggtaagcccacaatggcaaccttgtggctgcagaagatcttgtgaggcccaattcatttccgacaatttggtgatgtgacaacttttctcccataacaaaatggaatagatagtcctgaatcaaatcctcttaccaactgtggacctttggctaccatctcatgatcctgaagnnncaaacatc

SEQ ID NO: 8341 - DNA, 548 bp, Canis familiaris
  misc_feature (1)..(548): n = a or c or g or t
gccagntnnaggccanntgtgaaaggggcccctgaccccagattgcactttatatttcagcattacccnnattttctnnnnncaaagactcaaatggcnncttnnnttggccttcccctttgtctcattntagtgaactcnnnntcacccttcaaatgttggtgtnncccctcccttcaggacgccttctcttttctccagaggccttgggagatttttgctacctccatgcactcactatcttgggnnnnnnngatgaaaaagataacagcccctgctcttnnntctggtgggggacacattgaatgtgtcatgtgatangnactatnnnnngagtgtgtccgtggtactacgaaaggactaaggaaggccccctgccctgcctcggggaaaatggaagtggcattgaagttggaccttgaaggataggtgggatctgctatggagagaagggggaaggagtatggcagacaaagaggaagctgcatatacaaaaggcactggaagatgaaacgtgaaagcatatgagacatctgnngctaatgatg

SEQ ID NO: 8342 - DNA, 426 bp, Canis familiaris
  misc_feature (1)..(426): n = a or c or g or t
agcagtcagcccagctcnnagccctggccgcccagcagcangccgccgggaaggaggnnaagnnnnntggcagagaggaagacttgccactgacagaggcagtnnggcccaaaacgccacctgtcgtaatcananctcagcttaaaactcaagaggatgaagaggagatttctaccagcccaggggttnctgagtttgtcagtgatgcctttgatgcctgtaacttaaatcaggaggatctgaggaaggaaatggagcaactggttcttgacaaaaaggaggaggagnnagccatcctagaagaagattccgcagattgggaaaaagaactgcaacaggaacttcaggaatatgaagtggtnnnnnaatcagagannngagatgnnnnnngggataagganatanannnnatgctgcannnngaaa

SEQ ID NO: 8343 - DNA, 690 bp, Canis familiaris
  misc_feature (1)..(690): n = a or c or g or t
atacttcnttgaccccagagtatctgncttatggtacnntcaagagctagcactagagaannnnctgggggcaaggagggattgcattgcttctctaactctgcccttttcagtagtgctgaaaagtagtgcttttcccttttgtacttgattttacaacaggaacgctacagagcaactttgttttcttcctttttagctcaggaaagcatgtcaggctcaaaacacctctcaggcaatttaacggacactgaatctattgttaaataaaagtgatagcaacaagttttgaagagggagtgggagataaatggtagagacagcagactggacagaaaatgatttcttggctggccgactggcagatgggagggggtgttggaaccagaatgcacttctttctggctcagccttgatccaccccataggacagccatcagagacccagtcttgaccagatgaggagagctgctgagagctaagacaggtagaacgagctggcgtccctggagttggcaacaagggtctaattactggctgtgtgtcctgtggtgggcagaaacttgaacctgctctgtaacttgagtcttcacggtggttacttaaacataaaagacggcgaaattctagtgtcctctctgaggcagtcagctgagttgagactttgagattaagatgctgttttcatgt

SEQ ID NO: 8344 - DNA, 594 bp, Canis familiaris
ggaactgaggttgacagtgacagtccccttatggggtaacaggccaggctgggggactgcaaagttaacctgtatttatttatttattctccttggggtggcctcgaggtgagccaaccccacctctctgccctgagccctgagctctggagaccccagctctgccccagcttctctggttcctctttgcggagagccccatcctgagacatgttgctggacccaaggcagttctggctctcctggcgctgacccacccaacctgtgaatgtgtccccggtcttctgcccccagccctgctttgggagggtgggtaaatagacaagagattggagccaaagcgtcagtgcccagcagagcctgccgctcgccccttgcagggcagagccctatctgcacagagctgatctggctgggctgcaggcctgcagaagactgtgtgctatgtcaggaagcggtgtctggctcaagggccaccgctccaggtctgctgggcctgctttctgcccaggaaggtgcctgcacatgaaagggaaagaaatacatatctgataagactttataaaagaattattataacaagcaaaacccagt

SEQ ID NO: 8345 - DNA, 495 bp, Canis familiaris
  misc_feature (1)..(495): n = a or c or g or t
gaggatcccagactcagcagctgggtgnggctgcangacaggngctggcctctcccagtggncttccctcaaacagaacgatagcccttgccctctggtgagcagctgacccctttctggcaccaaacccagttcacagtgtgagccagaaggacaggcaggaatgctgctcttgctcactccaggccttggtttccatggtaaccaccgcattccctgaccctgaagggaaatagctactgagacaacccagagaccttgggtcagcctgaagtggaaggaaattgtggtgtccgtcgtggtgccatcacccctccctgctctagcgacagccaggcctaatgtggcctctagtggacagctctgcatggtccagctctaggaagggtaggcggcgagtggtccacaggaggcgcaccctgaggtcctagcaccacctggtggacaagaagggcagagcggctacgggtcatgtgnnnnnntgagcctggccct

SEQ ID NO: 8346 - DNA, 605 bp, Canis familiaris
  misc_feature (1)..(605): n = a or c or g or t
ttaatttcacannagtttgtaccgtatctgtaggcatcctgtacataantctaaggggaaaactaaggaagagnacgtgggcttggggcctgccgagtcggggtggggcccacaggcagggttgggaagtgtcagagtgcttgtattttaaaacaaccaaaaagaattgtaagagtggcttgctgccaggtttccactgccattcttgggggtatacatctttgggaaaggtggtgacagggcatccgctaggctccctgtcgccctgctgctccttctgtaagaaaatgaaatattttatgcctagtactcacactcaacatttcttgtattttgtaaatcgtttttgagaatgcagaccacctcactaaatggtgaaaggaaaagctattttacttttggtctctgtgagtcacatccctctaaaggtttacatgaaaattccaactaaagatgtttgttaaaagttacacaatgtgcactattaattgaacatctttttattcagcctatacacagatctttgtttagagctctcagaattactcagataacattttgtaactgctnnnnntgctttatacgtccaccgtaaaaatggcatt

SEQ ID NO: 8347 - DNA, 85 bp, Canis familiaris
gaaatagtatatattatatgaagactatgcatttttcatgagcctttatatttcaagctctttatttaagcattgttggaatatg

SEQ ID NO: 8348 - DNA, 613 bp, Canis familiaris
  misc_feature (1)..(613): n = a or c or g or t
gtggtctcttcctccctgagcagnngcctaacccgnnaggtgggaaaggtgggcgcccaggctctgtagggtcggagtcccctgccccttctgcggcccttggcgccgtcttccagcagcttccagcaaggagctaggtggcagagtggggggggcagcccccggccttgacaccggattcggggcgtgcacatgcacttttcttgcctgagtgggaccagagcttctctgacattctccagggtagctgcaccccgagctccaggggaggggtggggcggcccgtggcctcaggcaccaggtcccgccgccccctgttgctttaacaagtagtttcgccaaaatctctcagcaggagcctgctgcgcagcttccacgctgtccttgctgtcctcgctcccctcgctcccctcgctccccggcccccaggcagaggcgggctgcagggtgtccccgggcccccggtgtggacgtggctgtccacaaggcccccccacagctgagacccaaaacaccagcgcctgagtcccactgccaccgcagtggtctgggggctgcgacctcctgcctccccaggtcccctgagtcctgcacccccagacagcagnnnnnn

SEQ ID NO: 8349 - DNA, 554 bp, Canis familiaris
  misc_feature (1)..(554): n = a or c or g or t
tcagcactgagaccatcaccctgagncagggctcncggacgtncgtcctgtnntggtctgacacagctcacatcattaatcacagggtgctcgtctctgtgaagaaagagcaaactgtgaccatcaccctggataaagacatgtccttctctgttttactccatcgcgtttggaagaagcatccagtcaatgtagactttttggggatctacgttccccccacaaacaagttttcacctaaagcccacggactcataggccagttcatgcatgagccaaagatnnntatcttcaatgaacgacccggaaaggaccccgagaagcccgaggcgagcatggaagtgaagggacatacattgattgtcaccagaggtctgcagaaagactaccgaacagatcgagtgtttggaacagacgtctcctgttggtttgtgcacaacagtgggaagggtttcatcgatggacattacaaggattactttgtgcctcagctttatagctttctcaaaaggtcttaaagattgatagctttggaaattatctgttgtatgtat

SEQ ID NO: 8350 - DNA, 652 bp, Canis familiaris
  misc_feature (1)..(652): n = a or c or g or t
gcaagtgtgcttgcagtagacgaaaatggctataccccagctttggcctgtgctcccaataaggatgtggctgattgcctagctctcattttggccaccatgatgcctgtctcatcgagtagccctttgtcatccctgacattcaatgccattaaccgttacaccaacacctcaaaaacagtcagctttgaagccttgcccatcatgaggaatgaacctagctcctattgcagtttcaacaacattggcggggaacaggagtacatatacactgatgtggacgagctcaatgactctgattctgagacctactaagaggctgagccagagatctaaatgaggagttctgacactaatgcttcagattgtgctttttcaggaaaaaaggcactttcttattcacatacaaattcaacctgagaagaaagaaagatcgcagagtgagcaaatatgagaaatgtgatgacattaggaagaagagttttaaaggcaagttttgcaaaaggaacttctagaatcttgaaatagacttgaccagaggaaaacactttgatgtcacattactttgtggaattgtttaatttggttttgcagtgccaggaataatttggnnnnntgcaccctaatctnnnnntacaagcaacactattgt

SEQ ID NO: 8351 - DNA, 481 bp, Canis familiaris
catccctggacccgggctagtggggagaggagagcctgtgctggggcctgggggctcggggagggtggatggcacaactgctgtcatctcttctcctcccctcctcttgctcctggtgctgaggctgcaccccaaccctaggagggaggggtgccacagccgctaactggctgtgctctcattcagcctgcccccctcagagggaagcggtcttgcccactgtccttttgcctccatgctgaggttggtgctgtatttccaagggatggtcctcttcaccccccctcgctctgtattaaggactagggcagtagcatgggggtgctccccagccctcctgactccctccccctgtgggggggtgggctacggtgtgataaactctctttgttctcttcccactttgtccctggtaggggctctcccacagcatctgggctgtggccttagtagaagggcaccccttcctctgtgccaagag

SEQ ID NO: 8352 - DNA, 550 bp, Canis familiaris
agcaggactgttcccatcaacctactttgggcttcgaggtgagaatttagactaatgagccctgtgtctagcttgaagatttttctgtggctctgttatgttctcaggccctggggaggtcagccaacttttctttatcatggagctaatttctagtctgtggttgagccacgccttgggacactcctcttttccattgtgccttttgaatgttggcgtctctctcaccattagcacttccacctagatgcaaactagggagttgggagaaggtactagaatgaagcactcatcattcagtcattcatctgtaacaagtgtatttgaacatcgagtttgcagagatcaggaatatgtggatcccatcttggaagagttcagaaatctagtggagagaacacatggtgcaggtgacagctgtaacacatcatgctgagcgctgcaagaggggtactagcagtgtgcgccccggagcacgggaagaaagcccacagaaccatggaaatgaggggagcctttgcagagggtgtgacaaaagtcagcttgacat

SEQ ID NO: 8353 - DNA, 519 bp, Canis familiaris
  misc_feature (1)..(519): n = a or c or g or t
ttccggctcccaaccgtccttggcctggcctgctgctcctnncctcccaccccccccccttctgcaagttcatggcctggcccgtccatccaagcccctttcctctactggcctccagaccaggatcttcctccctggctcgctctctctccctgtccctctccacgtgtccgtctcatcctccctctcctctctcacatctcccagctgggtccgctgtctgtggcgcggggcctctgctcagcccctacccaggcaagccccggggcagagggcagctgcccccaagcctggacagtcctggaggaggtcagcaggtggagacgatgcaccctgcatgcactccgcactccaaaggggagcattggccccggaaagggcccagcctcccactggagccccagccagctttcatcgtccccctctccccacgagatggctagctctcccctcccttcgccttctggcccctggtatggtgggggtttctaacgatcacacccagcttgaggaggggct

SEQ ID NO: 8354 - DNA, 629 bp, Canis familiaris
  misc_feature (1)..(629): n = a or c or g or t
gcattcagagtctttaatgggatgacttgtgttggaaaatccaagtcactggtcactgnncaatcaaccagctggtacaataggcgactgtgtggctggaccactgnnagctggagagggaagtcaagccaaaaatagtagttgtaggagtacacaaccaaactgagactcttggcagaaggctggttccaagtaaaaactgtgttatggaaaatcgtagagggaagagcaggtgaatggcagaagtcaggatgtgcacaggctgtatccttcgctgtttccattcttggtttaagatttccgttctttccaaaattttctgacgattggaactaaacatactcttaacttcgtcagcccgcctgaacctcttgagctgccgcagccgcatgtactctgattttacacgcttgcgccaacaaacaggtcccttctcagatttcttcccagtctggcccatgattattctatggattcaaatataaggatcataacctctgaacaacctaagaaataggggcaccttggtggctcagtggttgaacaactgccttcggctcagggcgtagtcccggggtcctgggattgagtcccacatcggggctccccacagggaggctgcttctccc

SEQ ID NO: 8355 - DNA, 446 bp, Canis familiaris
  misc_feature (1)..(446): n = a or c or g or t
cagcaatgtaatttnnctaattttgattggagggggangagacagacanncncctgtgtnntaatcttaataggcaagaatacttgagcttttgaccntgaatagaagcaattttttaggttcatgaagtaatccatgnnnaaggcagcctttcatgcacagaattgacacgtcccttttttcataattactctacctcccagaaactccaggcagnngttaacttcagaaactgagttccaggttctgtgaannggtcaaagcnntgtgaaaattgagaggtgaacccataaacttacnnnnnnntcattcatgtaataaatgtttagtttgtttctctgatcaatatttttaaaaaacttaagttactaaannnngtttttcnnaaatcagtctatttatgnaannnnnaatagaacttattaatannnnntcagacnnnaann

SEQ ID NO: 8356 - DNA, 493 bp, Canis familiaris
  misc_feature (1)..(493): n = a or c or g or t
acaatcagaaattgcaccgagatgacagagagcatgcaaaaagcctgggacttcacgtgaacgaggaggagcgccagcggcccgtgggagtgctcatgtcctcggtctacgggaggcgcatacaccagcccgtggagcccctgaaccgggaccacggccgtgccagccacgtgaaggctgacttctacaggaagaatgacatccccagcatcaaggcgcccagctttgggcacatttctccagcctgacgcccccgcggtggcctggaccgtgggggtagcacagatgggctgcgcctgggccttccgtccccccctcacagctcccagggagcagccctgaagctgcttgcacctgacagtgggtggggggatgggcccggtagctcctttcccctcctggggcttgtggggaagaccctggcccaagaccctgtgatgaacatctcatgtgatgcttnnnacgtgtgatcgtgtcnnntgaaatgatgcta

SEQ ID NO: 8357 - DNA, 559 bp, Canis familiaris
  misc_feature (1)..(559): n = a or c or g or t
agtgctnnngccaggtgannaacagnnggttctatgacnntcagggnnngcaaacccttttcttagaaatgctgttcaagctgatgagnnnnggcttcctgccccacaaagtggtgcaggaagtgatgagctactacacgaagaagcagcgggccctgcggctgaacccaggctggaagggccgggcccgtggccccagcggcgcggtgcgcactcacgcgagcctcaccttcttctgccaggccgcgcgcctgggcggcctctcgggcgccgagctggagcgctcactgcacagactgcacaaagcaggtgcgcgcagcccctactcccagatacctaacttggccgggcggacacccccagaagaccggacgcggaaccgagccccactccccgacctccgacttcccaagtcctgccagcccagccgccacaaactcgggtccacccagaggtccctcagcctggagttcgtgggccagccactagactctctacgcccctggaagatggctccctcccccccaactctagtgcagcagcagcccttctccccttc

SEQ ID NO: 8358 - DNA, 663 bp, Canis familiaris
  misc_feature (1)..(663): n = a or c or g or t
gctgccatcgggccatcatcaccatctgncggctcatnggcatcaaagacatgtatgccaaggtnnctgggtctgtcaacatgctcaacctcacacggggnntcttccatgggctctcccaccaggaaacccatcaacaactggctgataagaagagtctacatgtcgtagaattccgggaagaatgtggccctctgcccatcgtggttgcctccccccagggagccttgagaaaggacccagagctagaggatgaggttccagacatcaaacttgactgggaagaagtgagggctgcgcagggaatgaagcgctcagtgtggtcaaatttgaagagagctgccacctgagcttcccctggccttgtactgctgcagtagtagctggtgctgtccagcacctggagagactcagcccctcacattttggaatatcactctctttctaaaggaaaggctaaccttctttatttacaaataataaataactatagctttaatttattgagcatgtggtatataccaggaactgtgataggaacggtacatacatattttcaagactactttaaatattcatttaaactagcaaaagtccatgaattaggaagacagagcttatagcctgacccagtaaaaaataatatgcaaaataataattgct

SEQ ID NO: 8359 - DNA, 571 bp, Canis familiaris
  misc_feature (1)..(571): n = a or c or g or t
gttcatttataaatatttgatnnnnagataatccataagtattttnnggcccttctttctctatctctccctcaattccaatcccctcccctgataataatacaattaaaagattggtaaaataatacatctngacaaaaaatacaatttgttgtattttacttctgatacattaaaatgtgtatttagtttttttccttattttcagaaacctaaaagaacgtcttttatttccaaaaggataaaattggatatagcctctttagtagactctatcacagttctattgtttgctgtgttcatttgcttaatgagttgcgtgagaacagtcactgtaatgaagtgtgtgtgttgggggtggggggaagggcatgggaaatgttttatgaaaaaagaagttataagcctaatactatgaagtaacatctaatgaagttctttttaagtgcaatatatttatttctgctagaaatgtattatcgacattatgtaatatttgaagcattacatgttatttgtaaacagcttnnnattatataatacccaaaattgtacagaannncaaatgtgt

SEQ ID NO: 8360 - DNA, 653 bp, Canis familiaris
  misc_feature (1)..(653): n = a or c or g or t
agatgtaaaatatgatgtagaaattattgtgaaataanngcaagaagtgagtttaaaattctgcagatggncttatttgtgtatttgtctttttattttatctgtataatttttttgtcagatatnctggggtgaaagtcacatgatacgtgaggggaagagagtttaacatgcactaacatttctgcactgtaacgggggggcacacactcaaatccatgactgtacctacaggtaagtccacctcctcactgacagccacacactacagccgcagctaatgtgatggatacctcatgacatcttcttgcttttgtagaaactctgaaaagccaaaagacacacatatgggatatattttgaggtgatttaaatgtaaactaaaagacagcagactgcacgtccacacagttctttacgcagtgtctgaccaagaactcacaggaaggtactctaagcacttgccagtgccatgatattcaagaaccttgcagcatttctgtgccatggcttcacatgaggccagaggcatcctggacattagacctattatactgtaagaatataattataaagtgcattcatataaatgtgaggttttcttttgcttgagtggacagtagcacctgtatcattgaactcattttgtatca

SEQ ID NO: 8361 - DNA, 620 bp, Canis familiaris
  misc_feature (1)..(620): n = a or c or g or t
gacaatgtggcnntcnaagtggccaatgccatcattggccactatgactgcacttatggtggcagcacgcacctgtccagcccactggctgctgtctctgtggccaagaagctgtgccagagtttccagaccttcaacatctgctacgcagagactgggttgctgggcgcacacttngtctgcgatcgcatgaacattgatgacatgatgttcttcctgcaaggccagtggatgcgcctgtgcaccagtgccacagaaagtgaggtgctccggggcaaaaacatcctcagaaatgcactggtgtctcatctggatggcaccactcctgtgtgtgaggacattggacgcagtctcctgacctatggccggcgcatccccctggctgagtgggaaagccggattgcggaagtggatgccagtgtggtgcgtgaggtctgctccaagtacttctatgaccagtgtccagcagtggctggattgggccccattgagcagctcccagactacaaccggatccgtagcggcatgttctggctgcgtttctaggcaagaaggctgtacgggcaagagggctgggccagggttcatggtccctccccaccacaaacatgccacctcgg

SEQ ID NO: 8362 - DNA, 610 bp, Canis familiaris
  misc_feature (1)..(610): n = a or c or g or t
tcccgaagggtgctgaatgaggatgggtactcctctactatcaaggacaagattcttaccattgatgtgaaacctggtngnaggcagggcacacggatcacctttgagaaggaaggggaccagggccccaatattatcccagccgacatcatcttcatcgtaaaggagaagttacaccctcgctttcgcagggagaacgacaacctcctttttgtgaaccccattcccttgggcaaggctctaacctgctgcaccgtggaagtaaagacactagatgatcgtctgctcaacatccccatcaatgacattgtccatcccnnnnnnttcaagaaggtgccaggtgaggggatgccactacctgaggaccccacgaagaagggggatctcttcattttcttcgacatccagttccctacccgcctcacaccccagaagaagcagatgctgcgccaggcattgctgacataactctggtggctgggggctggagctggggagaaggctagctgagccttatctcattcctgcctcaggatgtgcaggggagccagcccactgcacaaatgtgaggatgggatggcatgggacttttaaactgacacaataaaga

SEQ ID NO: 8363 - DNA, 559 bp, Canis familiaris
  misc_feature (1)..(559): n = a or c or g or t
ccaggcccgaagacagcagagcctccagaagccnagcacccccgcacctccccgcccgcgcccgccgggcccctcagggcgcgcccccagcctcccaccctggcantgcatgcaaacaccacgctagnngccccttcccgcnnngggcacccnnnntccctcccccctcactcccctcctcctccgcaaggctagttccagagcccacgcccaccgctcctctcccctgcaggagagggggcggagagagggagcctagccaggcgcaggggtgggggcgggcgggcgtcccagaattccctttctccccttccccaataaagatgagggtactcaagttgtcttggtttttattttatttttttcctttttccagtacactagcttgtcttttaagaaaagggatatttaaaaaaaaaaaagaaaaaaaggacagaaaaatgttttaaaaaaacaagcaacacccacacctgtgtctgtatatagccttttagacttgtcagcttttgttgtgtagagtcgtttgatcgctgcggagagaagggagactgctgtaccg

SEQ ID NO: 8364 - DNA, 574 bp, Canis familiaris
  misc_feature (1)..(574): n = a or c or g or t
tnnatgccatccccaccagcggcntcacagtcgcagacgtccccaagcttatggacacctgccaccaggccatgaggaccacgnncttccgcatatccaagatcgcccaggagaatggggccactgcgaggcagggctcctaggcagcccagtagccgaggcctggctgaggcagggcctggctagagatgggacagaggaacctcctccctgccctgacagctgaacatcactgtgtcctactgctgaaggtcccccagctttcctctgggccccggatgcaggtcctgtccctggtcctgacgtcccccagaggaaagtctggagccttccccagaagcccatcctcatgcctcagggacccgggagcaggcctggggcccagtggggctggcggagcagggctaaactacatggcctggggcctccggacgattggccagagtctgggcctgcaggctgcatggccagccccggcccttggggagaagtgggactctggaggtgaggggcacacatcagtcttgtgcaacctggacctcaggggagcctgggagcaagcctgccagacact

SEQ ID NO: 8365 - DNA, 554 bp, Canis familiaris
  misc_feature (1)..(554): n = a or c or g or t
gaagaganctagnnncagtacactnnnagnnagatggagagnnnnaataaaggnnnntgctctgttgactcatnntgaggtgaaaagaaagaaaaaaactaaaaagtacatacagaatttcattctgaattttgtacagatggccagagtcattgagaagtcatgagactgtgctctgtatcttctgtttaagatggcaggcaacgaatggcttcttcaaggacagataccctctggagaaatagagagcatttccagtcaaccagcaatctcactgcagattcctggagattgcttatcacttgaagctgttatatctatcagcgtgtttctttattactgtagtgcagacagcagtgcctgtatgatgaagggaattttgttcagtcagcctttacagataaccagtacacaccaagagtgcacagctcctgtagagctcaagtatgtattttngcaaaagccannnnnntactcagtcaccacagccgctgtccaccatcctcctcgtcactataacttaggaaaagccgctttatttctgcctctggata

SEQ ID NO: 8366 - DNA, 638 bp, Canis familiaris
  misc_feature (1)..(638): n = a or c or g or t
aagtgaaaaagatcaagaaagccaaaagccacttgaagttaaaaaaactttccctgaccccacaaagtcaggattgtctacacagccagatgtcagcccagcagctgggcaatcgacagaaagaaccaaagaggcangacagctgcaagcatctcctgattccagagaaagacattttgaaaagcaagtactggaaggtgacagggaggtggcatttcccctacccgacaaggaaaatgcagggaagcaggtaacgggaggagtcttggaggctaaagaggagattttggaaggtcagacgccactgcaacatccaaagccagttcctgcccctgatgcaggtgtgttcaagcagaagaccacaggtctggagcctgaggggaaggacgggacggctgaagacgcgatgccaggcctgcaagagcaggacaacacaccggagcctgctcaagccgagccattcgacaacaccacgtacaggaacctccagcaccacgactacaccccgtacaccttcttagacctcaacctggacctgtccaagtaccggatgcctcagccctcttcgggtcgggagtcgcctcgccactgagctctccccttgagagagtaaacctatcggnnnntgggctacagaa

SEQ ID NO: 8367 - DNA, 590 bp, Canis familiaris
  misc_feature (1)..(590): n = a or c or g or t
angagtctgcgttccaagagatgtgccaggggctgctggannagtcggacggggaggaagagccaggcgagggcccggacacagtgccgnaggctggaggaaagcagactgaaggagcagagacatcgcccacacctgtgcgcctggccgccatggagaagaagacagagcagcagaggcggcgggagaaggccgcccagaagatgcgggtacagcaggcccaggagcgggctgcccggctccggcaccaggagctcttccggctacgcgggatcaaggcccaggtggcacggcggctggcggagctggcacggcggcgggagcagcggcgagtgcagcggctggcggaggcagacagaccccgcaggctggggcggctcaagtatcaggcccctgatgtggacgtgcagctcagctcggagctggctgactcgctcaggactctgaagcccgaaggcaacattctccgtgaccgtttcaagagcttccagaagaggaacatgattgagcctcgggagagagccaagttcaagcgcaagtacaaagtgaagctggtggaaaagcgggcgttccgcgagatccagttatag

SEQ ID NO: 8368 - DNA, 534 bp, Canis familiaris
  misc_feature (1)..(534): n = a or c or g or t
gtcagnngcagatcagttatggacagcagagctactgaagctcagacgattgtgacagctgtgggacgggtcctggtggagaaactgggactttaccaaggaatgcgtgcctcagacataaatatgcacaaagaattccaggccccaggacgtgggcactcccgccaccacaaggttctttcctccccagaacaggggagagtgatgagagagacggcctccaagcagcaagccatccccaagggccacagctgtcccaacagggccgagtggatcccaggcagggacagcagatgggaaggcccacccagggagctgggggccccaggcagacccagccagcacaggctgatgctggcaggtgcctcaggtcacattcaccgttatccaacatatagtcttcaaaaatgtgtgtcatcccatcaggcagtgtgtgctcctcacacctgtcatggtaggaaagctttacttcaagaaaaagttgagtatatgcaaagaaagccttttgtttctcatgttagcacnnnntccatg

SEQ ID NO: 8369 - DNA, 610 bp, Canis familiaris
  misc_feature (1)..(610): n = a or c or g or t
ttgtgtgatatttattgaacattttcacaaatatttatttttgtangnntanagtgaattctttgaaagtttaaagaaacttgaccaaaagacagttatagaaacactggcacttgaatgttgaatgtcatcatatgtgaaataatatatttcggggtagtgtgagcttttaatgttaagttctattaaaaaattgagtcaaattaaacagaccggcattggtgatgtagctagctataattttcagacaaagtttaagacaaaattggcaacttgaaattaaaacatgccaaggttttgataacacttgtcttaaaatattaatgaaacacttctgaatactgataatgaagtgtccacattctcaaaggttctgtgaattttgttttagttacttgtttagttttaagtgactgtctggcatatttgcaatcttcaaacatgtggttatctttgtgtattgccataattagtgacttttatattcagttttatcagtcagcaatattctcttttaagaatggatttaaagttgaatatagaccttgaacctcaagtcaccactgtaagttagtaattgcttattgtattagttttagatgctagcact

SEQ ID NO: 8370 - DNA, 585 bp, Canis familiaris
  misc_feature (1)..(585): n = a or c or g or t
agatgccgccagtccccagtgggctgagcctccaggagtttgcccgctttgtngacctggagggtgaggagcccgtggccggagtgtgcaaagaggagacaggcactgaggacgagcagggggccggagagggcagcttccagcccctgcccaccaaagccgacgccctccaggccctgggcacgctgaggaggtggctcgagtgcaacagcacctcccctgagctatttgaaaaattctacgcctgtgaggaggaggtggagcagctctgctgcttgtgaagggccccttgctgctcgcagagcctctcctcctgtttcccatggaaacgccctctctaggaaggcacactggaggctggtctctttcccgtggaaatggggctcttgtgaaagttgtagaagggagacaagcggggagaccaagtctaagctctgagagaaagttgtccaagccttgagaaagaggggtctaaaggtggggctccaggcgggggtgaagctagcgtatagtttctggacctctagggaggctgggacttgggaaggtggaattggggctttacggacaggctgatccccttga

SEQ ID NO: 8371 - DNA, 636 bp, Canis familiaris
  misc_feature (1)..(636): n = a or c or g or t
cnnaacatgcacctgcgcacgcacacaggcgagaagcccttccagtgccanntctgtngcaagaccttccgcacccaagccagcctggacaagcacaaccgcacccacaccggtgagaggcccttcagctgtgagttctgtgaacagcgcttcacggagaaggggcccctgctgaggcacgtggccagccgccaccaggagggccggccccatttctgccaaatctgcgggaagaccttcaaagccgtggagcagctgcgtgtgcatgttagaaggcacaagggggtcaggaagttcgagtgcacagagtgtggctacaagttcacccggcaggcccacctccggaggcacatggagatccacgaccgagtggagaactacaatccacggcagcgcaagctccggaacctggtcattgaggatgagaagatggtggtggtagcgctgcagccacccgctgagctggaggtgggctctgctgaggtcattgtggcatctctggctcagggcagcctggcctcccagctccctggccagagactctgtgcggaagaaagcttggggagcccgggcgtcatggagccctcactcatcatcacagcagccatccccgnnnnntgtgacacgtagccaccc

SEQ ID NO: 8372 - DNA, 577 bp, Canis familiaris
  misc_feature (1)..(577): n = a or c or g or t
gcagaagcnnaggcagatngaggccctgtatgaacttcagggcannnnggngncgggggccaggnnacggctgcccctccttcnntgaaggcttagaccagactgttcctgggacactcctggggacctgcctgctctggtcctgaagtagagtggcagcccaccctgaccctgagcaggaagactcttcccatgtctggctgggtccttagcaggttccccattgctctaggcatggattgggtccctgcttctggtcaccatttggcagctgcccccttcccccccgacccccgcagggctccacttgagacctttggggcccagcaggcccacggaggacacgcagcctgtccagagaggacccggcaggaaacacgcttgtcttggactctgaaaagcctcactcatgccttgaatcgggtcctgtgtgcatcggatgctcccatgccaggtgacttttcgttccctaccaaactatgccagggccgggcggcttcctccacttcactgtttctggagctgctttgtaacctaaggctgcagggcaagtccccgcagnnnngcacacccaggt

SEQ ID NO: 8373 - DNA, 681 bp, Canis familiaris
  misc_feature (1)..(681): n = a or c or g or t
ctttactgtgtctattgatgagattttagatttcttttatggctatcaagtgatccccggctcagtgtgtnnaaaatacaatgaaaaaggtatgcccacaggcgnngccatggtggcnttcgaatctcgggatgaagccacagctgctgtcattgacttaaatgacagacctataggctcaaggaaagtaaaacttgtcttagggtagctgttcacatcaattctttagagggtagatcttcatagtgctgtgattaatgcatccagattgttttcctagtatttccaggttagaacctgtggattgtttcaattgcatatagattggtttctataacatagagtattggttgactgtttacagaagactcactaccaggataaatattgctgtatgttacagtaaagctgtctggagagaacacaaaaatgattttggcataccattagagaaaccatttgtaaaacacaaatgaccgcataaagcttatcaaggagtctagattggtttcgttttataccatatgggatgaagaaaatagaaatgtcaatagagctcattaagggtgctcttgccagctgctgaaaaatagaagttggctactcttggaatttggtttaaagctggacagatttgctttgttatagggtcaaagctttgtctaaaagtcctcattttct

SEQ ID NO: 8374 - DNA, 549 bp, Canis familiaris
  misc_feature (1)..(549): n = a or c or g or t
ctaaaaagggnnnctgctactnnactccagaactctgttcctccagaccaagaagacattctcaaatagaaagccgtaatttggttccaccacatcctgactactacagtatagttttctctattctttcattttccccttccccattcctttattgtacataaagtaactgtgtatgtgcacaagcatattgcattttttttttttaactaaatggccaatggtatgttttgatcgacatcaaatggagatgggatgggggaaaatactgcttctgtgaaaataccccctctctccattagtggcatgctcagtcagctcttatctttatattccagtaagttattttgctctcactgtttaacaaaaaaaaaagaacaacataaaaatccttgcataccttgttcgattggagaattttaatgtttttcatttatcattgtaaaaccaaggacaattttataacttttttgtacgtagctgttacatgtagggcaatctgtctttaagtagggataaattactctaaaagaaatgaatcctagatag

SEQ ID NO: 8375 - DNA, 663 bp, Canis familiaris
  misc_feature (1)..(663): n = a or c or g or t
ggctagtgaagaangcagagcccnncaccaaagacaaaccttatcccgactgccccttcctgctactagatgtgcgagacagagattcttaccagcagtgccacattattggagcttacacttatccaattgcaactctgtctagaacaatgaacccttattcaaatgacattcttgaatataaaaatgcccacggcaaggtcatcattctgtatgatgacgacgagaggctggccagccaggcggccaccaccatgtgtgagcggggatttgaaaacctcttcatgctttctggaggtctaaaagtcttagctcagaaattcccagaaggactgattacgggttccctgccagcatcttgccagcaggcccttcctcctggctctgcccggaaacgatccagccccaaagtgccgcccccaccagctgagaacaagtggagatttactccagaagacttaaaaaagatagaatattacctggaagaggatcagggtcctacggacaatcctagccggctgagccaagctaacgcctccggaagagactccaaggctccaggcacccgcagcggtcagaccctcccggctgggggccctggcggccccccgaatgcccgttcgctcagcagtggccacctgcaaggcaaaccctggaagtaaa

SEQ ID NO: 8376 - DNA, 614 bp, Canis familiaris
  misc_feature (1)..(614): n = a or c or g or t
ctttcctctactctgcgcacctgccagagcgnntggcccctnnacgctttgactacatcggtcacagtcaccagctattccatgtgtgtgtgatcctggccacttacatgcagatnnaagccatacttctggacaagactctgaggaaggattggctcctggtcaactcccggcccctgtctttccctcagatagctggagccatacttctgtgcctcatcttcagcctcagcaacataatttatttctcagctgctgtgtatcggattcccgagccagaattacataaaaaagaaacatgattcagaccataagcttttcatgccagatgtcaacattaagctacaacatcccaaccactataagccagtggcatggtaccagtttgccaaggtctaaaatattcacaatggtgggtgtcttggaatttttgagtaggttcatgtcaataaggtatttaactggggaaatttctctggatgtgcattgattctgtattatgattttaaaatgggaagatgggttcaattaagtcctttttgggcaaatccttcacatttcattaagttttaaatttatttaaaatgggttttgcagnnctctttaaacagttg

SEQ ID NO: 8377 - DNA, 561 bp, Canis familiaris
  misc_feature (1)..(561): n = a or c or g or t
ccctgtgtaggnnaaattttcagctcctgggtttggnnagagaaaactgctgtgccgtggggctggtgaagaaagtcaaagctcagatcctgagactggctgggaacctcttgactcatgatgtcattagagtccacctctaccagaaccttcaggctgtggagttaggtattatctttcttaactaacttctatgagaactgcctttgactgaaccactaaagagcaaaggaaggatgggggtcgggtatgaggtcccagccacctaggacagatgatgtccttcaaaaacagcttgggttcccggctaaagaccctagaaaggtgaatcgaaatgttttcctcattggtttattctttccaaattcatttgcttttagttttctaagaactataaactctggctgctttccatgttctcagggcccctgggtagacagacaaagcttgatgatttcagagcagacataggccaagaaaccgtggcattgagtgtgctgagtccagacaaatgatatttatatacacatccaaatttgaagagaaaatgtatttctttag

SEQ ID NO: 8378 - DNA, 530 bp, Canis familiaris
  misc_feature (1)..(530): n = a or c or g or t
atttgcaggaagatgaagcagaggaaatngaangccctcaatcacctggtcagcttttaaaccctgctttagcccactccgtgtctgtggcatcatgtggcaatatttttagctgtggtgcagaagacggtaaggttcgaatctttagggtaacgggagttaagtgtgaacaagaactggggtttaagggacacactttgggagtatcccaggtctgctttctgccagaatcctatttgctgcttactggagggaatgatgggaagataatgttatgggatgtaagcagtgaagttgaaaaaaaacagaagagtcctacaaaacctacccacaggaagaaaactaaaagagcagcttataccaagcagagtggaaacactcatgttccagtagcaggtgaagaagaacatggcaagattataccaaagctaagtattgaacatggagaaaaggtgaactggctcttgagtacaaaaataaaggggtaccaaaatatattagtagctgatcaaactagttgtatatctgtg

SEQ ID NO: 8379 - DNA, 588 bp, Canis familiaris
  misc_feature (1)..(588): n = a or c or g or t
tannagtggtcaacgtcacgnacgncgacagtgtgtnnannnnnatggacgacgannannanntgccttccgccgannngctnnaggactggctnnaggatgtgctggcgggcgagatcaacacggaggacgacgacgaggaggaggacgacgacgatgacgatgactagcggctgtggccgccctctctctgcccgcccgcccgctgctctcctgtgctcccccttccctgcccctccctgggctcctccagggaccctgggtcaccctccatctgcatcgggcccgctgacctgaccccgactgtcacctgacagggacaggaccccctgtccccccacacgcccgcccagccgcctcactgactgtcccctgtccctcggtggccccatcccacgacggattcccccaccggtccgtgtgctctccctcgtgaccctcctctcctccgttccccccacctgcacacactcttccccacacccccaaatcctccgtccttccggccaggagggagggcaggccccgcgtcccgggccacctcgcggcaatctcttgttaatgtatttgggtcagatattgagaggc

SEQ ID NO: 8380 - DNA, 695 bp, Canis familiaris
  misc_feature (1)..(695): n = a or c or g or t
ctgnncgcccccgatagcgtangcctgctgctgtaatccgcanngcgattgcagggcactgtaccagtaaatactccttccctttctaatatcatgtaggaacgtgtctcacggcggggctgctccgcaccggcaggtcancncgtctgctcannnnngccagccctggctctccctagtnnagatgcagtctgaggacatccgtgatcctggtacggagcactcgatacagactttgtatcttttaatcagtgtagccgccgcggccgtgtgcttctgctgctctggagccggagcagtaccacttgcgtgccatctgtccccctggcgtcgagattcaagactgaatctcccctacgggacagcagccctacatccgccccccaccttcccgtgctgtgtcctgtccactactctgacagtgcccgtggcacacggccacgagtggggagacatgagcctaaaatttaacccaactgcagaccctgagagtcctttcggaggaagcctgtgtgcggtgttttaaccttataaaatggatgagcgcgaaggggaaaaaaaccccttgtaagcaggtaaacgtagaagcttcttttgtatcccaggtgtggcttcttcaacggaccaagctgcgatgcagtattgatttgacagggcctgcacttcagtgtctgtctcgaacggctccacatgat

SEQ ID NO: 8381 - DNA, 654 bp, Canis familiaris
  misc_feature (1)..(654): n = a or c or g or t
aggactgtganngtccccatgatgtcagaccctaaggccatcttacgctatggcnnngactctgatctcagctgtaagattgcccagctgcccttgaccggcagcatgagtatcatctttttcctgcctctgaaagtaacccagaacttgaccatgatagaagagagcctcacctctgagttcattcatgacatagaccgagagctgaagacaattcaagcagtcctgaccatccccaagctgaagctgagttatgaaggcgaagtcacgaagtccctgcaggaaatgaaactgcaatccttgtttgattcaccagacttcagcaagatcacaggcaaacctattaaacttacccaagtggaacatcgagctggcttcgagtggaacgaggatggggcaggcaccacccccagcccggggctccagcctacccgcctcacctttcctctggattatcacctgaaccgacctttcatctttgtgctgagagacacagacacaggggcccttctcttcataggcaaaatcctggaccccaggggcatttaatgctccggtttttaatgttccaataccctagaagaacaaaaccctcaacggatggcagatgacatattacatgaaggctgcccctacaatnnntcagtgtatact

SEQ ID NO: 8382 - DNA, 525 bp, Canis familiaris
  misc_feature (1)..(525): n = a or c or g or t
gacnngtctccagaaatcaccacctttttaatgcgacccagcccctacagtctggcagggtgacaccttcacttgctgcctgcagtgatggcctggaggctgcctgtccgtgccaggatattgggtacgaagagcagccccgaggcccgctcgatgctttcaatgggcacgaggaagcgctccagtgggactgcctcatccaccggagcattgggcatcacgtaggagcggagttcgatttgcccgccagccgcctccaggattaggactttgaagaagtgggtgggcaccgccacgtggttcttgccaatgacctgatacttcacgtaggacttgccgtcggcctccgtcctgcagacagacccagggctgtgcctccaggaagcctttcctgacctgacttccaacctatgtcagcctgtaggactgccaccctcttgcgaggcttctgggctcttctgggctcccccaggaggctgggagccnnnngcagggtagacattccnntaccctgttttcctcagg

SEQ ID NO: 8383 - DNA, 637 bp, Canis familiaris
  misc_feature (1)..(637): n = a or c or g or t
tcgcgagcatggtgcnntcagggngnntgctggtcattgaccatcgcnactatgaccacatcctcagcacaggctgtgcacccccannaaagaacatctactataagagcgacttgaccaaggacatcaccacatcagtgctgacagtgaacaacaaggcccacatggtgaccctggactatacagtgcaggtgccaggggctggtcaggatggttctcctggcttgaggtacccactgggcttggcagcgggtgaaggggggtggtgccgaggccaccagtcctcatggttgcttgggggctctgttgcagtaagttccggctgtcctactacccgcaccgtttggcttccttcacggagttgctacgagcagcctttgggggcaagtgccagcacagcgtcctgggtgacttcaagccttacaagccgggccaggcctccattccttgctattttatccatgtgctcaagaggacggactgagcgctgaacctggcctcagctcctacaaccctccacccaacatggccagccagatctctctggggaggtggggactagcagtcccatacccggcccagccccagccctgcagatcctggggtgctgggaggggcaagactgctgttgtgggtg

SEQ ID NO: 8384 - DNA, 733 bp, Canis familiaris
  misc_feature (1)..(733): n = a or c or g or t
tacagctaccagatnncacttacgcntgtggttgttacactctggtatcgtgctccagannnnnnnnngcagtctacgtatgcaacacccgtnnacatgtnnagtgtcggctgtatcttcgcagagatgtttcgtcgcnngnntctcttctgtnnaaactctgaagctgaccagttaggcaaaatctttgatctgatcgggctgcccccagaggatgactggccccgagatgtgtctctgccccgaggagccttttcccctagagggccccgtccagtacagacagtggtacctgagatggaggagtctggagcacagctgctgctggagatgctgacttttaacccacacaagcgaatctctgccttccgagccctgcagcactcttatctacaaaaggcagaaggtaacccagagtgagcagtggaatggctgcaacggtagcaagaggagagaagctgtcttttctcttcctttgaacacttgagtggagagctccccaaactaagaaggcagtcttgaccttcatctctgaggctgtggaaacaactcccactttttacagagaatattttgctgccttaatgacattccctttccacctctccttttgaggcttatccttctcctgccccctcctccccattttcatacaccaagggggtatgtcccttgttctcccctttctatcttgatattggnnnnntttttatacaggaaaaacaaaacaann

SEQ ID NO: 8385 - DNA, 588 bp, Canis familiaris
  misc_feature (1)..(588): n = a or c or g or t
gttagatccaacttgatnngtgtctnnacaatttatatacagttgggctgcatttatacagtatggtaaactaagggtgaatggttttctgaaaatgttttttctcttaatctgtttagttgtcggaaaagctatcagaagatggaactaaaaatcccagtgaaaagtcttcccagcaaaaaagcatagcttttagctctaataattctgtagcaaagccaatgcttcagaaaccagctaaagctactgctgaagagacctcttcaggaactcccaaaatagataagaaaaaagtccgtatggactgtggatacctgtctgaaaaaaaaattaatgtagaaggttggcttaaatgcactttattgcagatgtgtattcctagcattattgcatctgtgggagtcatttagtggtaattgttgcagttccaaaggatgatacataaatatgtaaatccttaatatattagattaacattttagatttctcttatagataagaaataacacatggaccagaggattcatacaggtgggagtcttgtacatacacttgtaaatgttttgtataatagtgtatatgtaaaag

SEQ ID NO: 8386 - DNA, 539 bp, Canis familiaris
  misc_feature (1)..(539): n = a or c or g or t
gatctaaatattannagaatcaattactcatttctgcgacatctcttccattcaccatgctttcctggctatctttgtaatctttgcagatccttgataaagatgatgttagcctgtcttcccccatctgattcctggactgctttaagaaaaggggaatcttgagtaatttcattaagataaatggctgttggaccttttaatttgctcagtaaatgggtcggcttactgctctgcattgataacagcttttcttaacctcctctgttagccacgcacacactccttccttgcatccaaagttttgtggttttaaaacttgtagctgataactttccaaggttacctgtattgctaataaatattactgctttctgatagtcatagtttttcctttcctttctatccataatctggcaaaattgtttccagttatgtcatggtgatgtcaggattattatnnnnnntaaaacttgcaagctaaaagttggtttgtttttgcaattataaaacagaaaaagtgacctttctcaaccttt

SEQ ID NO: 8387 - DNA, 632 bp, Canis familiaris
  misc_feature (1)..(632): n = a or c or g or t
agcagctgatcagcannttggtgcccttgctgctgaccatgcaagagggcaacgncaaggtgagccagaaatgtatgaagaccctgttccactgttcttgcttcatggcatgggaattgccgaaaagagcttatagccggaagtcctgggacaaccagcagcagacggtggccaagatatgcaagtaccttgtgactacccaccaggacagcgccttcacattcctcagccagagcctggagtatgccaagaattcccgggcctccctccggaagtactcagtcatgttcatagggtccctggtcccttgcatggagagcataatgacagaagaccgtctgaacgaagtgaaagcagctctggaagacctgagacacgacccagaagcattggtgtgcatctatgcagcccaggcccaggaccacatcctggccagctgctggcggaactcctggccgctgccgcacggggactcgtgggtgtgtgacccggtccccacgcaccgctggagccctagctgtgagaacctgcccacttcccaccagcggcgctcctggatcatgcagctgctgggttcctggaagatgtccttgnnncagtgatgtccctgnnnnnccagccctcctcagggg

SEQ ID NO: 8388 - DNA, 650 bp, Canis familiaris
  misc_feature (1)..(650): n = a or c or g or t
atgttaccaccaaatacnnnnctttcatnngtgaattactggtgtttctatacctggaatattatgtttgttttatttactggatgtttacattttgggaaggcaaacatttttgtttgttaaaaaattatttgtaatttgttgttcctaagatttttataccataacaaaacttgttcttttctcatgaatttgcagtttctaaataagacaagcaagtataaaactgggggagaacagactttattaattaaattatgtcttgatttttctaaacgagaggactatttgtaacactaaatatgggagctatttcttaacaaacttgtttggaaagattcatgttatgttgtgtattagattgctccatcttgtgtatgaagcagatttggtctttgtcttaagttcctctactttatagttgtggatgtactttgttaaaaaaaaccaacaacacacacacagaaacctacatttcatgtctttaaaaaatgtttaaatgttatcttcggaacattgcaaatgattaaaaacaaaataatgtgaaaatactacggcctaactgaattcttaatgtcacaagtgttttactttggtaatgtgcctttgatttaatttgggacacttttaaaaggatactttatttgtgt

SEQ ID NO: 8389 - DNA, 597 bp, Canis familiaris
  misc_feature (1)..(597): n = a or c or g or t
tcgcatcaacttcaacaacgcnaccagagacacggtatttgatntnnncgttcaaagagttcagcctttttatgcagctctgaaggagtttgttgacctcatgnactgtaaagaattcaagtttactttcaagatgaatccaggtgatgtgattacttttgacaactggcgcttactgcacggccgacgcagctacgaagcaggaaccgagatttcccggcacctggaaggcgcctacgccgactgggacgtagtgatgtccaggcttcggatcctaaggcagggggtccaacacagaaactgactctcccgtctgtgagctcagtaaggttccaatgactatattttgtccgatatggcaaggtggccttcctcgaccatgacccatggcctttacatactaatttctttcccgtcgaacaggtcccctctcttgaacgagttcccttcctttgtgctcatacagcgagcccactctgtagacggctgagccctgctcttcccagatagagcatctctccggctctattgtacgtatgacctaatttctcttgcctgtatatgagtctccagaatgcctacaaatagtttagtgtc

SEQ ID NO: 8390 - DNA, 613 bp, Canis familiaris
cagtaatgaccgagagcgggtccaggaatctgctgatgaactccagaagatgctgcaggaggatgagctgcgggatgcggtgctgctggtgtttgccaacaagcaggacatgcccaacgccatgcctgtgagcgagctgaccgacaagctggggctgcagcatttgcgcagccgcacgtggtatgttcaggccacctgtgccacccaaggcacaggcttgtatgatgggctcgactggctgtcccatgagctgtcaaagcgctaaccaaccaggggccggcccctgctgcccagaagctcccgcgtgcatccccgggacaaccagattcccggactcctcaggcggtgcccttccctcccactcctctcccacagacacaggcctctgctcctgctcctgcctgcatgttgtctctgtcatctgagcctggagtctcactctccgggcacggaggggtctgctctcctgcctgctcggactgtggaagggacttccagggctgaggccctttcttccagaggaggagcagggatctgggtttacttttgttttttccattttgggtgtacccttggggccaggtggggaggggaggtgagggctccgggtggt

SEQ ID NO: 8391 - DNA, 609 bp, Canis familiaris
ggaccagtctttccattgtggtggtattaaaagctgattgtcatttgcattgtctactgaaaacctttgggtggcagctaatggtgttataaaccatatgttctaatgtctttttgcagattttaaggttttgttatagtgtcagctttaatattcgcatgtgtgttaaatctctggataccgtgtaattaaattgatttcttgtgatggtgacggtgattagcgctcacttaaaatccagcgaagcaattatttcccctcttaactggaaatcatatttgtgaagtatggtgtcccttatcaacagtgtattcatgattcagttcatattttgtgtttctgtttataaattttctatagcatttgatttcacacttaatataaatccatttgatttgaatatggtggtgtgcgtgtgtgtgtgtgtgtctgtgtggtgtgtgcacactttagttccataagccttgggaagctgattctacgaatatcaaatataaacataaatgtataaggcttattttatttgcaaaatgatacatacattcctcctatttattaaatcactggctttagtgttctgtagagatatttgtagaccgatttcaaaca

SEQ ID NO: 8392 - DNA, 544 bp, Canis familiaris
  misc_feature (1)..(544): n = a or c or g or t
aacnctggctatcaagaangacattgggagaggcagnnnnagggtgggggagattggacatgggacctcccttgccacctgccctctggcttgggttccgtttccctggctggggcctgacacccagttttgcccacactgctgtgggtagggagggggcttgcagggccagcagctgttgccctgtcctttatcttcctggcctctgggcttcattcccagatcttttccttccactccacagccaaaggctatgacaaaaccactccttggccaatggcatcactcctcaggcctgtccccagctcctggggtgtgccccctgaccaatggcagagcctcaaaggccctgtcagccaatggcagctcttctcgggctcccctgggccaatgacgttgcctccagtaccctttgtccctcctctatgcgtccccattgcagagaaggggggactgggaccaaaggggtggggagaatggggagccccatttctggccctgcatctgaatgggcttcccctctcctacccacccagtttaattg

SEQ ID NO: 8393 - DNA, 626 bp, Canis familiaris
tggatgacagcaaggaattgcagcggtttaaggctgtgtctgccaagagcaaagaggacctggtgtcccagggcttcactgaattcacaatcgaggatttccacaacacgttcatggacctgatcgagcaggtggagaagcagacctctgtagctgacctgctggcctccttcaacgaccagagtacctcggactacctggtggtgtacctgcggctgctcacctccggctacctgcagcgcgagagcaagttcttcgagcacttcatcgagggcgggcggacagtcaaggagttctgccagcaggaggtggagcccatgtgcaaggagagcgaccacattcacatcatcgcactggcccaggctctgagcgtctccatccaggtggagtacatggaccgcggcgagggcggcaccaccaacccgcacatcttccccgagggctctgagcccaaggtgtaccttctctaccggcctggacactacgatatcctctacaaatagggctggccccggcctcctgctgccctgtctgccctcccctctgccgggcgctagacatgtacagaagtttttttgtggttgtaaatggtcatatttcactccctcctccactttccctgtcac

SEQ ID NO: 8394 - DNA, 706 bp, Canis familiaris
gttccagaggctcgctgtttctatggctttcaaattctcatcgagaatgtccactcagagatgtacagtttgctaatagacacttacatcagagatcccaagaaaagggaatttttatttaatgcaattgaaacaatgccatatgttaagaaaaaagcagattgggccttacgatggatagaagatagaaaatctacttttggggaaagagtcgtggcttttgctgctgtagaagggattttcttctctggatcttttgctgctatattctggctaaagaaaagaggtctcatgcctggactcactttttccaatgaactcatcagcagagatgaagggcttcactgtgactttgcttgcctgatgtttcaatacttagtaaataaaccttcagaagaaagggtcagggagatcattgttaatgctgttgaaattgagcaggagtttttaacggaagccttgccagttggcctcattggaatgaattgtgttttgatgaaacagtatatttagtttgtagctgacagattacttgtggaacttggattctcaaaggttttccaggcagaaaatccctttgattttatggaaaacatttctttagaagggaaaactaatttctttgagaaacgagttgcagagtatcaacgttttgcggttatggcagaaactacagataatgtcttcaccttggatgcagattttt

SEQ ID NO: 8395 - DNA, 609 bp, Canis familiaris
  misc_feature (1)..(609): n = a or c or g or t
aatcatctacccantaggatgaaatgaattcacataagtagnntgagtcattcatnnnnngtccaggtgacagtcccattattgggcacttaggctttatctgctgtcccgttgctgggttaggcccaagaacacctctctgtgtaatacattatcaactggagaccatagtctatgctacagccacaaaggcttccttctccctgcctggctgatcacctttccagcttttattccaacaggtggatgccacatctagagaccctggaagagtccattttctatccttgcctagtgagggtctttctgctaatttttaaaagccttcatttaaggcaagaattttaatgttttgtttatagtatatcccaagcaactgaaacataccctctaaatattgggcactcagaaatacttggtgaaggtggaactgtcaaaatgaaatctgaacatattttcccttgatactgcaaatgatcttttaggattgttcatcatatattattaatagttgacaattattgctgtgacctctacttaaagactcttgtgtttaggatattttcaaaagttgcctaaatgttcttaatattcagaattatacagtat

SEQ ID NO: 8396 - DNA, 545 bp, Canis familiaris
ccttccgaccccggtgtcccctgccgcctgtgcaagaccccccgggaccagaggggccctgagaccctgctggagcccgcgcatgtcagggtgagcatcccgctgtccgtcctccaccctccacaccagtaccgcatccaccggcgaaagagcttcgacgcctccgacacgctggccctgccccggcactgcttgctgggctgggacattttccctcccaaatccgagaagagctcagcccccaggagcctggacctctggtcctgtgtgtcctccgaggcccagcaccggaagctgcccgctgccagcccttcctacctgtgtggtcaggaccccaggcctgcgccccctgtgaagccctgaggactggccatttagaggaggatggagccgcggccaccagctgtaacccgtcttctctgttagggcatccgaggagggagccctgcccggcctcagctgcaggtgcacttaagctccggcctcctaggttgggcaggtggagggacccaggcccttgtccctcttggacagaggtggggatg

SEQ ID NO: 8397 - DNA, 517 bp, Canis familiaris
  misc_feature (1)..(517): n = a or c or g or t
gcgcgcgctcttcgcnnannagncttcnggcgnngcggagcccacgnaggcgcagcacgcatcgcagggcggccaagaaggccagggaagtatggagacggagcaccagggcaaacgcgagggtgcggaagataagggcaagagccaaggacttggtgcgttccagagccagggaggaagcgagggctaaggtgatggaggagaggaaaggacggaccctgaaggaagacaacaggcctaggacccgggaagagaggagcaggccaggcttgaagcccagggaagagaagcagcaagaccaggagaagccggtaaaacgcaccctccagaagacaaccttggtgaagactgaccgcaattctagcagtcaggggaagactcatgagccaagggctgcccgcacaaagacttccatgaaatgtgaaagtgctcggaatgcagccgggtgcctgtagggtgggagcaattgcccttcatccagacacagatgcctttcctgtaggctctaatcagagca

SEQ ID NO: 8398 - DNA, 492 bp, Canis familiaris
  misc_feature (1)..(492): n = a or c or g or t
ctagagcgnctgcccaaccccatgcgcttccccctcggcctcagtatcccctttccttacatggggcactgataacaannagctagncttgcccactcccacccttctgctcctccccaccccccaaggttctggttccatcttttcctctgttcacaaactacctctggacagttgtgttgtttttgttcaatgtttccattcttagacatctgtcattgctgctgtgaccagcgccaaatgttcatcctcattgcctcctcctgtcctgcccacatcccctcctccgagactcttaggggaagggccccagggcagagcaggctgggttaccgattaccccagtcccagggaaggtggggctctgcccctaggatgctgcagcagagtgagggggggggcctgtatagaccgtcaagggtgtaggggccaccttctccccctgttctgctggggaggaggtagtcattatttgtcccagcctggggcccc

SEQ ID NO: 8399 - DNA, 516 bp, Canis familiaris
  misc_feature (1)..(516): n = a or c or g or t
gtgaccgaggagaacttcttcgagatctgcgatgagctgggagtgaaacggccatcttctgtgaaagtatnctcaggcaaaagtgaacgcagctcctctgggctgctggagtgggaatccaagagcgatgccctggagactttgggcttcctgaatcattaccagatgaaaaacccaaatggtccatacccttacactctgaagttgtgtttctccactgctcagcacgcctcctaataggtgcccaggaagagtcccatctgagcaggaaaacatttttcctttatgctgtttgttttgtttttttgttttttgttttttttctttttttttcctttgcaaaagttcctgtattcctttttttaaatgctaggttagtgggcttaaccataacggaaacgctggaagtctggagggggaggggaaggggacctgatatctcccaagattaaccttcactttttaaagaattattgtacatgtgnnnttttnnnctgttcatacatttgtnntgcc

SEQ ID NO: 8400 - DNA, 584 bp, Canis familiaris
ccccttatgtgtatgctggggaggaatgaattcaccatgcctcccacacctgctgcattcaagagttcacatacgtctgcagtcacaaagcctacagtatcagataaaaggtcagggatggcgacagcagcagccatcacagatccaggaggaagcacaggagaaagaccatagggggtgcattcggcatgtcctaatattgttgtaagcaagggccacaagcccttcttgtcttcagagggcacttctagcacatcaggaggagctactggcttcttctcagagggagaacaaatctggtgattccaagagcagaaactactggcaagcctgtggcaaaaacagctaacagctcagtattgagacccttcattacaacctcagagtaaaggctacatgaatgaacaggatggaagccagaggtctccacccagcagtactgactctttaggaaagagcctcaaagccctgcaccacaccatggtgcagaggtggacatctcatataagactgtggaggagatcagtgtcatccaccctcacacaattcatctcaaattctctgctctaatcatatatgctctt

SEQ ID NO: 8401 - DNA, 609 bp, Canis familiaris
  misc_feature (1)..(609): n = a or c or g or t
tcctnnaccattctggagtgtgaaccagtcacatcctgttgaaagcctggaactgaagaataacctggtaatgagaccagcagcagaacatctcctcttaaagacgtgtgccttggactcatgttctgatgtgaccaatctcaaagtggaagaaacagatccctgtcattctctggcagctttcattaggaactgtttcagggcttctcccagaagtatttggtttgtactttttgctcaactcctgctaatttttcttggctgtgcagcgtgtgtgtggttaaggtaaaaccaatactacttttcatttttgaagtgcatttgtagcttctggactggtgctgccttccagagggataatgaatcatctgaactcaatgatttgaaccagaaaatgtcctagctcaacctgagtcaatctctcagcctaggactaagtcagagggcaaacaatcacaactaggattatgaactgaatcactaaatgagtttacaatttgtgtggtattcatgattgcttcttggggaaaggagtggtgagggaaatacattatcatcactcagtcctcttctaccaaaactactattggatcagattatcagtgcctg

SEQ ID NO: 8402 - DNA, 663 bp, Canis familiaris
  misc_feature (1)..(663): n = a or c or g or t
aagnngtgaagaanntngaattcaagcanggtnnacactatgtcactgcccccaaagaaggnncttttgagctttgtnnagaccgagtcctgaaactnnnnnncaatatgtacagcannnnccggcccgtngaaacgcatatgtctggagcatcaaaaaacttggcttcacgtacacaggaaagcattgttccaaaccctcttgctaaagaagagctgaatctcttggccaggctgatgggagggatggagattaagaaagccagtggccccgagccaggattccggttgaatctcttcaccaccgatgaagaggaggaacaagcggcgctcaccaggccagaggagctatcgtacgaggtgatcaacatacaggctactcaggaccagcaaaggcacgaggagctggctcgcatcatgggggagtttgaggtcaccgagcagccgaggccaagcaccagcaagggggatgacttgctggccatgatggatgagttatagctgtgccggccgagcacccccaccccgcggtccctgtggggtgggccgccccataaggaccccggggatgccccaggcagcaaaccgagcgaggctgctgctagttttctactgagtgagtggttacctcccattcctgtttgtgttgtaaagaaccatgcga

SEQ ID NO: 8403 - DNA, 659 bp, Canis familiaris
  misc_feature (1)..(659): n = a or c or g or t
tatgatgaatcagaacatccagaacannagttcaagtgtaggaacaagccaggaatcagatctggaggatggcagcaccaagtcatcttcaagcaagctgggactcatgcttgatcntagcaaaataaggagatcagagcccaagatcaagaagtctctaagtaatgaaagaannnnnaaaatgaactnnaaatctccannaaaagggctaannnnnnntttgtctcnnnatgagagaaaagaaaaatccaaggatgaaccaaaagaaaaccttgctgtgtggatcatgagtatgtatatcttttttgtgaacatactgttccatgcacacaaacacgaagaaaccctcaaggagaaaataagggaggacaggctgcattacatggccacggctcaccagagnnnnntcgaaaatgatgagctggaagcaaggctgaacagcttgaaagaggaagaggccaaaagagcagactgtgagatcgacatcaccgtgatcaaggaaccagtggatgctccatcctcaagtttcacacccagtccccctaaggaggacaccatagtgcccccatccagcaagcccgtcacaagtaagaaaaagaaaaagtagaggctactgcatttgtacacaagctccaggaacaagccgatgtaaaaggaac

SEQ ID NO: 8404 - DNA, 571 bp, Canis familiaris
  misc_feature (1)..(571): n = a or c or g or t
tttcttcttccctctccnctacatgattttccagctnnnnnnaggggnnnnnntgatctccatctttcggtgctatgagaaaatcaagccttccaaggataaaacaaaaatgatctacacagctgctgcaacagaagaaatcactccaggagctctaggaaatggcacccacaaaggggaggagtgctccccttgcacagccgcaccttcccctagtggcctagattctggtgagaaggcaattcagtgtgatcaactagagaaagcaaaagataaaaggaacaccaaagaagagtctttctccagcattggcagcagcaactatcagaactaaccagccttgcctggagggaggacaaaggagcctccatgaagagcctcacccatccaccgcttagagattggtacttgtttaaaaaaatgaagattttgttcaaggacagccttatgaaagcagaaaccaaaattgccttttgttcctgaatttccagcgttccatanccctaaagggcactcaacttttgaactaggctatngaggcttttaccctacaaccaaatatcaaagtcct

SEQ ID NO: 8405 - DNA, 722 bp, Canis familiaris
  misc_feature (1)..(722): n = a or c or g or t
gaatgcaggtgttgaaggatcattgntagttgagaaaattatgcagagtnnntcagaagnnggntatgatgctatgctnnnngattttgtgaatatggtngaaaaaggaatcattgatccaactaaggtggtaagaactgctttattggatgctgctggagtggnntctctgttaaccacggcagaagttgtagtcaccgaaattcctaaagaagagaaggacccaggaatgggtggaatgggtggaatgggaggtggtatgggaggcggcatgttctgattcctagaatagtgctttaccattcttaatgaactgtgagaggaagctcaaggctgtgttcctcaaccataacttcagagaagtcagttcaaggaaatgactgaagaaaaggctggctgatgtttaagaaaatcgctataaccatcagttactggtttcagttgacaacatataatggtttactgctgtcattgtccatgcctacagataatttattttgtatttttgaataaaaagacatttgtacattcctgataactgagtgcaagagccatgtaccaatgtactgctttcaacttaaatcactgaggcatttttactactattctgttaaaatcaggattttagtgtttgccatcaccagatgaaaagttaagcagcctttctgtggagagtaagaataattgtgtacaaagtagaaaaatatccaattatgtgacaa

SEQ ID NO: 8406 - DNA, 622 bp, Canis familiaris
  misc_feature (1)..(622): n = a or c or g or t
gctgggaaaagnnnnngatgnatgtnnacatcaaagaggtccttatccaccccaactacagcaaangcaccacagacaatgacatcgcactgctccacctggcccagcctgccatcttttcgcagaccatcgtgcccatctgcctcccagacagtggccttgcagagcgtgagctcacccaggttggccaggagaccgtggtgactggctggggctaccgcagtgagactaaaagaaaccgcacctttgtcctcaactttatcaacatccctgtggccccgcacaacgagtgcatccaggccatgtacaacatgatatctgagaacatgctgtgtgcgggcatccttggggactcacgggatgcctgtgagggggacagtggggggcctatggttacgtccttccgtggcacctggttcctggtgggcctggtgagctggggcgagggctgtgggcgcctccacaattatggcatttacactaaagtcagccgctaccttgactggatccacagccacattagaggtgaggaggcctccctcgagaaccaggtaccttagcatccctcaggcttgtgtctgaaccccagaggccactcatggagtgggggctggattgctga

SEQ ID NO: 8407 - DNA, 302 bp, Canis familiaris
  misc_feature (1)..(302): n = a or c or g or t
ccccatccctccacctctccccccctcatatctnnntatccatatttgtctccctgtccacccactcctggggggccttccccatctctcctccaggccctccagggagagggaaaggagtttgggggggtgcgttggtctctatggtttttatatataatatattaaaaaaaaattaaaaatctgtatgaaaatatcagattgcacccccctcccctctttcctggcttttgccccctttttcttgtaaaaaaaaacaaaacaaaacaaacacattttgtacagggaggggaacggggagg

SEQ ID NO: 8408 - DNA, 619 bp, Canis familiaris
  misc_feature (1)..(619): n = a or c or g or t
tnnatttttctgaaaagccaacgggctggtgtgctcagnnnnngcagatgctcctnnagcaggtacggcccngtcgcgncacgcacnnnnnntcatactcgcggcaggtggcagtggcgctttgagcgncttgcacacactgccagnctcgctgacgtncnnatcaggtccgcggctgccaacccgcaaaagtgacgcagacctaatgagacccacctctcacccttccccgagggagaagcagcacggctgcacattgcagaggcagtgctgggtttcccttctcactgatttgctggggggcagggtctacccctcaaggcacctggtagacgctgagatgttggtgtaacatctcaccaactctggcttgcagagttgcagacctgagggggcggggtgggcagggggcagcgtgccctggagcgcagcgagccagcagccgccccgctacctcctgaactaggtcaggcctgtgccaccaccgtaccctccgctacagaagttcagatgcatccttgatactttttagttttgcagcctggagcgccatgctgtttcccaaggtacattttccatgtccttctagctgcttctggcatgtatccctgggccctaa

SEQ ID NO: 8409 - DNA, 761 bp, Canis familiaris
  misc_feature (1)..(761): n = a or c or g or t
gacgaagatgacccnacagctgacgatagtagtgctgcggtgagtgannngatnnngccnntcgaaggtgatgatgacacgtcacgcatnnaagaagtcgannnngtgctgccctgagaattacttgtatatgtattcaatactttatcttcattccctctgataatatattttcaaggatgtttttctttatttttgttaacattttaagaatctgtaaggcatgacaatatagctacttaaggggaagataagatttctttttgtttgagtgtgatactgtgacgtgtaggaactaaagctcagctagtttttctttcctagtcccatgctggcttattttaaccggacaaggtaacctatgttgtaaggtgtacgtaacctaatgttagccgtgtggtctcaagtgtggattccgtagtaagaccaagtgtttttttgtcactgaggtgttctgagctgtaccttgatgtgtaaaagaagaaatactggttaaaacaactttcaccttctaggatctactttttaaatcttctgtcccttgtagttctcaactgcatgtaccaggcctctagaaactagtagtgaaactgaaccaactggatgggagtagccatggatagggcttgttttccaaagaagagcgttgtttagagtagcgagattttaagcctctttcggcgtgttgtaaagctgttcaagaagtaactccacaagttttgtgagtgaaaatgtgtagtgctcaagtcacattctgcttt

SEQ ID NO: 8410 - DNA, 571 bp, Canis familiaris
  misc_feature (1)..(571): n = a or c or g or t
tcattcatgnnaangctgccccatgacgaacagcntatctgannagctttctattcttctctgacttctgtcgaactcgttggttccaggaggtcaaacaaaatgcaggtacttctaatgggtgtacctggctgagttcttttgctcttttctcagtctcagactgagactcagaaggagccgtttcaatggagaatctttatgtaaaattgacaaacgaatggagtcagtttagtgaaagagccaggctggactactccaaagagcaggaagttatgtctggtgtcccagaaggaaatgtgaattctgttgggtatgagagggagatgctattacctgttggaaaatgtaacggagagactggcatccagggaatgcaactggcttactttgtagaagtaattcaacttgaagatgggaattaccacttaaaataccctttcagggggctcctggggtgggggggctcaggtcatgatcccacggtcctgggatggagccctgcattaggctccctgctccctgtggggagtnnacttccccctctccctnnncctgctgctccctctcc

SEQ ID NO: 8411 - DNA, 605 bp, Canis familiaris
  misc_feature (1)..(605): n = a or c or g or t
gngaaaagagggttcttctccttgtgtgtgtctcttccccctccactcctaattcttctgctctgtttgggaagaacgtggaggaaaagctgacttctgcccccactgctcttacccctactgtagtggcctttggagatgccccctgcctccccccaccaactctcttgtgtgttggagagaaggggccctcccagcacaaagttgcattcctcccccccctccgccccgccctcgttaatttattctaatttattaactctggcccgcccgatctgagaagggagcactgtgcctctcgccgcagccttgtggtgcggcctgggaggggagagggcttgggtgcggcccagttgaaggttgatcttgctgtttttgtttcttgtttttgtgtttgtgttctctggcatttgctgagagagaaaagaaatgtgagcaaagcagaaggaggtgggaaaatggatccaaaccccagtatgccctaccccaccccacgacctgtcccttagtggtgggaaccccttaccttgcaaagtgaatgtgtccccttccccaacctctagtgtatttcacagaaaacttcccaataaaactgtgnnnaannn

SEQ ID NO: 8412 - DNA, 613 bp, Canis familiaris
  misc_feature (1)..(613): n = a or c or g or t
tcnccaacgtagagactcagnnnnnngccctctccaggcccccgagccgagaacactaaacacctcccgtcccttcagcactcccgtcctcctgccccctaccccccgtccccggccgttgcttctgtatatagagaaataagttattggccgcgcccctcccatcagtccacggtactgcccggttctcccctcaccccgcccttctctagtggtaccgcccaggccttaatcatccccattccgcgcggtggtatctcccaggctctacatctctggggcggcgcctctccaaagggttccctgggctttcacgcgctcctcctggcctctgagggatgcgttgagccccaccatcgacccgcgcgccccaggacggagtgccccccccttgcccgtcctctcaccgccgggccctgcccagcatcccggccttatgcactgccccttccgccaggccccgcccggcccaggcacggcctgaccccgccccgggcaccgcctgtcgagccatcctgccacgcctcccatgcctgcagcttctcgcgaggggcagtgacggcccctgtggcaggaggggctgccccagttggggggtgaggctgtcgctctc

SEQ ID NO: 8413 - DNA, 665 bp, Canis familiaris
  misc_feature (1)..(665): n = a or c or g or t
gatgaaaaaaaatccgtcttgctgatttgctgatgaaatgtgaaagtgaaatnnaaggaccgagtgaagagcatattttttttcttttttgaggaattatcagggaagtaaggaaacctttgggagagaggactttctaagctctatttaggtgttagatctaattacttgtagattctatagtctggtgaaggtgtgggcgatgtgatgagaggtttgagaaatgggtgaaatgagatgggggatgtgtaggtcaaatcaaattaaagatgatttttttaatgtgaataaagttatgttccgatagtttgtacagaaaaaaaataataaaatggatgcccttcatgttttattgctattactaaatgtcaagattgtatgctattatgtcttgtaaatttcttttgttggtgtaaatatggaaatgccacattggttaagtgccatcatttgtaatgcagtgtgtcatttgaaaagagatttgaagaagctgacagctaaaaaacaaatgggaaacccaaggaattcttagcaattaaaaacaaactataacatcctttgttttcaaaatgaatagtgtacctttgaagcacaaagtccagtctggtatagaagcgccatgcccattccctgcctctttcataggacacttcactgccattttc

SEQ ID NO: 8414 - DNA, 541 bp, Canis familiaris
  misc_feature (1)..(541): n = a or c or g or t
gagcaccccccacccacccatnnctggtactctgaccccttcctggggttccctctgaagcaggctctagagtcagaagctgagcagaggtgccaccagccttattctgcatctctgacttgagggtcctggatgggatccctgggcgcctttgaccccatcaccaccacggtgaactccaccgtctctacctgcctgttggcggaagcatctgacatgtgatatggggaccgtccatgccttcaccccaaggccaggcccctggtgccattaccagcaccgccctacagacgggaccccacgccaggcaccaagggctacggactcctgccagaaggattgcacccttgacagagcttctctccgtgaagtggccaccccattcggtgtcagggccctggagcccccggatccctggagctcgggacattgctgtcggcacccacaacccctgtattccgaggtccacccagcaggccagcaggagactcagtgtagccaannnnnngggtccgcacgacnnnggtggattcttgtgtga

SEQ ID NO: 8415 - DNA, 555 bp, Canis familiaris
  misc_feature (1)..(555): n = a or c or g or t
gccannnnngtccccctccccccgtgtcgcagggacagtgacgcccctcgcttggggccagagctggcgctggggccgcggctcctcggagcccccggcctggggtgtgttgtgcggcccggcaattcccggtgcccggagccacggcccctgggagccctgggcacggagtccgcgtggagttccttcgtcccgcgccctccagccccgagtgccttgggcggggcagccaccctgtccccgcgcggccccgacccacagcctgagaccgtcaggcaggacccgggttgctgcctcgtgtggccgtcaccctggccggcccggagggtgggcagatggcggagcccctgcgccccaggacgccggccccggccggccggcagcatcccgctggtccagtcaaagcacagctcctcgggagccacccccaaggctgatgttgtcctgcctctcacgcatgctgcacccgctgagggagctgtgcctggggctggcccctgcgtgggcctgaggcccggagccctgctcagcgggcgggaccgcggggcccgggag

SEQ ID NO: 8416 - DNA, 681 bp, Canis familiaris
  misc_feature (1)..(681): n = a or c or g or t
gatcatagtnncttcagaaaaaacagagctcacaaccaatccagnnnnnncagaaaagaaacagatnnnagccgatccagaatcccccaagannagagagaccacnnnngatctcgaacccccagcaaggacagagaccacagnnaatctcgaacccccagcaaggacagagaccacagccaatcccgaaaccccagcaaggagaaaggccacagccgatctagaacatacagcaaggagagacgccacagccgatctcgatcccctgataaggagaacaatcctagccaatctacaatgcccagaagtctcagccagaaggattccactagcagagaacacagtcccagtcagaatggaacacctagggagacaagggaccactccccatctagattgctcagtggagccccaattccaagccaggatgataatcaaggtaatgccaccatctctaaggctgcctcacctggagagaggtcctcatcatcttcttccaagctggcatagcccccagtctcagtgggctcacgggtctctgtcatggccaggggaggggacaggagacaggagcagaggagcagctaggcagagtccctccccggccagctcttcacagccacaccttggtcacaagttctccagtgcaggacgtcggcaagtagagcgggatgctgagca

SEQ ID NO: 8417 - DNA, 604 bp, Canis familiaris
  misc_feature (1)..(604): n = a or c or g or t
cttccaaacagacagctcaaagttaaggnngcagacaggcangnnatcagcaccactgatgctgaaagacaagtagntacanctccaggcctacaggaagcaatcaatgacctcgtgaagaagtacaagctttcccgagcttttgtccggccttctggtacagaagatatcgtccgagtatatgcagaagcagactcacaggaaaatgcagatagccttgcacacgcagtgagcctggcagtatttcagctgactggaggagttggagaaccaccccaaccaggtttctgaagacaatttttatattcatgagaaactggatttttaaaaagtttttacaaaataatagtactcccattattgtgacaggttcaaacccatttgtaatcataatgtttacagtgcatcttactagattgtgcttctaaaactgattatttttcttaaacactaccacagtaattgtttagaagtaggtaagacttgttaaatttagtttttaaaaagtaaaacttacctaatttcaatctcattaatgtaaagtggggcttcactctgtggttcaattatcaactttataatacatgcagggaaaattcacgag

SEQ ID NO: 8418 - DNA, 616 bp, Canis familiaris
  misc_feature (1)..(616): n = a or c or g or t
ccccagttgctcagtagaattttccttcacaccagaagggtacagaatacagtttctccctngctgggtnntcaggaaggatggttgacatcctgcctctgcaatggccctttgtcagtctgctaatgacactgacgcacatcttgactctggagttggaacctgagcctgtgagggtgagggaggtctgaaatcagaagctttgtttgtgtgtcgatgtgactgcatgttcctggacataagtgtgtacccctgtgcttggtgagtgcacataagtgcacatgtatgtgtggagagcaggggactctggcctgaagatgctgaaggaagagacctgtccagtgcactcaagggatatgctggccctgttctgtgtccatgcagcttggattggggaggagcaggaaggagacaccttctatgctcaagcctcaggactgacctatggcttaagcacagccttcactgggtccaagctttgtgggccattctgctggtgtgtctgcaaatgtgcaaccctttccaggacagccttccttgcacaccctccttctgctcctagtacttaatcctatcaatgtgttttctctttttctttttatgtttaagcaaaact

SEQ ID NO: 8419 - DNA, 593 bp, Canis familiaris
  misc_feature (1)..(593): n = a or c or g or t
gtcatagatcttggcnncctttgggaagtcagtcgacttccattcacnntaatatactgtgaacatattattttgtnacctaataaatcagcgaacgaacatgcagatgtttggcataatgtgaactaaaattgaaatcgaaaatgttggtggccattttgtaacaagagcatagcactttatctagatgaaaactggatttcttgtctttgagatatcttgaactgtttattgctcagaacctaaataagcatgccgacgcttcatttgttcatgcttgaagtgaaatgttctacttttcactggagaagacaaaaacagggtgatcttcacgttattgttttatacaagtgacgaaaatataccttgccttgtttagaggcaaattcatatttataaatattttgtcttttttttttcctccatgaaacatatgcagtaatcacttacctggaaggtgagtatttattctgtttttaaggagacactttgcagttggagatgactgatagaagaaactgtttgtactatatcttacccatgtatctgaccacaggttgcaaagtttaaaaaaaagaaaatggttcatatct

SEQ ID NO: 8420 - DNA, 521 bp, Canis familiaris
  misc_feature (1)..(521): n = a or c or g or t
agctgcacgcagggcagggcctggcatctcctcttgtaggtggtgttggggtgccannntgagcccagctctgnnnnttcccctgnnncccnnngcctccggnnncccctcatgccccggtgggggaatnnnnngccccnnncctcctcagctgtccaccaggcagtggctgagagggagctggctctgcccggaccccgcgaccttcagaacacggccgtctgcgcccggaccccgggctgcgccgcacaccagctgcaggccctctgggtcccatgaccgtaggcagacggcgtgcccccaccggtgttgcaaggccctggggaggcatgtggtgacaaactgcagaccctgcgtggagggggacccctgaacaaagcagggaggcccacggtcagacaccaggagggactgccaggaagacgccatcccgcccagcaaccttcagacaagtgcccacgggacggccagtcccgccccctccaggggcttatgccctgagcgcctgtcccctcgacctc

SEQ ID NO: 8421 - DNA, 678 bp, Canis familiaris
  misc_feature (1)..(678): n = a or c or g or t
tcatgaacgagtaaatggattcagtgtattcaaaaaagaagaagtgatatataaatgtcaccaaggatacactttggttggggagnctagactctcttgtagnnactcacgctggtcacctgcagtccctcaatgtaaagctctgtgtctgaaaccagaaatagcccacgcaacgctgtccatggataaggatcagtatattcaatccgaaaatgtcaccatccagtgtgactctaagtataagttggttggtccccaaagtatcacttgcttagagagcagaacctggtaccccgagatgcccaagtgtgaatgggtggtccctgaaggctgtgaacatatcctcaaaggcagaaagacgatgcagtgtctccccaacccagaggatgtgaaaatggccctggagatatataaattgtctttggatattgaactactggaactacagagagacagggcaaaggaatcgactgtgcagtcaccagtctgatttccctcaaaagagggagaaaaatgtgctgccttctatacaatacagaccacttcaggtttccaactctccggtcccctttgcaccaccattcaaggcaataaatgtctagaaagaatcacttgttcacatctatgctttgtgactgtaaacttattaattatcttgtagttcatgcctttgcttct

SEQ ID NO: 8422 - DNA, 595 bp, Canis familiaris
  misc_feature (1)..(595): n = a or c or g or t
catatttagattaggnncttgantnnnaatgatttnntgcatntaaaaataaaatttgactgaaaatgtttgacattttttaaatgagttaaccaaagaagtgcanntactattccatattagtcctgcatttctctctaaattccatntnnnttaaatgttttctttttctgatttttaatacnnnagaataacttcagaattaaaagttgaatatnacnnttagggttttaatttcatagnnnatctgacatttttcctgatatgtannnnagtccattggcaaaagtgtgtgtattttccttcttatttgtaagattatatttagtgacttttttttctttgattatcaaagactcactgnangnantgctatttcttgtgcctaagaatgtttctgaacattgtatcactaatgctacttgcaaagttgagtgtacagaaaatttcttgttaatatcaagcacatgtggatgctctagggtgagactgtnnnacagaatgcgtaatttttgtccccaggaaatttgcagtgaagcaggtgctggatgggtcccctccccccccctccannannnctgttaattctgtcttc

SEQ ID NO: 8423 - DNA, 417 bp, Canis familiaris
  misc_feature (1)..(417): n = a or c or g or t
atccctcagaccaggaagccagctttccagannnttccatccnngaccctggagtnntgaggaaaaggaaattctaagattcgggggaagcgaagggagggcattgggatgaaaaggtgaggccaacagacggcaagggtcactggagagtcccagctccaaagaggtggctttcctcccagagcacgactcacaaggtaccaaagcaaatgtctccgtaatctgtgctgtcctccagtggccacctctttggggcaggtggactgaggtctctgccggtccctgagcccaccttcctcccctggacttgctgggtgactgctggtgggtgacccaccccgaggtggccgtctgaagcggccccactacttcctccctgcgtccctcccatctgagtatttaagcacccctccccct

SEQ ID NO: 8424 - DNA, 638 bp, Canis familiaris
agctcacttgcccctcagatgtatgcgcatgcacacatgtgtgcatatgagtatatatgcgtgtgtgtgcctgagcatatgtctgtcaggaaatggggcaggtttaaaattggggccgacatattccatgtgctgcggacacacacacccccctcctgtccttagctgaatgaccacagaagagctgctgcctatgggccaggaattgtagggtgtgcatgagcaaggaccagggtgcaggctggaacttgggaagagaagggagggggttgtgatctctctgcgccaatgccaggatttttcagcaggaatttattggaaacaaccacaggggattttgaacaaaccggtctggggagatcaggcctgattgaactaaaactgaagctaaaggcttgattgaacatagaatccgcctccattatggaggcagtaggacagtttggtttgttattttcttcattcctcatgtggtaaattatgggatcgtggagacaaaatcccgccagataaagcatctcatttgtaagtagtgctctatcaagtgtttttttaaaaaatgggaagcgccacctgatacttcttggaaaattggcggtcagcacccattccctgtggtatttagaaggcagcataga

SEQ ID NO: 8425 - DNA, 637 bp, Canis familiaris
  misc_feature (1)..(637): n = a or c or g or t
cagnntgccaannncaagacaggtgagccccgnntcggtagnngtagacaacagtgagctgcacacagagaccaaagaagacagaaagaatagacagaaatagacagaaatagacagaaatagacagaaagggatcctggcaggatgagaactctgttcagtaactggtgaaactacccatttttttccaaggcaccaaacctctctaataactggtggcattagtgtccattttgctacagaaataattggttcagctggataggaggggcgggcacgtggaaattctgcctagctaccactcatttggctttggaaggaaatggacaactcaggagctctttatctcctggaatagtaccaattctgctgagtggaacactctgctctgagattggagaattcagatgaagaaatccacttagccatttacagggccggacctagtgcctcctttctccttgtgaggagggagtaccatattggtatcatgggaacgagcttcatagcaatttctaggacccagccttcccagttatcatggagatacacagtgttcactccagaccccaaactccaccaccaaactggatcactgggatggctgacttcttcagggctaacctctcagaatggg

SEQ ID NO: 8426 - DNA, 600 bp, Canis familiaris
  misc_feature (1)..(600): n = a or c or g or t
aaagagatagtgctgcnnacaagnnnnntctttgaagacgagcaggatgatgtgagactgactgccatcttcttatttgagaatctggcatccctaacaggaagaaggtggaagattttttttgcggaagaaataaaaaagagcatgatttcattccttctccacctctgggatcctaatcccaagattggagccgcttgctgtgacgtcctgatcatctgcatcccttttctgggtcttcaggaactctatggggtgttagatcatctccttgatggtcaggatctaccacgggccagggatttctacaggcaattctgtgtgaaactggcaaggaaaaaccaggaaatcctgtggatcctccacacccactcattcaccttcttcagcagcaattgggagatgatccggagtgctgcagtcaagctcacagatgccatcgtcctcaatttgaccaaccgatatatgcagttattagacaaagaacaactgaccacacggctccaggcacttcggcaagacccctgtatcagtgtccagagagcagctgaagctgccttgcagaccctcctgagaaagtgtaaagagacaagcatcctt

SEQ ID NO: 8427 - DNA, 623 bp, Canis familiaris
  misc_feature (1)..(623): n = a or c or g or t
ccatcacagagctgagctnnngncgagaatacacagctgctgtnnnngccaaacaagtggcccagcaggaggcccagcgagcccagtttttggtagaaaaagcaaagcaggagcaacggcagaagattgtgcaggccgagggtgaggctgaggccgccagaatgcttggagaagccctgagcaagaaccctggctatatcaaactgcgcaagatccgggcagcccagaacatctctaagacgatcgctacatcacagaaccgtatctatctcactgctgacaacctcgtcttgaacctacaggatgaaagttttacccggggcagtgacagcctcatcaagagtaagaagtgagcctcgtgaccaggaatccgactcccagagaagttgatgtttcttccctggtgtttgaggagccagcttgaggtccagcatacacccctgtcccacccccagtatcatgtgatggccccttcctgcatctttcctcccagcccttggatgaacaaagcctgacccgtttcccccctggggaatgattttgctcctccctgtgttggccagaggtgttggggacagtgtgatttctgagtgatttcctacagtgttggttcctccctccag

SEQ ID NO: 8428 - DNA, 197 bp, Canis familiaris
cacccctaccccaagccataggggatctagccagggcttgggagaggagggagctggctctgtgacgtcgtcactcccattactgctgctgctggctggctttagccctcccgtgctccctccctctttcctactgctgtcagcgctgagtaggagggaggcccagtccccaagccctagcccccaggtctgtgtta

SEQ ID NO: 8429 - DNA, 642 bp, Canis familiaris
  misc_feature (1)..(642): n = a or c or g or t
aaaaaatnnagagcaatgaagctgcatccaaggaannagcttcccaaaaatccctgcctatgaattattacacagtattctaccaagttcaagaacaactacccagagactgttttgtggtaagtgaaggagcaaatactatggatattggacgcactgtgatccagaactaccttcctcgtcacaggcttgatgctggcacttttggaacaatgggagttggtttgggatttgccattgcagctgctatagtggcaagagatagaaacccagggaagcgggtcatttgtgtggaaggagacagtgcatttgggttttctgggatggaagtggaaaccatctgcaggtacaacttgcccattgtacttttggtggtgaataataatggaatttaccaaggttttgatgcagatagttggaaggaaatgttaaaatttggagatgctactgaagtggctcctccagtctgtcttctgccaaactcacattatgagcaggttatgactgcgtttggaggcaaagggtattttgtacaaacaccagaagaactccaaaaatcactgagggagagtttggcagacacaactaaaccttctctgatcaatatcatgattgagccgcaagccacacggaaggcccagg

SEQ ID NO: 8430 - DNA, 589 bp, Canis familiaris
  misc_feature (1)..(589): n = a or c or g or t
ggatatcgnnagtgtggtgaaagagnngggcatcgatggattgattatcaccaacaccacagtgagccgccctgccagnntnnagggtgccctgcgctctgagatcggagggctgagtgggaagccccttcgagatttatcaacccaaaccatccgggagatgtatgcactcacccaaggcggagtccccatcattggggttggcggagtcagcagtgggcaggacgcgctggagaagatccgggcaggggcctcgctggtgcagctgtacacagccctcacctaccggggcccgcctgtggtgggcatgatcaagcgggagctggaggcccttttgaaggagcagggttttaccagaatcacagatgccattggagcagatcatcggaggtgaggacgttgttggtgggaagcctgatctggaatcttcccatgaaagctggcaggnnnnnnnnnctggattgagagtggagagccacaatccacgagagccttcctccggcatgactgtaaaagccaatcatcagtgtcaccggaatcaatacaaggcttttttaaattgcttgtcagaccattaactgcattcatg

SEQ ID NO: 8431 - DNA, 627 bp, Canis familiaris
  misc_feature (1)..(627): n = a or c or g or t
gctggcggggnntgcagcagnntctctcccagtagtggnnatcgcccgcnnattaccggccgctcagncgacctgcctgcccggccttcagctttgggggtccccgccccgcctccaaggcccttgaggccccctccggccgggggttgctgcggactgagggtgcggggatccgtgcccagccgccgcttgccccggaggccaggaagctccccagccctagccccaacacctacaacatctttcctgggtgccgtctgcggagcccccgcccccccgccttctccatgagccgctcacctgcgttcaccgcctgggtcacctccgcccgctctcccggtccggctgcctaccacgtggaggattgctatgactcgcgcttcccctcagcgcctggagtggtgatccagggtgtccgaagatccaagcgccacgacacaggacccttctgcacgttgtagcacctgctgggcacagccctgggctccctgggggccttcccaggcctccctgtggaactctgggcctccaacctggccttctgactccttgggcacctttgatccacccgtctggctggctaacccttctgtgagccatggacatcgagagggtcccagctggaag

SEQ ID NO: 8432 - DNA, 611 bp, Canis familiaris
  misc_feature (1)..(611): n = a or c or g or t
cgccctactgtacntggtgtccagcaccctgctcaccagcctggctgnnnnnncctgccgccaagagctcacnnnnntctggaccggccaggccagagccaagacgcccgcccagcccgtggcggggctccatgacgccccttcatttggctctgagcagaagcaggaggagacggcagacgtccacacagccggcaagtttgagggggccaccggccacctggcaggggacttggacagcaacctggaagaggacgaggccgaggccaccaccgcatctgaggatgaggccagtggtctggatgtccacagtgatagctccgagggctggaacgatgccaacctggaccccgacgagctgcctcaggcctcccccgggtcctcggaggagctcgtgccgctgatgccaccgccctcagtgctgggccaagcccgggcccaggcccaggcccaggcccatgacactggcctgccctggatggggctccacaagaggaagggcgggaaggtgcagagaagcatgtcaacccacgcccccttgtgaaccggaaccccgagacctgtgccccaaggagtgatggcagagtactttggagcacagccacacgcag

SEQ ID NO: 8433 - DNA, 587 bp, Canis familiaris
  misc_feature (1)..(587): n = a or c or g or t
atgagaagagagtgctccagcannnagcacannnggcacatagtaatgaatcaaagatgaactgaannnnnnnnnnnnnnatttccagctatgtaaagacattcaaaatatnnnnnnntatgcttttagtaacntagtgcccaaatatggccaaaaaaacttatatgattatgaaaatgaggcataattttacatcagtacagtcatgaaaaatgaaaaataaaacatttaaagctaccaaagatataataaaactggtagagtcatatataattggtggattgtaaagactcttttagcaatcattgatggcagagttcaagggtcataaaaatggccatactatatgacttaatacttttggaatttttcctgaacaaataacagaaagagaattatgtacccatcactattcttagaagcattatctataataatgaagcattataaatagcaaccatctaattatagtcaagtagttgagtaaaatataaaatatttcttctcaaaaatatcattttaaaataatcattttaaatactttgtaccagtattcaaacagatttataatnnnncnnnngccacan

SEQ ID NO: 8434 - DNA, 683 bp, Canis familiaris
  misc_feature (1)..(683): n = a or c or g or t
gtctcccaacacttcttatgattgccacgtgtttaccaggtaatttaatgaggtgctatgtttgtgaaaaaatatcgaattcaaaaacactattgatgttgaacagcagattacactgtgtagtaagcagtccctttggtgtttttttcaaatcttcggtcattttctgattctcattcttggagttcttaaatcttagcaagtgtcaccaacattaaatactcaaagtccatttaaactttctttaaggttggagtaattgtctgtgtttgaacagatgaaataaaaataataatcaaggttagagctttgagtgtccagaaggaaaactgtactaattgtctgtcttgttttatttaggggccaccatgcccaccccgccccccgctgccgttaataacgaagattattaagtatgaatgtggccattttgttaagtttttgagactgcagttctcaacttttggttaaaggttttggctgctgtacaaatgttattttaagatatatttcgaattgtgacaacaaacattttttgtacttttttttcattggaataattttcaagtttctgcaaataggacaactgtaaatttaaagcattaagcatttattggtggataatgtatatattccccttccaagaaatgtaagtgagtgaaattgaaataaattctnnnann

SEQ ID NO: 8435 - DNA, 627 bp, Canis familiaris
  misc_feature (1)..(627): n = a or c or g or t
gnnnatgaacttgctgctctcagggcacagattgccaaaattgtgaccctgcaagaacagcaaaatctcactgcaggtgatttagaacctaccacatctgttgctgcagcaccaccctnnnnncccccacctcctccacctcccccgcccctacccccatcaggactccaccaaagtgtatctgctattgacttgataaaagagcgaagagagaaaaaagcttgtgctggaaagactctggttaagagcagtccaaagaaatctgatatgccaaatatgctagagatccttaaagatatgaatagtgtaaaactgcggtcagtaaaaaggtcagaacaggacataaagcccaaatctgtggatgccactgaccctgctgccctcatagcagaggctctgaaaaagaaatttgcttatcgatatcgaagtgatagtcaaggtgaatctgaaaaaagaattccaaaacttgcatctgaggccacctcagaaacagtgttgtttgggccacacatgttgaagtctacaggaaaaatgaaggctttaattgaaaatgcttcaacttcctaatagacagtgagccaagaaaaactatccttgttccagctgttggttagggctgtttggcta

SEQ ID NO: 8436 - DNA, 595 bp, Canis familiaris
ggcatggtatggaaaccaaagtcctgtgaaccaattcgccgagaaggccccaagtgggacccagcccggctgaatgaatctaccacctttgtgttgggatctcgagccaacaaggccctggggatggggggcaccagagggagaatctacatcaagcacccgcacctctttaagtatgcagctgacccccaggacaagcactggctggccgagcagcatcacatgcgggcaacaggggggaagatggcctacctcctcatcgaggaggacatccgggacctcgcagccagtgatgactatagaggatgcctggacttgaagttggaggagctgaaatcctttgtgctgccctcctggatggttgagaagatgcgaaagtacatggagacactacggacagagaacgagcatcgtgctgttgaagcgcctccacagacctgaccgaagccaagacccctggctacacttggcagccctcctccaaggccctggcacccacgtggcggaggccactgctgggactgcacctggatggatctcagcagcattaagctgtgcctgggctagtctgtagtgactcactacagagcacccc

SEQ ID NO: 8437 - DNA, 602 bp, Canis familiaris
  misc_feature (1)..(602): n = a or c or g or t
tacccagaatgtngagagaaccaggnnacggtgatgcccattcccannagcatcctcatggcttccaaaacatgaggttccattatgagcgcaacccagagactgatatgatgacagagattggcctagaagagctcaatggactggagatggaagtcatgaaaaggcagctgcaggtgatcaccagccgcctgcgagccctggaggaccagggcgccacctggcgccacagggaagctctgttcttcaccgtgctggtgtcggcctgcattgccaacctgtggctgtggatgcgccagtgatgcctccagcgcccgagcccctttctccttcctcttgcctttcctccctgccccactcttgctcgtgctccttccatctcccagcagcccttagcagcatcagagccattgtccacctctcccccgctggcctggggaggcctgtgctgccgggaggtcggaaaagggcagcgtcctgctggcccatcagcgctccatgatcaccatctgagagctgaaccttgccaatgcgccctcggtgtcccttccgctccatcgtctgtggcagggccctggctgcgccnnnnnagttttcttcca

SEQ ID NO: 8438 - DNA, 602 bp, Canis familiaris
  misc_feature (1)..(602): n = a or c or g or t
ctcctcactcccaagtacgtatgtatacgtgtggatacgtgtnnannnngcgtaggnccgtcgcatggacgggagaccgggcgagaccagccggnngtctcaaaaagaccttccagggacgcccgggtggctcagcgcttgagcgcctgccttcggcccagggcgcgatcctggagaccggggatcgagtcccgcatcgggccccctgcctggagcctgcttcggtctccgcctgtgtgtctgcctctcggggtctctcctgaatgaatagcacagcgcgtatactgtgtctcatgaataagtaaataaaaatctttttaaaagaatacgtgggggatagatcccagggtacgaattgcatgcctcgcctgtcaaaaagcctaaagtgtattgtatcatcacgggttgtgctgtaactttgccattactatctttgcagcaattagtagttatattgactcaaaccagtaccgttgtgaaggtgagaggaaaaactcaccaatgcgtttacttattcctaaggtgtttatagttaacggggattcctttcttttattcaaacccctccaatcaagtcggtttacaaaacatttttggatcaa

SEQ ID NO: 8439 - DNA, 663 bp, Canis familiaris
  misc_feature (1)..(663): n = a or c or g or t
cgaaggtcagctnnctctgactggnnagctaggggacgtcatgaannagtctgcccatctcgccatcagctggctccgcagcaatgcaaagaagtaccatctgacgaatgcttctggaagttttgatcttcttgacaacacagacatccatctgcacttcccagctggtgctgtcacaaaagatggaccatctgctggggttaccatagtaacctgtcttgcctcactttttagtgggcggctggtgcgttcagatgtagccatgactggagaaatcacactgagaggtcttgttcttccagtgggtgggattaaagacaaagtgctggcagcgcacagagcaggattgaagcgagtcatcattcctcagaggaacgaaaaagaccttgaagaaatcccgggcaacgtacgacaggatttaagttttgtcacagcaagctgcctggatgaagttcttaatgcagcttttgatggtggctttactgtcagcaccagacctggtctcttaaatagcaaactgtaggcccaaatctcaacttttcagaatttcaagttatgaagtgccaagaggtattgaaaaggtctttctttgttcatacccgtagaggtcagcatagtgtcccttacttgtgaatacgatcacaacagtaacaaatctcactc

SEQ ID NO: 8440 - DNA, 648 bp, Canis familiaris
  misc_feature (1)..(648): n = a or c or g or t
ccctggccccgctgggccctgcatgtagcgtnnaaggctcntgcnngnnnttcgtcacgatcggtaaatgccttgccccttggtgtagataagctgatagcgatctgttcttttggcttaatctccttcagtttggttttccctttactaaggctctttcctaccttcttcaggctgcctaggatatgtaaagagacatagcagtaatcgccagtgagaagagaaagcctgtgtcatgcatgaaggaaattgttgagggttaggtggcctccttgctcattattgttacgtgcctgggcgtgtatagacagtttagtgcccccatgcccccccacgcagttgaaacctgtataatcctgttaccaagctgtattgttgcctcctgtgaaggaaataatattacttctgttcttccccaattaattgctgttgcattattttacttgtttctgtactttttttctttgcatcgacattacagacatcgaggacctcatcaaatcaatttaaaaacgagtgtgaagggggaacaaaagtcaaaatatttttagaaggtcttaagaaacaatgcctctgtctagcatgccaacaagaatgcattgatattgtgaacatttgtgatacatgtattaataaatagannnnnnn

SEQ ID NO: 8441 - DNA, 625 bp, Canis familiaris
  misc_feature (1)..(625): n = a or c or g or t
gggcgtcnctgganntgggnaccacctccaccngcagtgaaaggggccatagcaccaagctagggcagctgtccccaactccatttcctggaatagtgttcggagcttagcacctcagtcagcacccacgtttgtctccctttaacccccgccaagcccctgggtgcttgagaagggctgtgggcggccaccaggtggccaaggtgtcctcgtcctgagatggctgtccggggccagcggggccctgctccatcctccttcccagcactcgggccataatctcagcctccaccagcacaccaggtgtccaccagcctctcgctgcctcaggtgctccgctggcccagccttcctgcccagacatctgtcattgtcaccagcagtctccaaactgggcatagcaggagggcccagcacagctctgaagggcccagaatacgcatgttgtttgttaaccggctttgctggtgtgtggtaaggctgtctccagcctcaggggcggcgtggggtgcgagacgaccagggaggagaaaaagtttgtgtctctacatccttgtgaatgtcccgtctgttttaaatacagtgcagtccattttatatgatgtgcaataaaaacaggaaggcn

SEQ ID NO: 8442 - DNA, 679 bp, Canis familiaris
  misc_feature (1)..(679): n = a or c or g or t
antaatgttatatatnnnnacacaaatgttcacttttgcatccannnnnntcgtgccttgtctctactccctcttggacctggnnagcagagacagagtcctgggactctgtatttctctagttctttggggcagggcctttgggaatgaatggggagaaacttcacctgggctggggctctaggtctgtcaccattccctcttgccttcggacagaccgttgtgaactctgtgaaggaaacggaggtgggggcttttgcatctcatcacagtaggactgaaagagaagccctgggattctcctctctctgggtgctgagccttcagctccttgttccagcccgagaactcaaggtgctaccttggttctttgtacaatgctgtgtgatctgggtgaaaccagcccttgaccttcctgcgcccctgcctcctcatcttctctctttttaaatacctgtttattccaactcttctctgaacccaagctgtgacaaagaagggccatccaccactctcattggcccctctccctggaaaacatataattacagtgtcaggtctaggaaatgaatgactgttcttccccagatccaggtatgttctggcttatttgagacctctgatttctttgaatcctgtcccttgattaagcaagtgacttggaacggnnnnngggtgc

SEQ ID NO: 8443 - DNA, 647 bp, Canis familiaris
  misc_feature (1)..(647): n = a or c or g or t
gcnngcantccggnnacntccacgnngacacnnnnnnnnccatgaaaaaggccctnnagctgttccggaatgacatcgnngccaagtacaannagctggggttccagggctaagcccctnnacgctgtcgcccccacccacgtgggccccggggccccgggggcgggcgggtctgatctcctgtagccgtgtagactttgcttctgagtgtccgctttgttgatgagaagtgggcgggagaggctgtgcagggtggcttcgcgggcctggggcctgggccccttgtggagggtcaccgccccgggggccgggaagagtgtggccctttgctcactgtggcccacagagttctggtcacacttctcctctctcctaaactccagcccaatccctccaacctcctcaaactcaaccacaccttcaccctcccctctgatcccaaatccaagccataaaccaaggcccggccataagaacgctctgatccatcactgccccccagtgtccatctgtaatgaaaaagaggtctggacagagtgggccagccaccccccagcccgagggaggcgacgtggatctggaacataagtgtgccttttctcagcgaatggagtgactcacctggttttaataaaagacccnnnnnn

SEQ ID NO: 8444 - DNA, 548 bp, Canis familiaris
  misc_feature (1)..(548): n = a or c or g or t
gtcttcttccatgatgtgaacctcctcccagaggatganngcaacctctacatctgtgacatcttcccagcccatgtgtctgtggccattgacaagttcaannnnaagctaccctaccacggctaccttgggggcgtgtttgctctgcgccccactcactacctgaggataaacggcttccccaactcgtactggtactgggatcatgaggaccatgacatcgctgctaggctgcaactgagcgggatgctactctcacgaccccatctgctctttggccgctaccacatgctagaggggcaggaccccagccaccagcaaagcccccagaggcactgctggcatcgtcctgtgaggatggttgaacagtgttcacccaacagaataccatgcaaccagatgcagcacgaaaagaacaagtctctccctgtatccagtgttttcctgttgaggaaagccccatgctgtgcaggattattttgcttctgctgattcctcactgcacggctggcatcttcccgcaggtcttctgaaatgcaacaccagga

SEQ ID NO: 8445 - DNA, 384 bp, Canis familiaris
  misc_feature (1)..(384): n = a or c or g or t
tgtctgagcctgaatgcagtaggttccgtatcaagctgtggtgtcaaagcttcannaaggattttactctttggttccttctcccttccctgaaccttccccctctcttcaccccaatccgtcagtatcttagtaatttggcctctacactctagtaaaagctgatttggtttgttcactctctgaaggactgttagccagatttcaaaattattttatagccaaagttttaacaacatctattctattatttagacttttaacacgtaaagctatttctactggtttctgcccttgttctttcctttttaaaaaagaaaatgtattttccatttggtaccatagtgtgagatgctgggaaccatgactgtaaaacatgctatg

SEQ ID NO: 8446 - DNA, 547 bp, Canis familiaris
  misc_feature (1)..(547): n = a or c or g or t
agaaaangtantgtcnacccagaatnctatacccagtgaaaatnnnnntcaggaatgaagannnnatcaagacatnctcagataaaagaaaacgaagaggatnngtcannaacagatctgctctaagtgaatgactaagaaagctgagaaaggaagaaatcttggaatatggaaggaggaaggaacaatggaaagagtcaaaatatggggcacaggaaaggagattgaattaaagctgaatgacctgaaaaacaaatgaacttggatatcagtggatattaggatgataactcttaatacaagtgccctcctgtttgtgctgtctatagaacacactgctttcttccaatgcatcagaaacccatcttttaaagaaactactcagaaatgttcttgcaccacctacttggggtacaagaatgatgttaagtgatgagtgtgtgcagcctcttctgtatcctgtcctatatccagcaattctccctctttagcaatccagccaccgtgcatctaagtttccctactcagttatagattaccctcacct

SEQ ID NO: 8447 - DNA, 317 bp, Canis familiaris
  misc_feature (1)..(317): n = a or c or g or t
tatnntcccattgnntaatatangaaatcattattttgttgagtaaatatgctgatagntaaataaggaatcatctcaagtcatctcaaagataaatgttaatagttaagaaatcatttcaaagtaataagcatcttttataaaatgcctatgaattataaaaggggaaaaagtaactttacagtggaaaaaccttgcagaataatcgaaattatcatcagtaattcaacaaatcaaaatcttgctcacttaataggatgcaatgggacgagtgtagcatcactcatgtgctatgtgatagtcttacaaagatgcac

SEQ ID NO: 8448 - DNA, 153 bp, Canis familiaris
ggaggttgcaatgcaagtgccaacacctagtatttcctcgaggcctattatctcttctttgctcccacaacctctgccaaagaatccaggggctcagccagctgcccagagctcagaatcagctatgaaaaccaaaggtcaagagacttaaca

SEQ ID NO: 8449 - DNA, 426 bp, Canis familiaris
  misc_feature (1)..(426): n = a or c or g or t
ggtacaagctgtctttnngcgagagcgtgccatcatgctgctnnngggccagaaggtggtcccacggaagacactcgcctctggctaccggtattccttcccagannngggggctgctttgaaggaagtcgtagcctaagtgggaggctcctggcagggcctgcagcctgtccttctacagaggcttgctggttacagactgaataggttcaggtactcctctgagacctgaaactatctggttcttaggggttcctcaccctgccctcctcctcattgctctgttgctccaccttatttaactgattgtccactgtctcaaggttgcagtctcctcaaattgggtccttaacctcttgactccttttaaaagaatttccaagtttggtttcccttccctacatgtcccattactatcccagttat

SEQ ID NO: 8450 - DNA, 523 bp, Canis familiaris
  misc_feature (1)..(523): n = a or c or g or t
tcnaggtctgtactnnnnngctggaggccgaggactaccccctgcnnnnagggtctgcggacctgggtgtgtgcctacacangtcctctagcggcctggacctacccatgaaggtggtggatatgttcgggtgctgtctgcccgtgtgcgctgtgaaattccgaagcttgcaggagcttgtgaaacacgaggaaaacggcctggtctttgaggatgctgaggagctggcagggcagctgcagatgcttttctcaaagtttcctgatcctgctggcaaactaaaccaattccggaagaacctccgggagtcagagctgcttcgatgggatgagagctggaagcagacggtgctgcctttggttatggacacatgaccccttggcccaaaaacagagttgagtgtggcccggttcctcttagccctggggaaacgctttagagcagcgcctcccggtggacagcagctgggatgatggctgtggaatgacattttttaatnacctggagtttgtgnnnnnnaaac

SEQ ID NO: 8451 - DNA, 574 bp, Canis familiaris
  misc_feature (1)..(574): n = a or c or g or t
ctgggnncagccaccccatgnngccccttgcgaccatgtngccaggtgaatagcagctcccctcccaaccatcctgggtggggtgtctttccagtccttgcggaggtcttctctttgtctccccatgatgggaagacagagctgagcatattatctcctctctgaagtagagagaaagtcgcccataatgggcgtgtctgtaaatattgtgacagtatttttttactgtgcttgtttctcataagggggtgggtaaaaggtaaggtgttcttgttttggggggtgggtggggcgggtgttattttatcttttctgtggatcagaaaaagcagaagccaaannnnngatgatctttgttgttcaagctgatggnaatgtctactgctccatatatttatatgtcccagcatctggaccacccttgccccctcctgtaccgtacctgtcccccgcaggcccagcttggcacacctggcccgtggggtgtgttttgtcttctgtttttctttctgcaaagacatagctaggaaagccaccgatannnnnnnagttctcagggaattgaagtgtggtt

SEQ ID NO: 8452 - DNA, 596 bp, Canis familiaris
  misc_feature (1)..(596): n = a or c or g or t
tagacatgtcattgttattttgccnngctcagagaaattttaaagaaatttagagnnnncagacagacactnntcagnngnnnnnnaggtnnnnagatgttagcacannnnacgtgggganagtnatgatacnnnnnnnatggnnnnngagtncacgtcannnnncatacgtngactgtgagaatattgacnnnnnnatatnnaaatctgtgtttgtatcccagctnnggcactttttaaactgtnncttaatcnngtctcntcannncaaagagtnncagatncttctctctaaaagatgacatcattgggctgnnagaagattaagtgaccacttacgagaaagaagctaacattatctttgggctacagaagatagtcagtaactgtcctctgaatctgaatttatatagagaaaaagttcagtgccatgctaattaaatacactttttacaatacatcactttttttatggacttaaaaaaactcatnctgaattttccattttagaaaaacaaactaaatattttcaaagctctgtaaccagtgtagtaaccagtttagtatttagtacaataagatagtcagctattttt

SEQ ID NO: 8453 - DNA, 527 bp, Canis familiaris
  misc_feature (1)..(527): n = a or c or g or t
tgggactctgtagctacagtnnnnnnnncctcaggccgaagaaactgccccccacgctcctcggggtctgatnnagnnnnngcacgggaatccagacccctcagagattaacctgatacaacatccatnngcaccgagtaaactaggattgctcagattctagactatgcacaggtacccccccancttccaccagggttgcccatttcgtggaccaagggggtggggggaacttcttcaggtcctcgacttgcacttggaattcctttgatacctccaagttgggacggagctggtgtggccatcaggtgctgctctgcgtcctcaccgtgccacaccttaccgggggagtccggtgacaatcttgtgctataaagcttttttttttggctgggaatttcccccctacttttatgaaaggttttttaatgattttgttttgtatgctatgctttcaaagccttaactgtcttatctagcattatctcatttgtacaaaaacacactggcgtagcacaggcaaatgt

SEQ ID NO: 8454 - DNA, 597 bp, Canis familiaris
  misc_feature (1)..(597): n = a or c or g or t
atgaagatangaaaggggtgcagctacagacccatccaaatgtnnataaaaaaacttttcactgcagaatctctaannggcnnanngaatcnnnnnnagtcatttccagtcaacagtgatgtaggggtgctaaagtggagactacagaccacagaagaatcttttattccactgacaattaactgctggccctcagagagtggaaatggctgtgatgtcaacatagaatatgagctacaagaagataatttggaactgaatgatgtgattatcaccatcccactcccatctggcgtgggcgcaccggtgattggggagattgacggtgagtatcgacacgacagccgacgaaataccttggagtggtgcctgccagtgattgatgccaaaaataagagcggcagccttgagttcagcattgctgggcagcccaacgacttcttccctgttcaagtctccttcatctccaaaagaaactactgtaacatacaggttaccaaagtgacccaggtagatggaaatagccctgtaaggttttccacagagaccactttcctggtggataagtatgaaatcctgtaattccaagaagaggga

SEQ ID NO: 8455 - DNA, 558 bp, Canis familiaris
  misc_feature (1)..(558): n = a or c or g or t
gattagatgattcctgtggttacattctttaaatgtttgaatgnnnaagntatatcttgctctgagaagtcnnncanacgtnctgacaaagcgaagagtaatatataactgaggttagtaaataaatgtatctagcctgatgggccagagaatgtaatgacattatataaatacagctcagtatgtgcacatttttctagtataattcttggatacttactttaaagagcaaagaattattcatattgttttgattttaaaattcatataactgcttatctggcaataggactctagggaaattttctgtgttgtgactctgtagagtcagttcatctgcattcttttattttcctataagtcaacatgttccccaagtttaaaagcctggattccaaaaagaatgtggaagtgttaaaatgtgtgtgattatgccaacattttaatgctgttttctgcactgctgtttttgttttaaatattttatttaaaattttctattaacattattttgcttgctcagtgctttgtgatgagtcgannnaaattcctttcaat

SEQ ID NO: 8456 - DNA, 519 bp, Canis familiaris
  misc_feature (1)..(519): n = a or c or g or t
aaaaaaacttatacagcttttccaagttgattgtttcaaaannggtgtttatttaaaataagtggtaatgtacttgaatgcattttttatgacaatgattcagtaatggtaattttactattaaagaaagtgaaaggtttagttttgttagcgtggctcagcatgtagctgtccggtgtttctcacctaagggcaaaagaaaatgatagtaataatggcggtagttgtgttttatttttgcacgtgtgctaagcataggcttgaagaggcgggtaggcaggtaaatcaatgtacttcctaaatttggagataattctccttctttaggtttgttatgcttgactgtgtccatgttcttccagtgatgattttacagttcctgatcagtttactcacggggaattaaaatgtcatgttttccaactgtaacttccctcattgaataatactgctagatgatatactaactgcaaactgcattaacccttaagccagttctgttatgctgtgatttgaact

SEQ ID NO: 8457 - DNA, 425 bp, Canis familiaris
  misc_feature (1)..(425): n = a or c or g or t
agcactttcagtactgaagcagctcagaaaaggtggttnnnnnnggcnnnnnacggctgttcctcctcgtnnnaagcctcaagggtggatggagggggccgtgggaagccccggaaacgctgccagacgcgtgaaaaccgggattatgaccacagtcgccgccagagttcactatttaccaagctcctgcagagatgcactgacaggtgcttccgttttcacgggtttccaccctctgggtgtacacctggatcacctggggagctttaaaagaaaaaaatccgtagcccgaagcccgcgccctggccgtggcgaggcggctgatctcggcagggctgggccggggcgtcgttacggccccgaggccccggtgctaaggtgctcgcaaccnnnnnnnggtcgattacagacgcccgtgacagtcc

SEQ ID NO: 8458 - DNA, 620 bp, Canis familiaris
  misc_feature (1)..(620): n = a or c or g or t
aggagggataattacgtgcccgaggtaaactttcannnnnnnctgctnntcgaggatggatcaggctcctgagaaccctnnaagggccctcngnngagggtcttgaaccacagcaccccgccgtcctctgcctgtaccatggcctcgttctcctttccgggacgtgaagtcccttctggtcttacagggccgagtcctggatgctgtgctgctcttggtacctcttggtacccgagcataaggtttctgagggcttagcttcctgctgaggttttctggaaagtggctgggtgggaaggagggaattacaaaggggaaagtagaagaattatcccgtaggcagactgctcaccttggtgggggggggggtgaccctgcctcccgttttcttccattgaagaatctgggagaagcggtggggagagagagagagagagagagaagccactgattggtctttggggcctgccctgttcttgtaggtttcagccctggatcaggagatcatcgaggtagatcctgacactaaggagatgttgaaactcttggactttggaagcctgtccaacctgcaggtcactcagcctacagttgggatgannnttaaaacaccacgggga

SEQ ID NO: 8459 - DNA, 465 bp, Canis familiaris
  misc_feature (1)..(465): n = a or c or g or t
gcatctgcacacatgtgctctcagagacatgtgtagnnnnncagaccagagnnagacannaaagaatntactnngggttcagatgggagagggaagacgtatgagaaagatgggacataaaaatgaatagatacatacacacacaaaagtgaacagacaacattactgtgctctggattaagaattttggctctggaaccagattatgtacgttttactggttcagtggaagcaaggtcttgtcaggtaacagaaccataaagaagattcattttctgaccagccaaatgggacaattacagnnnnnnngtcagaggaggtaacaaatgcatggtctgttagtaaagaaaactttggtaaaactgattagggatatgtaccttttcctggaaaatgcgcaccttgtagaatcatgcccatatcactgagcagcctgctggatacgtttgtggaacatctganctc

SEQ ID NO: 8460 - DNA, 550 bp, Canis familiaris
  misc_feature (1)..(550): n = a or c or g or t
tcactctagtttatattatatgtagcgtatattttttactaaattgtcaccttacaaacatctacaagtaaaatttcttttcttagctgtgtggcnaggcagtctgctttttacgagttggctttttgcaaatccaacccactgaagtgtttgttagcgatttggggaagcattttggtgcttctagactttgcagggaagggaagtgtcttaagtgggagtccatgctcaggttcccagccaggtttgtatccagtcctgagacaggaagcagcagcctgcagacccagagagcctccctcctgaagaggaagatgatcctggaaacaagactgttccaggtctgaagtgttgctgaatttaaaaacaaaaactcgacagcttttaaagtgtcttctatttcactgtatttttttttaacttgccacaatggtagaaaaatcttttgctgaaatgattttgatgatttttgttctctatcttgtttataaaaggaaaatatacatacttcgaattttgtgactttgtgaaggtttctttaagatgtgca

SEQ ID NO: 8461 - DNA, 523 bp, Canis familiaris
  misc_feature (1)..(523): n = a or c or g or t
aatacttaaantgtatacataatacatgaatacatcctcatgttaaaaaatgaaactnnatagctaagattatcattcccttggaaaaccacctataattcctgtggccacctcagtaactgctgtttactactacactggtgaaatgttatagggaaaaatgtaaataactgtcaggaggggaatggcctggttaaataaaatatagtataattgtgatagattactatgttggatttaaaagaaatgaactttatttatattaacattagatggatctcagaaacaatactaagtgaaaattgtaaagtgcagaaagatatatacaagttatatttatgtacaaaataatatacattttctgtgaccatatatgtatgtaaatatgtttttaaagggtcatgaaggacccataccaaactcataacagtaattatttgggggaggagtatagatgggagaggtgggaagtggtgaaggtcaaagtgatggtcaaagaaaactttagctttatcctnnncat

SEQ ID NO: 8462 - DNA, 625 bp, Canis familiaris
  misc_feature (1)..(625): n = a or c or g or t
tnncacnagatnctctgcttaagtgatagcnngatctctaactnnnctcagttttagaatagtgagaacatgacactcagttngcactaacatgggccattttgttgcccaacctcctttcccatcctccacccatcccttcannatcggtacagtgaaaggtaacttatttctcttctgcacagagcataatgtgaagttttctacttgcttttacgattttgttttccagaaacctaaaactccttcagttgatctaatttaatggcttttacgttacatatgaccattaaaacctcacttttttttgttgttgttttctcatttttgcacttagtaatgtatatttttacattgaaaaccttgttctagctgaaagtaattgagaaggaaagggtgagtgagtataatcatagcattgtaggtactaaatcgcttttcctacttaacggatggatttctaacagtcagtaatagtgacataaaggacaaaccaactcacttgtaatacctaaggcagatatttggatcagtaacttgttttttactatgcctagaataactgataaaggacataaggatagcccacagtctgtcctcaagtagaacattttgattctcttaa

SEQ ID NO: 8463 - DNA, 626 bp, Canis familiaris
  misc_feature (1)..(626): n = a or c or g or t
gctgtgannnggttatggctattgctccaactcattatatatnnnaacgnnaacgctctgtgcatcacagtnnagctgttagaaactacaacagagatgaagttcaactgccccggggacctagtgccacaccagtagattgttcactctgtggtaaaaaaggaagatatgttagactgggattatcttcatcatcttcatccagtgatacagtagaggtgatggagaaacattctcaggaatcacataactccatggacatagtagttgatcgttctcaagcttatagctattctcaaggtatgatttagtaatatgtagcaattagatttatgcaagctattaaatctgagttatttattgaactgtagtaagtccttacaggcaggggtacatactaattttatatactagaacaatattagttaaattactatcgaaagttttcttttcagttactatttgtcttgtgtcagtacctggctttgtggtagcttaactaaactaaaagatttttagtgtgacttatgttaaactgaaacctaatataccatgggtttcaagtattttaaagtattaagcatgtgaagaacctgaatcattttctttgaaatgttttattcaat

SEQ ID NO: 8464 - DNA, 599 bp, Canis familiaris
  misc_feature (1)..(599): n = a or c or g or t
gaaggtcaatatctctannnnnggctttccggccacctgagcccttttcagtagtagagcttgactggctgagcatggggctctaagaatataaagacaagacacagtcttcgctctcaaaggacttaacctgttgcaggctcaaggcagtctctgaggaaccctgaattacagatactcaaacacaatgttataaggcaatagaaataaaagatatcaattgtctctgacgggaatccccagaacccgtgactatgtcactttacatggtgcacgggactctgcagatgtgaagtaaaggatactttggagaggaggtttcttggaatacccaggtgggtccagtgtaatcaccagggtgcttataagacggagacgggaatttcagacagaatgcaatgtgatgacagaagcagagagatatttcaagatgctacgctgctagctttgaagatggaaaagggggctgcaagccaagggatgcctgtggctcctagaaggtggaaaaggcaaggaaatggattctcctctagaacctctagaaaaaacacagacctgttactttgattgtgaaagctgtttcagacttctgactttca

SEQ ID NO: 8465 - DNA, 488 bp, Canis familiaris
  misc_feature (1)..(488): n = a or c or g or t
catgcannngacagatgagcagcgagnncgccggctgnagcgngatcgnnnggctannnnnnngaagcgggccaatgaaaccccagaaaagaggcaggcccggctcatccgggagcgggaagccaagcggctcaagaggaggctggagaaaatggacatgatgttacgagcccagtttggccaggacccttctgccatggcggccttagcagccgaaatgaacttcttccagctacctgtgagtggggtggagttggacagccagctcctgggcaagatggcctttgaagagcagaacagcagctctctgcactgaacccacctgccctcccactcacccagggccctgtccttactgccagaggcaggcctgggtgtgttgcaggtggacctaaacacttcttgcatgtgggagcaggatgatggggtcagcagcaagccagcttaaggcagctctggacaagggagtaggcactccagagacctgg

SEQ ID NO: 8466 - DNA, 463 bp, Canis familiaris
  misc_feature (1)..(463): n = a or c or g or t
gttcatgtgtaagaataatggtnattatctctgctgannnnnncggatngcaatatactgcctcacctgnnngctccatttgatgtgcatatacaaaatggtatttcagtctttaaaatgagggagagagatttatatgaaattgatttcattgaaaataatttataaaatgaatgtagatctcactgaaacatatctgttctgaattataatttatttcccttcttccctcattttataagtatttttcttcctccaaacagtactatagttttcactctgccttggattccttaataagctatctaagaaaattccaagaaaaggagcaaatttaggagatacactgaaatggatgaatgagcacatgaaaaaaaaacctgtgtagagactcgtcatgtgacaggcgtaagaactattttctggaaagaagatctggagaggttgggcagacccggtgact

SEQ ID NO: 8467 - DNA, 479 bp, Canis familiaris
  misc_feature (1)..(479): n = a or c or g or t
catctccgttgaaactcntaatacagccccatcgagtaagaaaaaagacaaaaaagaacagctttcaaaagcccagaaacgtaagctggcagataaaacagatcacaaaggagaacttcctcgaggatnnaactgggtggacgtggtgaaggtatataacacttctcttctgggcttcaaaaaattgttataagtccgccatcaaataacgaaatttatatgtttcatttctttcccgcctcaacctttgaattttgctgggatgcgtatttccttttctactgcagcatttaagcaaaactggctctaaagatgatgaatagtacttggaattgaagacaagagaagagcatcctttaaaaagtaaactgggttcaaaatccttcattactcttttctgctattgaggtggctttttataaaacagaatttttttgtatgtttcttatgtaaaaaatgttttaagctgaaagttcatg

SEQ ID NO: 8468 - DNA, 371 bp, Canis familiaris
  misc_feature (1)..(371): n = a or c or g or t
ccccacacgccccaggnnncgccctgccccgccccgtcccgtctcccctcctgtggttgcgggcacagggacaaccctgggcgtggacacccccactccccgccacgcagacacgccccgtctcccgcccatcggccacttgcatgggcgccaagtggcgggcagcacagccccgtggcccctgagcccctggcacccctgcacgccgtccctgtcccgtccggaaattgttgtgagatgcacatgacgctcaccaccttgactgttttgttttttgaaagattttatttactggagagaccccgctcgttcccaggaccccgggatcagacgcttcaccgactgggccccnnnnnnccccattttaacta

SEQ ID NO: 8469 - DNA, 531 bp, Canis familiaris
  misc_feature (1)..(531): n = a or c or g or t
gngtcnggggcccagctccccgccgaggactcttgaccctgtgtttctgtgccaaagccccgtccacgccactgggcacagaggggggcnnaaggggggctgggcatcctcttaggctccctgagcctcgctgagcctctctgtctggtcttccttggagaacattcctccgggcttgggaaagaaaaccggcctccaggggaaatctggtctcttcctcctgcttctagaaccaaccgcatcagggacagactgatcccgcttaacacgagggaggggtttctgaatgctcctgcctcaatcttctccttcacattcctcaagggagtgaagccgccttaagtcctcctataaaaacaaagccacctcctaatttatctagcttggaaagcccctctcccaaagaccctcttccttcagtgaggtgtgtgtgcagaagcactgtggtcagcctgtccccagataggagatcctgtctgcttttgggccgtagccttaatcaccatcgtgtgtgtatgtgtgtgggggcat

SEQ ID NO: 8470 - DNA, 535 bp, Canis familiaris
  misc_feature (1)..(535): n = a or c or g or t
agggcatcatcgcttaggcataaaagaggtgatcatcaaagaagagacaagcagtgtnantgctaagcaggttcagaattcgggtgatcagtggagctctctgcagcatgcagctgaagttgtccagctgcctcaactaacagaaacttccagaaagccagaggcagttgttggaccagaggagtccaagacctccccaggaaaacaaagtaaaaactcctcacccaagaacatgaatattttaccacctattgtatgacctttgctgaagacaagctcttcccagaagttaaagtgaccaccataatccagtcaaaagatgcagtgcttgcaggaaagtctcagaaatgactggactccatggtagcacctaactgatgctcgtctaggaccatgaagtagaggacagagtatttctcaaaggaagggaaattgaataaacaacaggatatattcactcatccaccatcctcaaaatctcctttgtttggctttcnnntccttgtctatatgannntaattataaaacagatac

SEQ ID NO: 8471 - DNA, 439 bp, Canis familiaris
  misc_feature (1)..(439): n = a or c or g or t
cctgctaccagnnggcccagcggaccttccacacttttgatttctacaagaagcaccannnagccatgacaccagctgggctggcctttttccagtgtcgctgggatgattcagtgacccacatcttccaccagcttctggacatgcaggagcccgtgtttgagtttgtgcggccaccctcttaccaccccaaacagaagcgcttcccccaccggcagcccctgcgctacctggaccggtatagggacagtcacgaacccacctacggcatctactgagtggccagagtgccacccacctcaaagtggactgagcctctcaggccccaccagcaggaacaataaagaccactctactgggccacgctctgggctctagcccctgcctgaggcagcccctttgtggccttctcaggcccaggctttggaaatgaagagag

SEQ ID NO: 8472 - DNA, 434 bp, Canis familiaris
  misc_feature (1)..(434): n = a or c or g or t
atgtagaagtaatnngnnnncttctcnnnncanttctgataagtggaatacaggaatggcttcnntcangaatgacntcgattgccagcctgaggctttgtatgagggtgctgctcacccagctctctgctcctctgtnnaagcagcagaagtccctccacatgacccaggcagcaaaagaaggttatcaagaaggggagggggggcatagtgggactacctaaccaacccccaagctgcaacacaagaacaaaatgctcacaaatgtgttgagtgtttactaagaggtgacatggtggtgacctccacacatggattaggtccactttcttgtaggtgcccagggtagtgacttatatcccctgatcagctctctggggagaaaggctgctttggcaccagtcaaagcatttatgtccaggtgtcctgacatc

SEQ ID NO: 8473 - DNA, 460 bp, Canis familiaris
  misc_feature (1)..(460): n = a or c or g or t
gnactggagnagngataaggcaaaggcagnnntnnnnngaacaacttcggattacttnnnccttcannngctcctgaagttccnnncagntaaaggaagagatcctannnnngntaccttcggggaagatnttgngttgttgctccagntnnnaannnncnnncttgactccctgggtgttaatcctgacctgcttcctgaagattttgtcagnnnctgnnnnnnngngntggccccagtgtgtnnagtggttggagggatcctggcccaggaaattgtgaaggccctgnnncaaanngaccctcctnncaacaactnnnnnntttttgatggcangaaggggaatgggattgtggaatgcctcggccccannnnaacctaagacttggcagccctggagnnnnngacctgnnncctgcccacatgtgtgccctgtccccttcccccacgaaggcaactc

SEQ ID NO: 8474 - DNA, 618 bp, Canis familiaris
  misc_feature (1)..(618): n = a or c or g or t
atgctaccatcactgnnagtgctccttgnntagaccctttccttcactgggncngcagaatgaggatatcctcattctgtcattccttcttcatttgtatgctttattgcttctgtaaggagacacttcccttcatttactggtgggttgcccagtgatacagtggaaagaaaagatcagtgtttaactttttccctttattcattttcaagttaatgaatttggttcctactgttatcctaaggcgagcagctaggttttactttttatttttattttttgtatcattataaattcaaagatttgaatgtatttgatggcttttagctcagggtagtttttagcaatgagtttaatagtatcatcttaggtgcacggaaacttcttcaagtggctcccaagtccttttgacacaaatctttggtagtttctttgttttctgttatatgacaagatgttccaggtttattctatatgtttcctgcccagaactgcaatcagccattgttttaaaaagccctggcttattttaataggaaatgtcactaaaaccataaagacatcactatatcaagtctttctggtggaaatataaatgtttatgtacaatattcatat

SEQ ID NO: 8475 - DNA, 519 bp, Canis familiaris
  misc_feature (1)..(519): n = a or c or g or t
tggggctggggccgtgaagatgatgagttctannggcgcatcaaaggggccgggctgcagcttttccgnnnntcgnnaatcacaaccgggtacaagacatttcgccacctgcatgaccccgcctggcggaagagggaccagaaacgcatcgcagctcaaaaacaggagcaattcaaggtagaccgggagggaggcctgagcaccgtgaagtaccacgtggattcccgcacagccctgtcagtggccggggccccctgcaccgttcttaacatcctgttggactgtgacaaggctgccaccccctggtgcacctttggctgagccagcctgacaggaaggaagcctgtgccccaaggccacactgctcctcaggctcaggacatcagacccaggttcccacaccaggaggacaaccaaggtttgcagcagcccagcgcccccaatgtcctgaggcaggcctgagccgggacaggacacgcatgggcacccagatgagttgctagcaataaacagtgatgg

SEQ ID NO: 8476 - DNA, 565 bp, Canis familiaris
  misc_feature (1)..(565): n = a or c or g or t
atacaccangttcatccctcctaattattacacgcctccttatctcactgctgagccagaggtcacttaccaccggttaaggccacaggataaatttctagtgttggctactgatgggttgtgggagaccatgcataggcaggatgtggttaggattgtgggtgagtacctgaccggcatgcatcaccaacagccaatagctgttggtggctacaaggtgactctaggacagatgcatggccttttaacggaaaggagagccaagatgtcctcagtattcgaggaccagaatgcagcaacccatctcattcgtcacgcagtgggcaacaacgagttcgggactgttgatcacgagcgcctctccaaaatgcttagtcttcctgaggagcttgcccggatgtacagagacgacattaccatcatcgtggttcagttcaattctcatgtcgtaggggcgtatcaaaaccaggaatagcgagtggatattattaccctggcatttctcaaaatgaaatagatttcaagggcagacagatttgtaaaagatactaatataataannnnt

SEQ ID NO: 8477 - DNA, 475 bp, Canis familiaris
  misc_feature (1)..(475): n = a or c or g or t
cccccccacccccaaggggctcccagagccaaatccccgagccagnnccgggtggnnaaggcttccggagtggcgtcccggttcgcaggttctgctacgttccagccagcccctgactggtccccagaaaaggtgctgcgctgaggacgaggagctgctgcgagctgcaggcgctggccctggggcccggggcttcatcttggacacccgctcggcctgagccgccaaacaggcccttgtgaccggcggcggcaccgaggccagaggcgcctgccctggctgggaaccgctgcattggccacttgcagaggtgagaggtcttcagatcctctcctaggggctctcctacaggactcttcagggaaggggtatgagttgggagtgtcctccacggaccttggggactgttaagcatttccaggtagccatcctacccggtgagcgtccgcacttgcacactgcccactgagagctc

SEQ ID NO: 8478 - DNA, 664 bp, Canis familiaris
  misc_feature (1)..(664): n = a or c or g or t
agccccannnaaaccaagagcatgagatctcagggctnnaaaannncctcctccccttgggtcagaaaaagcataatgctgacagcagaggcaggcttcttgcttcattcttagaaccaccatttgcgggagnngtctcnttagcaccacttcctggggatacagagtggcgaggggaacccgccggcctgcagccacacaggcaggggacagcaagagggatcaaaacccatgcaagtccgacagagaaacgctggcatttaccttgttgctcagagtcctccgcacgaggctggaagaccgccttgctctcgctctcccttcctctcccatctcagcctgggctccagggcgtttggaatccaacaaacccaactcacttctcaccagtgtgaccttggctcccaattcccgctctctgagcctcagtttccttatctgcagaatggggggcaatgcagagcctccctcaggagctcgtggtgagaatctgccaaggcggcagacgctcagaaaagtgcttagctggcaggtcctcaataaattaagcctagtattcccacctgagccagcaattccactcctaggtacataccccaacgaaccgaaacccgatgtccaaacgaaaacctattcacgggagcactattcgcaatagacaaag

SEQ ID NO: 8479 - DNA, 120 bp, Canis familiaris
  misc_feature (1)..(120): n = a or c or g or t
gctcacaagcccnntggttggtcacagaaaagcacaaccgnnncaactccagtggcagttccttttgtttgtgtaagaagccacttgaaacagaacagcatggaaactggaagagtgacc

SEQ ID NO: 8480 - DNA, 472 bp, Canis familiaris
  misc_feature (1)..(472): n = a or c or g or t
catcttgtagccattctctttgtgttttaaaaggatgttgataangggnnttaggccaagataaataataatgttacttgagccacttgatatagctgcttggaaagcctatgtagttctttctgcatgcatttaaaattttgaaaatgcttcagctatgatatttgtttcctcaaagaaaccatggccagtagctagttgttccataggaatctcagaatagcaaatcagtaaggactccagatttgacttggtttttagctgaaagaacattctgagcaagatttacttaaataacaaaaacaggtacatgttagaaacttctcttgaagcagcacacacacacaaaaaaggccttaaagtggtcgtcttaagtgtgcatgggtgtgtatacactcctgnnnnnnttatacatttctaatttgtatttaaagacctcaaggacagtgatggtgaagtaaattcactggcc

SEQ ID NO: 8481 - DNA, 536 bp, Canis familiaris
  misc_feature (1)..(536): n = a or c or g or t
aggctgtttcatatnnaccttgtcaggctgctcccttccccattgccaaaataccaggtgccaggccctgctaggaaggaggacctagtcagaagctcctcttcatgcagggtgttttcctattagaatatcatgcccacccttcctactgttttaccacctcttggttttgcccccagcacttctactacaagtgaggtgtaacagctgggtgctgggggattcagtaaagcataatgaaatcataaaatatctacattcccacatgtgtacaagcctgcccatcctgccctcttcgcgtgggtttgtgaagggatttggaacagtgtcagctcacgtaggtactaaaataattacagaatcatgaatgaccgggtcacttcatttacatgaagaaaccaagaagacctgagaccaaattattgaaaaaaaatttttttaagctattgctgctggctaaggccatcaagactatactgacacccagccccgatcatcccttgccttggtcctnnnnnntcagggaaaattatgaa

SEQ ID NO: 8482 - DNA, 677 bp, Canis familiaris
  misc_feature (1)..(677): n = a or c or g or t
agagnacatcancttccatccagtctcttccgtggtgancaactcccgaaacaacactnntnaatgtcntgctcctgtcaacctattggtcaaaaaggatctcaaggcaagtggtagtagccagaagatgatgaaatggctggccacaaagtcacccaaaaaggaagagtccaaaacaccccaaaaggcagagtcagatgtgccccagtggtccagccagttcctacaaaagagcccattccccaccaagagaggaagtgcaggactcctggagcgatggctgaagcaggagaaggaagaggagcctgtagccaagcggcctcacagccaatatcagggactttgagagaccaagactgtgatttgctgtactcaattttgttgcttattatgtgtgtggatttgctttgggatgagatagcagtattgctttgacagttgtggattcatgagtggatagctttcctggctgcaactaggaacccacagtggagcagatggcagcctgggcagaggagggaccgcccaccatcagtaattcataggggcctttatacctggtgtgtggctggtggagccttctctccaagctagaccccgtgtggttctcagcttgacctgttactgctcacagaaggctgttttctgctcagcttttgggttctgtcagccttttg

SEQ ID NO: 8483 - DNA, 598 bp, Canis familiaris
  misc_feature (1)..(589): n = a or c or g or t
tgcatcacagaatctactcttcntgttttccaccactgtgtnagtcaaatctnnnngctcctgtggnntctgacgtatggntcgaagnnngtctgtcagtgagagagacaagcaaactcatctcttctctcaaactatgatgtagaatttatcttttgtgttttgtttgtttgttgtttgttgtgatgtctttttcttcttaagttatttgaccttcagaatagacttaggaaaggctggttcctcagcctcctggttggtgtctttttgtttttggtttttttttcaacccagaattactctggcaaaggtctgcagttgccattcgtgcatggccttatcagnnncagccactagcacttcnctgagtgccaaaaatgacgtcattgtatgtgttccttttgtgatacctaatcatgggaaagaaattacaaagaagaaagtcagattgtgttnnnagtcgttcagggttcctcacttcagtcgcgtaatattgggagatattttgtgttctgtgtaactatcttttatgattatgttaccatggtactcctaaagtatatgctttacnnggataaaaaccatatttttgtgaaaa

SEQ ID NO: 8484 - DNA, 590 bp, Canis familiaris
  misc_feature (1)..(590): n = a or c or g or t
gtgtggtagcaatgcatcaagctcagctcatttccaagattccccatatcttaaannngatgtatgatgcagatctgttggaagaagaagtcatcatcagctggtcagaaaaggccnctaagaaatatgtctcaaaagaccttgccaaagagattcgtgtcaaagcagaaccatttataaaatggttgaaggaagcagaggaagaatcttctggcggtgaagaagacgatgaagatgagaatattgaggtggtgtattcgaagactgccagtgtacctaaagttgaagctgtgaagtctgacaacaaggatgatgacattgatattgatgccatttaaaggggtgggtgcagcccagcttaacggtgtaatgctgcgaatctttctgcatcatcagccagaagtgcaacatgtatgtgcaaaagctaaaatggcttaacatcatgctacactttctactaaaaatgtattgctgtgagtggtctgtaattaagcccaacaagacatctagggagtccatacacatatcagtgagcagatatagtttgcttatttatagcatgtttctttttgaaaaattagtggtggaca

SEQ ID NO: 8485 - DNA, 402 bp, Canis familiaris
ccccccactccaccccctgaaaaatattcgggaccaatttttttaacttggcataagtttgtttttgggtgggtttacccctgcccgtaattctgtcctgagaccacgggcgaagctcatcacttctggggagaagagacacaaccacaccaatgatgttttcgtttgtaatacttgaaatttatttttttattattttgatagcagatgtgctatttatttatttaatatgtataagggagcctgaaaatagaaagctgtatagattgggtttagttgttcgttggttggtttgggggccttttacgtgtgacttaagacttctctgtgttctgtatgttgtctgaattaatgacctgggatgaggctgtgccagctttcaaacaggggatgcttttcaga

SEQ ID NO: 8486 - DNA, 412 bp, Canis familiaris
  misc_feature (1)..(412): n = a or c or g or t
gctagacgacatcagggcggctggggcngaacccaactcatctatnctgaaaccggagctcctggcagccatcgagnagctctcatgaaataaaagcagggttggctttagcccgcgtgggtctgtctcatgctctcctgcttcctccccgcccccccggaaccccctctcccgcagaactgcctgccctggtgcacagagcactgcgggcaccggggaggagcacggccgagacctgtgcctggggccgccgcctggagagggcacccggggggccgctgccgtcgtctccctgggtgcaagcccgccatagccacctgttgatgagcccccgggagggagagtaggcctgccgcgtgggccaggtggccaccctggccctgatgctgagccacggggttgctggagacag

SEQ ID NO: 8487 - DNA, 477 bp, Canis familiaris
  misc_feature (1)..(477): n = a or c or g or t
acagggcgactggcccaggaaccaatgctactcatnntgaggggcctcgactgccctcatccattccctgccctccctaggaacccctggcttttaccttcgtccatgccacttgacaaccacagggccccagtcctctgtactctggggctgggctcccagtgatgggcaaaacgcggcgaggccattttctttatgcttcagagcaaaccccttctcctggggccagaccctggatagggagttactagctctggtgatcctgttggctttgggtttcctgaccaatcccacataggtaaagctccccagttcctaggtgcggccaagggaagagcccagctgccttttctgcctgtgtccactgctttctctactcttctctggtaccatgctgaagggtcttttatgaatgatctgaaagaaactctgaaagtgatgaggggaccatctacctaaaacacagannnnnttaga

SEQ ID NO: 8488 - DNA, 514 bp, Canis familiaris
  misc_feature (1)..(514): n = a or c or g or t
aactgaacattattaaagttgctgcnaagaaataccgtgactttgacattccagcagaattctcaggagtctggcgctatcttcnnaatgcctatgcccgtgaagaatttacccacacatgtcctgaagacaaagaaattgaaaatacctatgcaagtgtggctaaacagaagagttaggacagctcttttagtagaaaaagctctcctttcacttgttatcatattataaaggcttttggaaacaagaatatggaaaatactgtttcctctgactctcttatgacaagaatgctgtgtattctgtatctaatcagtccaaagnnnnnnnnnactgtgtattttaaagttctttgtatattcaattaatctttattcccatggcataaccactgcaatcttaaatcacatggaaagcatcaagatcttttgctatttaattgaattattacaatgtgttgtgtgtaagctcaacagatggccaaagttacaaaagnnntattgctcataaactg

SEQ ID NO: 8489 - DNA, 426 bp, Canis familiaris
  misc_feature (1)..(426): n = a or c or g or t
ggcttcnnnnnngtatnnnnnntaccttctcacccacatcctgactagcactgactagcacccagagaggnnnatgatgaaaggctcaactccaggggtagtacttgaggtcgtgctatgccnnnncagaccagctgcttccatcagatttccagtgtcnnagtcgcagtttgaagcagcagcgcctctgtaaggggtaannagggnnggtgctggggtctggccntctctcacagagagaggtcagggacagggccagtattgtgggcatgtgtatatcttcccaagnnctcttacagtccctgccgggactccctgacttattttggttggttcctagtgctacttcttnnacaaaatacactttgtagaactgattagattaccttgttaatttaatgtgagttcgtgcctttnngtctcaat

SEQ ID NO: 8490 - DNA, 525 bp, Canis familiaris
  misc_feature (1)..(525): n = a or c or g or t
tgatatnntgaatttcagaacatcctttggtgggatgttcatatcngcctcgcgagcaagnctgatagtaaaggcaaaattttgtcccacggtggcaacttaaacctcatttttatgagggctgtatctacctgcaagatcattagttcagattctaccttccttttccatttaacaaatatttattgaacaattactttgtgcctgatactgggaacatggtgaatgagacataagagacctgggtctcctggagcttgtgatttatagcagtggaaacacacagaaccattaataaccccaggcattctaagttatgtttgtggtaagagctgtgtgagaggatagtcttctggtggtcactcgttttgctctgctgctcaggtgctggatctttccctccccagttgggatctctcagtcagctttgtttattttactttctttgtaacctttttctgtctctaacattgtacccttatctgtaaagtttccccattattccttgtactgtaacagctattt

SEQ ID NO: 8491 - DNA, 485 bp, Canis familiaris
  misc_feature (1)..(485): n = a or c or g or t
gtgctcaacaaatttaatgagtgaatgggaaaaanntgggagagtncaaagtgagcaggaactctccatttctacttttgtcacnngccacattcaattgtaaataaggccttttcttcaggcagcctactcaagaaacctgaagggagcaatctccctgacaagacagaaaagaggtattatatacctgaggttggcaaactactgcaggcaagcaaatttggctgtttgtttttgcatagtgcaagtcagcaatggactttgcatttttaaagggttgtaaaagaaggaatatatgacagaggccttttgtggtctatgaaacctaaaatatgtactgtgtggcccttcagagaaaaagtttgccaacttctgttttataccattaaccaagaggttaaccaaattttttaacctttgtggagaaggtcaaaaagcatggttaaggaaaagatgtgtcatctctatacactcctataaccgtg

SEQ ID NO: 8492 - DNA, 519 bp, Canis familiaris
gcaatattgcatgtttaggaattcaaagttaattcttaaagggcctgaaatatgttttgaaggaatccgtgcaaaaaaggaaagttcccaataagcaggaagaatatggaatattgagctttttcttccatttccttttttcctgttcttgaggcatgaagaaatggaaggtggttaaagaattgaggctttccttctgggagagctatgaagtgactagaattagaaagtgccctctaaagtttgttattctttcattctgattttatttcttaaaataaatggcacctgggcacacttaaggctattaacaaatcccaaagaggtttataaaaacctgtggaatagttgtaaactaactatggatgactcggtatctgctttgttattcctcagaaatactacactgagtatatgcccgcattactggacttcattttgatacttgtctatccttcatagtgccctctacttttaaagggtttatatgttgaaaaactgctgtggccttttatgacc

SEQ ID NO: 8493 - DNA, 615 bp, Canis familiaris
  misc_feature (1)..(615): n = a or c or g or t
tcataccacactcccagaggatccannatgcagtcagtgacagctgccacctgtcctgtcagaggtcagnnntgaaagtaggtggccaccaacacttttcagtgtgtcctttctctgcctcccctcacaaggacctccctcagtatttccagaaccgccgaaagcattgtgcccacacaagtatctctatttgtggtgtgcctctatcctggctcttggtgccagtggctttctagaaggtgcctgagatgggtgacagtggacagaaagactacatctggaagtttaatgaaaagctttctcaagagatgacctctccccaacaggagctcctaagaactgaagaccagtttagcaccagccagttgcgctgcatgctgcctggttcctgagaaaaccctatctccacaggggaagagacctgggttcgattcctcagagggtccatactcagcccttctctagagattccctgtcctgtcaggatgtcctccnnnnnnattgttatagttctggattacggaccagacgaaaaaagaaaaaatttccagccaaatacctcctgcaggataccagtcatgctaaatattcttcacaaacataaaggannnnnnn

SEQ ID NO: 8494 - DNA, 574 bp, Canis familiaris
  misc_feature (1)..(574): n = a or c or g or t
atgtnnatgagatcaaattccaagaggatggcacttggtgtccaatgagaccgaagaaagaagctatgaaagtgtnnagccagccatgtacaaaaatagaaagttcaagtgtcctcagtaagccttgttcagtgactgtagccaatgagacaagcaagaaaaaagtggatgttattgacctaacgatagaaagctcttctgatgaagaggaagaccctcctgccaaaaggaaatgcatctttatgtcagaaacacaaagcagcccaaccaaaggggttctcatgtatcagccatcttctgtaagggtgcccagtgtgacttcggttgatcctgctgctattccgccttcattaacagactactcagtaccattccaccacacgccaatatcaagcatgtcatcagatttgccaggtttggattttctttcccttattccagttgatccccaggtatgtatcctgaatttaagcaactaatttgtatttgattgttatgtcatactaactaaaaatgaccagttgcataaaatcaggacagtcaactttcagttacttaacttgatggaaaggaa

SEQ ID NO: 8495 - DNA, 388 bp, Canis familiaris
  misc_feature (1)..(388): n = a or c or g or t
aagganggcagggcgnnccaggcatgagagganngcccggtaccaaaggtgaaaaagnnnacattggtatcggcanngcaggaganaatngnctccccggcccnnnnngtcctcaaggccctccagggtatggcaagatgggtgccactggaccaatgggccagcaaggcattcctggcatccctgggcccccaggtcccatgggccagccgggcaaggctggccactgtaacccctctgactgctttggagccatgccaatggagcnnnagtacccacccatgaagaacatgaaggggcctttcggctgaaaccaccagctccgtcagatgaaggactccattgggaacatatggctgaaacttacaggnnnnngtgatgggttgtg

SEQ ID NO: 8496 - DNA, 600 bp, Canis familiaris
  misc_feature (1)..(600): n = a or c or g or t
accatgaanntttcatctacttccatgacagagttnnagatactttccgctnnannggggaaaatgtggccaccactgaagtcgctgatatagtcggactggtagattttgtccaagaagtaaatgtttacggagtgtctgtgnnaggtcatgagggtcgaattggcatggcctcgatcaaaatgaaggaaaactgtgaatttgatggaaagaagctctttcaccatgttgccgattacctgcccacttatgcaaggccccggtttctaagaatacaggacaccattgcgatcactggaacttttaaacaccgaaaagtgacccttgtggaggaaggctttaatcctgcagtcatcaaagatgccttatatttcttggatgacaaagcagaaatgtatgtgcctatgaccgaggacatttacaatgccataaataataaagctctgaaactgtgagtattcctaaaaggataactcacgtttccagaaagaaaccgaatgaacctagtacagccacttgatgtaatccaactttaatttgattgaagactgtgagatgcaattatttatgcattctgatgagggaagctttctaaaatta

SEQ ID NO: 8497 - DNA, 309 bp, Canis familiaris
  misc_feature (1)..(309): n = a or c or g or t
tagtgttgattgcccttcccgcatttattggtgtattnnaatganngaatatgnnnnntaannnntccatgnnnnngggctaatggnnnnntgtannnnaaatgaaaaaagatcnnnnnnnggacatcttnnngggggggagggnnntnnnnnnnannnaaatgacnaanntannnaattnnannnnnnntnnnaatctgctttnnnnnntcannnnnnattagnagggcactggccagagtttgnacnnngtgttttacnntnnnaacatnnnntttgctctttgtatnnnnnagnnnnntaagnnna

SEQ ID NO: 8498 - DNA, 522 bp, Canis familiaris
  misc_feature (1)..(522): n = a or c or g or t
tcnnnactgccccttgggctaaccagccagaggattctacattatnnaactgctgagccactgtccgaacagccaccaccttgactctacaaaatggacccgtcaagaatattgagaagcttggaaagatcacttgaaaaaattcttttgcattcagcatggactcgaccagcatctatggagattatttttttgcttcattttctaaaattgtatttagaaaagtcttaagtattgtgctttgtaaagaagatgattaaaatgaaattttgtgaaaatatttttgttcaaagttgtcatggtccaagaggaatgatttcttggaattcaaaccatttttctccattttacacaatttgattactcttctagaaatgtctttggaagacatggaatatagtacccctcaccccacttatctttcccaagtgaacagaaataacccattaaaatccatggctgtgaattccatttttacattgttggattttacattcatatttcggcagaaaattctagtta

SEQ ID NO: 8499 - DNA, 560 bp, Canis familiaris
  misc_feature (1)..(560): n = a or c or g or t
tggagtnnngcaccgtgtcccntgaggcccctgccagggccccctctcttccaggagcaggtccatgggcaccctggcaggcagcagacttttgtcccagcctttgtttgggctcactcagtgtcactccccaccagagcctcactcccaaggtgggatttcataggatgagaagtgcagctgggaggtccctcaatgtcactacatcagagaaatccaagctctggcccttaaagctcatcgttagtcctgcagcggtcagactgcccttctgacatctggcaattggccctcaagccccctggagggatgggccacccagtctgtacataggataagatgcgaggtctgctgccaaggtcagggcaggatgagactgcacccagctgggccctggggaatgggtcacctgtgactgtccccattgcactcatgcctggggcctggcaaatcggctctggcccacttttgcatctgagtcccctgaccctcaccctctgctccagcagaccgggtccctgcaaccctcagtctggtggtggtctggatcaaccaaagca

SEQ ID NO: 8500 - DNA, 510 bp, Canis familiaris
ctctttgagtttgccttccgtgccttgtttgactgtgaccgacctgtggctcagaagtcctgtgatctcctcctcttcctgagggccaagactgcttcttcctctggtagcctggaggagtccaggagcggcccagatgtggcctccgtggaggctgccttgcagaggtggcaggcaggtgatcagggccagcccctgggggacctggagcccgaggtcgtgctggctgtgctgaggtctgtggacctggaaggccttcggggtgcattagccgagggcagtgaccacatggagaagagccctcagtcactcctgcaggacatgctggccacggtgggcgtcctgggagagaacgaggccgactgctactgagccagcccagtggcagtgtccccagcgtccctctcccctgtgccacgtcccttccttgggactgttgtcctgagatctctggctgacctggctgcacgagggactattcagggagaccgggaccaggtgagcccagca

SEQ ID NO: 8501 - DNA, 646 bp, Canis familiaris
  misc_feature (1)..(646): n = a or c or g or t
cctgtctttaaattntctagagattcattagactgnnnaacgaatgccttcattcctaattcatattgggggaaatgttatnnaanaccacttttggcattttatcataaattttttttttcagaagttagggcaatatgaatgagtttgttgttggaagagtagcaactcagtgacattaactgtgtgataccacctatctgacttttttcactgcccttcattgccaaagtactactgaaagacagttgtaaatagttttcagcagtatgtttgaatttttttttggaaggtttgaattctaagaggaaatatcttcttaaattgtatatcagaaataaagtgatgtagtttccttctctgtaattagaggctaagtctaattttgaggcctagtttattaagtaggttgtgtttataagtaacgagttctctattttcttgatgataggaacaggaattggtaaatgaaatggaaaattaatttatgaaatggaaagtaaagctaaatgaggttgacttctgttaaactgccctggagatagtaaatgaagcctttaggcttcctttcccttttctatactacttcatttcacatgttccaaagcggatacttctgtgagaattgctctttttttaagatatt

SEQ ID NO: 8502 - DNA, 663 bp, Canis familiaris
  misc_feature (1)..(663): n = a or c or g or t
ttatgtaatatcaaatatgcttattatatcagnngttttttttttttattttgttcttacctcacactaccaaaggaaaaaaagacctgtttacatatatgaaaatggggtctgacacttatagaagtaggacagttctaagatatttttgctcacatggactgacctacacataaatttggacagatacaatgactaggagcagggcactgtgtagttttaaacttaaatattttcagaggctagactggtaaccgaactgattgaaagaaataggtgtaatgacaatagggtgtgggagggcttttaagcaacaagagagtaaaagcatgctaagagaattcaaatacagaagtttttaaaaaatattgtgcaggttagataggtgatctcttggtacaagttgactgttctgtgttgggaatttaaccccctgatatataattacattacacgataggtttaatcctacattacagttaaagaatagtggtttatggctaaaaggataagctgatcaactcaaaatgtttatcacttagatggtcttattttatgagaatactcaaatttggtgagccagtctttaacaaagatgagactctttaaaatatttattaccttagctgaatattaattagnnntattttacatatgtgcaaa

SEQ ID NO: 8503 - DNA, 535 bp, Canis familiaris
  misc_feature (1)..(535): n = a or c or g or t
caaannnaagatcctcgacaagtgtcaggaggtgatcaactggctcgaccgaaaccagatnnnagagaaagacgagtatgaacacaagcagaaagagcttgaaagagtgtgcaaccccatcatcagcaaactttaccaannnggccctggcggcggcggcggcggttctggagcctccgggggaccgaccatcgaggaagtggactaagcttgcactcgagtcagcgtaaacctcttttcctttctctcttttcttttgtgtgtggtttttttctttttctctttttttgaaatgccttggtgccaagtatgagatctgttgttggaagtctttagctaggtgtatgcatatgaaaggaagggtgcaacaacttagtttaattataaaaggttagttctaaagtttgagtttaaaaccattatttgaggtttctctttaatgcattttgggtgtttgctgacttgagcatttttgcgtagcttagtttgtgcatggaggtttgtttgagatggaaaacctgaagtttgcacgaaa

SEQ ID NO: 8504 - DNA, 533 bp, Canis familiaris
  misc_feature (1)..(533): n = a or c or g or t
agaaatgcttggagtccatgtgtcaaggtgaggaggcacagcttcagatctccgagcaccctgaatctccattcaggctcacactggcctccttcacgcagggcagggactcctgnnagctggaggccagtgaaaaggaagccctggccaagaaagaacgcacgaggggcacagaattatttagagctgggaaccctgaaggggctgccagatgctacggacgggctcttcggctgctgctgactttacccccacctggccctccagaacgaactgttctacacgccaacctggccgcctgtcagttgctactagggcagccccagctggctgcccagagctgtgaccgagtgctggagcgggagcctgaccacttaaaggccttgtaccgaagaggggttgcccaggctgcccttgggaaccttgacaaagcaactgctgacctcaggaaggtgttggcggtagacccaaaaaaccgcgcagcccaggaggagctgggaaaagtgatcattcaggggaagaaacaagatgca

SEQ ID NO: 8505 - DNA, 580 bp, Canis familiaris
  misc_feature (1)..(580): n = a or c or g or t
cttggtggnntcccaccgctttaagcacctcgttccgtcctgcttcacccactcgggttacggcttccactgcatcatgtggctctccgaaagcctccccagccggaagaatcgaatcccgtcccctgcggagaccgtgcagctggccatgggtcagggttacctgtcaccgtggagaaccagcaagagaatgacagaggtggggaacttcacgcctggggagaggctgcgggggagcttacacttcacggagacgtgggggtcatgccagcctatgtccacacacggacgtgcagatgcacaatcgggcagcttttccctctgggcacccaaatgacgcagtgcctgtgtgctgtcagacctcagcaatgcccctcggtgggcgagacccagagatgccagtgaggggagtttctataggagtcggcgtctgggcttctgtgaggcactgctacgtaaccattcgtgcatttcttccgtcgccaattgctcaacgtttggttgctttttatcagggaaaaatagttcactctgtgggtgtgccacagcctatttgtccattgccttgctgaacaccatc

SEQ ID NO: 8506 - DNA, 490 bp, Canis familiaris
  misc_feature (1)..(490): n = a or c or g or t
ttttgtgggtcgnnnaccctaaaatccagattttagnctaattcattttgagtctattttatnagctgagtatctgggtaagcaacctgntagccacagctgtggccaggggaattgatgcaaccctcaagcatttctatttattcttgaagagaatagttggatatcaccagtgctctagggtatccatacattagtttccttgatgctgtgacttgcaatctcacttttatcagatttgctgaaatttcagggcacttctgctatgatgctagtatgattttgtctcagatggaacagaagagccaatgtatcatattcaaccacagacaaaagccgaagctctcctttttcacttggataatgggagaggtcacaagtcaagttcactttcaagatccaagagccactatctgtgcaattgtatttggctttttttgcactaattttgtttcaatgctggtaattgaaaccattttaatatatttgg

SEQ ID NO: 8507 - DNA, 720 bp, Canis familiaris
  misc_feature (1)..(720): n = a or c or g or t
acttgacttctctgtgtcatagnnagtctggcnncactggacagatgatgaatccctagagcttctgnnnaaannngggctcgataggggcanntcaannagngaggcttcagggagtctgggtggctcagtcagttaagacactgccttcagctcaggtcatgatcccagggtcctgggatagaggcccacatgggactccctgctcagcagggggnctgcttctcctctctccttgcccctcccccttgctcctgtgctcactcgctctctctctctcactgtctcaagtaaaataaaatcttttaaggaataaaaaannagagaggcttaagatttaggagcggtggtggtatagcatctgggctctgaggccagggtctggatgtcccagggccagcttggcatggggagacaaggaggaaattctgcaattctcgccccttacactcacggtgtggaggcacctggcacttacagctgcctttgggaagcacctctcgtgttccagacatccggactgaacactacaaatcttgtattatgtctaatccccgcggtcctgttcagtaggcatcttgatccccattttatagatgggaaatccaagcctaagagaggttcgctgatttccctgacactgagctgggcagctgagaagctcacagtggaattcatgtccgtcttaccccaaaacgtgtgtctttccaccctttccag

SEQ ID NO: 8508 - DNA, 529 bp, Canis familiaris
  misc_feature (1)..(529): n = a or c or g or t
tcaagtgatgtcaatggcccggccacagctgtcacacacgatcctcannnnnaagaactggttccactatgctgcccggatctgggatggcgtgaaaaagtcctctgccctggcagagtacagccgcctgctggcctgaggccgagggaaggaacgtcatgcagagaacccccttctgggtccccatgaatggttagggagcatcacgtgtcctactcccgtgctggggtggagcgtggcagcaggcctgatggatgagggaccgcgacgttctcgcccagagacatgaggtgtccagggccaggcccctcaccctcaatggagtattgttccgggggcaactttgaaatcccacccccaccctggggtagggtggcccatcctcagttccccacagggacaggcagtgggagtcgtctggatggtcaccaggaatcccaggttccatctcgacctccctctgcagggacaggagcaacaggtccctcctccctgactctaagcctgatcctgtaaggtgcggcagggt

SEQ ID NO: 8509 - DNA, 501 bp, Canis familiaris
  misc_feature (1)..(501): n = a or c or g or t
caggtccggggactcaggcccctctnnnngagggtgagacccgnngttttcatcgcaggatggctggctgtccttgtcaggcctggcagcagtgacaggagtcctgggctgtgtggccccagcagaacgaggaacctccgcacgtctcggcccttccaggaccgtgtgacggctccccgtggcccatcggactccggaagctactcngagggaagcctggccattttgtttgatcttaaaggtggcctcagaatcgagtggccgggagggcgtctgtaggcccccagcacggcagagctcagggtgggagtgcgnnnnnnnncgtgnnntgcgtgggctgcgtgggcagcggggcgagccccggcgcggctgcgggagccaggcttcaggcccccgcaggagttagagcgaggccagcctctcgtnactnagcaccccccgcggaagcttggctggagggccagccttggaggagggattcaaacattgtggaaaacatgt

SEQ ID NO: 8510 - DNA, 481 bp, Canis familiaris
  misc_feature (1)..(481): n = a or c or g or t
agaattacagctcaggctacagtgttgatgtacattttaaggatggcaaatgaaactgattncttctttatttcttgggatgatttctgggacctcatttgcaatcttataattagtggctgtgattctacactaactgtactgggcatgagtgctgtaatttcctcaatagcccattatttgggccttggaatattggcctttattggatcaactgaagaagacgacaggaggcttggcttcgtagcacctgttttattttttattttggctcttcagaccggcttaagtgggctaagaccagaagagagacttattcgcttaagtagaaacatgtgccttttattaactgcagtcctgcatttcatccacggaatgacagaccctgtattaatgtctctcagtgcctctcatgtgtcatctttccgtagacattttcctgtgctctttgtctctgcttgcctgtttattcttcctgttt

SEQ ID NO: 8511 - DNA, 565 bp, Canis familiaris
  misc_feature (1)..(565): n = a or c or g or t
tcacttcaagactttccttcttttcagtaaaactctannnggtgttatggggnnngnnaagnnnaccaaatccttgaaactttttatttggctcatgccatgttatgatcatgtaccttttaaataaggggaaatagtatctttaaagttaatgtctagccaagagtttagttaacgaagaattaaactgcactgttgatcggtgctttgtgtaaatacatcttaacgttttggttgagaggggccttaagaaggacagttcattgtaggaaagcaattctgtacatgagtttaagcatacttgttgcattgtctctgcagattctatttttgtttacaatattaaaatgtatgttagcaaaaatgggtggattttcaaataaaatgcagcttccacaaaacttttgttatggtattctggtctgaggtgcattttgttttcttactcctttttctttatcatcagtatcattattttttgctaataaagatatacccaggtgattatatttgctgatttaataaaatgtaaattttatttgttttaatttcctaaaagatnnat

SEQ ID NO: 8512 - DNA, 404 bp, Canis familiaris
  misc_feature (1)..(404): n = a or c or g or t
cgatcaactcttcagaatttnnagagctttgggcacccccaataatgaagtgtggccagaagtnnaatctttacaggactataagaatacatttcccaagtngaaaccannnngcctggcatcccatgttaaaaacttggatgaaaatggcttggatctgctctcaaaaatgttagtctatgatcctgccaaacgaatttctggcaaaatggcattgaatcatccatattttaatgatttggacaatcagattaagaagatgtagctttctgacagtttccatgtatcaagaacagatagttacatttttactgttaactttgtctatttttgtttgtgtatttttctttgtnnnaaacttaanntatacttcatcttnctgannnnnnannnnnnnnnnnnnn

SEQ ID NO: 8513 - DNA, 533 bp, Canis familiaris
  misc_feature (1)..(533): n = a or c or g or t
aaagccttacagttaattttaatgtttgnnntttggggtgcaacnnacagnnagggnctgaaaaaagagtggnnnggggctattaagtatttttagtaaatgttgcctttgtcttgtgcagaacatgtagaatatgctctttaatttagtaaatatttttttaaaacgtagagatgctttgttattgtagctaaaacaattcttaatcataaaatttctgaaattcttgtatttttttttcttatctgaagttgtttaccaacttatttttgtttgaagtgtgatttttttttctcttcccaacctctcttgcaaaaaaaaaaaaaagtgggtttctgctaatgaattgagcagacatctaatattttatatgccttttgagctgtgtaacttaatatttggatacttgataatttgttttattatgtaattgataaaatggtgatgtgtattaatgttagttcaaccatatatttatactgtctgggaatgtgtggttatagttctgtgggagaaataatttgtcagtgttc

SEQ ID NO: 8514 - DNA, 598 bp, Canis familiaris
  misc_feature (1)..(598): n = a or c or g or t
catccatccatccatccatccatccatccatccattcacctatccatccatctatccatcactcccaaccttacnntnnnntcaaaaaaggnacagtcctngnnntcaaaggtgaaggaatnnagactcacagagtgaatggcttaattaaggtcacccagctagtaagtgacactggcctcctcccagaggcattgctatgacagccactcaggtcacaccccagaagcctaactaccctaccatcccctgccccaaagatgagagaagaggctgctgctcaggttggatgtgaaatgggagctgttgattggagaggaggcaggacatgctgcctgcagcagtcacagtggctaagggctgctgtccccaccccaactccatactcagacacccggtgcaggaaataatctcagacattggctggcccagtggtcctgaagtatgtctgagcactaggttcactggggaacatttaaaaatacagattcctgggacgcctgggtggctcagcaattgagtgtctgcctttcgctcagggtgtgatcccagagtcctgggattgagtcccacattgggttccctgcatggagnnnnc

SEQ ID NO: 8515 - DNA, 472 bp, Canis familiaris
  misc_feature (1)..(472): n = a or c or g or t
ggtaatttttttttttgcatgcgtagctttatcatgattaacttnnnnntctttcagtgactgaaaatcctgcttatttccaaatttgcagtattgtacatgacgctaacgaacgacttttggaataaaatgttttcatgtatttcaaactactcccttaagctggtctctcggtgcccaattgtcaaaatctctgtttggcccctctccccactctcctgctactttagggcaggaaaatgaaaaataaagcaaaaaagcatacaaataacaaaaaccataaaaccaaaaagccaccacccataatgatgatgggcgaaagtggtatcctgtttgacattctaactctttgcttatcagtgaccttgatcattgttctctctagaaaatccttgggcatttttatttctagtcatgtgactttgtctttaaattttggctgtgtgttttactttttaaaagaatcannnnn

SEQ ID NO: 8516 - DNA, 478 bp, Canis familiaris
  misc_feature (1)..(478): n = a or c or g or t
acactatnnatggcttttttttttttttttttttatnannnnnnnnnnncatgtgnnnnnnnnnnnnnnngtgtatgnncnnntnnnnnannntgtgnnnnnnnannncatnnnngnnnnnatgnnnnnnnnnttgtcagtggtnnnncannnnnngcatatnnntnnnnntttnnnnnnnnnatgnnnaggtacnnnnntgtnnnnnnnnnnngtannnnnannnnntagtnnnnnnnnnnnnnnnnnnnnnagatgtcnnnnnnnnnntgtgtagagaannnnnnnnnnccnnnnnnnngattttcnnagnnnnnnnnnnntnnnnnnnnnnnntnnncnnnnnnannngccagttnnnactatnncnnttaacaaaaatagctccttgaaagnnntgttntccttcagtggtgnnnnnntatcgatcaagacacctcattcaaatgaaatctgcctttggaaaatttaatatatt

SEQ ID NO: 8517 - DNA, 416 bp, Canis familiaris
  misc_feature (1)..(416): n = a or c or g or t
agaaagnagggtttggggccagtggagtaatnnnttaagggttnnnnnccattnnnagctccatcttccatngnnnnnctccnnntcattggcatnnntggnngttacaggaatggcacgctgttttgcttttgaggagaatctttcaggacattttacactcnggnnnnnnnngttccnnncaaccctgagatgattttctnnnnnttatcaaagaannnnngctagnnntttctcctttggccatgttctttaagtatcnnnnntcttcgtannncttgctcccatttcccctcagaacacattgtcnnngnnnnaatagacatttnnnannngnnnnagatntnnnatccagacnnnaatcagaattttgtcttgggccannnngntncnnnnnnnnntcgattctgtgcann

SEQ ID NO: 8518 - DNA, 493 bp, Canis familiaris
  misc_feature (1)..(493): n = a or c or g or t
ctcccactgcaccagcacccagcctcctgcccccgggtnntaggggtgtggcttttcccggggggacatggcgtgactgtgagtctgatctgctggggtaggagnaagctggtgccttgccttgctcgagcactttgaacttggggacatttcatagctagccctggctcgcagggtgctgcaggggtaggcaggggcccatgtgggtgcaggggaggctgggccaaaatcccaagacatgcgcacagtgtgactcatccctgcacgtaaccccaacttgtttgttgtcttcgttcactggtggccttctgtgacgtcacactgtaacgttgggaagatggctccctggggcatccctgctcttcagaacttggccctgggagccttgggcctgtctgtctcatggagcctgaaactggggcctaactgcagtcacctcccttctttgggcagtagaaacactttcaaaacccaaatctggggatccctgggt

SEQ ID NO: 8519 - DNA, 571 bp, Canis familiaris
  misc_feature (1)..(571): n = a or c or g or t
ccactgcctactgcccccgcagcagtgtctccgaggactagcaaggnctgnaggcagatattaatggtttctgaccctcaccagggcggtggaggggtgggggtgggacattactagagtattcaggatttacagtgcagtatttcacgtgtaactttaagttttcagtactgtgcttttataccttttaatgcaatgttgtattcatttcagtactcctagatagtgtgtagaatttatgcatgtttgtttatgagtaagctcggttggtgctttcgcttttgtgctacctttgaattttttgtaccagagacgtgctaaacttatgaaattcattgagaaattttccatcttattcttttatatggaacggatgatgtgtattagagtagactacttctggagagtttggaaagactccccagtaaagctggcctaaccaagggaaaagtcaaggcccctctctttaggacctcgatgggcacaggaaacatccatatggaatgcagtgatgtggacagaaatggtctcgatgtgggcacttggcacactttactaaacacaaattaca

SEQ ID NO: 8520 - DNA, 569 bp, Canis familiaris
  misc_feature (1)..(569): n = a or c or g or t
gagctctanaganncagatatngtaaattttgatgacatagcttcctcagaaaacttgctacatcttactgcaaacagaccgaagatgcntnnaagaaggnngcctnnacgcttcaatggtnnacattctccaacccaaagcccagaaaaaaccttgaagttaccaaaagaagaagatagtgccaacttaaagccgtctgaatttaaaaaggattcaagctactctccaaagccatctctgtacctttcaacaccttcaagtgcttcgaaaccaaatacagctgcttttttaactccattagaaatcaaagctaaagtagaatcagatgatgggaaaaaaaaccccttggatgaacttagagctcagattattgaattgctgtgcattgtagaagcactgaaaaaggatcatgggaaagaactggaaaaactacgaaaggatttggaagaggagaaggcaatgagaagtaatctagaggtggaaatcgagaagctgaaaaaggcagtcctgtcgtcttgaaatggcatggccctgtatttttagggttccagggattcagaagcaacac

SEQ ID NO: 8521 - DNA, 490 bp, Canis familiaris
  misc_feature (1)..(490): n = a or c or g or t
gagaatgaaaagagcancctcactgggcacatgaccgattgatttccctgaatatgtaaaaacagtacttcaaataagctgtttcatcacactcccntagatctgtctccagataatcctgaatagctgctaagcagtagttgccaccggggagccagaggataaatgcaattttcatttccccttgggatcaaatccagctgagcaaatggcccagatataaaggattggcttgaaggaccaggcagagaccatctgcagtgccagccacgttgctggggactgggtgagaattagaacaccccaaagtcctgaaggccatagtgtagttacctcaggnttgtgcttgtttccttacccanntantgttcccatttaaaaacannnnnnaagnnnnnnnnngnnnnnnncnnnnngtnnnnnnnnnnccnnnnnnnnnnngtatgntnnnnnannnnnnngannnnnnnccacgtcngcctcnnnncat

SEQ ID NO: 8522 - DNA, 509 bp, Canis familiaris
  misc_feature (1)..(509): n = a or c or g or t
cagcatacgtagctgcagccccagaactttatnnagcttgtgnnnnnnnannnnnnggtganacagagagatcagcaanngaaannnaagatgaangaaaagtggattcagcaannnngacaagtatgatgtctgtacaagaaaatatccatatgctatctgaagaaaaacagagaataatgctgttagaacgaacattacagttgaaagaagaagaaaannngcgattaaatcaaagactgatgtctcagagcatgtcttccgtatcctcaaggcattctgaaaaaatagctattagagattttcaggtgggagatttggtactcatcatcctagacgnnnnncatnacaattatgtattatttactgttagtccaaccttgtnnnnnctgcattcggagtctctgcctgccctggatctcaaaccaggtgagggtgcttcaggtacatcaagaagaccgtgggtacttggaaaagtaatggaaaaggaatactgtcaagccaaaaag

SEQ ID NO: 8523 - DNA, 540 bp, Canis familiaris
  misc_feature (1)..(540): n = a or c or g or t
tttaaaaattttctacattcaaaacaaaactcaaaagaatttttttggaatgttgannaagacttcaaacctgttccagagtgctggataccagcgaaggaaatagaacaattaaacgggaatccaatgcctgatgaaaacggacacattcctggttgggtaccagtggaaaaaaacaacaaacagtattgctggcattcctcagtagttaattatgaatttgaaattgccctggtactgaagcatcatcctgatgatcctggtcttttggaaattagtgcagtgcctctctcagatctcctagaacaaacactagagcttataggaacaaatattaatggaaacccatatgggttaggaagcaagaagcatccattacatcttcttataccacatggggcatttcagataagaaatctacccaccttgaagcacaatgatctattatcctggtttgaaggttgcagagagggtaaaattgaaggaatagtatggcattgcaatgacggctgtttaatcaaggttcatcgccatcatctt

SEQ ID NO: 8524 - DNA, 487 bp, Canis familiaris
  misc_feature (1)..(487): n = a or c or g or t
tggcttggtnnngccctgtgcagtagattggacatcacaatacaccatggnnntccacccggcaaaggagaaggtnnttcgatcagtatgaagaaaagcaaccccaaactctcactctgacttgactgtgtttatgttgatgccctgtggtctgcaagtgaagtgaagattcagagttnannnaagcccaaaggaaaacgcaagtggtttttaaagccatttggtaaaagcagaagtnctcaataaaggcattacacttttagatttagcaagatggactgttnntgaacaatcttgccagannnnnnnaaaaaacatatatttttcacaagaaaatacaagttacatttttttggagataatattaactanttatggataaaatgtggtattttcaaatacttttattggttgtttcaannnnnnnacnnntctttaaacttgtaatttttgataagttatttgtgtttgttntatctataaatat

SEQ ID NO: 8525 - DNA, 595 bp, Canis familiaris
  misc_feature (1)..(586): n = a or c or g or t
ccactgctcnnnntatgatagtgtacagatctattaaagaaaagatcagcatgtggactgcactgtttacntnnggnnngactgggacaatctggggaatatctactatgtttgttcttcaagaacccatcatcccattagatnnagaaacctggagctatctcattgccatatgcgtctgttccactgctgcattcttaggagtttactatgccttggacaaattccatccagctttggtcagcacagtacaacacctagagattgtagtagctatggtcttgcagcttctagtgttacacatatttccgagtgtctatgatgtttttggaggggtaattattatgattagtgtttttgtccttgctggttataaactttattggaggaatttaagaaggcaggattatcaggaaatactagactctcccattaaatgaatgcttgattattatcttgttaacatttagttattaataggtacactgccattttaatgtttacctataaatgtcttgtgttgtataattgacagagtgctatataatatataattatgcagatgtagacatttgttctactctaatatgtaaaa

SEQ ID NO: 8526 - DNA, 610 bp, Canis familiaris
  misc_feature (1)..(610): n = a or c or g or t
aggttnctgagcccatcaacttgcagatggtggtggccaagtaccccgtgctgtatgaggagtcaatgaacacagtgctagtacaggaggtcattcggtacaaccggctgctgcaggtaatcacagagacgctgcgagacctcctcaaggcactcaaggggctggtggtgatgtcctcgcagctggagctgatggctaccagcctgtacaacaacactgtgcctgagctctggaacgctaaggcctacccatcgctcaagccactgtcctcatgggtcatggacctgatgcagcgcctggacttcctgcaggcctggatccaagggggcatcccagctgtcttctggatcagtggcttcttcttcccccaggccttcctgacaggcacactccagaactttgcccgcaagtctgtcatctccattgacaccatctcatttgatttcaaggaacactatcaaccacgggccactccaccaactacgtcattgctgtggagatcccctccaatcagccccagcgacactggataaagcgtggtgtggccctcatctgtgccctggactactagattcaggacagaggagctgaggccattaaagnnnttcnn

SEQ ID NO: 8527 - DNA, 582 bp, Canis familiaris
  misc_feature (1)..(582): n = a or c or g or t
gccannttngaacaaatgacaatgccagggtaaattaaatacattaattggnnnnngccaatttnnnnntnnngtggggcatggaggaagcagtggattcactcagagcagataagtgggtgaagggctagatagataccagcatgaaaattaggaaaatgttaagaaaacaaaattgtgggatagaaaccaaatagggaactaacaaataccgattatagcaactagaaactagaccctggttgttaggatcagtgcctgaagggtgtcacatctcaaatgagacatagtcttatttactggtgccatttaaaaatttttgatatgactttggtagtagagagctttaacattcatccatgcacaaatctcctctctgagcacatgagaatttatatttcctgattctcttgctgtcgggcagagctgtgtgattcatccttgacaatggattatggatggaagagatgtatgtgtattaccctgtggcagcaattgtagaagtgttgtcaaagtgacataagatcaaagcatggaacatagatacaacatatggaagataagtgctctggaaagttacct

SEQ ID NO: 8528 - DNA, 526 bp, Canis familiaris
ctgtatcacaccccaggcaggcgctggggccccaggcgctcgccgcatggtccgccgcccggcccgaacacctcttcacacaggcacacctgcgtcctccgagccttgctgtggctgtggccgctcggaatggagtatcccccggcacctccacagcaaacaaccctgggtgaggacgacagggtgcctaggaggaactgcaacagtcaggaagccttacagagtcctggcactacggtgggcacgggcatgaacacggctgcatttgggttcaactctctggccccaagctccatgcccgggactaacccagtccacatcgtttccctcatctgatgcggatcatgaggattctgctgccctcaggagggtggttcgtgggaaacgcttcaaagccggagtgaagctgtgtgccaacaaaaaccagacgtagtatgtcccaaggaaaggaagtccctgccctgcaaagagctttgtaaaaatctagtgccgtggaggggggcacttgacgggatgagcactgggt

SEQ ID NO: 8529 - DNA, 611 bp, Canis familiaris
  misc_feature (1)..(611): n = a or c or g or t
caacgtcaaagcctgnnngcnnnnccaccagggcnnnctgccccccgtgccgctgcannngnnnnacgcgcccaccaggctgatgaaggatctgggctacggcaagggctacaagtacaaccccatgtacagcgagcctgtggatcaggagtacctgccggaggagctgcggggagtcgatttcttcaagcagaggcggtgctgactcgcaggctttgaccgcagaaggctttgtgtctgtttttaaggagagcaagagtaactggattgtgaagttggttgcccggtggaagttaaaccgacattctgtgccagaagtgtcagagttctgtagagggaggcacatgtacttcaactaaatgtgtaacattgaaattgtgttcacttgcactctgtgcaatggttatgcttatgaaaatatctggcagctttgtgcaatgaattaatgttataaggaattatctattttgtcatagtatttaagtcataatgtcattcagaattcagttctgtaggattcttttttctttaagagatgtatattcagggtagtttgaattggtaaaaaaatgtaattgtgatttaatactgcatagtgttttgggtatttt

SEQ ID NO: 8530 - DNA, 449 bp, Canis familiaris
  misc_feature (1)..(449): n = a or c or g or t
tggcccggnnttcagcttccgagcgagtacggaccccgccacgaatgaagcagagaagttacagaaaccttccaactgcttgcaagcttctgttactagtgtgtgacagtggttctaccccagatctcctgtctcattcgatacagccaagtttacgacactgggactgatgtttacatcttgggaaagacaagcatctcgaccacagtttttgtgtttacttaaactgtgctgctaagtaggctagggcaaaaaacaaaaatctttatttcagagtattgcttttcacatttatggctctgtagcaaccgaatagcagtaggggtgatatgtatacttttgcttcactacttgtaactgagcacacataggaaagtctagacactgtaagtgtgatatgcattccaatgtcatgaagttgccaattccatttttaaatgccacagatg

SEQ ID NO: 8531 - DNA, 383 bp, Canis familiaris
  misc_feature (1)..(383): n = a or c or g or t
agtggccccgtcactctgnnnagcatcannncgtggttccgnnncaagtggttaagggtgcggaaaggctgtgattctggccagcatggggctggccacattgaagatgtggatagaaggtctgctccgtctgcaggcggcggccaggctccaagtggcgagagccaggagagcagtacagaacagcccagaaaagatgggacccaccactggtcgccccatgaagggacacagaggacaggtgggtacagcagggcctcacagttactgatcggggctcctttggttccagtgactgaggccgcgggttatgctgtcattctaacttccaagagctccttctcgaagaaagaaataaaatcaagatcgggccaaaggatgcc

SEQ ID NO: 8532 - DNA, 459 bp, Canis familiaris
  misc_feature (1)..(459): n = a or c or g or t
tgacctgnncatccccatcacnnngagctcttgggggcnncagtgcagacntagcagctgtgggtggcgtgcatggcactgagagactggctctcctgagcacatgggggctccccntggccnctgannacccctggccnannncaccttccgtggcagctctggnnctggtcctggggcaggcgggctctgggatgggctggtgagcctgagcagtgatactgttcccctccctggccaggtggggctggatctggtgtcctgtgtccccagggccccaggggaccttttctggaggtgattcctggccaactcagacaaggctacttgggtgctattatnnnagcccgggggtcgggggcagttcaccttggtttgggcctctttcaagggaggggggccacaagccttcccttcttggcaggagccctctgggggatgcagggaaatgagcatggc

SEQ ID NO: 8533 - DNA, 697 bp, Canis familiaris
  misc_feature (1)..(697): n = a or c or g or t
ctgtgccagcgggaaggggacacggtgcccagctttgtgcnnctctgcattgctgctgtggataagagaggnctagacgtggatggcatttaccgggtgagcgggaacctggctgtggtccagaaacttcgcttcctggtggacagagagcgggcgatcacctccgatgggcggtacgtgttcccagaacagccaggacaagaaggccgactagatttggacagtgctgagtgggatgatattcacgtggtcacaggagccctgaagctttttctcagggagctaccccagcctctggtgcctccaccgctcctgccggattttcgtgctgcccttgcactctccgaatcagaacagcgcatctctcaaatccgagaattaataggctcaatgcccaggcccaaccatgacactctgcggtacctcctggaacatttatgcagggtgatagcacactcagataagaaccgcatgaccccccacaacctgggaatcgtatttgggcctaccctgtttcggccagagcaagagacatctgacccagctgcccatgctctctaccctgggcagctagtccaactcatgctcactgacttcagcagccttttcccctgattggggcaaggaggaagacaaaatgtgtttccactgatctctgttgggtaccctttagtggggggtgaggatagtagatgtt

SEQ ID NO: 8534 - DNA, 634 bp, Canis familiaris
  misc_feature (1)..(634): n = a or c or g or t
tgctacgatctagactatgctatgagaagctcaagnngtggggaaagaccaaatnnannagaactaaggtactctnnctgacagccctgtnnaanntccagtccagagccaacgctggctgccagccacgttggtgagcccacttaacagtgccatcttagcgaagcccctgctggactgcagccccatcaaacaccatgtggagcagaagaaccttccaggtgagcccagtcgacccataaaatcatgaaacgcaatgaacagtcgttgttatttgaagccactgaatttctcagtgtggtttgttatacagcattggatcagcaaaacactccctgatttggaacaaggcagcctgtatttactggaaagtgaaaccaattcaaaattctgctcatcctcaggaataccaaagtggacagaaataagactttctgcctcccaggcaattcccaagagaaacagcttagctggctgtggaagaattaataagaacaatgcagtaaagtgagatgaagtgtgctatgtcagcagtgtcactggccaagtgtgcaaaaaccatcgtgccattaaagtaagcaattcaattactacaatatgtacaaagcgaaataatcaacctgcagtttgatga

SEQ ID NO: 8535 - DNA, 542 bp, Canis familiaris
  misc_feature (1)..(542): n = a or c or g or t
caannatttgagccttactttttaaatatttctgagcagggtcntgagctctgtcagtattttcacttactgatatttatatttaaaatatggcattgtatgttacattgttaccctccttagtaattataatgagaagatgaatttgttcattatttttcctgatggtagatgtgaaacggtgcttcagaaaattgtctatgtatatatccgtgggtgtgaatgtgtgtgtgcgtgcgtgtgcacgggttcacagacatagattttaaagtataaattggtcctttaaaaattggcctgccatctggaaatggaaattgtgacctgagacctgctgaagtattggaaaacttgacataagggtttttaaaagccccagaggagtgagttgtatacacacacacacacactcacacagagacagatacattgaatcttaaaaacttaaaacctatgaaaacaaccatatatactcatattctcaaacctattactctttgttgttatattctgggccaaatagaggaacgagtgggagagag

SEQ ID NO: 8536 - DNA, 599 bp, Canis familiaris
  misc_feature (1)..(599): n = a or c or g or t
anctctgntacantaatnnnnntannncntcagcttcagtatttatcatgatgcctngccactctactcnnnannnnnnncatgtccactacccacttcccatgagatttctccagtgtcccccagacctgactnnaaagagtcagtaccttgatgaagcagatatattctacctaaatcccttaaactggctatataaagagtttcacaatgattcaacattgcctactcacttgatcatcttcagcattttagaggaggaaataagtgctttcctaattgcaagcaactatgagagaactgctgtgttcttccacactcacttgccagaaggtcgaactggaagtcacatatatgtctacgaacggaaataaaaagggacactcaacagaagatgaaattctgaattgtgtttaaatctttcctgaagaaatagacattgttgggtacaaatattcagatgctgcataaatatgcctgtaaacactgagtaagattcatggatctaggaaaaaaaactactgaactgctttaccaaatatcactactgaggaaatgtatgaaaaatgtcacaaagtataaaatatattaatacaaat

SEQ ID NO: 8537 - DNA, 570 bp, Canis familiaris
  misc_feature (1)..(570): n = a or c or g or t
aagactgctaatataggtattttagaatgtgaattgaaaatggatccaaaagcttttcagaaagaggatagcaaaaaagatctagtgcgatttttttttatatcatatagcttaagctgatttaaaacaaaggccttagactaattttcagttttctttattgaaataagctaatggcttgtttgtgtaaagcttttttattaaaagaaaaaatttaaaaatcttgtacctagnnnngtattgttatagaatttacatgtaanattttatatggtagttttaagtctgtcagtttcttaattgtggacaaattaacagttggctctggccttttgctgtaacctgcctgtgtcactcacttagccctggcatctgtgcagacatatcagtttcagttcttctgtcacttggacgttcaggctcagcatgaatttttgtcaggtagctctaatacctggtgttttcgtttgtttttgttttccttccttttttttttttttttttagtnaaagtttaagaggnnaagtaccagtgttcagatnnnnnntatnntagtttgtatattcaaca

SEQ ID NO: 8538 - DNA, 503 bp, Canis familiaris
  misc_feature (1)..(503): n = a or c or g or t
aaaaaggtcngtcntgttttttttagctagaannagtttactnngtgttccctgccagtgnnnctcagcagggactcctgtgnnnnnncatgcgcacgttaagtgtgtagaaaagttatgcattgttatatcctagagtggcagctcttaaatcattgctcaaaatacnnntnctgtttcttctactttcctttgttagtgccagttcagatggtaaaatattttagttactcacattgtgaaataatcagccttttgnnnaattctttgagcgttgccccacacgtgacatgacttgccagatacttannnctannnnnatattnnnttgtatttttattnnttatctgctaggcatggcatttcgcatatagannnnncaattgaangnnnttcagatgacatnnnngttgtagatgcancttcattaannnnacagataatcaaactaaatagacgnntnnagcttctagaagaggagnnnaaagagcgtgctaannnnn

SEQ ID NO: 8539 - DNA, 572 bp, Canis familiaris
  misc_feature (1)..(572): n = a or c or g or t
tcgggaaannagagnngagttgccaggtgnnaggnnnnnattggcagggagagtcttaacggcaaaccaggaatgaggcgnncttgactcttctcttccctggtgtgtcatgatccagggaatgaaaagaaaatttgaccctggattagtcccttccttggattttcctnntactatattctcacacgctaggaccagctgcccatnntgagctcagagcagccccttcaaccattattggcctaacctggctcgtcaggaaacccaccccgccctccagattgggcctggctgctctattctgtaccaagtcctggagaatagtgtcaagttcttcatagccctggtagntcctagattcccatcctctccctgtggaggccaaactgactctgtctgtagccacaacctgcatctccnnnagcacagtgagatatgactnnggggctttgcacctggctggcccgggaangcagtaggggtggatagngnngtctttcctnnnnnnctgtctccatctgtccctaccctttncntgccccaccttactcccaccaaaaagtaaaaaaatc

SEQ ID NO: 8540 - DNA, 156 bp, Canis familiaris
  misc_feature (1)..(156): n = a or c or g or t
tgnncgattcctgggcccccaagaccgaacctctcctggctctggtaacccagtgaggtgaatttggacacgccccaatgcttgtatatgctgaatgaaatctgtgtctgtattttgctggggggtgggtaggnnngggagatacatctgcttttt

SEQ ID NO: 8541 - DNA, 465 bp, Canis familiaris
gccccccaaatctaccagccatctgcagggggcagggacatggcccacctttccgctgagatgtgccacctatgaagagtgcctccaaaggaaagacgagattcagctgcccccactgggttgtcctgagatccttgggaggctgaggaggaaacttcagaggagccccttcccctgctcagagctatttcatgagttgtgaaccagcagcctttagggggaggccagaactgctcggcacatccaagcatcaggtcagatcattgtcatcaaaaaatgtgaatgaagcttagattcacctcttggggggcgggatacactagcacccatcagatgtacgtgacttctcagtttctcactgcgacctccatttttttaaataggaattttcaaccccttgtgcttgtctcatgtctgctcgaacagttcgagaccctgattactgttttaaaatgcatgcacgtt

SEQ ID NO: 8542 - DNA, 502 bp, Canis familiaris
  misc_feature (1)..(502): n = a or c or g or t
ccccacgcctggnntgcagctnnaggcccaactaatgctggggacagcgagggctccgtcagnnntnntggcangacctgcaccgcaaggtcacacaccccaccccaccccgccgcaacccgcaattctactttaagtgctctcgccatgacctaggtcagcatcacccatagcatcagatgtcgtcggctgccctgcgtgcctcgggccttcacgccgggcctccatcctttcaagaacagcccttgtggaccagaaccacctcaggctcacagcagagccccgaggagagtacagggagttcctgtcgaccccgagccccctcgactgtcaccaccaccaatgcacacctgttacaacccatggacccgcacggacacgtccccgtcatacacaccgccgtctccgccagggctcgctcctgtgcgctcggctgcgtgcgtctgggcagagggtggaggcgggtgatggcatcactcggagcagtctcccggccaattcc

SEQ ID NO: 8543 - DNA, 75 bp, Canis familiaris
  misc_feature (1)..(75): n = a or c or g or t
tccccctgactttatgacttccagggacagcnctcgaattacaactgccgttgaaccaccaggttcatgaggatg

SEQ ID NO: 8544 - DNA, 670 bp, Canis familiaris
  misc_feature (1)..(670): n = a or c or g or t
tcatcagtatcatcaaaatgagtaaatcttcaaaattgtggtgagtgaaantagcacattacaggatattgcaatttttataaatcataaaaaatatgctttatatttttatggagatatatagtacaagcataatttctggatgnnaagattcatacaaatttcaggaaacgagtcacctctgaagaagtaaggaagaaaggaatgtaagaggcttcaatggtaccttttatttcttaaaagcttttatttattaaaaagttattttttctttttaagtgtacttttaaaaaagattttacttatttatttgagaaagagagagcatgagcaggggaggaacagagggagaaacaggctctccactgaccaggaagcccaacatggggctcaatcccaggaccttgagatcatgacctgagacaaaggcagacgcttaactcactgagccacccaggcacccatcttaaaaagttcttaaataaatacggaaaatgttaacatttattaaacatggctgcagtggatatagatatctgttatatttgctctaattttctatataaattatttctgaaatttaaaaaattgtaaatatgtcctatgtcaacaaatattctgaaatagcaatttttaatggctgcattttttattactataaatagtactg

SEQ ID NO: 8545 - DNA, 375 bp, Canis familiaris
  misc_feature (1)..(375): n = a or c or g or t
ttcagtggtactgttgccagcannaagaccaactacatccatggtacattcttccagtggagacttttggacattattggggacagtcctttacccattccttgccatctggagattgattagcaacttcctatttagtaaccctcctgcacagacctctgtgagagcagcagcagcagagtcctcaaaccttgcatcatctagcaactcagagaaaagggacccagtcaggaaaagagtgctggagaaacggggggaagactttaagaaggaggggaagatctacagattgaggactcaagatgacggtgaagatgaaaacaacacctggaatggaaattctactcaacagnnnnagtgtgacagtacagtatg

SEQ ID NO: 8546 - DNA, 672 bp, Canis familiaris
  misc_feature (1)..(672): n = a or c or g or t
gctaccaccacagctactacatcaggtacaactaatattactttaagtccaacttcacaacctgggcnnnngtctaccttcgatgcagccagtttcattggaggaattgtcctcatcttgggtgtgcaggctgtaatcttctttctctataaattctgcaaatcgaaagaacgaaactaccacactctgtaacagacccattaaattaacaaggactggtgtgtgactcactgaaaccaaaatattatctttcaagatgtcccacatggaagacgctattccaggatctttatattttcaaaggatgcatataggatactttggagcatcgtccttgaggaaaaatcacttaagtcattttgctcaacaggaatatttaaaatattctgcatgaatccttgtggctgtcttcttttttattttaaatggctgctgctgtgggattatgttctctcttcttgacataccaaatgtaactctgtaagtgatggaaaacattgtcctacgcagacaacctcatgactcttttggcagtttaaatttagtcctttttaaagcctaaaagctgcattactttcatcctatctcaggatgtagtttagtgaccagaattgagaagaatgtgccaaatgagcatcaatcgggtggacttttggctgtcctttcaaaagt

SEQ ID NO: 8547 - DNA, 522 bp, Canis familiaris
  misc_feature (1)..(522): n = a or c or g or t
angcagtccagcntgcaccagtgcgggcctcaccacaggggagannagnngcatctggacgtccagtcggggagcgtcgtcagaggnngaaacaagagtcagattgtgtcctcctgtagcttggcccgatgctggggctgccctgcctcttctttcagaggtgacagctcttctgcttgctcccccagctcaagccctgagatatgcagggtaacgcatttatagactgttggggatcagagcgggcagtaaatgccaaggtcagactcagtaatatcctgccctcatgtgctgccaccttctctgcctcccggtcatccagggcaacattggggttgatggggtgaggatttctagttcccagctcctgttccccagtacagtcacactaatatacagactcaggctccagggtgaggtccctgtctagaatgcatcttccctgcttctacccctgactggctgggtcattggtgatcctgctggcctgtctcccgattgtttcagggtttgatatgggtt

SEQ ID NO: 8548 - DNA, 579 bp, Canis familiaris
  misc_feature (1)..(579): n = a or c or g or t
gtcntccataatgccctctctagacaccttggattatgtacacaaatacaagataaataaacataaatatgattaataataacaatgctgaaaaagtattggcctaccaaagacacactcaggctttagtgaatacataacctcagttttaagacatgcgtatcttctccaatcatgaaatcaaagcacagtgcagagtttgtaccaagtactaaggaggggtctacgtatggctggctttattttcttttgcttttgtttatggaaggtgttcagctgacataaacagaagttggccaaaatactgcctgtaatgttaatttcctatataatttacttaaataaaacaggttaacctcaatgatagtagttgaaatgttccatcttatgtgtttctgttaagtattaccattatggtgctactgagcattttcttttataaaaagaaaaatgccatgggctgcagtcttcttccaccattttttctcacaaggtccattaatatgcttataacactagtgccagttattttagttgataatgcttattatgatatttgtatatttgtttgcattccaa

SEQ ID NO: 8549 - DNA, 580 bp, Canis familiaris
  misc_feature (1)..(580): n = a or c or g or t
agctctacagctgacttcatngagcagcagttactcagatcacnaggggctgatgnnagtggatctgcttcaccagatggaccctccacgtggctnctggagaaggggcctctgtnnacggtggggtcactaggggtcactaggagtacaggctctgagcgcaggatcaggctgtgcatccccaacaacggggcaagtggacctcacgtactgtgcgataggatgtcctgagaaggtcgtagcaccacccccgtgatattcctgtcaaagatgcatacctgggacagaatcactaggatactggagacaagcccaaataaagacatgttctgccaaacagctggcctgtgatcttcaagagtgcccaaggcatgtaagtcaaagacagaccctggaagtgctccagactgaagaaggcgaaggagacatgaccggtaaacgcaacacctgattctgaattggacctttttgctgtaaacgaagttatggggataactggcaaaatttaaatgcggtctgaagttccatggtagtgatgtgtccgtgttcattttctgattctgnnnnnngtcctgtggtt

SEQ ID NO: 8550 - DNA, 611 bp, Canis familiaris
  misc_feature (1)..(611): n = a or c or g or t
tgacactgcatcatgacacaggtagtgtcttggtagtgggtgtgactgcctcctggggttgtagagctttcctnnaccccatccnntcttggnctgaaccttgggcagctctaaaagagnnnncagccttgaagacctgcctttttctatgccccagagaaggggccccctggcaacacggggtacctctggggtggggtcacacctgaccctttggcaatcatggcacccctatttgccacagccactttgctaacccttcccttccccaataggaagtacagtcacttttgtttgtccttttgtggtcactccgtttcctgtcttggcagggggggaagaggggaagctgggcagtagctttgggtgggggagggcacctgtggtttttaatgggaaatacctctcagagatgctcctatgggctccctagagccccatcccagtgctagggtggtttccatggagatagggcactgagactctccatgaggttggaacggactctacctcgggggttggaggggggggtgtctccagccagcatccagcccctccctgcccccaggttggcggcagcaccgctgagaaagctgtatttccacccagtt

SEQ ID NO: 8551 - DNA, 551 bp, Canis familiaris
  misc_feature (1)..(551): n = a or c or g or t
accatgtgatgctgttcacccagaccaagnagcaggccnnnngcatgcacannnnnnnggggctcatggggctgcaggttggcgagctccatggcaacctgtcccagacgnnncggctagaggccctccggcgctttaaggacgaacagattgacatccttgtggccacagatgtggcagcccgtggacttgacattgaaggggtcaaaacggtaattaacttcacgatgcccaacaccatcaagcattatgtccaccgggtggggcgaacagctcgggctggtagggctgggcgctcggtgtctctggtgggagaagaggagcggaagatgctgaaggagatcgtaaaagccgccaaagcccctgttaaggcccggatacttccccaggatgtcatccttaaattccgggacaagattgagaagatggagaaggatgtgtatgcagttctgcagctagaggccgaggaaaaagagctgcagcagtcagaagcccagatcaacnnagcaaaacggctccttgagagagagaaggggaaggaggcctcaaac

SEQ ID NO: 8552 - DNA, 681 bp, Canis familiaris
  misc_feature (1)..(681): n = a or c or g or t
gaaatncntccttgaagaaatacagcnnggtnnngagttgntagcccaaggcgaatatgagaagggtgtagaccatctaacaaatgcaattgctgtgtgtggacagcnacagcagttgctgcaagtgttacagcaaactcttccaccaccagtgttccagatgcttctgaccaagcttccaacaattagtcagagaattgtaagtgctcagagcttggctgaagatgatgtggaatgagaaaatgtcaacataatctcaattaaaaatatttttaaaatcttaagtcagaagatgagcagctctgggggagtaagggcaaataggcttgttatggactgtcctatgctgaaatctaccaaagttaatttttactttgtgtagatccattcatctgttttatttatttttcccagtgaaaagtgtattttgatagaaagcgttttcattttataaatacactatgagttaccaaaatatcatggatttattttattcttaaaacgtgcaattaaaannnntacatataacatcactacttatattaaaaatactcagtgcttagttttgaaagataggcaaaaaagtataagagaaagctgaagaatgcacgtttttttaagctaatacactttgctctaataaaacaattggatggaannnnnnnttgtttatcaaaactg

SEQ ID NO: 8553 - DNA, 448 bp, Canis familiaris
  misc_feature (1)..(448): n = a or c or g or t
aatgattttnctagagaactgtgctcttcccttacctcggnnaaggtgaatgggtttccatcctgccccaatcaggaagcagactccccctgttcnngagtgcttcagcccctcgccactcccctgggagatcactggaacccacaccaagcaaggatggagggaccaagcaagagtcctacaccctcatgactccaagtgatgactgagtccagggttgactgaggactcctgatgacagcaacaacattgtggaagggacaggggtctgtcatccttagagctgtggcttgggcatcttacttttgttcatttgattttgagtgcagtatcagagtttagagggatttttgnnncntnnattnnnnnnntttnnnnnnnntgttgcannnangatatagtnnnnnnnnnctnnnnntttgtgnnngctcctaccccagagccccng

SEQ ID NO: 8554 - DNA, 559 bp, Canis familiaris
  misc_feature (1)..(559): n = a or c or g or t
tgcccggaccnaggccnccacccccgagctcaggccctcttggccccattcctggtgcagacacgaaaggaatatcagcacagaggagcaaggacccagcacgaccatgaccacgcacggnngtccttgaatatgttaagctcgtggtagaacaaatagtcatcaatgaagatacagtggaggcccagcggctccagcagggaccgcaccttctcctccaggcagcactggccgttgatgatgggcccgaagggcttggggatgcccaggtacttgcccaagaccaccatgttgacctgcagaagagaaggcgagaggggagccctgctggctggggatgctctacacatgggggacccatccccaggcctggcccatcctcatcagcatccctgggccaccaggatgggcacttgctccaaaactagggtctatggagaaaagaaacggatttgtggttggaagagaggattcataccaggtggggctgccgggaacacccatggcagctttataggaatgaaagtattcctccaatactttcttccatctatcagaa

SEQ ID NO: 8555 - DNA, 271 bp, Canis familiaris
  misc_feature (1)..(271): n = a or c or g or t
agaggtnnntagtttttcagcgttgtaagatgactgnnnngcgagcnnggnctctgcatagcattgaatgtttctgtgtcccagtttgcacattggcagcaaggtangaattatacctggaataaggggattgcatataatgataggcagaacctggagcatttagcaaggccaggcacaagaggagtgccaataagagtagatgctaggcacattccccagccccaaggaactggaccttctaaaaacaggagtattgggacacctgggt

SEQ ID NO: 8556 - DNA, 506 bp, Canis familiaris
acagaccatctggcatgagggacaggggctgatgggtggacgatggacttcagcccccccccacctgctctgtaccctgtttctttttgtcctcagcagcagggaagaagctagaggccataggagaatggccaagcaaagcgggggacacttgagagactttggggatagagcaggagggggatgggaggggccggccacctgtctgtgaggagacttccttgtcccccccaccccactccttgaacccacagtgctctgcttctctgtgtaaccctgccggcccctggtttggaggggggctcgtttgtgtgtgtgcgtgcgcgtgggtgcagcttcatgcagcctcttccacaggagggggcatctgtgcctcccctccctcttagtgtttgctccctgtgtggccaggcagggagggctgcgaaggaaatgggagtcccccttgccctccggcctgtctttcccccacccagtctcttccctgccccttctctggaaaaatg

SEQ ID NO: 8557 - DNA, 544 bp, Canis familiaris
  misc_feature (1)..(544): n = a or c or g or t
ctcgcaggatggggncgtgctgnntcagtggctctgctcaaactgtcaggttgcctatgacacctcagtcatcgagatggccctggtggaagccctgcagaagaaactgatggccttcactctgcaggacctggtcttcatggagcagattggaatcttccagaacattgcccagcactatggcatgtcctacctcacagagaccctggagtggctgctgcagaagaaccctcagctgggccactagcaccgtgagcagcattcccattctctgccctgacttcccaaacttgtcaccttgtctgggatggagcaccaaggaaaataagccccagggagcttcagggagcaggtcacatggttccggagaggcctgaccgaaccagtgcaggaagcggctccatctctgggttctctgggcctccagctgtggtcaggccacccatgtcaggcctgacaagggaggggccccaccactgtcttgctgaataaacagtcctccctgcagccctgccctcctaccctctccactgctgtttcagcg

SEQ ID NO: 8558 - DNA, 558 bp, Canis familiaris
  misc_feature (1)..(558): n = a or c or g or t
caaactgaacaccatgactgaggctgaggccagtgaaatccaagatgtttnnnngctggacctgaattctcgctggcagctgtataggctgtggctacagatgtatcaggctgacacccgccgaaaaatcctcaactatgagcgccagtaccgcacatcagcagagagaatggctgnnnnnaggctccaggaagacctgcacatcctgaaagatgcccaggttgtaggaatgacaacgacaggtgctgccaaataccgtcagatcctgcagaaggtggagcctcggattgtcattgtagaagaggctgctgaagtcctagaggcccacaccattgccacactgagcaaagcttgccagcacctcattctgattggggaccatcagcagctgcgccccagtgccaacgtgtatgatctagccaagaatttcaaccttgaggtatccctctttgaacggctggtgaaagtaaacattccctttgtccgtctgaattaccaggtaagaagcggaacctctcttattacctaccaaatgtnnngaagtctcctgggagcttg

SEQ ID NO: 8559 - DNA, 512 bp, Canis familiaris
  misc_feature (1)..(512): n = a or c or g or t
ggcttcaattcagcaaactctcactgagcacctgctgtatactgagcactgaatgggggagggggatgggagcactgagatgatcaacatggtatctgggctggggggcaggcctgcnnnnaatgggtgtcgtcgggcacagactcacatgtgatggatgtaaggcaggaagtgatgggagacggcatgagaatgtgtttgnnnnattacagagaaagcagatgcaagttggtgcagaccaaggaatgcgttctggaagagactgcacttgagcaaagttcaggaaggatctttgtaaacagagaggagattgtaacttgaaagggtgataggatgaggggccagaaggaggtctattatactctcatttaaaacatcaaccctctgcaactctctttttggccagcatctttcaactgtcctgaccctttagaaatgtccccagccagacacaatcattgaaactgcctcattatcactggttgagaacttggcaagatgaagggcttttg

SEQ ID NO: 8560 - DNA, 592 bp, Canis familiaris
  misc_feature (1)..(592): n = a or c or g or t
gactgtgtcagcactgtggctcgnacacaataaagccctcatggatccagtgtggccttgtgaatgggtagggacagggccctggtcagggggccttgtgtccgggcctcccttcacttggggcccccagggaacagcaggcgcccctnnttggggtcaacgctgccccagtgaggcccgggctgccgtctctgcacgccctggacagaccagcccctgggaggtggggcctcctgctggtgacgctgggcctgcagagatcaagcgccgagtgcccctggaggctgagaagtgtgttcagagaaaggccacgtggcccgttgaggacgaggggagccgaggcatctgtgttgcaagtagcgacggcacggtctgtactgagcagcttttttttcatggagacagtttacatgtgggggtgacatatcaacaatatgaaaaagacacggtgaagatacaccaaagtcgtattttaagtttttggctgcgtccccaccctcccccagcactggccccagagctggtccagccagtgacgccgcatggccctcaggtggtgcgcatctcccgcatgggccttgtcctgccttgt

SEQ ID NO: 8561 - DNA, 549 bp, Canis familiaris
  misc_feature (1)..(549): n = a or c or g or t
accaaagtgtgtccacaccctggctgnnnnnngaagtnctatttatccnnccacntgnnnnnncacatgaccatccattcaggtgtccgtgaattcacctgcgaaacctgcggcnagtccttcaagannaagaaccacctggaggtacaccggcgcacgcacaccggcgagacgcccctgcagtgcgagatctgtggctaccagtgccgacagcgcgcgtcgctcaacttgcacatgaagaagcacacggccgaggtgcagtacaacttcacgtgcgagcgctgcgggaagcgcttcgagaagctggacagcgtcaagttccacacgctcaaaagccacccggaccacaagccagcctgacccatccaaccactgaccacccctatttattcgtccgctcggacaccacgcccgggctggccggtgcccggacagccgcgggggcctcccggaccgcgggccggaaggaggcgcccctgcccagccccagggctgggcccccggggctggtcccccccaaccccgccctatttctggaggtggcgcctg

SEQ ID NO: 8562 - DNA, 543 bp, Canis familiaris
aaggaaagatgctgaaatccagaagctgaaaaatgtgatcactcagtgggaggcaaagtataaagaagtaaaggcaagaaatgcacagttactgaaaatgcttcaggaaggtgaaatgaaagataaagcagaaatacttctgcaagttgatgaatcacagagtatcaagaatgagctaactatacaggtgacttcacttcatgctgcattagaacaagaaagatctaaagtgaaagtattacaagcagaactagccaaataccagggtggcagaaaagggaaaagaaactctgaatccgaccagtgtaggtgattccgttagcctatgaggtcaacacaaaaattaaaactttcagggttttgcaaaaatgtatatatttaatgctgtgcaactgctaaactatgcagtttttgttggagaaagttaaaatgatgagctcactaacagtctataattttatgaccttttggcttaaagtggaaagaagaaaaatagaattccagcagaactcaatgattattgtttactatccatacttctta

SEQ ID NO: 8563 - DNA, 417 bp, Canis familiaris
cgagatggaatgagacctccatggcctcctcttcccatttttgctgagcacacagattactcatatcctggcaaatacacaggaagccacacaaaaggaagtcctggtccctttatatgaaacatacatttgggcacccatgatttgaatccttgacatcaaaggtataattggatatgaaggtcactcatggttgtccaatgggaaggtgatcatttattagcagtgcaatatattatttctctcttgaactctctttctatccctctaccaagactgttatcctgagatctctggggtctcagcacatccacgggccagaacaaattctgtcattgggctttcatccagagtttgcatttgtaataggtggtttttccaacttctggtagtcatataagacatgttaattttggt

SEQ ID NO: 8564 - DNA, 517 bp, Canis familiaris
  misc_feature (1)..(517): n = a or c or g or t
ttttatatgaagttnngaaggctatagaaagattgtattggggacagttacctgccagctattaaccattgcttctggnctgacctgaattcacagagggcatggtcacccgacaacttaatcaatgagcctctttggctttagagtggcaggggccaagagctccatcaaagaaccctatgtgctttcagcaactcagaagattccagttgttttcagcaggcctgagaggttaaaataaacaaatatgaaaatgccagattgccctctcatttcttctcatacctgctgccaaccagggccagtgctggacaggctgcccccaaagagactgtggtggtgcctatgaggccaagacatgtgaccagagctgtcactgcnntaagtgcctgcctttctctcctcaccccactctccatttctaaaaatgcatgaaatacccatttctgtataattaccaagtgcataaaaggccctccaatccctctctcctggcacagatttcaccccgtcgagt

SEQ ID NO: 8565 - DNA, 592 bp, Canis familiaris
  misc_feature (1)..(592): n = a or c or g or t
tcatcatgtagccatagatctattgcattaagtagttgtgtntaggtttnntctttttacnntactcaaaacgttagcctcccatggttgtggtacttttgtcactgccattgaatgaaatatcctttnnnnnaacattctttaaaatgagcgctttatctgtttcacaggctagaagctgtgattattgttccaaagcacatagttcactgcacatgaccacttctctgagaggacttctataacatactttgaacttgtcagagtcctctggactattcaggtgtatttttatatgctttgatttcccaactagaagatatgcatcttaataactggagctactctctgctgtcctcctttgtaccttacccacagttggcatttataatttggtatnntcaggtgcattagccagtgaaacaaacaggagttgagttgtgtcggacgtgaaggtaagcatagaaaagaggagggtattcnnnnnnngattttaaaggatatataatttcaatgataaatgantnctggtgctctggtgtctcattctggttgtcccttaaacaaagcagcatgcttcatggtgacaggc

SEQ ID NO: 8566 - DNA, 546 bp, Canis familiaris
  misc_feature (1)..(546): n = a or c or g or t
agtgtccgtnnnactcccgctcnncgtttacaaaacctnngncnnnnncnnaggctcttttgtnnagccaatnagctaataggtgtgaaagggctttaaaaaaaaaaaaaaactgtgaagcctccaccagcgagagaggttatttttgttataattgttgatgctctggaacactcttctcttggctccttttctgtctctgcccccttgttgctcaagtctgccccttgagggcttggtgtctccgttctctaagagcaggatatttcctcacttcctccagagaccaaaggtcagactaatgagctttaaacctccagagagctttgtctgaaaggaagccccagagaagggcttatcttggactctgtcctcaaatagccagtgatgaaaagtccacacagctggcaaaagggtggttggtttctcctcactggaaacaggatcccagcaggagatggacagctgcgttgtaggcattgtccattgcttttgggctctcatggggctttttaagtacactctgattttcatgggagtctttta

SEQ ID NO: 8567 - DNA, 658 bp, Canis familiaris
  misc_feature (1)..(658): n = a or c or g or t
aaagctagcnnngcaaactattttaaaagtatatcagtaaatgatattcataaattgaattagttagatatattttgtttaaaaaatttaaagtgcattgatatttattaatcattggatttaggaaaaggaacagatttctggtaaaactgacatgcggcagatggtaaagaatattataaaatgtttggatgagaacaatcagggcgaactacatttttctgttacactggtaatcatttgagaattgatttacctcagtgtttaacagttttttgttttgttttgttttttaaataataactaattgtcaagcactgatagagatgcagactttggtgggggggnntgggggnnnnnntcacctcaccagctgcagtgcatttgtgtgtttttaaccctcagagaactctgcattttagggtacttgaggctgacttgcaaattaaagttttaaagtaacctttttttccattgtaaatatttctgtaaatactaccaattggaaattagaacagtagagtacttttctgaannnatcctatttttattttatacagtatttctcagctgtgatctttggagcaaaagccaacggcaggaaaaaaaaatagtttgtaccagtttcatgaagtatgtctttgggtttttgtaaata

SEQ ID NO: 8568 - DNA, 531 bp, Canis familiaris
  misc_feature (1)..(531): n = a or c or g or t
cagattcnnatataatatctanaatgcgtggcacttttgctgacaaagaaaagaagaaggaaaagaaaaaagcaaaaactgtggaacagactgcaaccactgcaagcaaaaagcctggtcagggaacaccaaatgcagcaaatacccaaggaaattcaacaccaaatcctcaggtccctgattaccctccaaactatattttattcctcaacaatttaccagaagagactaatgagatgatgttgtctatgctgtttaatcagtttccgggcttcaaagaagtacgtttggtacccggaaggcatgacattgcttttgttgaatttgaaaatgatggacaggctggnnnnnnnnnnnatgctttacagggatttaaaatcacaccgtcccatgccatgaagatcacatatgccaaaaaataacatatggcatagttgtctttaaaggacttggtgttatttaaagtgtttgtcttgataacatttggtcaggccattttaatagttgggatgtgggtgagtgaaagaaatt

SEQ ID NO: 8569 - DNA, 641 bp, Canis familiaris
  misc_feature (1)..(641): n = a or c or g or t
gctgatgaacagactgctcagccctgtnntcccccagatcagnnnnnnncagtnnaacaaggagannctgaagaacatggcgctctccattgctgaacggtatagggctcagggaatcagtgcaaataagtnngtnnactccacattctatcttctgttggacttgatcannttttttgacgagtatcacagtggtcatatcgacagagcctttgatataattgatcgtttgaagctcgtgcccctgaatcaggaaagtgtggaagagagagtggctgccttcagaaatttcagtgatgaagtcaggcacaacctctcagaagtgcttctcgccaccatgaacatcttgttcacacaatttaagaggctcaaggggacaagtccatcctcggcatccaggccccagcgagtcatcgaggaccgtgactctcaactccgaagccaagcccgagccctaatcacctttgctgggatgataccctaccggacgtctggggacaccaatgcaaggctggtgcagatggaggtcctcatgaattaagtgtgatgctttgaggggcttctgggactgcacgctgtcagtacctcgggcgcatgggcccactggggtggagtttctggtttgtttctgttgtgttttg

SEQ ID NO: 8570 - DNA, 287 bp, Canis familiaris
  misc_feature (1)..(287): n = a or c or g or t
gctaggggcntatttttgaaaccagcctnnagaagaactgtgggtccacagctctggatctccacagcctggnngtcaagnnagctgggattctttatcatcctcctggcccttcctcttgatcaggaggtggcagacatagcttcatgtgtcacatctgcannaagaaggggacatgtccctttgtttataaagaaaaccagtagccttcccagagccaaccgcagagccgtgtttctgtctcattggctggaagtgtttattgtgnnnnnncttagctgcaagag

SEQ ID NO: 8571 - DNA, 230 bp, Canis familiaris
  misc_feature (1)..(230): n = a or c or g or t
gggcacagtgtcaccccattttccagtctttcaagagctgctgaaattggatttgttaatgcaaggtcncctgatttttaatatttttaataaattctagtttttaaaaaaattttgtctagatttggccctacattgtccgttgctttcaagtatgtgaacttctttttttcctgatttttctcatccataaaacagaataatctttacattttaggggatccctgggt

SEQ ID NO: 8572 - DNA, 497 bp, Canis familiaris
  misc_feature (1)..(497): n = a or c or g or t
ttggcagtnnnctggcagggtnnagtctgactgtcntgctgtggtttggccctgtttatcctgatttcctctnctgaggaacagcagccctttgccaaggcctcggctncttccctgctctgccttccaccctcagcaataggattcttcgggagggccggagaaacattccaggactgtaccctcttgctggacccagagccacttatgggatggtccgcccacacccccagccgaacctgtctcctgtcactggccctggtaattccgtgggcgtgtctgtgggatgggcacctggagcccccagataagccctgcaccctgccctccgaaggctgcatacaggggtgggtgtgtggactgagggcacttttcaaaaagctggccaactgcctgcctctggcacctggggcccactccgacgcggcgcgcggactgccagcccgctcagccccagagccgncgaaggccgtggcagtgatcaaggttttgtaaac

SEQ ID NO: 8573 - DNA, 525 bp, Canis familiaris
  misc_feature (1)..(525): n = a or c or g or t
tccagaacccacagccgggnnnnnnnggnntgcagcagatccccgtggccaagatggtgtgtgggnnntcaggctcccagcntgtccttctcaagctggagagacctgtgaccctgaaccanngagtggccttgatctgcctgccccctgagcggtatgtggtgcctccaggcaccaagtgtgagatcgcaggttggggtgagaccaaaggtacagggaacaacaaagtcctaaatgtggcttcactgaatgtcatctccaaccaggaatgtaacatcaagcaccgaggacgcatacgggagaatgagatgtgcactgagggacttttggcccctgtgggtgcctgtgagggtgactacgggggcccacttgcctgctttacccatgactgctgggtcctggagggaattataatccccaaccgagtgtgtgcccggcctcgctggccagccatcttcatgcgtgtctctgtatttacggactggattcacaaggtcatgcagctgggctaggcccaatctcaat

SEQ ID NO: 8574 - DNA, 566 bp, Canis familiaris
  misc_feature (1)..(566): n = a or c or g or t
gaatattcatatcgatagtgtgtcagacatcaaaaaaatgcnnnctgtcacctgccaatgttgtattgtggnnatttatagttgtacgtatgtatatgtatcattgtgtagactgtatatcagtatatggtatatgtatatcaaatttatttttatctttaataaccagtgtgatatgaaaagcaagtaaaaacctcataggattgattatataatgcagttattgagaatatatatagtggtactgttttattaaacttaaattaaaatattttgattagatttttaataagattttatgttagaaaattccatctttgatctttgaatcaccagggcaaaatgactctgaactaactttgtgaaactatttcagtgtactgtgtacaacactaagggggtagctcattgtaattttagatacatggaaagaggggaaaaaacagacatcctatgcagtcttaacaacttcagtattctgggcgcttaaccataaactcaaactggcagttttgggcttattacaaattgtgatgctttaaagcacatgttctttattgttgtaa

SEQ ID NO: 8575 - DNA, 566 bp, Canis familiaris
  misc_feature (1)..(566): n = a or c or g or t
tgtgtgtgtgtgtgtgtgtgtgtgcnngtgcgcgcgcacacatgctcgcacacatgnnnnnnncccnnnnnnnnttgggggtgtncgcgtgcgcgctnngnnnanccgcttgacaannngcagctccctaatgagtgacgaggcagggctgctgcagaaaagtaacacttccctggtgtgaagacctcttactgagaagtttagttcactactgttctcgcaaacctaatcgtataacctgtaaccaaaacccacagaacaaggatacaacacgctaaagagtaacttacaatcactaaatgttagcaccattacctgctgttaggaagggattgcagacctcggctcgtcagtctctggaaatacctggatgcctctgcatgagttccacttgttcccaaacgtcctggggtcagggactccctatgcatctgcaggaagagagctttagccagagcttggtgccactccaaagactcactgtccagggagccaaaagcaaagtggattttaggtaaaaacggcctcccctcctttaactagcaggtagacaggaagaaagaagt

SEQ ID NO: 8576 - DNA, 543 bp, Canis familiaris
  misc_feature (1)..(543): n = a or c or g or t
gtgtgnccactgagggctttccacatcctctcgaacacantnnnntagattntccctttttcctgctcacacagtatgtcatttccnntaatcaatagncctcctgcctgngcagctctcccctgcctttttcatttaggagcatcaaggtaaacctcatttccaggatcaatgtgaacattgacaaagtggaacttttgagtgcattctgttgatgctaattttttggaattgttaatatatgttgcattatgttaccaaagaaatattggttttagtagaaggaaatggccaccctctaaaacactgagactttttcaaaatgtgttcatttccctctcttgactctgccaagcttcctactgcttttacctgaaaaaggcagggccacttgaagacacttcctcctgctggcttttttctgaaaccagggagctagtgcacgcttatatatttcacaaaagggcccagtgctcagaacttcgttgtacccagggtttttaatccctcttgcagtattgaccagcagagagaaatggggtc

SEQ ID NO: 8577 - DNA, 144 bp, Canis familiaris
  misc_feature (1)..(144): n = a or c or g or t
cgtcaatatgcccttttcatttcgtttgttgtttactatttaacctggcaaacatgttaaattttaaagagagaaagtcatctggcatggagggtgtggtgatggccctttctaagaaggtaaagtttaaagnnnnnntgggaa

SEQ ID NO: 8578 - DNA, 613 bp, Canis familiaris
  misc_feature (1)..(613): n = a or c or g or t
tatactagaatttgagttaatcagtatagntacatttaagtgatagaagaatcacatcattgttattctctctttgaaaaccttgttatatnatggttcatttgtaaagtctgatgatagaaactgggtnnagggatgatagggagagaaggcagtgcaggggatgggggaaataaagggctaagactgtggtagtagaattaaatttgtctattttatataagttcctgtatgatctaggattttgtatcaaatattgttaatattcttgctgctgatgtttttaagatacacgttttcagagttatgaagaatttgcaggtagttcatcctaaattaaataacttgtcactaacttatttatagtctgcattttattatgcctaaagggtcattggtcatagattagggaaataatatccttcagagtactttatttggtcactatccttttgatcagaaggagccaatagtacagaactccaggaccatgtgattcaactttagtgctttggtttattttatataatgtaattaattttaacctcttgaattaggttggttatgtttcagctctaattttataggcagagaaatntacagaaacatagca

SEQ ID NO: 8579 - DNA, 545 bp, Canis familiaris
  misc_feature (1)..(545): n = a or c or g or t
ctgctgccgggagaagggcnnttcgctgggactggnnagctgggtgtggcgctggctggtccatgcttattggggcttgagggataggcactgggcgnnaggnnaggccatgtgctgtggccaagctgggtcactggagtgaccattggcaccacccaggccatcaggggtatgccaccccaccaagtgcctcacctcgctgcagcttgcacctggtgctttgcgaagaagagagccgatgtgagggccagggacatgacactgggctctgagctggaccgtgtggagctgccaggtcccccttcgaagggctttctggactcaccctctgaggtcctgcccactgccccaaacagcaactctgcaggagatgactgggagttagcatccatcctcagaggtggaggacaggtcacctctgcagacctcggggaccctccacaaaagcttcaagnnngagatatcccctcatggctcctctgtcagactcaggccaacgtttgtttataaagagaacactggtgtgtgtccagtgggaggtgggt

SEQ ID NO: 8580 - DNA, 417 bp, Canis familiaris
  misc_feature (1)..(417): n = a or c or g or t
gagagaaagaagtacacactgcgcatttctaaggccactgcatatgctttcaaggcagaaatcttgcccnctgagcagagtcagcagctccaacttgagcctgataaggaagctctctgaggcttctcccaggagaagcagggaggagcctgaccttgatgggctcttttggggcccaaggcaagtcgcaggcaatccaatcacgtgggcagctctgggcctctagccggtggtgttttcagaattaaattgcggaatttgcaaagtaaattgcggaatatggaaagtaaaatccgactgcttctctgaggtgcgccggagaggggacaggggagatcacgttgaaaggattgttattgcgtgttgggagaaccatcaatgactgcccaaatcattgatctttatatttcaatgccc

SEQ ID NO: 8581 - DNA, 560 bp, Canis familiaris
  misc_feature (1)..(560): n = a or c or g or t
atgnctacatgnngcttccaaagcatgatatgagagactgatanncaactaaatcaatagagagaaaaataatnnnaaattgtgaaaacttccacagagaaaattaatgcattgaggaagtatagataatggagggaggctgttttagataaggtaaaatggagatcttactgagatcctgaaagacaaacatgaatccaatccttgatgaagtgtttaagcaaagccatgcccatgcattgatacataccaaatattttagcaatatattctccaatttgtccttcagtttcattaattagtatgattcacaggaaaatctcagctctctgcacaaagatttgatgaagagatagccttttttggaaagttatagtaattttggaaaataaggaaattactcctgagaaccagctttaagagggggagttgcggggggtgggggtgcctgggtggctcggtggttgaacatcagcctttggctcaagtcgtgatccagaatcccgggttgggttctggattggttctggggtggtcccaggttgggttcctcgacaggc

SEQ ID NO: 8582 - DNA, 495 bp, Canis familiaris
  misc_feature (1)..(495): n = a or c or g or t
cacgaccactgggtacacagaganntggcgaaggagtggctggtcacagtggaatgagaataggtgtagaatctacatgcaaatgctgatgaatttgttactgggaatccgtgctctgctactggctatctgtgtcctgcaggtcatcgtatccttgacttccctgagcatggctcttagaagttcgcgtggccagagctcccggcctctggatgaggaagggtcagagaaaaagctactgggggagaattcagtgcctccttccccatccaaggagaagacaacagctgccatcatcctgtgagctcctgaagaccctgcctggtcctccgcatgcccccagccagagtagcccagggcctctggaggatacagcatccactccctagggcccctccctgcccctgctcctcacacttgcctgtcctttggccagtgtcccggcctcctctttttctgctattcccactccagtggcctcaattcaaggaacag

SEQ ID NO: 8583 - DNA, 413 bp, Canis familiaris
  misc_feature (1)..(413): n = a or c or g or t
gccccagcngaccccaggcacccgcgagagggtgcgcttcagcgacaaagtgctctaccacgccctgtgctgcgacgacgaggaggcggacggcggggcggcggccgaggcgggcctgtccccagagcccccccgccccgaggccccggtgggcgcccccaagcccccgcccgccccctgcaagcccaggcgccctccgctgaccagctgccgcccgggccccgccgcccccgagcagacccggagggtcacaaggaacagtagcacccagacggtgtccgacaaaagcactcagacgttgctgccctacacggctgccaaacagaaggccaaggggaaaaactaggggcttgggaggggcccggggggcagtgggcacatagagctataaatatatatatatatacatatat

SEQ ID NO: 8584 - DNA, 581 bp, Canis familiaris
  misc_feature (1)..(581): n = a or c or g or t
annnagtgtcacatgcaggggatacttgggggcaggtnngannacntagtnnaagattnnncnnattcattccctgtccccnngnnnaaagttccttctggaggttttcttnnggatgnnaggaactnnngcnntgaggannaannnnnnccggttaagagtctcccaaacagactacatatgttccccaccacgagggtaaaagcagccaagggttgtcattgggaaagaagaacattctccattgcctatcctggctctgcaactcctttgttataagcaggattaatcgagtatcgggttggagtatcctgctcttaatattttatgattcactgactcaagtcctgaaactcttggaaatggctctcctaatgtagaagatcatgagcataattaatgtgagaataaaaaggcaagctttagacctggatggaacaggctcattaccttcctaagaggagaacccgagagacacttggaggccccaggcgcctggaaccttgggttggaaagaggaaatgtaaagcaagtcctggaatctcttagtaattttgctctgggctggacagagcggcctt

SEQ ID NO: 8585 - DNA, 698 bp, Canis familiaris
  misc_feature (1)..(698): n = a or c or g or t
ttgcaaaggctgcangntcatgccatcaggggaactctgtagacatcaggtcaataaatgtgaccttccagagtggtgcaatgggacatcccatcagtgcccagaagatgtatatgtgcaggatgggattccttgtggtgacgatgcctactgctatgaagggagatgtaataaccatgacaaacagtgcagggagatttttggtgaaggagcaaagagtgcatatcagagttgctatcaagaaatcaactccctgggaaaccgtttcggccactgtggtataagtggcacgacatacctaaaatgtaatatctccgatatcttttgtggaagagttcagtgtgacaatgtgacaaatattccccatctgagagatcattctactctgcagcaaactcacatcaatggtgtcacctgctggagtattgattatcacttgggaatggacacacctgatgttggtgaagtaaaagatggcaccatgtgtggtacaggaaagatctgcatacgcaagaaatgtgtcagtttgtctctcttgtcacaagtctgcctggctgagacctgcaacatgaggggcatctgcaataataaacatcactgccactgtggctatgggtggtccccaccctattgcctacacagaggttatggaggtagtgttgagagtggcccagcatctgccaaaaaaggtttnnnnn

SEQ ID NO: 8586 - DNA, 519 bp, Canis familiaris
  misc_feature (1)..(519): n = a or c or g or t
cacgggagtcggagccagtggtggtgacaggagaaggcagtgactcaaacagagacacagtgcccaagggccaacttccaacacacaggccagggccatgttgttcgggcatgcatcgtggagaatgcagcagtggcgacctcgacaccagagcccccgaagttccaggaagctccgcgccctcagccctgagccagggagacgtcatgcccagagggcgtgcaccctccagtgaccaggagccgcttgaccacctcccaagaccggaaaggctgcagcaaccacctggaacacagggctgtcctcggtgtgtcgtgctacagagagaaatagacgacctgaaagagcagcttgcggccatgcagtccctgactgacaagttccagaccctttgaagtcgggcccagcatctccgtacaagaggatcagctggtacttctggagccaggaagttgtggccaagctggttccctcctgttccacctcagccagggcttcctctccctnnnnttgtgcccc

SEQ ID NO: 8587 - DNA, 58 bp, Canis familiaris
  misc_feature (1)..(58): n = a or c or g or t
gatcctcccatttggagggggatcttggggttagnnngnnnagaatgggaagggtnna

SEQ ID NO: 8588 - DNA, 549 bp, Canis familiaris
  misc_feature (1)..(549): n = a or c or g or t
ttctatcagaagcatcagcaatcccgggcacaaaatgagctgatgaattcaggtnngtacctggtgctgctgcttcacctctacgagcagaggtttgcagaactcatgagactcaattacaatcgagttgcaagagagaggttgtcaagaaattacccacaaccaagacgggaagaaaatgaaaatgctgagctgggggacggacttgaaagcagcagccacgctgtctagcacgggggctggccccggagccctgcggagacatctccccttggaggcttcttctgtgttcccatgcacctccctcccctctctttactgaaactgaagtgttgacagttaccattttcacctcgcgcccctctcctctcagggtctggcctgagcaacaggacagcagcgaccacgcggtccccgaaagcctgcagcctgggttggatgagtccccgcccgctgccctgcagctgccccttggcccaggggaccccaggtgactcggcagcctggaggccctccacggagggcacctgttcaggcctcactccaccc

SEQ ID NO: 8589 - DNA, 446 bp, Canis familiaris
  misc_feature (1)..(446): n = a or c or g or t
caatgaggnnnaccaaaaaattgangcattaaaatcagaaaataagaagctagaaaaacaaaaaggagaattaatgataggtttcaagaaacaattaaaattaattgatattttaaaaaggcaaaagatgcatattgaagctgccaagatgctgtcttttaccgaagaggaatttatgaaggcacttgaatggggaaattcataaatgatctactttataactgactatgtgacccatatacattgtatttaaaactttaatgatttattcttactctttataaactttaatttcattggctttcatccggtaactccagagaattccctgtttagatttaggggatacagaattgacatgtaattattaaaggaagtattttgtaaaataggataacccacttgccctcttatattatattcagnnnnnngttcataagtgatag

SEQ ID NO: 8590 - DNA, 200 bp, Canis familiaris
  misc_feature (1)..(200): n = a or c or g or t
anagtgtcctgtcnnnnnnnnnnnnnnnnncactnnnnnnnnnnncacnnnnnntcnagcanttcccccttatctccctnnnnnncctctctngannnnnnnnnnnnnannngacannnnnnnnnnggggggggcagnnnatggagagagnnnggtagaggtgggtgggcatggggggcaccctctgtgctgnttttttt

SEQ ID NO: 8591 - DNA, 527 bp, Canis familiaris
  misc_feature (1)..(527): n = a or c or g or t
cacagtngaacgcccctgccgccgcccttccccctgaagcaggtcaaggtccccatcgtggagaacagcatgtgtgacgtgcaataccacctgggcctcagcacgggggacggcgtacggatcgtccgcgaggacatgctgtgcgctggcaacagcaagagcgactcctgccaggtgggcacccccgccctgccctggcccccgccgcccggccccggccgccctgaccctcccgctccccagggcgactctggagggccgctggtctgcagggtgaggggcgtctggctgcaggcgggtgtggtcagctggggagaaggctgcgctcagcccaacaggcctggcatctacacccgcgtcgcctactacctggactggatccaccagtacgtccccaaggagccctgagcccagcccccgggccgcccgggttggtggggaagccggcctccacggcgcctcacccctgccccccggcccgggggccgcccttttccccctgtccccgtggcctgtccccggagccc

SEQ ID NO: 8592 - DNA, 578 bp, Canis familiaris
  misc_feature (1)..(578): n = a or c or g or t
ctcagtnnnngttcacctttgtcatcgtgctcccctaaccagggcagcctaanctnnnctgctgcagtggtcagtaatcagggagacagaagccatacaagactgaactctggaaaaggaatcaaaatccccagcctgcacggagtatcaaaacccaccgctcccccaacctcagctcagtccaagagggtcagcaactcaggtttgcccactctcccccaaccccatcctcccagaggtcgaacatcttcagtaaatgacaccagacaaagactggctgccattctgcggaggagactgagtcaacagtgagtgatccacacggcacgcctggcctttccagtgtgccagggatacactgtaactgaggatggcaaaggtcaagttattatcacagatcaagaatgcatgtttgtagatatttttaataggataattggaaaaactaggaattgtgaagccacactctctaagagacctttgaaattgcaacagatgatgaagttgtcgataatcccagagggccactctctatatttctatatcatatgtttagatgtgttctatgaatatgtcct

SEQ ID NO: 8593 - DNA, 459 bp, Canis familiaris
  misc_feature (1)..(459): n = a or c or g or t
gcaaatgccctctcgtgnnngacgtagctttgctgtctgacgggctctacgatgccgctgacgtcagcacagggaagtgcgtttccagcctgtgagtaggtccttgcgtttaaaccctgatgcccagagcccagtaccttgtgccttcgtcgtggtcgctggcaaccgaaacggtctccctccgtcggccgagggagccaggttgacgacggctccctcagggccacactcctgctgtttttcaagacgttaacatcgatcgtagatccggaccaacccagaaacttaactcgtgtctcttaagtgggttaatgcgtctttattgtcagtggctagtagtgagtcttcatcataggatttccaggctgagaagaaaaggcagtgatgagtngccgacctgagaccgtgggaggaccccgcagttcgagcccccgtccnnnnnnccgcactgaccgcggc

SEQ ID NO: 8594 - DNA, 518 bp, Canis familiaris
  misc_feature (1)..(518): n = a or c or g or t
cacttccactcacctcaactgtgctccggaaagcatcaccatgatctgaggcctggnnagggtggctggcccagcctcagcagctccccacctcataactttgcatttattttgtaccaaaaacaattttgagaaagtattttgttgggatatgggtttccttgctgctggaggaatggccatcccatacccacctgtgctatagaagagcaggcctggctgctgcctgggccacacacaacctactgcttgactctgcagtgttttatgtttaaaggtcacatatcctcactcacccagccagcccttcaggtgccttctactccccagtgccgaggcaacaccactggggtttcccgctgcaggaattgggggctggaaacagcaagagggatagaagtcagggaatagaagggggagcactccttagtctgtgggaaggcccacttttgggcccactgagctgcactgggattcttcactcggccccttactttcaggcaaataacatagcagaa

SEQ ID NO: 8595 - DNA, 499 bp, Canis familiaris
  misc_feature (1)..(499): n = a or c or g or t
anngtatctgtgcatcgagcagtttcgaattccccgcgaccgtctggtgggtcgcagccggcccgggctctacagccatctcttggatcagctgtatgagctgaacgtgctgcctccgaccgcgcgccgcagccgcctgggcgttcttttctgtccgcgcccggacggcacggccgacatgcacatcgtcatcaacggcgaggacatgggcccnancncccgggggctgcnnnnnnnnncnnnncccnntacgcagtggtggacgtgtttgcctccaccaagagcgtgcgcctggtccagctcgagtatggcttgccgtccnngcagactctgtgccgcctagtcatccagaggagcgtggtgcnnnnnnttggccattgatgggctccacctgccgaaaggacttaaggatttctgcaagtatgagtagaggnnngnnnccaccctggaactgggccacatgagcctgtcctggccccngagctgtggctggtctgaa

SEQ ID NO: 8596 - DNA, 600 bp, Canis familiaris
  misc_feature (1)..(600): n = a or c or g or t
ataattaatattaaatgactaattataatattttatcaatatgaattctnnaggccaacaccannnactattaaatttttanntcctgaaaatgagagttttagagacatttaaataatgttctctaatatccatgtgcaaatgtagacaaatccactagtctgtttaaaaatgatttcttggggcatctgtgtggatcagtcagttgagcatctgcctttggcacagatcatgatcccagagtcctgggatctagccctgtgttgggctcagaggggagtctgcttctacctctccacactgcccatgctttctctccctagttctgtctctctcaaataagtaaacaaaatatctttaaaatgatttctttatattaactaatgttcagcaagtttcagcaatgtctcttgtaaggagaacttaaaatagcaagttgccgcacaactaactggattgaccacatggtgaccctaacctcttggtaccacggctaaaaacccaaaaccagcagcttcttgaacaggtgtttatcctttcttgacttagccttaggtaacaagcatagcaattgtattagcaagcaactaatttgtgtgt

SEQ ID NO: 8597 - DNA, 569 bp, Canis familiaris
  misc_feature (1)..(569): n = a or c or g or t
gccccagttcaagaaggtttttgagatccctagtngagaagggtttttnnacatgattgataaagaacagaaaagcaccctcatcatggtccatatttatgaggatggcattccggggaccgaagccatgaatggctgcatgatttgccttgctgccgagtacccagctgtcaaattttgccgagtcaagagctcagttattggggccagcagtcgcttcaccaggaatgcccttcctgccctgctgatctacaaaggtggtgaattgattggcaattttgttcgtgtcactgaccagctgggggaagatttcttcgctgtggaccttgaagcttttctacaggaatttggattgctcccagaaaaggaagtcttggtgctgacgtccgtgcgtaactctgccacctgtcacagtgaggatagcgatttggaaatagattgaactgccagtctaattgcatagatttctcattgtttgggctggaagacacatgtctgggtatttatttctgttccttcctgtgtcatgtggtttttnnnnnngttctttgtagtcccttttattatat

SEQ ID NO: 8598 - DNA, 533 bp, Canis familiaris
  misc_feature (1)..(533): n = a or c or g or t
cagtctcccccaccnctgtgaagtccagagaactnctcagcgttttcantggatccgatttgaccttccttttctgactgccacctgctgttatggccataggctgctcatcacctccctgcaggcagtgcacnnttctgcagctgggtgagaattgtgggggtccctgtacacatcctccctgacccattccaagggagccccatccctaggaaatgcttccataaaatttcaagtcccttaagcagacccctgacattgccaagttgaaaaaaatcctcccaggcaactttgtgagtcagtaacctcgctggcttctcagtctccgggcagtgatgggttcagtgttaaatgtgatgaatactgtattttgtgttgtttaaatacatctcccagataatgtgaaaagggtccaggagaaggcagcttcctgtacgcagtgtgcttttttttttaattttttatttttaacaaataacaagtccttttgagaaaccaccatttctactctgaagtcatatcaatgaaaagat

SEQ ID NO: 8599 - DNA, 659 bp, Canis familiaris
  misc_feature (1)..(659): n = a or c or g or t
tnntgacagcagcaaatnncgcatatgtaanncagaaactagattcaaaagagctgggaaaatatggnctgctctattacaatgcactgttcatgattctgcccactctggccattgcctattttacaggagatgcgcaaaaggcaatggattttgaaggctgggcggacaccctctttcttctgcagttcaccctctcttgtgtgatggggtcctatagacctccttggaggtgcacacttgagccatggtctgtgcactcagctttctatctgggtttattttgatgtatgccacagtactctgcacacagtataattctgctcttacaactacaatagttggctgtattaaaaatatattaataacttatattggaatggtctttggtggagattacattttcacatggacaaacttcattggcttaaatatcagcattgccgggagcctggtgtattcctacatcactttctctgaagagcagctgagcaaacagtcagaggccagtaacaagctggacattaagggaaaaggagcagtatgaccagagaattgcttcgactacataggcccaagtttttgatcaaccgagaacactggcaattcttatacagacactgaggtgtcttgagtatggagaaaataccattcctttg

SEQ ID NO: 8600 - DNA, 222 bp, Canis familiaris
  misc_feature (1)..(222): n = a or c or g or t
aattttaaattacatttatgactctcattatctttttgttgggcagccctggtgtagactacgggtctgcagactnnngcccatgggccacatccatcctcctgtctgtcttgggatgacttgagaaagcaaagaatggtttttatagatgaatatttgcaactgatttgataaaaaggaacagtagcttttttttttttaagattttgtttatttattcat

SEQ ID NO: 8601 - DNA, 442 bp, Canis familiaris
  misc_feature (1)..(442): n = a or c or g or t
gagttgctgnncgcactatgtacgcggttcagtcnaggcattttatccttcttttgtctttctgacaacttcctgtaccacctcaatgatcaatgaggggaaaagagcaaaccggagatttctggagttaaccagctacagttctacagtgtcaaggacacaagaggacccctaggaaccccagtgagtgaatggctaagaacatgcgctttggagccacccagggaggagatactggctggaccccagaaggttgtnctgaggatttattgctacgggggaaagtgggggacctgagacacatggcacagagaggcattcttgccagtcttgtaacacctaaagaaatcctggctactgcgacgttgaacggttgctgtgtactccaggctgcagggagtgagcacaggagaagacacaggaataagaaccaacagaaaag

SEQ ID NO: 8602 - DNA, 637 bp, Canis familiaris
  misc_feature (1)..(637): n = a or c or g or t
ggaatgctgttggtgcnnctagaaagaagcatttgccattggcagatagnnttagcatnnaagaaccaanctcccattttcactttaagttggtcatatgcctcagcctcacagaacttggggatccagtcagtatatccagaactgggtataaaaattactatggcatccagttctctgaagaaatatatcagttactgcttccataaagtagtcatttgaacaccccttgacatcatgtgcacttgggccatcgtttgcacagtcccacctgtgatctcagtacttaaattccaaccaacactttgtgacccacagattaacatgttgagaagcctaaagatgaatacagcatgtgcatcacagcagtgttgctggctgctttgaaagcattgaattggcttctggcagagaacatgcatctattgattcagaatccctgaatggtacaaccaaaatgttgagcatggcatgtacaagccgtgttaggcctcagtaatgtgtggtagcagatgatggattcctacatgtgcttggttgctatgcagctggagtatcagacttggaggtgatggcaaatggtacttcccaaacacatctgctagagttgggcagactgcacagatgattgtggtac

SEQ ID NO: 8603 - DNA, 473 bp, Canis familiaris
  misc_feature (1)..(473): n = a or c or g or t
agtggcatgatggatgacataagaaagaagagagaaaaaattgaaaaagaattcctgnntnntcctcgtgacacatgcagagtgcagtacgtggattacatggatgaaattgnnnctgagataggagtgaaacccaacctgctctcgctcttcctgtgggatcctaaactggctaaggacattttctttggaccatgcacgccttaccagtaccgcctgcaggggccagggaagtgggctggggcccggagagccatcctgacccagagagagcggatcatcaagccactgaggactcgtaccctcagccatgaccagcccccatactctgtgccattttggcttaaaagtatctgtgctgttcttctctttgttctcactttaatcattattaaaggataatcctatgatcgnnagtccattagagtcgaagagtgacacacactaattaagagacaggcatgtgcaagtgt

SEQ ID NO: 8604 - DNA, 378 bp, Canis familiaris
  misc_feature (1)..(378): n = a or c or g or t
tatacatatatatgtatgtntgtgtgtatatatattcatgcagagtgatgagctgggagtgctgagtgagctgcctgtctgcctatgaatccaaggtcagagctccctcaggttctnnagggcagcagattgcatgctctgtnnttggtgacaagtgagtacttggccagcatgtggcatggatccttgcaaatctgccaacattcctggacatcacttcccagcacgttttgctagcagtgggattccttggacatgagaggacagttgacttgttttttgaaannnnnncatgcnctggtgaacacctactcagtgtcttcccaggagagtggcctnnncaaaccagagagagctggggaaggagagtcaggctac

SEQ ID NO: 8605 - DNA, 534 bp, Canis familiaris
  misc_feature (1)..(534): n = a or c or g or t
cacctcntcggcacacccacagctccagagagcacaccacgtgctttcctggacctgcagccccggcgtccagcagaacgtagtggaaatcagggagccctgagggtcccacaacacaggtctctgctggagaatcccgaaggtgaccccatacatccacctcttgatcactctgcccagagtcgtctagtttcaagcagaccttctgggttggctctcaacttgtaaggcccctgtctgtggaaatttgcttctttaaagaagagattaggagcatgttatgacctccccgccaccaccaccaactctcagacggtgctgacgcagtggtcccatccagcacgcaggcccaggcaagaagccgcttcacactcgatgtcctttgtggggtgtggaggaggggaatcttagatactagaatcagaagacaccagtgaggggcgcctgggtggcttggttgagtgcctgccttctgctcaggtcatgatcccagggtccctgggttcaagccccnnntcaggctccctgcctgcc

SEQ ID NO: 8606 - DNA, 608 bp, Canis familiaris
  misc_feature (1)..(608): n = a or c or g or t
tgcttccctgggtttctgctttcaccatgcagaatcggattcatccacgctgacactatggctgggagagggacccagccgattaccaggatatgctacacatcaactaggagttgcannagctgtatttgatgaaaatactagaaaaatcttggtggtacaagaccgaaataaattgaaaaatatgtggaagtttccaggaggcctgtcagagcctggagaagatattggagacacagcagttcgagaagtttttgaagagactggtataaaatcagagttcaagtccctcctgagcattcggcaacagcacgccagtcctggagcttttgggaagtcagatatgtatatcatctgtcgcttaaagccatattcattcaccataaatttttgccagcatgaatgcttaaggtgtgaatggatggatctcaatgacctgatcaagactgaaaatacaactcctatcaccagcagagttgctaggctgctgctctatgggtatagagaaggctttgacaagattgatttcaccatggaagaacttccggcagtttacacaggcttgttctataaactctatcacaagaaactgccagacaattacagaa

SEQ ID NO: 8607 - DNA, 513 bp, Canis familiaris
  misc_feature (1)..(513): n = a or c or g or t
atcaggtnncgtggttgaannatgtggnnagaaaagatgtataggccacagagacttatatttttattgctcaattatatgattggncttatggctttggttttcttnnagaggggaccttgacgagatttgttgtgtccaccatttctaaagcttgcatcaaatgcattctagacttttaaatctgcatgcaatatcctatcatcaagttgatgcaagtgaaatttcaagctaattgctactgacgccaattattaacatacttaacagtgaagggacaaaagtgtttttaaagttaggctttaagtctagagatctgatgtccagtatgatgactacagttactaatacttgtagtgaatatggaaatttgctaagagagtagatttcaggtgctctcatcacaaaaataatacggtaaccatgtaaggaaagtgtatgttaattggcttgaccacaacagttatttcattatatgttttacatcaaatcatcatctcactcaccttatat

SEQ ID NO: 8608 - DNA, 582 bp, Canis familiaris
  misc_feature (1)..(573): n = a or c or g or t
tcctggcactatanntgggggctttgagtccagcnnngagatatggtttctgtgattggcccagccactccctaccactcaanntannaatctctttnnaccatctgcccacacagagcttgtgctgagtctattnnaaaaggcccacttctcattctctagaactccatgtccactgaatgaaaaccttatccattggatggagactctatattcattggaataaaagtcctctctctgggcctcagtttccccaactgaacaaagagagacttgcactagaggagccctagggtcccttctgctctctcattctcaccatgaggctcagtctggttgggtgcccaggtctgggggagcccacagttcctgccagaatcttcaccctgagaagtcgggctgtaatattagtctccagtccttgtcatccttttagaccccaaatcatatcccaattgccttcctgataaggggcctctcatgtagtaattacagccagaaaatatttgaagtatctttaattctttttaataaatgatttgttgtacaggaacaattcttgatttcattcacttacaaaaa

SEQ ID NO: 8609 - DNA, 587 bp, Canis familiaris
  misc_feature (1)..(587): n = a or c or g or t
aattctttcgctnnnacttctaggagggcgcatacagaatgctttctctttggcttactcagcatgatctcatcaagnnagcatttgtgagcanctgcctggcggactaaccttggggccaccctccatgtgggtaccatgttcctttgcagaaggatggaagagatgcactgccaagcacagaatctggttcaccctggaggctcgggaaacacctgttgccagccttgggagtccctgcctcaggaatgtggagcagcccagtggctctgtcttgaggagccaggctggccctgagtcagagctggagactcctgactgcagtttcaagaaggttgcagttgggggtgaggaatgaagttctgtcatcttctcaagagcccgaggatttagtttatcaaatccctttctagtatgttgggatgttttctggggtatctggatctgaaatgggatttcacttggaggagctatataaggctttcataattaaaaaaaaaaattcactaaaaaatcagaattgtagagcactggctagctcattgggaagagcatgtgnnncttgatctcagggtnnnnngtccaag

SEQ ID NO: 8610 - DNA, 547 bp, Canis familiaris
  misc_feature (1)..(547): n = a or c or g or t
ccatcaagctgnngagattgcgggggnnngaggggctggggcaggggcgggggcctggcctctccctggcacctctgaacctgggcgatgctgagactggcttcctgacccagagcaacctgctgaccgtggctgggcgcctgggccctgactggccggctgtggccctgcacctgggcctgccctaccgggagctgcagcgcatccgtcatgagttccgggatgacctggatggccagatccgtcatatgctcttctcctgggctgagcgccaggctgggcaaccaggggctgtggggcttctcctgcgggccttggagcagagtgaccggctggatgtagctgaggaggtgagggccatcctggagcttggccgccagaagtacaaggacagcatccagcgcacaagcctggcccccaggggccttgacccagctgaccctgcagcaccacagtctgtggagtctgcccaggcatagaccccactgactttgggatggccccgatgnnnnntgccaaagggtcaggggtccccattttcaagcct

SEQ ID NO: 8611 - DNA, 541 bp, Canis familiaris
cacgcctgggttcagacacgactgtccagtcttccccaatttgaccccagagaagccgttgtacccgtcagggatggtcagcgtcttgcctgtgggacagggagtatcctagcgggtgcttcccccagacgtccccaggccactgtggcctcatatctatgaccttggaggcgggtgtcacctgcaggacatacctccacccacacgttcttccttggtgtgttcatgcatccaggcccacgaggtcctgtgtgcacacatgtgggcaccggtaccctcattctggaggcccagaaggtgacaatcgccccggccagggatgggcaacagcttcccaggatcctaggctcctgaatccaaggcaaaccctgcagaaggtgttgtctggtctcctgttgtgattctgagtctggggttgtggatttgctcctgaatgggaccctctgtgccctgtgaccctgggtcaggtgttcaaaactgcagctatttcagaaaaccattcttttcctcacccttcgattcatgagttacacatccaaga

SEQ ID NO: 8612 - DNA, 327 bp, Canis familiaris
  misc_feature (1)..(327): n = a or c or g or t
aagttacgagaatctgtgtggaacanntgatgtgnnaaggaaggagacaagaaagaatgctatgacatggcaaaggacagctcataccaagacaactttcccacaagacaggcataaggagtttgtttttctcttgctccttttcactaaaactacccatgcctgcattgtgacatctggaggcccagtaggcactagccctgtggtcctcccaactggcagcccacagcctggcagggatcaccgctgttgtcaacagcagcgagacagggccagcctgggagaccttgacattgtcttcttggtgaccaggtgtggacagggatg

SEQ ID NO: 8613 - DNA, 255 bp, Canis familiaris
  misc_feature (1)..(255): n = a or c or g or t
gggctcggcttttgtnnnntgtcgnntgctgtgtgcatagcaccccccgggcttgtcgggcggctccccagaaccactcacactaatgtgctgctaactgggacagatccgtgggacacaggaacacctgtcggactcagacccgtaactnnaccgccaaagtcggtcttcaccccaagtagcnnctgctactaggtctttaaatgtatgttcagtttaagcattttcggcatttcccagacatctccngcaaat

SEQ ID NO: 8614 - DNA, 372 bp, Canis familiaris
  misc_feature (1)..(372): n = a or c or g or t
ggacttcagaatccggttaggatccgagtgtggtcccagagcacgtgtcctggccagaggagcacaggacactctcacatcntnacctccccatngaagagatgagtaataaagctcannagcttgcccaaggcaccatngaaaaangcgttcatcatcttaatggcacctttcggnnnnnnnnnnnnnnnnnngccncttcctcannaaaccccctcccgagagnngtctntgtnnnctattcctggcatgtcctgcggtacaaaagcacggttcatcttttcaaggagacgtggggaggttgaaagtcaaacccattggaacaaannntggcttgggagaacagtcaagtgcttnttagccaagtgctcg

SEQ ID NO: 8615 - DNA, 629 bp, Canis familiaris
  misc_feature (1)..(629): n = a or c or g or t
ttatatacattccagcacaagaaaatgagcttttattnnaatngaaattgttctgattcctgtgctgatgtttgaaatnncagnntgatggggagagaagaaccgaagctgtcagttgaaaccagcccttctcacttgggagtctaccatctacaatagcccactacaaacatctttattttacattttttattgtctatactccccacattcttgacacctgccaaacagtgagggcagcacttctacccagagaagagtctggcttcccctgttgtctgtcccgagcaggccgagtgtgaccctaagtcaaaatgtgcttccacaaaagtggtttcctgcattataattctctaaggtagattttggtttgttttaaaagaagaaaggtaagagttcaactcctttgaaagcaaaaaagtgggaaacaagcccaaatctaaaactaggaaaaagattggctttttcaaaggttcatattatataactgcctctttgtaacttccagccaatctgcaaaggagactctgcctggagagagccagttcttaagagcatagcttaaccctgtgcccccttggcttctgtgccatttgacaaaggtttagtaaatggaatggattctccta

SEQ ID NO: 8616 - DNA, 515 bp, Canis familiaris
  misc_feature (1)..(515): n = a or c or g or t
tgtaatttnanngcatctcaatgaattatntctntnaatattattcttcnnncntgctttagacctagaaaattatggtttggggaagnncttttanntcactnnntggttaatataaaggatnnnatnnnatagcaagtgtgaagtannnnnaatgtttattatttacagcgttttcctgatatgttgtcttcatagcacaccaaaatgaaatgatggaaaggctcgtgggctcacaacctttgtttttcttttaaagtaaatgcaagtaccaaagctcacccntaaggtctgactgtgcccgggtaactgaggcagagctgtagcccaggctcccttcccccacccgacccagtccaagagcagaggcttcgagatgctgtaggaagcaacacccaccttacctgctgtttgttactaagtatcttcaccttcctttgagtagcaatttgtactaagaaacatgttattttggtgttgtataattctacttttctagtagattgctgtgtgga

SEQ ID NO: 8617 - DNA, 480 bp, Canis familiaris
  misc_feature (1)..(480): n = a or c or g or t
gtnnnaaagaaggctcngtctcncagcccatnngnnntcaccatcagtctgtctagaaannagtctcttcactggcctgttcagatgttcattcagtannaagtacttgtgtcnnnnctgagtcaggccctgggcaggtgatactagggacacagtagtgaccaaaaaggtttagtccctgccctcataagctcttgatatttggaatgaccaaatgtaaaacctagacaccaagatgctttggtccatactcttgccaacatcatcgctagtgtggtttttgtcatctcatgggactctgatgaattcaatttgtcagtccatccttgcaccaatgccacaatatttttattactctacttttatagtaagtcatgatatctgatagtatagattttctaactagttcttcaagattgtcttgattattcttggccctttgtataaatattttgaaatnnnnnntgtagtttctatccc

SEQ ID NO: 8618 - DNA, 595 bp, Canis familiaris
  misc_feature (1)..(595): n = a or c or g or t
cccggattctcctggacattgatgaannagcaagagcatcaggcagttggcgcagggcgtgtctgaccaaatctccccgtctgccaacaggtttccannngatggttgacattgggacctgggggcctccagagcagagcccagcgtcacagggagatcagatatgactgtgctatttattgggaaagggaagggcatcgagcgccccacctctgcacacagtgacagctgctgttcactgccacccagcactggggactagggttgaagctcctgggctgggcagagacggctctgtttcctcagctgctctttctgtggaaacagagctaccggtgagagaagatgctatggtggaaggacacagaaactcatgctggtgccaagttttcttccttgtttctatcctgtctgtttccagtggggacccaagttcactctgaagaggtctgctagtgaccggacagaacccggtgtatcaccatcatcgccatgctccatcttcagtgactgagctgggaggcctccagcttgcttctgcttttccttctcttttttattttgcctttttccacctgtannntggggcgccctt

SEQ ID NO: 8619 - DNA, 531 bp, Canis familiaris
  misc_feature (1)..(531): n = a or c or g or t
tcnnnctnnnngagtggtgcagtcagtgacnngcccctttacagcgtatatgcagtctgggctctgcctccctcataaagtgctttatggtggctgaanccgagcnctccttccccagtacctcagtgccagactctcagccccacacagctgcagctgtcaccacccacagtccgtctgccttaatctgcacacctctgacatctggtataatcactgggtcagttacaaccacgaccaaaggagacaaggtacttttgctgcagttggaacttccagagggaggagagatgcctgaggtcttgcacaattcatttttgggcctgctcagtcccaaacctccaagcatcagcccacccctgcaacctgatctctggcagcagaatacagttagcctacagcagtagttggggttgaggaaaacgtggtggggtgagtatgtgaaatatgtattgtttgggctctgtggttccctcttactctacctttatgatagtgatgcagctggatgcctctagaagagagagaagg

SEQ ID NO: 8620 - DNA, 526 bp, Canis familiaris
tatccaaaatatgagtgttttccagtgtccaaaatgtaaacacagaactcatatttttggtgctgatggtgcaagaagactagcacagacccttgatcttgatattctaggagacattcccttacatcttaatataagggaaacttcagatacaggccagccgattgtgttttcacagcctgaaagtgatgaggccaaagcttacctgaggattgctgcagaagtagtaagaagattgccgccacctctaaaaaatttcacagaggaagacatagacatggccaacaagcacatgagaaaatgctccacaccacttgtcatcagatggagagctatacagatacattgtaaactacaacaagaacatgttattaagctgtctctggtgatgaaggaaaggtgatgtcccaggaccaagagaccagacttccaagattcgtggcagtagatcttatgctgatgaaaccaaatacggtttgctgagaatattgataaaaccactcatttttactgagggctattcaca

SEQ ID NO: 8621 - DNA, 515 bp, Canis familiaris
  misc_feature (1)..(515): n = a or c or g or t
tcgttcttcaagttcttaaaagttgctgtagtttctcatgcctggagtgctttcccctgcccagtggaggaggaaaatccttgtagaattcaacagtgtcacaagtgttccctacaaaagcagaagccgccagttcctcttaaacaagttggcttcttaaaagcaccataattacagtctattgagttctttaaagtgttgctctgggcataatttaaattctttttaatgactaaacaccttcaaaacttttaaagaaaaataagcgtgttcctttctgtgccattcggtaagcatgatcgctttctagtccacaaagatcaaaagatgacagcgtattatggtgttagaaaatgatcctttaaaaaagcacaagaatcttgaaagctctgcagtttgatggttctcactgggacattttatatttccacgtaagtcgtttgtccaagttctgcattctcatcaagccgacttccctttaaggagggatcagagnnnnncctgtctgtagatga

SEQ ID NO: 8622 - DNA, 455 bp, Canis familiaris
  misc_feature (1)..(455): n = a or c or g or t
acctgtgaacaggccttgcagcacccgtggattgcannngatacggctctggataagaatattcaccagtccgtgagtgagcagatcannaagaactttgccaagagcaagtggaagcaagctttcaatgccacggccgtggtgcggcatatgaggaagctccagctgggcaccagtcaggaggggcagggaccgacggcaagccacggggagctgctgacgccagcagctggggggccagcggctggctgctgctgtcgagatggctgcgtggagccgggcccagaactgtcccctacgctgcccccgaagttctagggccctagattcagggtccgacccctttgtgtgggagcggttggggcagcctgctccccttccctccccaaattggagagttaccctgctccactgcctccccacccctttccctatcannnnnnnactgcattttc

SEQ ID NO: 8623 - DNA, 598 bp, Canis familiaris
  misc_feature (1)..(598): n = a or c or g or t
cantttggtttaagaacacaagaggaaaaaagaatcaaagtccaccccatggtcaccacannaactaactcgcatctaccatctctgtgatgannaaacaaactgtttcataggggcattagaagcatgaaatgtcacagagacctgaaagaactttttaaagtgaagagctgaagagggggcaagctttgccgctatagatactcttctagatttggagaataataaatacattaaatgtgacaagagataaactgaagaaggaaccattatgcaaaagggaatcagaacatgaagacttagaaaactctcagcctctcccaatagcaataaatgacaaaggatgttctgctgaaataccaaggatgtggcttggctaccatttgtaaagaagttatttgtgtggctcatggacccaaacaaccacctcagcagaagctggaacagagataggaatctctgggaaggatccagagaaggccttcttgtctgatggcttgaagcctggtgtagggcataggtcactaagaaggttttgaccaattctataccagcagaaaacctgccagcttgggctgaaggggatacagatgggata

SEQ ID NO: 8624 - DNA, 567 bp, Canis familiaris
  misc_feature (1)..(567): n = a or c or g or t
tgtaaagtannactngagccactcacannngcaaaaagagaagaattcaagctttatcacattgttaagatttaatttcttgctatatnctggattagcacagaagcttgtatcagtgaagactaggagggaaatagggtgtaaaacgtatctgtcttttcaaaccttctccctctactcatgtttccttcaccctctaccacattgtgttggtcaaatgatactactctatgaaaccctgagctatagttgtcaaaagtaactatggaatgtgattagtcctctgtgggtgcttctttccctcttttttctcccttgctttctttcttactctctccactctggtatatggaaaaggtgacgtcaaagaattgatgcttgcttggactcatgttgtatctgtgactatgctattagctgtctcctttttccttcttatatgggtagaattcttacaatgtgtggagttcccttcttgataagtaggttaaatgcacaatgtggtactgttttatagtttctagatggttgtataaagcaaaaagttaatgtggttatgtgttttta

SEQ ID NO: 8625 - DNA, 489 bp, Canis familiaris
attcaaaccataccacacacatagccacctgctctgctaggagtttagtaactgattatcaataactcatgaagtgcctgcctcctaggagatgataataatgattataactgatgtttatctaatgcttactaaaacccaggcattacactaaatattttatgggctctagtgcttttaatcttcataataccccctatgaaataggtattacgagccccactttgcagatgagtcttacccaaaatcacacagctaggaagtcaaaattcaatccggacgtaactccaaatacctaaccattatgcaacactgcctctcagtcttagagaagccgtgttcataagtcccagagagctttgtctcccaggccatagaattctgcacagaacctggcccaagagggattcaggggctaaggaagaactaataaagctatttgggtgtttaacactcaatttattgaagttctagacttaaaagtactag

SEQ ID NO: 8626 - DNA, 505 bp, Canis familiaris
  misc_feature (1)..(505): n = a or c or g or t
cagggtnnctgtgcagtcctagnagcggtcagagtgtcccgcgctctggcccccgcagttnntgaggtcccggggtccccaccgtgcatgggactccctgcctgccttgccatgtacagccacgatgcgggctgagctgctgcatttgccctggagctcaccaagcgccacccacatccccccaacgtgtctgcttgaccggtggggtgtggaggccgcgcagggtgctccagggcctggaggaggtcgggtgcgcctgccccgccctggctccctgcgtcccggacctgccaggacacccgtggcgccccggctcctttccccccactgcagccctggcgcagagtccaggcccatccgccaccctggaagcgagccgccgggacgggtgagccccgtgcacacacaggtcacagtaatgcactagcgtcctaacagcaactggactgcacctggcgcgagtcaccgagagaggagggggcgcggggtgtgacttggtttaccc

SEQ ID NO: 8627 - DNA, 549 bp, Canis familiaris
gagaatttcaagttccatcctgtaattgtccatattgtcatgcaggatttggccaaaggaagcatgcaggaaaaattgccatgtgtttttaattatcctggattcagaataaaattgtcctggggaaccaatccctagtggtggagatttctaatgtagaatatttgcaggccaaaaaatggttgctttataattttaacaaatcatcttttagtgacatccttgtttagtgtcttctcaagctttctttaactaaggagctcagcttgtggcacagacatatcccactagcttgtgagatggaattagtgataaagaccttgaatttggattgaaaggtttcctatctttacattgttgagaaagtcatttttttattgctcaagaaatggtatctctcatgggtttgggaaatcctgttagcatgcagagtaatgtgataactttgttgatccattttatttttttaaataaatatatgatctgaaagccagcctttttctgttttattcagtggaaagataactgagttttaatgtcattttttaa

SEQ ID NO: 8628 - DNA, 519 bp, Canis familiaris
  misc_feature (1)..(519): n = a or c or g or t
ctcctccccatcaggctggatggcagcgggcccatnnannngctgacagttctgttactgtggcttcnggnnaggttcactnnnctgggggttaggctggtgccagcaggtcagaggggagagcgggaggctggggtactaactccccacctcgggggctctggctggctgcacccttggctgaagggtcacatcacctgtcatcctgtcaggcagctcttcctacgtgcttctctcctgggctcctgcagctgcctcctgcctcctcaggcctgggggaggtaagcagccccagggagctgcactcccccctgcccactaccatgtcaagaaaccctcctctcttgtccagagactcttttcagagtatccttatttgaatggggcacctgggtggctcagtcggttaagcacctgcctcttgctcaggtcaggatcccagccaggatcccgggattgaaccctgcatccggctccctgctcagcatgcagcctgcttctactttccctctgctgctc

SEQ ID NO: 8629 - DNA, 600 bp, Canis familiaris
  misc_feature (1)..(600): n = a or c or g or t
ctgtgggtgtnnnagtgttgtcnacgtttttcaattttcctttttaaacaccgattctccagttcaaagggttgacagtctacagccactattaaacatttctgagtatggaagagaaagtcaagcgacagtccagtcttcagcattgacgggccttctgcagaccaccctgcccccagcaagggggaaaatggatccactcacactcaggtggggaagagaaaggcaggagggggtttaagcttagtaagcgaaattactccatttaaccctccagggccagttggggttttgagagaggtttctgcacaacctaggattggcaaggagagctttcatgttgatcaatctgagttgaattcattggcttaacttgcatcaaaatccgtgtgagtgtgctcattaccgtacatccctacaaccattgccattccactgtcctggcatctcctgagagagcctctttgcatgttttccagaatctgtgtttgtttttcctttcttctctttgttctttttgttcaaaagtgtgacgggtccctgcccctctggggctttcattcgnnnggagaaacatcccaaaaccagcactgtttagct

SEQ ID NO: 8630 - DNA, 601 bp, Canis familiaris
  misc_feature (1)..(601): n = a or c or g or t
gagctcaagtatannagagatatcagaccngaggtgaaactcacccccagacaccagacactgtccactcnggaaagtatagatgtccaggaattcattaagcagaaactggtggaagctgacctggaccccagcgtccccccttatgactctcttcagacttatgcctatgagggccagagatctgaggccgggtccatcagctcgctggactcggccaccacgcaatcagaccaggattatcactaccttggagactggggacccgaatttaaaaagttagccgaactctatggagaaatagaatccgaaagaacaacttagggggttagttcatgcgaccttctagaattggcttcctgagcaactggagctctggaaacctcagcagtggcaaggaaggagcgtggacacacagtgcttggaactgagcaagctgtacacagctactgtggaaacaagtgcccttttcatgatggaaactgggtgatttaatgggaagacagtcaaattaaaaaaaaaaaaaagaaaaagaaaaatacagagaaaaagctattgttccttgtgtatattttcagttgctcaataaagtctnnnnnnn

SEQ ID NO: 8631 - DNA, 586 bp, Canis familiaris
  misc_feature (1)..(586): n = a or c or g or t
attatcccacaccctcttccanntctcccatatnctcatcttcatcttcccccacttcgtggctcacccgtcgtgctatccggccagaaaagcaggcccctggggctggtctgggccaggaccgccaggtcccactctggggccagctgctcctgttcctggtctttgctgccttcctgctctttgtttactactccatgcaggctgaggatggcaatcccttctggacggagccctgaggggctggcttcgtggccagctgttcccggaagtcctggctgactgccttagtagtgtctgctgggggagggggtgggggcttttctgtgtgttctagcttcggtgtgctgggcttggcccagggcagtgcttgctcccctgcctcgttctgcccaggaggtggcaagcccaggccctccgcggcatggcgggcccgggcaggccttcctctggagtctcctggtcctgcttgcctctgatccagggcccaggagggtaagacccttctcctggagaggagaacatggttgttgtcattgcatgcctcctgtctgttgtcacctcgtcgggggggattaacccaggc

SEQ ID NO: 8632 - DNA, 41 bp, Canis familiaris
  misc_feature (1)..(41): n = a or c or g or t
gcangagtaatgcagtcactggagtggggtggccagagcat

SEQ ID NO: 8633 - DNA, 731 bp, Canis familiaris
  misc_feature (1)..(731): n = a or c or g or t
tnccgaaacctgaaactgtgtcaagtcaaaagacttnnagcaaagagntaccatgcagtttttgagtgcagtnagtccacacccattctctaccccaagcnnnnaggttgagaccangtattcaacccgagtgctcactggaaactgggtnnaagagannannaagttcaccaannnccactgagaaaacanntcagagcannnnnnnnannnnntatgtgnncnnnnnnnnncannnnnnnnancagannnnnnggtggtatggcaagaggagagttgagnnnnncncgcacagacacctgctcgcaggccaccannagncctgccgccgccatctgatcagcacgtacgacgaccattacaaccggcgtggtcacaacccggcgctgcccgcgcggcgcacctggaacgggcaccagttgctgtggctcccggagagatcggacttccccctcctcgctccccctacaaactatggactctacgaacagctgaggcggaggtggctggcacccaaggctgccccgcgggagagcatttacacctcatcctaccccagcccgcccgtgtgtgctatgtcccggcgggaacatgccatccccgtgcccccccctcgcctgcaccctgtcccgcgcctctgacaactgccacgccaggggcagtgcggccagaacccaccggagcccccggggcattgaatctggcccaggcgtgctcccaccccgcctcca

SEQ ID NO: 8634 - DNA, 557 bp, Canis familiaris
  misc_feature (1)..(557): n = a or c or g or t
ttgctggtgnntactatgnnatggagcaggtgccagagagctnncagcaaagctgtgagggctacgaggagactgacgtcctggcccagaacctgcaccgcctcttccagaagagtccgtgagggccacagcagccggggctccgccgtgcccagcaggcccgcctcccactcagatcggggacactgaggtcctggcagggccccttgcagtgcgggcggagctcggtcctggccctagggccggggctggaccgcgagtggaggattgctgcctccctggcgcagggtcggggttcagtgctgagcctggggcccacccggttgctcggtggacagacggatcaggacggagtggttgtggaagggagcctgcggcgttacctggctcacgtgggggcggtgatgggcagaggcaccgtctcttcctggcgagacgcggccaccttgccagaagcacgtctttgggcagagcccccgtgcagttgggtttcggggtccgggaggccggcacctgcacctggcggacctccnnacgcacctggcccggggccagca

SEQ ID NO: 8635 - DNA, 618 bp, Canis familiaris
  misc_feature (1)..(618): n = a or c or g or t
cgctccccctcctcctctcaccacctcttccttcctcccttggnnagagaaagnagnnnnagngatggctatggacagtagccactgtactcactcatccaagggcttcngtcttcctacctgtctagaagatgtcgaaggagttggatatcagccagcccaatgatgacttgatccagggtcagttcctgcctctgccactttctacctgtgagctccccagcaagtcacttaaactctcaacaactcaccttccccatgtatacaatggggttatgaggcacacctctaccatagagcctgtgaggacctaagaagctgcctggcacatggaccttggccagaggaggcaagatcagagagcatcacggcagaaatagcgagatgaacctaggcctagccaatcagcttcctccagcttcaagaccacagtgactttctgggatggaatgtgacctactcggcactgaggcttctgctggcagtatgagaatgaggtatcctgagggggcaggactgggaagtcctggaggagcatgaagttcatactcagagaagtacaagatggagaggctatgttctgataataatgtttaagcatttacatctagccatgct

SEQ ID NO: 8636 - DNA, 607 bp, Canis familiaris
  misc_feature (1)..(607): n = a or c or g or t
gcacatgttcatctttcaggctgatgcccccaacccatccctcatcccagagactgatgctgtgggtgtgaccgtggtcctcatcacctgcacctaccatggacaggagttcatccgtgtgggctactacgtcaacaatgaataccccaatcctgagctgcgggagaacccacccctgaagccagacttctctcagctccagaggaacatcttggcctcaaacccccgagtgacccgcttccacatcaactgggacaacatggacagactagaggccatagagaaccaggaccccaccctgggctgtggcctccccttcagctgtgctcccatcaaaggcttgnnnnnnncaggttgcattcctgggctcctacccgagaattccatggactgcatctaactcgaggaatccagnnnnntacctgggcccagccgggactgtggccagtctcctagcacatctggagagggcagctgggcctcctggacaatcccacggaggccatctagaggactttggggccatcagctatacccaagccagacgtggttctgaggaaggagcaggcctcaggtctctcccaacactgacccagaaggatcagct

SEQ ID NO: 8637 - DNA, 610 bp, Canis familiaris
  misc_feature (1)..(610): n = a or c or g or t
caccccatcatgtgctcacannnagagcaaaagaaactaaggcanatgggttctgtcngggnntggggagatgctnnnggcagacaggaaacctgcccagctcttctgctctgccgggtgggcaagtagcaggagcccccagctctcagcatctctgctgtcaggctacctgcccggtgcccaccttaccctcannagctgggagaggcctacagggctggaagaaggaaggagcagctatgccctttctctcctcaggcacaaaccccttcagtttctgggttttggcccacctgccccacaaactgttggtctgttcaacaaacaataatagctaatatttattgacatttgcaccctgccaagcatttcacnnnnatcanntcatttgtttctcacagccaatatttattatctgctcttctgtgccaggctcagtgctctggggtaggggtactgcgagtgcagcctcactggtagagcctgcggttggtggtaggcccaagcccaccgcaaatgccagcagggccgggacaagagtacaaatggaagcctcacaccatacattgcaatactgtaaannnacaaatcaagttataactgttaaata

SEQ ID NO: 8638 - DNA, 601 bp, Canis familiaris
  misc_feature (1)..(601): n = a or c or g or t
cnaggtttgcacccaatttctgnacattttatagccgaacattacatgnnnntaaagggacatgaaacctactcgtattatgggcctctaaatctgctcaccttcaatgtgggttaccataatgagcaccatgacttccccaacattcccggaaaaagccttccactggtgaggaagatcgctgccgagtactacgacaacctcccccactacaactcatggatcagagtactgtatgactttgtgacagatgacaccataagtccctactcgagaatgaagcgccatcaaaaaggcaaggtggtcctggagtgaaggtccttagagttgaaaccattcctctgtggcgcttcacggcggctagaaagtgggattggagcatgattgatctcagcctggtgaagcagagaagcccctctcatggttccggagggtgagctccgaggcccccaagcttccttggcttcccacggtcagcctgcctagcccgccttcagctttgctcacagggagcgtgtgcattgtgtcatcactgtggaggacagtctccctggcgtctgacattttgtaagcatatcataaaaaaagctatttctagtac

SEQ ID NO: 8639 - DNA, 605 bp, Canis familiaris
  misc_feature (1)..(605): n = a or c or g or t
acagagctgggggcccgggtgtnaccatgccccctcgccacnntgcaggccggggtcctgtcaccacagccttcagagcctgagcgggggccagtggggcttcccgaggcccacagaggacctggcctcatgcagtggggaggaagaagtgccctcctgtggcagcaccttggccccaagctgccacccccactgtgcttcgctgtgcctgggagccgcggctgtgagcaggtcgtgaggtcaggcatctggacttcagggctcggccgctgtttacacaaggactggccctgcctcgtgggggaagagatccactggcccctccgtagccaggggcaggatctggaatgggagcgtcagacttggttggggagggccagatccctgagctggacagggatcagggtggccttggcatcagccttaaggtgtaggagccccttcgcctgcctgctctcattgtggatttttaggattatttaaagggtctgggacctttttccacatgcacttgtaggggagcgggtggtaggtgggggtggtgggtgctggcagtgaacctctgccactcccagattttctcccctcctcagggttccttgggg

SEQ ID NO: 8640 - DNA, 467 bp, Canis familiaris
  misc_feature (1)..(467): n = a or c or g or t
gtagaatacagatgttttgatcaccatttccttgangnnnnnagggagtcctattgtttagagggagtgtggactacaccaccatcgtgtttagagccttgcacattatcttttgttgaaatggaaaataataatgtattcctgaaatgggattttgacaatagaccgtatattttccatggcgagtatattgagtttctttgtaagagagatacatatatagctgagttctcaatgattggatctgaactcagagtacaatgtgacagagggcagttaagatatnnnnnnnnnnttcacaaaggatgatgtcttatcaacaacccttaaggacataaaatatatggcagaaagaagaatggcgtatcatcacatcattaaatcctttacaaaacataatttttagaagaaaaattacaaatctctacgttttagctttcttgaagatttaaatataaattgtctat

SEQ ID NO: 8641 - DNA, 380 bp, Canis familiaris
  misc_feature (1)..(380): n = a or c or g or t
aacgtactnnatccagaggtccaggatgaagatgcagctgcactatgtcagaaactaatgtgggaaggcttttccttcaatacttattttctaactcgtaacatgttacattaatagtnnngccactctaagatgttntaggtgctgatgacatgtttcacacttgctcttgaagatgacagtactgaattttcaaccatgatagcatactctggttgtgtnnacagaagaacaacagaactgtcacacaaccatttcactcttcgtgagagaatgagcctgcccagctagctgatgtactgtttcatggagtaaagtcatcttaatgagaaggaatttaaatagattattttgtnacctactcaaagaatttgtcttga

SEQ ID NO: 8642 - DNA, 623 bp, Canis familiaris
  misc_feature (1)..(623): n = a or c or g or t
ctntaattatcnnatactttctccttgtganctctccaatnatactgacnnnnncatgagcactgtaaaacagacccangnnattccctatactggnccttttaatctgctctattatcagctacagaaattgacaggtgatgtggaagagttagaaattcaagaaaaacctgctctgaaagtattcaaaaatattactgtcatacaggagccaggaatggtggtattagaatggttagcaaacccttccaacgatatgtacgcagatacagtaacaaccgtgatactggaagttcagtccaacccgaaaatcaggaaaggtgcagtacagaaggtttctaaaaaattagaaatgcacgtctatagcaagaggctggagatcatgctccaggacatatttggagaagactgtgtaagcgtaaaagatggttctgttctcagcgtcacagtggacgggaaaactgctaatataaacttggagacccggactgtagagtgcgaagaaggaagcgaggacgatgagtccctccgagagatggtggagctcgccgcgcagagactgtacgaggccctcacaccggtccactgacacctcgaggtctctgtacgtgttaaagcttttt

SEQ ID NO: 8643 - DNA, 711 bp, Canis familiaris
  misc_feature (1)..(711): n = a or c or g or t
cnctgatgatgaaattgnnnnnngnactacagttcgaaaggagatcatcaagaataaaatcagagccattgggaagatggcacgggncttttcaattctgcgnnnagagagtgagagtgtgctgactcttaagggcctgactcctacagggacactccctctaggtgtcctctcaggaggaaagcagactattgagacagccacagtagaagcggtagaggcccgggaagccatcagagggttttcgcttcagcacaggatccggagttttgaagaagcccgaggcctggaccgaattaacgaacggatgccaccccgaaaagacagccagtaccctgatgggccagtgaaattggtggctgctgcacaacccaatgctgcgcataggagtgatagggggagaagagccaataatgacacagagccctgctgtggcacaggtggatccaaaacctaagaacgaattttattaatttattattggaaaacaaaacaaaacaactttaacaacttaaacctggaggtgcattcatagttcactctgcatttatgctgtaagaaaggtgaccattttataaattgtttttaatttatgtttaatatatatataaaaaatacatgttttccttttttccccctaatttttaggaactgatctgattgtctgatacatatgtgaagtcttgtgctacaaaggggaccttcccctaa

SEQ ID NO: 8644 - DNA, 492 bp, Canis familiaris
  misc_feature (1)..(492): n = a or c or g or t
ggttgttgaagaagtaattannnnnnntaatcnnaggtcatnntnnagcccctcggtgnnncagnnnattgagcanctgncctnggctcgggtcatgattccggggnnnngggatctagnnctgctttgtgctcnctgctcagnngggagtttgcttctccntnnncctnngccctcccgacccctgnnagctcatgctccnnnttgcaagctnnntctcnatcaaataaanaaataaaatatttaannnntcannnngcagctgggtggatacacacaatcttatataactggtgtnnntaaagttagaaaaaagagagagggatgacagaaaagagatcagcntgtgaagacacagacacacaaagggaagacagccatgtgatgatggannnagagattnncangaggcannnnnnnnccaaggaattaaaggattgtcnnnnnncaccagaagctagaagcaaggaagacatgtcccctataggttta

SEQ ID NO: 8645 - DNA, 615 bp, Canis familiaris
  misc_feature (1)..(615): n = a or c or g or t
tgnaaagactcttctaattttcctgtnngcactcaggtaacttcctactntaattatttcctttctttcagatccttcagatttttctccaagactcagggtagggatggggagtactctaagaaattctcacagaaccagtgacaatcttttgtgtacatgaataggtgagcatagtaagtagggtaatagaaaacaggggaaatgagagaggatggccaaccttttttagtatgtctcttagaacaaatggaaacacacagtaagtagctttcagattatgtgatttttttggtcccttgtaaaaataatttacaatttgttctgaaactgtttgtcttttcactggctgcaagtgtaccccaaccacaagaagtatgtctggagcggcacaggtgaaaacccccactctcttccatgctaagttgcctgaactgacactgatgtctgcatttcccctgtgtttaaagttgcctgtcactatgctctccatgcagtgctacttgacatttaaagcaactttttagaaaacttaatttgtattttgttcatgttaagcatgtgatactaaaagacacttcggacttttttttaagcccttatgttttgaaaata

SEQ ID NO: 8646 - DNA, 631 bp, Canis familiaris
  misc_feature (1)..(631): n = a or c or g or t
aatgattgaaaattgagtgtctcctgatgctttattgatttaagaactgtctctggcttccnnacntatgtaaccagcttagtatcaagacaaaatcatttcatttcggtacctaanctaaaagaccgtgaactgagnnntctttttgtgagtaagtcaatgagaggtactattatagctctagactcctttttggacaattagtgacctggtgacatctctgtcttccaggccgtgggaccctgtccgatgagcatgctggggtgatatctgttctagcccagcaagcagctaagctgacctcagaccccactgatattcctgtggtgtgtctagagtcagataatgggaacattatgatccagaagcatgacggcatcacggtagcagtgcacaaaatggcctcttgacgtctcatcagttctccagcagcctgtcgtagaggctccatcctacctacgttgattatcttgtagaacgactaaagttccaatagttaggccatttatttagtgtgcattgggcacttttctgttaattttagagtaaactgcttttggacacccaatggaccgacttatcagaacattagtaagaaaggatcatgttttgaagcagcatgtccaggtca

SEQ ID NO: 8647 - DNA, 402 bp, Canis familiaris
  misc_feature (1)..(402): n = a or c or g or t
aacactttgnctagttcatttngagagctaaaaaggnnnaaactgctcaagccccttcaaatnnnattatcaattcccatgagtttagcccttnnnagaannnnnaaatctttccaattccagnngntgtncncaaagcagcttcttttaggaatgctggagcctgtcagttggcctcttgctcccctttgcttacttctgctcagatgccaataccacacaggtcctgtggctgtgaacggttagccccacctatctgtgtagataccttttgaccaagttttgttttgttactcatgtgttttttcattttgccatactagttgtctatgtgctttaannactatttgggggattcagaaattatgctgttgctgccatagttccagaatcccttaaaga

SEQ ID NO: 8648 - DNA, 372 bp, Canis familiaris
  misc_feature (1)..(372): n = a or c or g or t
gcacacgtgtgtcctcagagcaggggccnnntgattcccctccctggtttgcagctgtcgtcagagcccnnnngaatcnnnctnnnccactctctcaagatgccctcataanccantgtggcaagnnnncnngacntctgtnnntggnnnnannnnnnntcnnnattatctcggnnnnntgagnggcagggaganngccnnngggcnnnactanntaggtaggtnnnngggggngnnnnagggtgcatnnnnnnnntagnnnnnnnnnnnnnngcnnntcctctannnaggctcagtcaagannnncaatccagggttggtaatgttggannnnnnattcantnttaccttgtggatgctagnnntgtagag

SEQ ID NO: 8649 - DNA, 498 bp, Canis familiaris
  misc_feature (1)..(498): n = a or c or g or t
tgtgctctcctcagnnncaaattctacaaaagcaatttngtctcctatccaaagcataggaaagctttcctgccgttcctattttaagataacctcaaggttgcatgaagaatgcaagccaggtgacaggttcacttcctcgagacaacatctagggaccaaagtacaattcctgcagaatggtttgaaactctgtgctccatttttatacccacaagtcttcactgaatgaacaaagcaatactcctcaagaaaatgaatcttcaaagaagaaatacttctggcagacctgggagtgccatgtctaccttcagaggctttattaagaccaaccaactgctaaaaagtagatgagacttctccaagctggctcaaaggggaagtaccaagaatatatagacacttcacacatgcacacacatccccagaggaggggagaagaccatccgtggcttggtttttgttagggacaaatgagcgggactacataataagcaa

SEQ ID NO: 8650 - DNA, 547 bp, Canis familiaris
  misc_feature (1)..(547): n = a or c or g or t
ccactgcagactgacgtacaactnnnagggcattttgattatacagacgttgtttttcagactcttcatatcagttagaaaaatgtttggctttacctcaaatcacagccgttctggaaaggaattggattttaaaaggagatggtacctaaactcgcgccacagtgttctggactttgatattccggtattcaaacaagatgggacacagcagtgtattaaccttcttgaaggactgacaccttgtttagtaactaatttagtgtgtgtgtgtgggtggtatggtcttcgggagcacacccattcagttctactgaaatcatctagtgatatccttgtttcaatatctagttctctacagtaatatatgtatttccccatcagctctgttcctcattatgtaatctctttgatgacaagtatgaatatgaaggcatttcagatgatacaattgaataggattattttttgaaaactatacaatgaagtacccatgatgatatatatgatagaccctcatgattttnnnnttttcagggacccgggc

SEQ ID NO: 8651 - DNA, 723 bp, Canis familiaris
  misc_feature (1)..(723): n = a or c or g or t
aactgaatttnntaaaaggtgaactgaaaagttattnnnantaatcaagatcgtcattctgcagatttagctaaacctaagtgtttgagtactagaaagacatcttccagcctttcctcggtccgattctagagtcggtgaccactagtgcaattgtctttggaagtcagtaaacttgctttagaaatagcccagccccagactttctagaaaaaaatgctatcagttcaccttaaagactttcttttttaaacatacatacatttaatgatttcctttggaatccacccaaggtttagttaaagcaacttggaaatttacaccttagcattgtaccttccagccctaatttgtgaggttgcaactctcattgtatcctgcatgtgcgtgtagcctgttgtgaacaaccctacctagcaaaactacccatggtttatattacggcatatggtaatagctaattcagctccacgttctagaaacctgcatttcctgaatttggttaaaaactaaggatgatggattgcaaaacagttctttaaactagttggtatgctttaggtgttttggaattcaccttctcgaccctcctccgtcgcccagctagcacgttcacacacacttgctgtttcctattgggtgtaccactgccttcccttcccggctcccgggaatgtgtactcaatttagtgtcttgtatttatatgcnnnnccaacaggann

SEQ ID NO: 8652 - DNA, 484 bp, Canis familiaris
aggggtgcccatttgacagatgaagacactgaggctcagagaggctgagttacttgcctgaggacacctggccaggaagaaccggctgaaggacccctatagagaagggcttggccctaccgggaataaaataaatgaacatggacggatgagggagcaaaggcaaatgtatgaaatccagagtggcagctgcctccccagatctgtcctgctgctataacagaaccatagcgggttgtatccgctgctgcacctgcagccaggtgcggccatggaccaagttctcgccaacggaacatgtgtagacgtgccacgtgctgatgcccagatggggtcggagctcctccacgtcctctcccctcgctccctgcgagctggaacatcaccgagctggaacatcaccgtgcctgtgagccagctcgaatcctaacgaaggggaatgtggagcaagaagtggaaaaggaacctccatccccaagtgact

SEQ ID NO: 8653 - DNA, 531 bp, Canis familiaris
  misc_feature (1)..(531): n = a or c or g or t
caccaagagtccccagctnncagtaccccgannnggggacatccgtggtgcctgggcctgagatccgctgccnnntgcccgagtgcgtgtggggggcctgggnntcctgccaggggacgggccaccctgaggaggggacacccgcggtgcctgggcctgagatctgccgccggatgcccgagtgcgtgcggggggcctgggcctcctgccaggggacccgccgacccgggnnttcctcacaggctggcaaggcccgtccccgggccggccgggtgctcccgatggcgcagcctggaacccggctcaccgacacacaattagccagctttttgtctttggatctgcctggaagtgagtcacatgctggaaaaaaccttctggaaacaaacgcggggtggggggggaagtaggttaagtcactccagcgttttcttagataacatgtggatctgctgtcccgtaaacgttgaacaccacgcatttcctcagcctccctccgacaaagacccagggggattagtaagcctgacg

SEQ ID NO: 8654 - DNA, 470 bp, Canis familiaris
cccacgctgtgaggtgggggggggggacatggtcaggccccatggggtgaaaggccccagctactactttcactagggcctgcaaaggtgcgatgggctctgacggtgggagtcagggactgggcaggaaggaggcactaggattggctgaaggctcccaataccggcccctgcaggtgcaaaagaaaaaagaaggggccacagggagtcctggatggcctctgctctgctccacggggctccccacctggaaactgaggttgaggacagaatcttccaggaggtgaaggccaatcaggtattttaaaataactcctagtaaatggtccatgttgggaagccactgttcggccattgtggcccaaaggccttctctccctggcctcccgcttcataccggtctctgtatgcaccctcccttccccccacccgtgtacccattaaaatggctcagtccggggcagccccgt

SEQ ID NO: 8655 - DNA, 622 bp, Canis familiaris
  misc_feature (1)..(622): n = a or c or g or t
caaggnccgatcatcgaaagtcctcctccatttttgtattttagntaaatgaacttaaatccaagcacttttgcaagcgctccagcctctaatggtttctcccttcttgatcgtcttctgccacttgcaacttgatgttagcatataatccccaaaactctctcctgccatctgttttcactttactgtgaattatagcaaaggtcgggttggttacccagcatagaacaacagcatcacagcaaagggtcaggtgcacagggtggaataacgaaattcgaagggaccaaagagatgatggctctggaaacgctccccctgtcacttgtctctgttttacagatgaggaacctgacgtagagaccaagctgattgttctttaaaaaatcacataatgagcctttcatggaaaccaagttctttcagatcacgtggttctggtgatgggatctttccaacatgttcaatcctgtgaccgactctgtgacttttgatagctagaaaatccttctgaagtatattgtttatgagccagcggatctgccggagcctcatgaggattgaggcctacaaagcatgattttgaatttcattgaacaatatctggtttatacagtatatg

SEQ ID NO: 8656 - DNA, 558 bp, Canis familiaris
  misc_feature (1)..(558): n = a or c or g or t
ccnctcccaggtgctccnnnnnnncctggctccagccnnnaagactgaaannnntccagctcgcannaaaggtgggcactctggccccagtagcaccagaagtcgaggtggcatctggagatgagccccctttgcccttcctactctttttcttttctttttttttccactcnnnnnctttnnataaatactnnngaatctgtnttcaagtctctgactcctaggaatctgaannnatggagattttnnnnngaannnnctttganaagaaacctcattctgttnnnnnnntggttntntttatnnnnnnnntgttcnnnnnnnnnnnnnnnnngaaannncatgnnnncnnnnnagaaaagnnnnnccnnnnnnaggttttgaagaaaagaccacccctggctaggtttgagtagttccactgagctaaggttcagtgtttcaagagtagagcacacagtgattagccgtggttggtggaggaattatggatgatcctaattttcttcatacacttctgtatttccacattttctaaaacaagtatgtattacttaa

SEQ ID NO: 8657 - DNA, 562 bp, Canis familiaris
  misc_feature (1)..(562): n = a or c or g or t
tataaatatattcatnctgttctgtgtttatgnntagcannggccccttagagtatgtttagaaaatttacttgccagcacagcancggcataagcaaggggcccagcggctggctggcgtttagtagagttgtattcagaacagcaagttctgatgggaaaccctggagggagagaaataaacttaattcttcaccatttcaattcccctttggctcctccggatggagattcatggtgcaggccagaggcagaggcctgggtgccccggggctaggggcactttcagccccctgtgcatctaggaaggggtgggaggggtgctgctggagcggacccgtccactccaccctcggcgttggtgggatcctgaaccagggcttcctgatcccccttgggggatggcctttcctctgcgtctgtcctgaaatgctgccagtggcaatgtctgcagggccttaccagtcacttcacattttctaggagccatatnnnaaaagtgaagaggagtaggtgaaatttattttagcaatcttttatctaaccccatatattcaaaaca

SEQ ID NO: 8658 - DNA, 631 bp, Canis familiaris
  misc_feature (1)..(631): n = a or c or g or t
cgtgactcaacttatgtgccagacacaggatngcagtgataatagagttcagtccctccctgcaaagagcgtcagtccccttgattcttattctcagctcttcctccttcttctgtaccttgtctgcttcagcacaggaactacatgtggtgggaggttttagggaatctgctagtggagtgagtttattaatgcttctggaaaaataggagaagagtttgttgtattgaagtgtaaaaagccttctttactttttgagagcctgctgacattaccttactgaacaatttggttctagtacgtgctggaaaaaagtacttcttggggaagtcatttcagatacaaatgagaagacaagtttggtcatagctcagaaaatatgccagtatttcatagaagagaccaatgctatgcttcgaaagatttctcatatgaaagatgaagaagtgactttgctaaaccaactaactttagtagaaacattgtggacagaagagctaaagattctgcaggcctctgctgagattctaaacagcttgcaaacaccttttaggtaacttcacctaatgcatttgatcacctcctatggtgggtgtgacttcttaaacaggtttaaacaaagatttatttt

SEQ ID NO: 8659 - DNA, 574 bp, Canis familiaris
  misc_feature (1)..(574): n = a or c or g or t
cccccgccaccctnanntcagagtctgtggctgtgttttccctnnncgactccactaccccggggctccctccctacgtggtctgggnnagctcccatctgggtccagggtctgagtccacggctggaggcccgnggtggggggcgggggggctgcccagccacacctgttctagaggtgcccgtggctggccccgcacccagctcccctgcggggcactgcccgcaccggcccagctgcgacgggaagtgggggctgcacctccaccatgtcaggggctcctgcctggcaggtgcagaaaggggtggagctgggaggggcgtggggggtagggcagcacagggaatatttttgtaactgctgttgtctgagcgaatggatatgggatgattttaagttattgttgccaaagagatgtaaagttttttgttgctttgggggtgtgggtgggggacttgttttgggtttgtgtttttcgttttttattagtttgaggcttaggatgctggtgcaatgattttcttgttccttttacgtttgttttttaaaagaaaccaannnnngaaaaaaaaag

SEQ ID NO: 8660 - DNA, 474 bp, Canis familiaris
  misc_feature (1)..(474): n = a or c or g or t
ggctcgctccgcatcagcagcagcctggtgnccatgcagcagnngcnnctggnngccgggcnnngcggctgctgctccagctgcctgagcattgggagcaaaggnaagtcctcctactgctccgagcccacgctcttcagaaaagccaacaaaaaacagaactacaaatccgaggtcatggtgcccgtgaaagccggcggcagttcccactgccgggcagggcagaccggagtctgtctcattatgtgatccctggagcccacgcaggtgtggattttcaggcccaaggcagcgctgcagccttcaggatgcaagagacagcaaattggtgacgcggtactgtccggaggtgtcaccctggccagatgcctcacccagtccccatgaagtcaaacttggaagttgactgttttcatttcagctgctaagtcgcctctcgcttctcttcttctctgtcccgccctgaaaaccagg

SEQ ID NO: 8661 - DNA, 622 bp, Canis familiaris
  misc_feature (1)..(622): n = a or c or g or t
gggtnnggaggactctcagactcttcaaggtcctgncntggtttctgttaccccaatggcttagagttaaggccttccctggccgcccacgctatggttatctccttgtcctgttggactgtctccccaactctgctcctccctgactccccagtccccttagaagagggccaaaggaacagcaggaactcagactgataggaaaaacagacacagacccccagctccggctcaagaaaatggatggagcagatggaacaccactctctcttcacaagaagatcatggccctacaaaagacaaagaaggaccctctggattcccttcatcaatgtgggacctgctgcgaaaaatgtttgttgagtgccctaaagaacaactacaatcagggcagcagaaaacttccatgccacacctggccacccttttcatccttggcctctggagctgctttctgatttatctgtgcctcaagccctacgcgggggaggacgacatgctcccaagctagcacaccagcagctccggctcttcctccctctgctccttgagctgcacagtaaaggcttgtggccctctgacctaccaccctgccccaggcctgcccccacccggagnnnnn

SEQ ID NO: 8662 - DNA, 569 bp, Canis familiaris
  misc_feature (1)..(569): n = a or c or g or t
caatgcagagtgtgcagagnctagatnnaaacacactcagaaaaacnnggnncttccaatgtnnaagcagaaacagggagaagcggtgatctgcccaggacaggtaggatttggatccaagtcagggctcctttttgaatgacttccacagcctccatgaaagatttggaggcagaagcaggcaagagaagcaggtgctccagaggcacttggattcctcttgctgctttcccaaactagcccatcagcctttaaatcctcctccccatgtctcctccaggaaggcgccaggcctgctttcagtaggagtggctgaaagagcccctacaccctcnnnattgcaaaggagagccaagcagggctcactgaccttnnnagggccaaccagaatcagagagtcaagcttttagnnggctcctcatagagcccnnnnnnccaagnnnnnnngccctcaggcannncggtggnnngccccaaacccaaccccagccgtttcaggaagcgcctgccccagaccaggctggtctctccagtcctgtgccaagagctcattgctgtnnngcgctaaa

SEQ ID NO: 8663 - DNA, 330 bp, Canis familiaris
  misc_feature (1)..(330): n = a or c or g or t
ggnctgctgacctgtgctacctcagatctatgaagaaccagtatgaaatgtgcatacccaatctacnagtgtttcagatcacagatgagaaaaacatttttgttttttcattcagttgaatatgatttttcatcatttcctttcaatataatttagaaaaagattataaactggcactttttcttttaatgtttagcctttgttaaaaaaaaacacttttcctttcatgtataagtgcaatcagctgaaactgttgtcagttttctatccactatttcaaaacttatattaaaaagaagcagtttattagttttgggtctattcatgaat

SEQ ID NO: 8664 - DNA, 288 bp, Canis familiaris
  misc_feature (1)..(288): n = a or c or g or t
ctgctagcctgcttcagttcatcatggtccatgcctgtcacacacattgttgtacnnnnnggtctcgctgatttgnggcccaatgacctgacttctaagtcccagaacttatgtctctttgcctgagggctttctctggtcctctgaaaactgcctagccagaggggctagagagtgaaagcactactacctccaaaagaccccaaacaacaactgataggagttgatgtataaatatcccagtttcccatttttagnnnggatacctggagggcacctttcccagag

SEQ ID NO: 8665 - DNA, 658 bp, Canis familiaris
  misc_feature (1)..(658): n = a or c or g or t
gacacatgctgtcaaactcactnnatggggtacactgaaaggagcacaangacagaaagaaaaattctggattgctgccaattcctggggaatttcatggggagagaatggctatttcaggattcttcgaggagtaaatgaatctgacattgaaaagttgattatcgcagcttggggccatctgacaagttcagatgaaccataacatatcattaaatttccataaggccatgcatttaagtaaccccttaaattaaaattaagcaatgtgaggttctctgtgacagtggaatctttgtttcttcaccttgttattataatgtgcctgttttcttgtttcaccccagactccatgcttccgcttcctttatatcactgagcatataaaaacactaatagaggatagcagagtagctaaatgtctttaaagttatctggttgtttttctttttctctcatgataattccatttttgactttgatagttcacagaagtgtgacagcacttgtcttaaaagtacatggcattcctttgtagaaatgaagtaggttctatccttaaccaatgaggatttcaggcaacaaaacaaaacaaaacaatggaaataccaatttaccatctttatgactttttcaagcaaataatgttttctgaatt

SEQ ID NO: 8666 - DNA, 535 bp, Canis familiaris
  misc_feature (1)..(535): n = a or c or g or t
tcaagtaagtgatccnngtgagagcaaggtagaagtgcaacacctttatgagcctgccgtnnnngtctcatgttctcatttctgcagcatcctattcgttacacagatcagcactgttcagtgggagaaggggactacacaggaccatgaatacactaaggaagaatcattaggggtcatcttggaggctggctatcacaggcctgctgtcttgtgcatccttggattaccaagatggagaagataagagaagtcccccaatcnnnnncacaaagtattattgaaatgtaaatttgtgttcagcttgagaagaaggaagaggcatcttcagtgccaggagaaagaggcacatcattgtagcaagtaaagccttgaaagcctgtgaacgacaatgagtgaatgaactttagagcctggaatttacatctgacctcatgctgtcataggatatatccagtctgtgggtggcaacttaggacacagcaaccttgacctacaggtcatcatgctgatctactaaatggatgacatcatg

SEQ ID NO: 8667 - DNA, 311 bp, Canis familiaris
  misc_feature (1)..(311): n = a or c or g or t
ccctgcccggcttcctgcctcaccacttggtacattttgttttctgaacaaggtgggatccaagagagctgtttctagccacacgccaagcacctgcnactttgggcacaaggacacttttttttttgnnntctcaccacacgggtgctctgacctgcttggaagaggccannnnnnnagctttggaagggctggggctcccctgacgaggcgctggggacgcctgacgaggcgctggggacgcagctctatttagaatcatcttcgtggaccctgatgttagaatcccacccccagataattacctttca

SEQ ID NO: 8668 - DNA, 509 bp, Canis familiaris
  misc_feature (1)..(509): n = a or c or g or t
cagaagcnnnnnnatcttgagcacctaccttttacnnnnnngtgttcntagagcctgttgttcagcagtttctggctcagagtttattgtaatttgttactgctcacaccacaaaggcaccttgttgcatcctcagtggcatttgcctttcacatggttttccatggagaagggctatatgcacatttggactcattcatgtaaactcaatctcatgtatgaaacagggataacaacacctaccacacaggattgttggagaggctaggtattaatagctaagcacaaagtccaacctgtaaagtagttaactgctgtcgaccgttctcccctgtggatgaagttacagtttttcctgagtttaaagcaaactggctcacaattaaacataacagactaattttcatgatgttggtcatctaagcctgaaatagagtttgagtgagaagtttctattttactaatccagattattttctctctcccttgaaaacactggattctcccct

SEQ ID NO: 8669 - DNA, 613 bp, Canis familiaris
  misc_feature (1)..(613): n = a or c or g or t
tatggattnctacattagtcatgtnnngtcctacctgtaatatgcacaactctgacaatttccntatttgaataatgaaaaccttaggacttaacttgtagctagaaggtaagaataatctgaaaaacataaaagtggctaatgtggggccaggcacacagtaggcaaatggtgaatatcagaatagatccctaattcgattcttcttttctttctttctttttctatgttttatcttgcaaaaggttaaagatcatgagaatttttcttgaattccagtttgatgacttttattacatgaacagctgatcttctctgaatgtcactttctaaagtcccctctaggctccaacattttttgtgaatttaagaaaatttacatcactgaagaaaaataaccaaattgtgatctttattgaagtcctttcaactgcaataaatctctacagaaatgaaaacagggcgttataatgcatagaatctaatgtgggtcttctatttactgagtggtcacctcttcttggacaagccattgagccccactaacagcacagttttcccatcccatgaggcatgaagtagaaaaaagtttcaataccagttgtanannntc

SEQ ID NO: 8670 - DNA, 658 bp, Canis familiaris
  misc_feature (1)..(658): n = a or c or g or t
aggctttgatcgactnntgtgcggcccctgnntctnngtnnncnnngccccatgtgcgcatgatcgctctctatgacaacgaagaggtgggctccgagagcgcccagggggcacagtcactgctgacagagctggtgctgcgccgcatctcggcctcctcccagcacctgacggccttcgaggaagccatccccaaatcctacatgatcagcgcagacatggcccacgccgtgcaccccaactacctggacaagcatgaggagaaccaccggcccctcttccacaagggccctgtgatcaaggtgaacagcaagcagcgctatgcctcgaatgcggtttccgaggccctgatccgagaggtggccaataatgtcggggtgcccctgcaggatctcatggtgcggaatgactcgccctgtgggaccaccatcggacctatcttggcttctcggctgggcctgcgggttctggatttaggcagcccccagctggccatgcactccatccgggagaccgcctgcacctcaggagtcctccagaccatcaccctcttcaagggcttctttgagctgttcccttctctgagccgtaaccttttagtggattgaggcctcttggaaagacttctcttacacttgagaagttgtcagctgagctg

SEQ ID NO: 8671 - DNA, 532 bp, Canis familiaris
  misc_feature (1)..(532): n = a or c or g or t
cgggtgtcttatnggtctgtnnncgagacggttgccctgnncgtggtcagcttcagccaggtgctgctgctgangagnnnnntcannnnnnagcgagnnagcccccnnnnggtgcactnntangnctgcgtcctgccccgggccctgncgccaagctgcagcggctcccccagggcggcnctggggctccccgagggcagggaacacaggtggccccccagcagccagtgnntgcagagcccagcagcccgtgtggccccaaggagggcattcggtagggcagggcccatggtctggctgtatgaggacccccagtgcccagtcttcctgggggcggctcagggcgcttactgtgctccacagagtgtggatcgctgggcttgtgtgtgtcctgtcctccatggaggggaagggctatccatgtggctgggctccgtggagagcagaggagacctctgagtaagcagcaggggcctgtggctgggtgctgcctgaggtgagttgcgtgcctcccagaggcagnnnnnngcct

SEQ ID NO: 8672 - DNA, 556 bp, Canis familiaris
  misc_feature (1)..(556): n = a or c or g or t
gtttcacgagttgaatttaatgaacttatctaactttataacccatcntggctctagtaatttgatcaaggtggtagctttcgtgaatataatggtaaactttacaggaagctaaagcctccttttataatgcttctcaaccatagggaaaacattctgactgtgtggcagggtgattttctttcttgtggccacttacagtgggtatttattgttcttgacccttttatgccctagaatgctgtgagggttaccatgttgaatttgtgcagaagctaaaagcaccggatgtgccagagatgcaatttgtgattacgtttgcactggattgtgatttgaacaggacacttatgactaatgaactctttcttttgaggtggggaggagggttgtaaatgagacttcacgtcccacccttatagctcagagaatctagttgtggctgaggctgatgtggggagctgcagacagctggacctcctaaacacgcatcagaccttgcaagagatggaaggnnnnngcagaggactctgaannnccacccaagagcctttta

SEQ ID NO: 8673 - DNA, 151 bp, Canis familiaris
  misc_feature (1)..(151): n = a or c or g or t
ggtncttcagattccagggctactgatacaacntaacaagaaacttttnnnnttttgtgcctccaaaagtgttttacttgtatcttcctgaactcaaagggggaaaatgggcttgaggtctgtcaaagggcttgagaaagaattttgtatg

SEQ ID NO: 8674 - DNA, 615 bp, Canis familiaris
gaaaaatccaactgatgagtatctggatgccatgatgaatgaggctcctgggcccataaattttaccatgtttctcacgatgtttggtgaaaagttaaatggcacagatccggaagatgtcatcagaaatgcttttgcttgctttgatgaagaagcaactggcaccatccaggaagattacctgagagagctgctgacaaccatgggagaccggtttacagatgaggaggtggatgagctgtacagggaagcacctatcgacaagaaggggaatttcaattacattgagttcacgcgcatccttaaacacggagcaaaagacaaagatgactgaaaagatcttcaaattccagccaaacgttccttgttgccactttgggtatttctgagactttctcttagagtctgttgcatgcccttagctttgcagcttttgcctttcttgttgtatttattctcagccatttggggcacatgcatctctataatcagactggaaatgggattttttatgatttttcagaatagaaaatagcgcaatttaacttaccagcccccctccccaaaataaccgcagtctacacagagtcagtatattttttcagagaaagttat

SEQ ID NO: 8675 - DNA, 596 bp, Canis familiaris
  misc_feature (1)..(596): n = a or c or g or t
gcagccaccgaagcaattcgtacgcccnctgcggcggcctccgcgcccttnnagctgcccgtggggcccccagccctgagctccccgccgcttgccgaagccgctccgcgctcccccccacactctggcggctcccgacccggcccggagacattccgccagcgtttccggcagttccgctaccaggacgccgcaggtccgcgggaggcgttccggcagctgcgggagctctcccgccagtggctgcgacccgacatccgcacgaaggagcagatcgtggagatgctggtgcaggagcagctgctggccatcctgcctgaggcggcgcgggcccggtggcttcgccgccgcaccgatgtgcgcatcacgggctgagctgcgcagctgcgggcggcggggccccggcgttctctgagctggggccacgatcgggtccaggggcctgagccaggctctccgttgttgatgaaaaatgagtttttggcagctccagcgtctgatgtgccccttttcgttcgtcccttactaggtgtattttcccgagccttttcccttccaatctcctttttggctggtggcaaaacccgcnnnggacc

SEQ ID NO: 8676 - DNA, 575 bp, Canis familiaris
  misc_feature (1)..(575): n = a or c or g or t
ctgtgangtgaagagctgtgaaggtgtcacttgtccccctctgccttttagtggtatctgaaatatacacaaagaatgtcctagtcacactgttatccgatgttctgtgaataatttccacgtngacatataccaatttgaactccgaagccacccccagtccaggtacagggcagcctgcaggttacccaccacacgcgcatcctctacatggtccttgtcacccagtgcgacagggtccaagcattccttttaaacctcagaggtagcagtaaacctttcagtgttgctgttggcaagtgtgtatttgccaatagctacccatttgtactcacgtgccaacaaataaacatcagctgcacatctgcttccgctgtgtcccttcgggtgccgtgacatgtgtgaggagcctctcttctgtaggagcgaagctgcgttgactactgctgtcaggattgtgttgtgtggaataatcatctacataaattttatatgcacagtactttcccttttatatgtcaggtaaatatttgtaaaagttatactcacacannnnnnattattataatgattac

SEQ ID NO: 8677 - DNA, 642 bp, Canis familiaris
  misc_feature (1)..(642): n = a or c or g or t
agaccatgctgacgagnnacggcttcagcgtnnacacgagcgnnctactggacctgttcagcccctccgtgacggtgcccgacatgagcctgcccgaccnngacagcagcctggccagcatccaggagctcctctccccccaggagccacccaggcctcttgaggcagagaacagcagccctgactcagggaagcagctggtgcactacacggcgcaacccctgttcttggtggacccgggctccgtggatatgggaagcagcgacctgcccgtgctcttcgagctgggggagggttcctacttctccgagggggacgactacacagatgatcccaccatctccctgctgacgggctctgagcccccgaaagccaaggaccccactgtctcctagaggccccaggaggaaggctggccaagggctaggcgtggaccccggtcggcagcgagggccacagccctgtgtgcctggctggcttgaggctttacagccaccttggactgaccagcactgcggggattcagtcaggattggattttgggtttttacacgagagtccccctcaccccttcaatagagatatacacacacacggacagacggacggacgagactggcagagacctataaaggacannnn

SEQ ID NO: 8678 - DNA, 233 bp, Canis familiaris
  misc_feature (1)..(233): n = a or c or g or t
ttggcctccaagttttttaataagaaatttttgtattgacttggtccttgtttatagcttatacttacttgtgtctaaaggtatctcttaccactacccccttcccccgtatgttctcagcgaatagtgcaatatatagtaggtggtcctcaacccccactgtgctgtgtactaccatcacccctagggcttcaaaaagagggacttctttatagcaacattcactangncag

SEQ ID NO: 8679 - DNA, 415 bp, Canis familiaris
  misc_feature (1)..(415): n = a or c or g or t
acaaatatatgccccactcccattcagcctggggtgcnannctgccaaggtcagagtggcctggccaggagtccttcaggcctccctctcctctactccacccatggcctgtctcatccctgggggtcccggcctatccctggccatcctgggctctctgctgtacatatttgagactagtttttattccttgtgaagatgatatactatttttgttaagcgtgtctgtatttatgtgtgaggagctgctggcttgctgtgcgtgtgcacgtggagagctggtgcccggagactgaacggcctgatgctccctcccctgccctggtctggggaagccagctgggggtcctggctcctaaggggcacctgtccccccccccaactcccccccacacttgttccagctctttgaaat

SEQ ID NO: 8680 - DNA, 620 bp, Canis familiaris
  misc_feature (1)..(620): n = a or c or g or t
gcattgnnngacttgagtgttgtttttacnnnnnnaccaaactggannnagatgatggataactgtgagcagaagacctcgtatttagatgactgtttatgatttacattttattcaaattcttaggagttcttggaaataaacacagaaagctttgggaaaccaccagctaaataccaatgccgatggaggacacttatcctactctgctttgtatctggattatttgtggccatttccaactcattaggttccaagaccgttgagagttgtgnctaagttatgttatgttcttagcccccatggtgcttcatataatatataataatcattgtgcctaaacagactttcatttaaagacaaaagttttttcccctatgttggaaaaaatgaagatcttatcagcagaggactctagaagaagcacacggtaaacagagcataatcacggctaaaggctctttcagtgtgacaagctcttactgctttaaaataatatatattggggcgcctgggtagctcagtcagttaagtggctgcctttggctcaggtcatgatcctggggtcctgggatccagccctgcatggggctccctgctcagtagggngnnngnttcnc

SEQ ID NO: 8681 - DNA, 336 bp, Canis familiaris
ccccccctccccgagaacaccccacatgtcagaaaagtgaagtcccattgtttgcaggggcgttttcatcttctgggtaaatttgtccgtaaccacgctttgggataggaaagctgccgcgctttatcagcagctctggtccagagaccgtccaaattgaagtctgcccactcggattctctagaaacagtgcagccagtgaaagggaatttggtcttcacgtcttctgatcactaaattgtcactgctgaaataaatcaccttctgtcgagggattaagttataatcagtattcatctctgtttttgtcactgttcccaaattgtgtcatttgta

SEQ ID NO: 8682 - DNA, 351 bp, Canis familiaris
  misc_feature (1)..(351): n = a or c or g or t
tgaacaagcgtgtgaatgtgtatgtgtgtgtgtgtctgcctcattcagcctctgggatcaagtcagctcccgctcttcaagcgcagtggcctggagagtggtagctgccaaacgcctttcctctgctagcttccatgtcttgtttttgctctctcctcactctttccctccctccctttctttccttctctcctttatttgaggggggaagagtgctgtataaagtcaaacaaacaagtttacagttgtaagtgcaatgacccgagtcctccacatgaccttgtgaatcgtgtgccgtccttctgtgctctgtgagaactcgtggtacttcggtgtcnnnnnnccctgtat

SEQ ID NO: 8683 - DNA, 538 bp, Canis familiaris
  misc_feature (1)..(538): n = a or c or g or t
ctcccaaaggatgagtcaggtaacagtntaangccatgggctctgnnnnngctcaatttgcaaagtccctaggttctgaatgaaaaaaaaaatctttaatcaacactctggaaaccacatacttgctggttgaggccaaaggtcaattttactacactgttctgggggggaggggagctcagtgcatctctgtcaagtcagtcccaggtattgtaacaagcccctcacatgcattaagtttttacatgcacaaagatgaaggctttggtactgaaaccgaagacccttgtgtactcaagaatcttcacagcttatatattggacagattttctttttaggaatgaaggaaaattctcccatttttgagccattcttttatgtcaattctacaaaattgcatgtaactttataaatatttttaaaagatatagttttgtaaatatttaatattctgctaatttgattttgaattgtaaatgttaagtattgtttttgaagtttttatgttttattnnnnnntgttaaaaaagaaaaatt

SEQ ID NO: 8684 - DNA, 422 bp, Canis familiaris
  misc_feature (1)..(422): n = a or c or g or t
taggcagaagggnnagtctagggtaggagtacatacagtccagtgagctaggtcccttgggcccctgggtgctgggtaccccaagnnnagcgtggctaccccttccaaagctgtcggggctgtggcagcacccctactacccctctcctcctcgctgttggggaacaggagaagagtcctgccctctgcagccctggcctctggagtcttcattgtttgcttccaggccagaaagttctatttgaggaagagaaggggagggccgcaatcatgcttttgctctggaattggatgttgctctattggagtgctaggaaggctcctacagtctcttctctctgctgtttagcccggctgcttggaggacccacagctgagagtctggaagcaagagaagcagactcttctccaggtgggaaagg

SEQ ID NO: 8685 - DNA, 615 bp, Canis familiaris
  misc_feature (1)..(615): n = a or c or g or t
ctcattaaaaaataataataaaaataantgtaaccaanctttaagaactgaggctagaggttatttccagacacttaagtttcttctgtattcctaagttgattggatcagttggggttggcatgctgagaagtattttcttcacctttcttattttgcatttggggaccttgagaggtcaaatgatgttggttataagaccaacatggaccaatggagttggttataagacctacagtgatactctctctataattctggagtaagatctcaatcagtaatttcctactacaaggcctcccatnnngtctctgaggaatgggatagcgtgacaaacatttaccctccattcctggaggccactcattgaaaagtcacatgattgtcttacctggaacaagtggaaggaacatcatacatatgaaaagattggtgtttattaatccatctagtcactgattcattcatttattcagtaaatccttgctgagcctgtactatgtgctaggctctgttctaagccttggggacccagtggtgaaaactctggtcacagtttctgcctcctgcctccttttacttatggcaagtgggcaagatggttattaagttggc

SEQ ID NO: 8686 - DNA, 534 bp, Canis familiaris
  misc_feature (1)..(534): n = a or c or g or t
cacccaaagtggtggnntgagacagagctggcgttccgcgccggctggcctcnnncgcctccggccgccggctggcccttgtgcccacnnnagcaggggccagctcgggctccgtgggtnntgccatgttggctggccaacttctcacagccatcatcccatcacctcagggactggagggctgagttgccaccgcagctctcacaggccttgggctcagactcacctgctggacctttccagnctgtatcaggccgtggacatgtgtgagaggggcagcgtgagcccaggagagatctcgtttatgacaatggacgcctttccctcgaagtccaggaagtgacttggctgccttcctgcagcccatcctggaacctgtgtgtcgcctgtccccacgtttgccctggtctcctccctgaacccgacccccagttcatcccctacaccttgcctgctcccagnnnaaggtttgttgacactgcccagcacaggaaccctgagtttatctggcttttatatattttttaataagat

SEQ ID NO: 8687 - DNA, 568 bp, Canis familiaris
  misc_feature (1)..(568): n = a or c or g or t
atgagagaaaagtgagagcaatccagtaaagatattcataagtagaaaacaccaggtggtnatgaaaattaagcaaggnnntgtgatagagaggaaccaggggaatctccaggcctccctagtgtgtgcattattacatccatctgccttgaaattagtggccactagtcacaaggtggagctctgggagaaagtatgagtgaatttctaagtggaaagccatcatcattagaaatagaatttgatgagcatggagtccttgtagcttgaaacagttaatacagcttctaaaagaggctccttgctactgctgtgtagcttccacactaggatgatctacttccacaatttttttttagttttgatatttcattttttaaaagatattatattatgcagcagttgtatatttataactcacaagaataattggcttgaactaaccgggtataaaagcccaatttaacaatctgtcaagtgaaattaaagttctgttctttttagtgtacctggtaaaaactgctannnnnnttatccttctagtcaaagtatattgaagtggaatagt

SEQ ID NO: 8688 - DNA, 616 bp, Canis familiaris
  misc_feature (1)..(616): n = a or c or g or t
ctaccnnnatcccagagtctgnnnatctttagagggctttgtcatgtattagcagatcagagggtacttggtttaatagtaaagcacattatgctgaagaagaggcctgaggactttcctgggcagatcaattcattgtattattcagttcttctataaacctcctttggttaggctggcgacagcattctagtcacttcactccagcactgtgctcttggtgacttggtttgagacacagaagctgttttcagattatcagagtttcctttcttccttaacaatatcaacaggccacaggccacttcacattatttgaactcagattttgaaataaattggtagtattcttttccaaaaacattagacttttatgaatctctcttttttttcctcttttcttttggtttgacaagctaagctccccaccagatgactttggctgattgaattataccatgatgtgatgcgataaatgttccttaataggccttgataaataacttcttttaaagtcataatttgtcctgaagcttctctttcttctattaattgcatcataccacagtcaatnnnnnnncaagaggttttgtnnnaaggaggtaagcaatgaata

SEQ ID NO: 8689 - DNA, 472 bp, Canis familiaris
  misc_feature (1)..(472): n = a or c or g or t
tcagctctgcttgcctaaaccagcatgatgcttcagnnnnncctgctctgcccctcaaggcatggatccttctctcgctgtggattctgatgggtcaggctttggggaacagaggtggggtggagcaaccagcatccccatttggaaaaagagaggagtttgcagccagcagcctgtaaactggaaacactggtctcagccaacctcctcagggcgccctggtttctccccaaggagatgaggagcgatgacaccagcaacaggatgaacagaccactggaagggctggtgtgtgtgtacttcacgtgcagaagagaagtttagatcttccagggaatcgcaatgttgtggcgtctgacttgtatgtcacgtttgtgtaaaatggtatattctttaaaatagtgttgataactggaatattgtatgtatgcttggagatgctttgtgtgaacctannnnnntcactcaacag

SEQ ID NO: 8690 - DNA, 555 bp, Canis familiaris
  misc_feature (1)..(555): n = a or c or g or t
gtgttaccccctatccnnagcnntcagagtgctcctggaaggacnntgagnnnnaagctgccatnnaactggcnntaagcatcacacgagccgtgcgctccctgcgtgcggactacaacctgacccggatcaggcctgactgtttcctggaagtggctgatgaggccacaggcattctggcatcggcagtgtcggcctacgtgcaggcgctggccagcgcgggtgtggtggctgtcctggccctgggggctcctgcaccacagggctgtgctgtggccctggcatctgaccgctgctccgtccacctgcagctgcagggcctggtggacccggcccgggaactgggcaagctgcaggccaagcgcagcgaggcacagcggcaggcacagcgnctgcgggagcgccgcgctgcctcaggctaccctgtcaaggtgccccttgaagtccaggaggccgacagagccaagctccaacagatagaagcagagctcaagaaggtggatgaagccanngcgctattccagaagatgctgtgatacacccgactcctcatga

SEQ ID NO: 8691 - DNA, 210 bp, Canis familiaris
  misc_feature (1)..(210): n = a or c or g or t
ctctgtgttatgctaacaaagttctttttgtctttgcttttttaatgactgtctccttgggagagggatggtgaaaaaaaaaaaaaaaaagagggtaatgagatttttaaaaatcctaccatgccacactgattttatatctatcaccaaatctgatcatattttgggttttgcttaattttaannnntacctatatctttatgtgtcct

SEQ ID NO: 8692 - DNA, 692 bp, Canis familiaris
  misc_feature (1)..(692): n = a or c or g or t
gaccatgacttgnngcgctgtcagtatgtaactgagaaggtgctggctgctgtctacaaggctctgagtgaccaccacatctacctggaaggnactttgctgaagcccaatatggtannnnnnngccatgcctgcacccataaatattctcatgaggagattgccatggcaactgtcacagcactgcgccgcacagtaccccccgctgttactgggatcaccttcctatcaggcggccagagtgaggaggaggcatccatcaacctcaatgccatcaacaagtgccccctgctgaagccatgggccctgaccttctcctatggccgagccctacaggcttctgccctgaaggcctggggtggaaagaaggagaacctgaaggctgcccaggaagagtatatcaagcgagccctggccaacagcctcgcctgtcaaggaaagtacaccccaagtggtcaggccggggctgcagccagcgagtccctcttcatctctaaccacgcctactaagcggaggtgttctaaggctgccccctcaacactccagcccccaccctctcccactcactcttgaagagagggcctcacctggggctccaggctgctctttcccatcactttggcctcccatgtgacattggtgtgtggtgttgtctgtatatgctaactccgttgctctttcnnnnnnnact

SEQ ID NO: 8693 - DNA, 380 bp, Canis familiaris
  misc_feature (1)..(380): n = a or c or g or t
cattttcannngaaccagaacttgcttctgannnagaaagaaggcaatagcattctaagaatcaanngatcaatgacccctatcccatcctttcttactcttgttgcttctctttattagccaaccacttccacagagaatgattacatggaagggaagagagacataggacaacccccagtttcttcccnnncagtgttccctacctcaccagttagccaatgctacagatgttgggaggatgtgcacaggtcaagacgcaaaacagagcagttgaattagatttgtgcaatgtctcctctgtatgtgtgagctgtgaaataagaactgtgtcattacgatgattctgcatgaattaaatgcccttaagtttacattta

SEQ ID NO: 8694 - DNA, 506 bp, Canis familiaris
  misc_feature (1)..(506): n = a or c or g or t
agatatgtatttattttttttaatttttttttcaaagatatgtatttaaaaagaaaaaacttaaggtaaaacttaataagtgcatatgtttctattcatttatgttcatatgtttgcaggagataaaatttccagcaaaagtttgcagctttgttatttagtctactgaatctttgaccataatcatatattaaatatatttatattaccttaacctaggctttttagagttattggtaaccctagagtaaatacttgccatctttttgctcgtgtgtatgtgtgtgtgtgtgtgtttaaaataatgcgtcccagtgtctgtcatctttttaaggtatttatttccctagaatcctgcctcaaaatactactaagatttcttcagccaaaattttagcaacaggccacacntngctgtgagagatgcagagaaattagtttttagctgggtagattgttctgagtaaaactgggattttcttaaatggaaggctaggaacattgac

SEQ ID NO: 8695 - DNA, 469 bp, Canis familiaris
  misc_feature (1)..(469): n = a or c or g or t
gtatnttatttatatatattaatgcagtaagnncagaaaactgtttatggtannnncgtgcannngtgagccaaagaaaaaaaagannnnnantagtgagacttgtatttatattagagtacccnnaaaataatgatcgaagcatcagtttactgtctgtaagagaattctgatactgtacatagagtcatctatatnnnaatccctgacttaaatagcatctgctcttctattaccctctctgtctggctgtatgtctggtgttctcaatgcttttctagtaactgttggataataactagatctcctgtaattttgtagtagttcatgaccaatctctgtgactcgcttagctcaaacctaaggcaccgtttccgaagaccnnctgaagagctccgataaattgaccaggctcacaactgtttctgaggaaaggaaattcacactgtgcgttttagagtatgcaaga

SEQ ID NO: 8696 - DNA, 627 bp, Canis familiaris
  misc_feature (1)..(627): n = a or c or g or t
ggggacatnnacagattttaaacntggcccggtggggcatttggcnaggatatacttgtgttnaaannngtcaaaaatacttttggaattcaggagcacattnctaactatattttttttaagcttaagtaaaaattaaagaaaaattccataaccaaagagaaacccacattacctggtaggggacactcttgaccaaggtctcagtgtgcacgatgggtggggggccactggggccaggtgactgcaggagttccaaggggagccagccgggtgccttagaaggaagggcttggagggacagaccacatggagctcagtaagacgtgacgcatcaccaggaaaactgattactctccttatgaccctaataaagttgcttttttcagactagaatgttgtgatgccctgatcgtaacatgcttcttccctttcctcagcttcaaatgtaaattcatcactgggctcacttctaataatcgcagtgtttcctgcctcgggcttcgcaacaccagcctcacaaaatagtgtttgcttaggcggtaacttagactttacctgatttttgattatgacagcgatggctatagctataaggtataattttactgtcttatttaaatttta

SEQ ID NO: 8697 - DNA, 422 bp, Canis familiaris
gaagcttgcaattttttacttaaaggaccagatagtaaacaacgtaggctttgcatttccagaggacaaaatcaaaggtgatttgtaggtacttctatagccatgtaatcatgtaaacacgtaaaaaacattcttagctcatcggccctacaaatcaggccctggctatattaggcctgttggctgtagttagctgatcccaatccctgccatataccctccaaagggccctgtcaccttggtggctttggtgggatttttgagaacaagctgctgcaggataggagtttggggcaagactacttcctcttttaccttttatttagatctagaggatgtgcacacctgagtccaaatccacctgtctgaagtgagataaattacatgggttggagaaccacagactgcctaactgctttctg

SEQ ID NO: 8698 - DNA, 607 bp, Canis familiaris
  misc_feature (1)..(607): n = a or c or g or t
tgcattaacatttgaaaacgtcaaggttccagaaagcaatatnntgggacaaattggacacggctataagcatgccatagggatncttaatgaaggcagaataggaattgctgcacagatgctgggactggctcaagggtgctttgactatactgttccatatatgaaagaaaggatgcaatttggcaaaaggatatttgattttcaggggctccaacaccaagtggctcacgtggccacccagctggaagctgcaagattgctaacatacaacactgctaggcttttggaaaccgggaagccaatcataaaagaagcatctatggccaaatactatgccgcagaggttgcgggcctcacaactagtaagtgcatcgagtggatgggaggagtcggctacaccaaagattaccctgtggaaaaatactttcgagatgcaaaaattggcacaatatatgaaggaacttcaaatatccagctgaacaccatcgcaaagtgtgttgacgcggaatactgaccccctcaggcatgaggcctctcccccttgttgctggtataaaattctaaactatcgtgccttgttggagaagtaaacctctgcagcact

SEQ ID NO: 8699 - DNA, 531 bp, Canis familiaris
  misc_feature (1)..(531): n = a or c or g or t
aagatagtagatgannttcagtctcgacacacagtttttatacatgacaaaaactgaagtaaaaagaaaagcctttgtttgtaggatcaaaaattgttcagtggatcagggctcttataagtggtaaaaacaaatcctttgctatcataaagacaaaaaaatgaagggaaaaaactgtgagtggtatgcagatgaatatagtttggtatttatcttttaagatcatttcatactcagtaaaatgaaaaaagcaaagcagttatgatcaaaccacctgacacactcacctgattatcacctggattgtgaaaatgaacacgaactgttgctcaccttttaaaaaaagagcttattgggaattatatttctcagaatctacatgtgaggcctgaatatcaaccttcttcatattatgaggattatggatgcatgaatggccatgccttaacgatcaaatatttcttgatggcctactatgtggtaggcccagaggattatgaggattaaaaagatgaatatatatnnnnnngg

SEQ ID NO: 8700 - DNA, 633 bp, Canis familiaris
  misc_feature (1)..(633): n = a or c or g or t
ctanagtgtatnatagactagaagggcatcgctctcaaggtttnnnaanaccttgaagagcagatgataagcatctgaaccctccacctctacaccattactcagtataaatgtaatgattctagttacaaatcagcatgccctctaatccaggtggttttttttttttttttaaagaaaataaagtcttattagtaaagttaatatttctagttctaggaaattctgattctaggcctcctgttaagttggggttaccaactaatttgtttcttggattcccccaaatttctctatttgtaggagaggttttctctatgaggaatatgataaatatcatctgattactgtctggtgatgaaaattaccttacgtatgtgatatacaagtggtagccaaagaatctttaagttgggaaaagaaaacttttttggttcaatttcaagtaaattgtattctggatattcaaagtcagcattatgagttatactatggtgttcagagattaagttgtcttggatacagtatttcttctgaaaatgaattttctttttcttttttgtgatttttttaaagtgttgcaccagttatgcttatgcattgttacatcttctgattaatgttncatctgat

SEQ ID NO: 8701 - DNA, 302 bp, Canis familiaris
  misc_feature (1)..(302): n = a or c or g or t
tttcctgtcccaaagtttggtccttgctttgcctccctctgtgtctccatctttcccttcccacccccggnnntgcctttctccctctctctccctctcctctctggttctatttctctgtctccctccgtgtctctctctctctctctnnnngcactaaaatatacataacaaggtttaccatcttggccaatctgcaaagtatggtcggtgacattagcgacattcacattgttgtgctgccgtggccaccgtctacctcctttcacagtaaaaatatttaaaagaggggatccctgggt

SEQ ID NO: 8702 - DNA, 557 bp, Canis familiaris
  misc_feature (1)..(557): n = a or c or g or t
gtacataatctagatttttgttttcatagttttgcacttnnntagcctatttttgaagattaacacatttgcaagatgattgacttgatctttgcctaatccaatgagtgttgcagaaagcttgctgnnactataaatgtaaatcttaaaaggggatacgagataatagagggctgaaatttaaacctgtatttaaaaaaaatcaccaaatctatctgaaaacaagtcaattcatgtcatactgaaattttgggggctttcagatttctcctttcttaaccacatttctgaatttctgaatgcataaaaatgtccatttttttttttcacagcccttgtactccaaaatttttgtttgtttttgtttttggtccatcagtattaactattgggatactactggttttgtatgttttttttccttttgagacaacagtacatataatagaggtacaatccattggatttttgtttatgtatttatttcattccagtttgatttattttaattgttgatacttgtcaaacagtagacattacttgttttatttatgata

SEQ ID NO: 8703 - DNA, 679 bp, Canis familiaris
  misc_feature (1)..(679): n = a or c or g or t
anngtgaaaaaagctnntcagtccaagcctcaatctgtgagaagatctnnctnnagacaacaacatgaagacctcattaatgccatccgatcggcaaagcagtgtacactagccattaaagaaggccgacctctcccccctccacctcctccatctgtcaacccagattatattcaatgtccatattgcatgaggaggtttaatgaaactgcagccaaccgacatattaacttctgcaaggatcagtcttctcgccgagtctttgatccagcccaaacagcaggcaaattggcatccagagtgcaggcaagggcaaaaaaagagccaactgtaaccagtgccgtgggagccctgctgcaaaacagggctctggagaccccaaatatggccccagctaggccaggattagcagtggaccctgcttctggagcaaaactcagacaaggatttactaaatcttctaaaaaagattaactcctagagtccagactgtctccctttaactcatcaacctggacagctgtgcacccaggaacgccacctaaggggagaggaaggtggaataagcccatgattattcttgagacatcatggagaacaagtaaaaatgagattcaccttttcttcttcaatattccttttaaaattttcaaaacgatattaaacaacacatcannnn

SEQ ID NO: 8704 - DNA, 549 bp, Canis familiaris
  misc_feature (1)..(549): n = a or c or g or t
tttttgcactnanncactgcngnnnaagcattgcacagcacantaaattgtacttcccaaagccagaactggatgagtaaaggagtaagaaaccattgcctgaatgtccttccttctcacctccaatgtgttaaatcccaacatcgaatgtataaaccttgtcctcagttggtactgtacactcaggctttcctctattttcctttaactgatgaatattattttcaaggccctcagcatatttgtatagttgcttacctgatataaatgcaatattgatgcctttaaagtatgaatctatgccaaagatcaccttttgttttatgaaagattacttagaggaaataagaaaaatcatgtttgctctccaggttcttccagtggtttgagacactggtttacactttatgctgatgtgcttttctctaatatcagtgctccagacacagtgaagcaaattgggaaaaaaaaaaaaaaatccctgaagactgattagagacatcaccactaaaaaactacatttataatctaggatttgttatatgcaaa

SEQ ID NO: 8705 - DNA, 417 bp, Canis familiaris
  misc_feature (1)..(417): n = a or c or g or t
aattaattaattaattaaaacagagnnnggtcccgggcaggtgacaggtggggaggtgaantctgcagcttccagctccccaggccacaaccccctgctctcagcatgagcattaggagggtctgggctgctggggtccggnnnngctctctctctttctcaccctcatcccctgtccctgccccgccccacccccttccagacccaggnttaaagaccagagtcctgtgaaaaaggccaaacccacactcaaacctaaaaagccaggatccaagaaatgaggagccaggagtggcctggctgcagcgacccagggcgagctggctagctgtgaccccaggtctcccccacccagcctctctccacctgagtctgaatgggatggagctgctnnngccaacacgagaggnnnnnnnc

SEQ ID NO: 8706 - DNA, 464 bp, Canis familiaris
  misc_feature (1)..(464): n = a or c or g or t
cttcncggcatttccacagccagacccaanatttnnagcagtcagtaagaaaattttcacagaatcagaatgtttaccagnnnngccatatccctcctcctggtcccgctggagaggactattcacanangaggtactcttggaacgtaaagccaaatgccagtcaaggagcccaaaatgcaatgtggtatcctggcagttattacagactgtcctatccaacctattgtgggtggaccgaatgacacaaacctgtcctggaaatcttcctgtaggcagagcaggactgaagacagctggagtgacttcgtataagatcaggccaaatgaggtttataatctattttattgctcccttatgtgttcatgtttaaagaaaaatgacattgatacttacctcttcgctgataaatttacagtatttgnnnnagtaaggaaataatctgtcatccagtcttaaattt

SEQ ID NO: 8707 - DNA, 570 bp, Canis familiaris
  misc_feature (1)..(570): n = a or c or g or t
tagagctctttcagaaaccatggggtgggtgggcgntgcattcatgtctcggggttcaggcaccccttgcgctctgctccgggccagccggccagggaatggaggggtgtggtgtgaggtcagggagccatggccaccacctgggaggctcagtctgtggccgaagctactgctcggctaaacctgagaggggctggttttccgtgacatcctaatggtgtgggccggaggctctgctgtgctcaccggagtgggagagtgggctggggggcaagggggtgagagaggcggccacgtgaccgtgctacaggtggggtgtcccgccctaggaccggccccgctgccaccactgcctgtccgtgtgactgaccggaagcagttgagctcagcatgtttttaaagggggtggggcgtgagtcggtgggggggctcacggtatgtggtgaccaggtgctnnnnnngaccaaataaannnnnnngtcacctgcctttccacacagatctccttttccgactagcgatgccgactcctgaattttgtgttcannnnnnattttgaatgggtatttt

SEQ ID NO: 8708 - DNA, 466 bp, Canis familiaris
  misc_feature (1)..(466): n = a or c or g or t
gcaccanggctgnntcagactgggcccccacggccccgctctgcccctgccttttctatttcctgtagtctatctgactcccagtcccggatttgttacagcggggggcccttggcccaanntgaggtttgttttgtccctaaatctcctccactcactgtctccccccgnnnctgatgcctcaaccttgatgtnnaggatatagccccaagatggggaacgcagtgaggaatgtgctagtcccctccctcagctgttgattccatgtgacaaccataacttcttggatgccagccacgctgttctgaggcatcgcagagcatcaccttgagacaggacaaagcaggaacctgctaccccatcccccccacagcacaagattttgggaccacaaaaaatatatatctatatttttatattggggggagggagtagaaaagaaagcccctatncngggccctactca

SEQ ID NO: 8709 - DNA, 418 bp, Canis familiaris
ttactctgaacaacatggtttttcccatttgtaaacttaatttattatagatctgtctgacatttgatacctttttgtgaacaacattaaagccccttcctctgttactgtttttggggtgtgaaatcagtcttatttttgtatgttttttttttccacaatgaaagctatataatctcattacggcaaatttggggaaaaaatgaattcatctctaatcccaatacttactgaagtataccaagcacttatgagtgctaggagctagggtgttggaggtgaacagtattgtgaacgttgtcgtttatttcctccattctctaaaggtatgtactggtttttgcttatgtttttgttttgtagttgtaattatagcaaacaattttatatcttttctacttaaattagcccttggatt

SEQ ID NO: 8710 - DNA, 390 bp, Canis familiaris
  misc_feature (1)..(390): n = a or c or g or t
tgatgtcacgtccnngaaatcattgccagatcccatgttgtnnngnttctgtgccatgnnnnnntctgggagttgtannatttnaggtcttacatttaggtnnnngatctattttgagttcatttttgtatgtagtgttacgtagggtccaatgtcatgctttcacacttngatgtcctgtttccacatcggttgaaaagattgtccttccctcatcaaattcttggcacctttgttgaaaatcatttgaccatatgtgcgagggcttatttctgggctctctgctgtcttccatcagtctatgtgtctgcccttatgccaataacaccttgtttggatactgtagcctcataacaagtttttttttcaagattttgtttatttattcat

SEQ ID NO: 8711 - DNA, 619 bp, Canis familiaris
  misc_feature (1)..(619): n = a or c or g or t
gggaattgagtctacttgaattatgtgcatcctgnnnctggaggnnatagtatttgcatctcctcatccccccctccccatccnnnnncagcaatgatcttttaacagatattgtaaatttaaagggattccctttaaaccaactcagggtgacctcctgtcttgtctggcctgctgtctggttctactcacgggctggggtagtgtcccctgaaaagaagacattttagtaatttatcctgtggattgagcagctgtgatcatgaccatggtgctgtttggctgtgaccactgcccaggcttggcatttgggagcagcctgggttggcagcagagccagggtgcttggaccactgcctgaggggaggcgtgtgtgtgtgtgtgtgtgcgcgcgcacgcgtgcgcacgtgtgtgtgtacagacatttaatatgttctgtatgtaatagaagttcacacttggtagagggattgagtggggagtggaagagaggtggagacaaagcatgccttactttctggtaaggagaaaggtgtttactcttcagctccttaaaactttttaacaaaatgtttaccagattattcattcctttataaacataatttgtattttctat

SEQ ID NO: 8712 - DNA, 508 bp, Canis familiaris
  misc_feature (1)..(508): n = a or c or g or t
tggcgtgccggggaccnnngncgtgcctgggtgtgccatccaccacnngnntcagcctnnnnagggctctgctgctctcaagcgaggtnnttcgagatacaannacggnntctgctgatggactgccaaaaagtattttttgatggcttctggttcctggcaatgagcagctcgtgattgtatctaaaacacgtttatttttgggtcaatgctccagaccctgtctctgcccgaggtgggtccctctgctggacttgagggtccgtctgtctctcacacttcaaaacactgcagctaccttccacttcctgccccgaaaggaaacccagaacttccctgtaatcagggactaggggggaatgtggatgccgcgtgcgcggtccctccccggaggcaaggaaacttctggtcagttgccaccagccaacactcaggccaacaccactggccacagccacctctcttcggtgaccttctcagcacaggcatggacagcatgctccttaga

SEQ ID NO: 8713 - DNA, 656 bp, Canis familiaris
  misc_feature (1)..(656): n = a or c or g or t
catataatcntganacaaaactgaaagtagaggtcattcatgagaagaacaattnnncagatatgttagtcgcttctggttttgcagcgtattgtaaagattcagatcatcttaatgatggagttagtactggatctactacaatccagcctcaattacaggggaagcctctcttcccattgttagatcaaaattgttatagaagggaaaatataagttgtacctgctctgagaaacaaaggcaaaaagagaaaactgtaaagaggaaagaagtctaccagaacctcttaaggaaaagctgtatccgtaaaagattatattctagaaacgtaactctgagagagaaggctgattttgggcagtgtaatccccaaagttcctttacattggatacgtgttcagcttcattttgggaaccacctaatagtttcaagaataacatcaattatgctgaaaacatttttgaaaaactaccaactgaagaaatacaggaaaacaacatagtggatttgagaatagcagtaaaagcatcgcatgctaatgaaaaaattgtatcagaggaacaatttaaggaacccttaaaggtgcaaggagatgaaagctcagatcttttatgcatcagtttggcaacagataatacataggatacccagtaa

SEQ ID NO: 8714 - DNA, 694 bp, Canis familiaris
  misc_feature (1)..(694): n = a or c or g or t
aaatttnnctgcccatgaattncttcgnngcantagctctgtataatgacagggtatattaataaaaaatacacgagttgtgtctattttaattcaattaggaagtaatggcccactaggttcttaaagctgatttggtttaaaaacactgaaaatttttccttaaaagtgtttagtaagcggtttttataaacaggaaataacaatcataatgctataatggctattcatgaatgcatatttgaacattttcttcatgtaaattaaacttaaaaattatacctttagcagaaggcaagattccacccgatgcaacattgatttttgagattgaactttatgcggtgaccaaaggaccacgaagcattgaaacatttaaacagatagacacggacaatgaccggcaactctctaaaactgagataaatcactacctgaaaagggaatttgaaaaagatgagaagccacgtgacaagtcatatcagaatgcagttttagaagatattttcaagannnnnnnccatgatggtgatggcttcatctcttccaaggaatacaatgtatatcaacatgatgaactatagtatatttttatttctaagttttcttagctacttactgtactttatatataaaacaaagtcccttctctagaacttgtannnntgttttcctnnnacgagaacatatttta

SEQ ID NO: 8715 - DNA, 677 bp, Canis familiaris
  misc_feature (1)..(677): n = a or c or g or t
agtaccannngctgctggacatcaagttggccctngatatnnagatccatgcctannncnagctcctnnngngcgagnannaaaggctgcgactatcccccagccccacctcgcagcgcagccgtggccgcgcctcctcccactcatcacagacgcagggcacgggcagcatcaccaagaagcgcaaactggagtcttccgagagtcgcagcagcagcttctcccagcacgctcgtaccagcgggcgcgtggctgtggaggaggtggatgaggagggcaagtttgtgcggctgcggaacaagtccagtgaggaccagtccatgggcaattggcagatcaagcgccagaatggagatgaccccttgctgacctatcgcttcccaccaaagttcaccctgaaggctgggcaggtggtgacgatctgggctgcaggagctggggccacccatagtccccctactgacttggtatggaaggcgcagaacacttggggctgcggaaacagcctgcgcacggctctcatcaactccactggggaagaggtggccatgcgcaagctggtgcgctccgtgaccgtggtcgaggacgatgaggatgaggatggagatgacctgctccatcaccaccatgtgagtggcagccgccgctgaggccgagcccacactggggcacccagc

SEQ ID NO: 8716 - DNA, 598 bp, Canis familiaris
  misc_feature (1)..(598): n = a or c or g or t
atgttgcccaactgacactgtgtcnannggttcagaggtcacttctttccanctnaatgtttaccttgcagttttacccaaatacttagatttnnaaaaaaacacatttgaggactcctnnanntaaattataaaactaagtctttagtgtttgttgtttcaaatgagaagtaaaagttgttgtaactgctttaagtgacttgtgggagtgttttacttatgcataagtatttccagcaaaaggaaggtagaaaggagttgaaactatttgctacttgggagtagaaggctttttgagagagataggggtattaagtactttcattccacacttagccctgttcacaggcttttgtttcttttgaagaatatgcccaaataacagcagtattccagaaatctgacaaggatcatttgttacttgccacttcccatcccctctaccaaaggcctaaatctacagtatgtgcttgcctgggtgaagttcttcattccaaaccatgttgtatttcctttgcagttcattataatagggcttgacccacaaaaagtatctgatggcctgcctataaataaaattcagcattctatttttaat

SEQ ID NO: 8717 - DNA, 555 bp, Canis familiaris
  misc_feature (1)..(555): n = a or c or g or t
cagccgaccttcagggatgtagcaaaccaccgctctgccagtgctgtaggtangaaaaccagaggggnngtgtgggggccatgaggacagctctcttctgaggggnacgtctgccccccaggtggagcgtgttccctaagcttgctcagctgcgcggtcccaattcaggtgannnggtcctcaaacctgggctgtcaggaatggccttccgcagagaagacgccccgtcccccagccccatgtgcagccaggtgtgtgccgcacggcagccttcccaaaacatagtatgaatttttaaaatttgtttatttttgtttctcaaccactttataatgtattttttaatttattttgtaacgtcttgtttttaagtattgctgctatccttgttattcttcccactgtttttattgctgatttattttgtgaaaattgtacactaatgttgtgttttatgtcaaaatcaaaaatatttaaagaaatactagttctatttaatgtggttatggaaccagctggaaacacaaaacaaacagtgattgtacagcaggctgg

SEQ ID NO: 8718 - DNA, 687 bp, Canis familiaris
  misc_feature (1)..(687): n = a or c or g or t
atgccaggacaatcaagaacttgactttatcagtgggatgaagcaagtgnnncgccaatttatagatcaactggtagaatctgtgatgaagttgtgccttatcatggctaagtatagtaataatggggcagccctcgctgagttggaggaacaagcagccttggcaaacaaccccaattaccaggttggtggctccaggtgtagtcaagatggtgcgatgtcacagaaccatcaggactctcctggacctgaagtcatagttaataatcagtgctcaacaagtagcttgcagaagcagcttcaggctgtcctgcagtggattgcagcctcccaatttaacgttcccatgctctacttcatgggagatgatgatggacaactggagaagcttcctgaagtttcagctaaggcggcagagaaggggtacagtgtaggggatcttcttcaagaggtcatgaagtttgccaaggaacgacaactggatgaagccgtgggaaacatggctaggaaacaactgctagactggttgctcactaacctgtgagctaacaactcctttgactcctctccatttacccccctagcagcattccatcccagcctgaacaccccacccatcaggccagtgaactgcacatcacacaattgtatttcccaatacatctgagcagtttgtgcaaatacagg

SEQ ID NO: 8719 - DNA, 596 bp, Canis familiaris
  misc_feature (1)..(596): n = a or c or g or t
ttnnncagctgctctgnaanggcgttcgnnacatttgatgcttaggggttacggnnaagactgcgttcccctcgcgctctcctccnngactcccacatgagctgcgnagaccnnnnnnnnnnnnnannnnnnnnnnnntcctccctagcgcagccacannannagaaggctggctcagcaccccgagtccagnnttttctgtcacgggcgngtcccctccgagnngtccacntgtcctgtctccagccccggccccccagctcagtgatcccggagagaagccccgacacccgggctcagagagcggagaagagcaggacgtgcgttttaacattgtgatgctggacaccaaggtctggaaggtttgtggtttgtgagcacctgatgcccaagagcctacaccccgaaagtcaaaagtagaatcggtctccttgcctcatttctccgcacgctgccatgtggaggcttccttttcgaagttaggtgagaaagattgggtccagaacacctcacctgtgaacggaaagacctaatgcacccaggaatagctaactctgnnnncctctatcccttattctcccaaaaaggcaaacaat

SEQ ID NO: 8720 - DNA, 504 bp, Canis familiaris
  misc_feature (1)..(504): n = a or c or g or t
agatggtgccttctaaccagagaatgcatagtnnnncttcttaccgccaaatgaactgctttacgcanntcagccagacctactgtggcagctttgcttacgcatgcccggagatcttgctgggcttgccctacaaccctttcctgtctgacacctggagcatgggcgtcatcctctacactctagtggtcgcccggctgccctttgatgacaccaatctcaagaagctgctgaaagagactcaaaaggaggtcacttttccatctaactactccatctctcaggagtgcaagaacctggtccttcagacactatgccaagccaccaagcgtgccaccatcctggacatcatcaaggatccttgggtgctcaagttccagcctgagcaacccacccatgagatcaggctgcttgaagccatgtgccaaccccccagcacccctaatcggcaccaatccttggaaatcaacacctaaaagtggttggttgaaagggggttgagag

SEQ ID NO: 8721 - DNA, 508 bp, Canis familiaris
  misc_feature (1)..(508): n = a or c or g or t
accaggtgctttcagaccctgagaccaagaccatgggaaaagtnnctcaattcagaatacgcaggacaccagcncgtnntcagctaaaccttacaccaatggggctgcctcgaccaatcaggttgaacaagaaggagttcagcttagaagaaatttataccaacaagaattaccagtcacctacaaccaggaggacctttgagaccatctttgaggaaccccgggagcgcaacgggactttgattttcaccagctcaaagaagcttcggcgggctgtagaatttcgggacagtagccttcctcgatcccggcggccatctcgtggggtccgggcgacagctggcaggacccttacctccagcctggcccccagcccagatgtgggacctctgctgcagcagcggttggaggagctggatgcctcactcctggaggaggaggaagtggatagggaactgccccatcggacctaggagctccatttgtctatccatcctgaagcatctga

SEQ ID NO: 8722 - DNA, 184 bp, Canis familiaris
  misc_feature (1)..(184): n = a or c or g or t
aggagctcccagggctggtgttttnnnggnnnnncttgtcagtatcccnnngggtctttatgtnnnnnnnnggtcagtaaaatnnntggnnnnnnntttgctcctggcaggnnngctgtnnnnnnngagagcccccaaggagccacatggattcagactgactaggaaatggttcnnntttttt

SEQ ID NO: 8723 - DNA, 591 bp, Canis familiaris
  misc_feature (1)..(591): n = a or c or g or t
cgaaccccgagncgcatccccagnngcgcccccagccccgcgcctccacccttgcccagcagccggcgaagcagcatgggcagcacgggggtggccagtgacgtcaagaaactcatgtcctgggagcagcaacccccagagctcttccctcggggcaccaacccctttgccaccgtaaagctgcgtcccactgtcaccaacgaccgctcagcacccctcatccgctgaggtgcctccgtccatcaggggtctgaggtcgtacacccacgcctgcccaggggctgcccagagctggcggcagcggcatcagcagcagcagtggatccagggagctggggtcctgatactggggatactgggggtggctgcccttccccaaaccgcgccctcagcttgagcagctcccaagggactggcctggggtctggggccgtcagaataaagcaggcagcattggggggcgggatcatttcttccccccacgagggccctagaactctccctgggggccccccttgtgcaccccaacccttccccgctccataagggaggagcccccacacacccccttccccaccctatgtnnnnnnc

SEQ ID NO: 8724 - DNA, 616 bp, Canis familiaris
  misc_feature (1)..(616): n = a or c or g or t
tatcacgacatgttatatattttttgtaggggtcaaagaaatgccgatgnataacccatatgatttatagtgtgtgtaagcattcatacaggcagtngnctcagaaatgcaacaggtttgctccaggggaagagggagacagagattggccccgtgtgcgatgaaggccgcgaggctccgtcccattcagatcacagagtgagtcatcccctgtcacccacagtgaccgcccccctcattccagtgagtctgtccccgcaggtccgctggccgctggccaggtctcccccagcgctcgcatgtgcaaacgaaccgggggagggcagagaggtggcgctcataagcacgcgcctgcaagcacacctgccgtcagggtcactttcacacggagccccccctggcggtgtggcccaacgcagagcctggaggcgttaggcagtaagatgcacagaggtacctgcagcatgtaaatagcgcagagtcccacaggttgccagataacacactaactcctttctatcctgcgagagttcatttccaaacaaaacgagtacatgtttgttttccttaagtgctttttttgaatgttgtttgttatttttnnnnnnnctggaga

SEQ ID NO: 8725 - DNA, 578 bp, Canis familiaris
  misc_feature (1)..(578): n = a or c or g or t
tataagttttagtactgatcttttcccaatgctgcacactcctgtgtttggaaccntattttaatggctttgcaacagaaatcctgtatccagtttcctataatttaagaaaagcatccaaataaaggctttactattaacagaccagatagcaccagaaattatgtgtctattatgattaccagaacatgtcttaactttttagggcaaaattactcacactgaaagttctagcttaagtgttggcacttttgtggaaaaaaaaatcacttttggatctcagacttcagtgtatacccagtaattttaaattatgtgaaatgttttaaattagtgaactcgtaattactgttttgatgattcagtttcttgagaatggtaagtgtataaaattgctattgcagctttattttcaatatgtgcctgtaaaccatggatttttctccctttgtaaaaagtcatttgtagataattgaatgtttgattatagaaaggtcattagtttcttgttaacacattttgttagtctgnnnnngttgcttatcggnnnnnnatattgttcttgaaaatagttgatg

SEQ ID NO: 8726 - DNA, 504 bp, Canis familiaris
aacctgaaagagctgtatttggtgtcctgtaaaatcacagattatgcactgattgccatcggccggtacagcatgacgatagagactgtggatgtcggatggtgtaaagaaattacagaccaaggagccaccctgattgcacagagcagcaaatctctgagatatctggggctgatgagatgcgataaagtcaacgaagtgacggtggagcagctggtgcagcagtacccccacatcaccttcagcaccgtgctgcaggactgcaagaggaccttggagagggcctatcagatgggctggacccccaacatgtctgcagcctcctcctaacgctcctgctcccggggggggggggtggtgggagatctggggggccgagcccttggaaagattttccctgttccacgtctacgggtgtaccccagtgtatatgtgtgtcttgttcgcataccgcatagcataagcgcaattgctgtttgttcccaggtgagctgggttggggtg

SEQ ID NO: 8727 - DNA, 511 bp, Canis familiaris
  misc_feature (1)..(511): n = a or c or g or t
cacccccccnngtnctttgcngctatnnactgtgatttttatgcataaagcacatttcatgtgtattcaaccctaagttgaatgaaacttacagaatgaagctatgtctctttaaacggcctgttttcaaagatcgtgttgaataaacacatacccatatgataaaatgcagactttacacatacactgaaaatgatttttaatctcatactttagaaagatttatttagaattatgatttgacataatcttgggtattggaatgcagatctgcaacatatcttttaggacgcttatctctaaattgtttttgcggttgtactgttttttggtagtgaaaggttgaaattttctgttgccttcattttcatcttgtggtttgtctctttaaaaatggccttacatttaaaaaaaaaaaacataaagaagtgtatactacccaaattaattaattaattaatttaaaaaataaaaataatagggttttttttnnntgttttgtacttaaaag

SEQ ID NO: 8728 - DNA, 353 bp, Canis familiaris
  misc_feature (1)..(353): n = a or c or g or t
tttaaatttcatttgtaanttttgattcnnnnnnnntgctttcctctaatannnnnnnntcatcatnnnnnnnncannnnnnnnnaaggtgttgttttaaaaaatatgaaacatcaaggacaaagtagccaagtcttggttaataaagtggnnnntacccagtttgataataattcttcctccagccatttattgaaagccaacataaatggtggggatagnnnnnngaagtaaganatantngagtccattttgactctctctctctctcttttaaatagnctgtgaactcttttgttaaggnnnnaagtaaaatttggnnnnnnggtggattttaatgannnatgnnnctc

SEQ ID NO: 8729 - DNA, 333 bp, Canis familiaris
  misc_feature (1)..(333): n = a or c or g or t
agtccannnnnnnctcaacatcttttatttnnnnngctttgttggannnnnntannncngnagtaatttgcaacatgtngtctgtttaacagtgnnnnnatgtaatgcttttatccatgtttaaaaannaagnnntttgatcaaaggnnnacnnnnnnntgtaattagtcaaggaaaaagctttcaggactttnnnatgttanntgtttttcccannnaggaaatgctataaagctcaaattagttaggannnncttatacatttnnngttttgaacacttaaganntgcttttcagatatttatattgccatatnnnnnattgaatgctttg

SEQ ID NO: 8730 - DNA, 516 bp, Canis familiaris
  misc_feature (1)..(516): n = a or c or g or t
tttttatnnaatttttcatatttctnnagataaaagtnggtnngaggtagtngnnagggaattcccctgtccacatccctgtccaagaagtttttgaatcaaagccattcctaattttaagagttagagttaatatttcaagcattgtttccttttccctttataattatgaagtaaagaacataaattttaaacggaaaggtttagaccaaatgaaattattgagggaaattgcatttgcttttaaattttaattatattattcaaaaatgtctctcttgtacaaggtgaattgctgactaatggaataattcttttttgactcacagaagagtttgagtgtactgcagataatagaatgaaaaactgactacaggattgtaaacagtcataattacaggcagggtatataacagcatggggccgatcttacactttgctttgctcttaggaaaaccaccatatatttctgtgagcagaaaatgtaattaggaggagtttacttgtatcactgac

SEQ ID NO: 8731 - DNA, 451 bp, Canis familiaris
tccagagacactgagaagaaatccatcatacctttacctcatcctgtgaggcctgaagacattgaataaccatgagcagtggttcttaggctgatgctccagatattttatggacagtattattttcattggatgatcttggagctgtattaggagaaaagtaattatttaggtcttacagacttcaagaaaatacaggttataaacttgagtctcattgtttccagttagcaatatcatacctactaaagcctttcactgtaataaaattcaatcaaaaaggcagctaggtcagatggaaacattccactattttggttcataatattcactatgtgctagggaaaaaaaacttgctccagtctcctcctaaattctgtgcctgagaaccactgctgcatatgtattttttattttgtatcaaactgttaattgaagctttaaaagcata

SEQ ID NO: 8732 - DNA, 639 bp, Canis familiaris
  misc_feature (1)..(639): n = a or c or g or t
cnnactggaccatctgtacagacgagcggnnngtgcgcgtcccnnnntcacaaaaggactgggcctggaccaaaccacacgaactggactgagagggggaacgaagagggcangaagaaatcccgccccaaacttccgcctcccttttctctactttgtaatttattgatcagtttccgatgggagatgggtgccctttccccgcgggaagggagcggggcttccctcccgggccgcatgctaggagaggctgcccgctcccctttcttctccccagtcgcggggcccaagtcttccttcttcgtccgaaaggaggggaggggggactcgctgctacaagcctcgccccacgtgccactcatccccgccccgccgccgcatcaggtcgccggtgcctggggtcagctgcgggcggacccctcttcctccccagtgtctcgtgtccccggggcctctccgccccccccgtgctgtggccgtgtccgtgccccggggacagggggtgcagaactgcgctcccggttcccctccggctccggggtttgcatgggagaatcctctttccacgatgccactgggcgacgtggcgtggggggagggaggacggtgggggagccctcgcccgagactcttggtcgg

SEQ ID NO: 8733 - DNA, 543 bp, Canis familiaris
aaatactcaaagtttacgtaatgagaattatagcgcgtgtgcaaactcttgagggttgattatgctgcaatttagcatgttggaacgtctagagagaaggttgactttttgcacttctgtatatagtcaaaagagagaaacctgtataatagtaagatcttattttgaataaaaacgtctataattacaaggagttttgttaaggctaataaaatgacagactgagcaaaattgcttgcaaaagtggcacagagttagcactccataccccttcaaacatgttgctttgctttattgtggacagcttgtagtttgccaggattttttcagctggaaagatatgccatccttccgagatctcatgactgacaaaaactccattgggccaaatctgcctgaagatcattaccaaaaatagcaggtacttcaaccattaaggtgaaatcatggatcagatattccgtacatttttcaaaactactgcatgtttaaaacttcaacggaaaaaaaaaaaaaaagcaagagagaaagaactatactaag

SEQ ID NO: 8734 - DNA, 577 bp, Canis familiaris
  misc_feature (1)..(577): n = a or c or g or t
gtcctcattcaccgagcagtgctaggttctgtnnaaaggatgttgggagtgctggcnnaaagctatgggggaaaatggccattgtggctgtcgccgttccaggtagtggtcatccccgtgggagctgagcaagaggaatatgccagggaggcacagcagaggctacaggctgcaggactggtttgtgacctggacgccgactcaggactgaccctcagccggcgagtccgccgggctcagctcgcccactacaactttcagttcgtggttggccagaaagagcagagtaagaaaacagtgaacatnnngactcgagataaccgccagctcggggagcgggacttgactgaggctgtgcaacggctgctggagctccagaacaccagggtctcagatgctgaggaagtgttctgagcttttgtgtatggatgcggcaggagctgcctgcctccctccatgcaggagagctacctcactgccagaatctagaggcacccccccccccaaaccccctcagaatcatgtggaggcatgnnnnnnntctcctggaaagtcatttgatgtggggaatgctgta

SEQ ID NO: 8735 - DNA, 475 bp, Canis familiaris
tcatgcccagagacaaaggcagcagtgacatttaatattgcttcacgaatgactagactgctgcctccattgctattaaatattatgcagtggtatgaaaagaatgggataggtttatatgtcctgacacagacctccaaggcatactgctgatggataaatcaagtcacatcaatatgtacagtttggatccatttcgaacataaagccccaaaccccaactttctgtgtgtaaaaaatgaatagaaatcacaataaatgcatgttaatggagagtgagtaactttgaggaggggagtgggtccaggggcagtttgaagggtgactgtcacaatttactttgaatacttctgacttattatgtattttcacagtgaggaggtattcatataatttcaaaagaaaaaacctcctcaaccccctccccactccagctcagacaccactttgcaaaggcctttgcggaccacacaaa

SEQ ID NO: 8736 - DNA, 589 bp, Canis familiaris
  misc_feature (1)..(589): n = a or c or g or t
catttccctcaccagcnnnnnagcattttaaagtggggaacagggtcattccatatnctctaacttgctggcagagtcagtgttaagaatcaagctttttgcctaatacttaaacagtgaaggatgtgtagttgaactagacactccagacttctctagacagagtagaggttggggtgcttccaagctttcatggacctattcatgcaacatgacttcaggtcagctgtgtggcaggtgtgagtaagtccagagggaaatggaaagtcaatttagtccctatttctagatttgggttgttttttttttaaggttctccaatacaacattacatttatttctctttttatgaagtttactttttttaagtctcacagttagagatgttccagaaaatgtcacttgaagagggattgattttaatctggcataccacttgttaccattttaaaatcggtatgaagttgtaatttaaactcccatttgtaaccagaagttctcttataatggattacctgacatcctgccatgtgtacctatatcaatattgctgtgtaaaaattctgtatcagaataatgacagtattgt

SEQ ID NO: 8737 - DNA, 619 bp, Canis familiaris
  misc_feature (1)..(619): n = a or c or g or t
actgtacgcagcactatganctctgnncggnnnnncaggtnnnnggctaccctgctctcctgtggttccgagacggacagaagatcgaccagtacaaggggaagcgggatttggagtcnntgcgagagtacgtnnagtcacagctgcggagcgccgagcgcgaggccccggagaccgtccagccgtcggaggccccggtggcagctgctgagcccgtggcgcagggcacggtgttggcgctcacggagaagaacttcgaggacaccattgcagaaggattaaccttcatcaagttttatgctccgtggtgcggtcattgtaagaatctagctcccacgtgggaggaactctctagaaaggaattccctggtttggcagaggtcaagatcgcggaggtggactgtactgccgaacggagcatctgcagcaagtactcggtacgaggctaccccacattgttgcttttccgcggagggcagaaagtcagcgagcacaatggaagcagagacctggactccctgcaccagtttgtcctacgacaggccagagatgagctgtaaaacccgcgcccgggccgtcggagcggaaccgcgcgggtgccgtggaggctctgctcgtg

SEQ ID NO: 8738 - DNA, 484 bp, Canis familiaris
  misc_feature (1)..(484): n = a or c or g or t
tcaattctacagttgatnaagatannnnnagtgccattgtgcagcnnnnnnggngnnnncgctctactctgntaaaatattttcctgtaacaaatgacaataacacttgggnnagaaatccgtttacagtaactgttaaaccagcctcattagtagcacgggactatgagagcctgattgatttaacatctgattctcaagtgaaacaaaattttagtgaactttcactaaatgatttttggagtagcctaattcaagagtacccaagcattgcgaggcgtgcagttcgtgtacttcttccttttgctacgatgcacctgtgtgaaacaggattttcatattatgccgcaacaaaaacaaaatacaggaaaagacttgatgctgcaccacatatgcggattcgacttagtaacattacacctaatattaagcggatatgtgataaaaagacacaaaaacactgttctcattgaaattagagggt

SEQ ID NO: 8739 - DNA, 503 bp, Canis familiaris
  misc_feature (1)..(503): n = a or c or g or t
canacaacnnagagaagaaaactttcagnntcgaagaaaagtccaaaatctccaaaaaccgtgttcattatatgaaattcacaaaagggaaggatctatcatgtcggagcaaaacagatcttgactgcatttttggaaaaagacagagtaagaagactcctgaggatgattccagccctgccactccagatgggaactcatcctccactacaacgaccagtgccttcaccatccaggagtactttgccaagaggatggcagagctaaagaacaagccacaggtcatagcagcagggcctgactttgcagagacccaaatggaaagaaaaaatggaaagaaaagaaagaaagaggcaaaagatagaaaagtggagacttacaccgtacccaaggccaagaagaagagacaccaagttgagtggcagcttggagacccttgttgggacaagaattctggtgtttctgctgaaaatggagaagattgtgtgtggccacctcatgtc

SEQ ID NO: 8740 - DNA, 474 bp, Canis familiaris
  misc_feature (1)..(474): n = a or c or g or t
gatnctacggaannnagcctctgctgttagcaagnnaaangtgtgggtganactgggaaagactgcctgcccttcagcactctctccacttccggtgactgcttctatgttgtgtgccatatgccaacaactgctgaccctaggatcccatacactccctgtgaaactggtgctgtaccatgtatcccaccacctgggacttgttatcttactgtattttctaaggagtgaataatcttgttcaagtagctaacttatttaaaaaggcatttcctttagtggcattgacttcatcccatctgatttccaaggaaatggtctgtttctgagaacagctgatttcagtgactgtacattccagacctaaaaggtctttccttttggtgtgggtttttattcattttgaaatatttttgaacactggggtctctgaaactactaggtctctagaactnnnattgtaaaaagaacttg

SEQ ID NO: 8741 - DNA, 574 bp, Canis familiaris
  misc_feature (1)..(574): n = a or c or g or t
ttgaaaagaaaaagaaggagaaggttcttgctaccgttacaaaannagttggtggtgacaagaatggtggtacccgagtggttaaacttcgcaaaatgcctaggtattatcctactgaagatgtgcctcgcaagctgttgagccatggcaaaaaacctttcagtcagcatgtgagaaagttgcgagctagcatcactcctgggaccattttgatcatcctcactgggcgccacagaggcaagagggtagttttcctgaagcaactgagcagtggcttgctacttgtgactggacctctggccctcaaccgagttcctctgcgtagaacacaccagaaatttgtcattgccacttccaccaaaattgatataagcagtgtgaaaatccccaaacatctcactgatgcttatttcaagaagaagaagctgcgtaaacccagacaccaggaaggggagatttttgacacagagaaggagaaatacgagattacagagcagcgcaaggnnnnnngaaagctgtggactcgcaaattctgccaaaaatcaaagctgttcctcagcttcagggctacctc

SEQ ID NO: 8742 - DNA, 508 bp, Canis familiaris
  misc_feature (1)..(508): n = a or c or g or t
tanctgcagcagagcgacaggacaatctcacagtgacactctcctttttgaagnnaaaggggtttttgattgcaccatttaccagcatccaggaatgaacactgaaggaggagctcttgtcttcttaattaagagagttattaggtactggctttggaaaaacctggcttttatggaacagaatgggatgaaaacctaaactcagtattgcttattttgcccccaaaataacagagtcctattcagacaatcacttggtgacaggaaggtcaaaggagaaaaagtaggcaactcaagggtgggctgtgatccctttaaagcagaagaggggcaaccccccaccccattaccaaatgccacccttgccccaggacctttgcagcaagccgtgttcctgccccagctctagcaccttttcattttgataaagaccttactgtctttttaccaacttagtacttgaaatgatgatatagcctgcgttgggtgtctcaaggctgtgatctat

SEQ ID NO: 8743 - DNA, 665 bp, Canis familiaris
  misc_feature (1)..(665): n = a or c or g or t
cccacnnagcccccgagactatggtnngtccaaggccaccgccgccgccgccgccgccgccgggaaggtgaatgnnagctacggccactgcaccccaggctcagagaagagcctgctggacctggaccttgcagagggccctggccccacctgctgccagggcctttttctccctgcgggcacgccaccaccccggggccagccccccgcctgcgagaggctcctgcacttcccccacccgagcagagacggtttgattgaggtgtgtttccccattgcagaagctgggtggcttttcacagagagtcagtaatttcagaaatggaaggttcaggggtgggataggaaaggaaaacccggctcagggttcatacacactctagtgtcagaccctggactgactactcatggagtgggaagatgttcctccacctggagccatctcctgccctcggaagcctgcctcacagagccctgcctggtgacctgcattcaacgcctgcgtgtttccagcgatgtccacgtgtggacacatgttctgtgggattgcatcttaggctggaatctgcctcctgtggctctcccagggtcctggctgtgccctgtgcccacagctcagccccaggcctgcaccttattgnnngggcatgcttgctgaggcctgc

SEQ ID NO: 8744 - DNA, 454 bp, Canis familiaris
  misc_feature (1)..(454): n = a or c or g or t
gcatctcgcnnncaccccccaacccnntcaggctccatctctctgcccattcatgtctcaaactgcctccactgtgttcctgcagtnnnggtnnagaggggagcaagacccaagtcccggtcttcaggagctctcagtgccagggcagggtggagggggtgctgcctcttttcagcctggtccacaccccacttccggcagcctctcccttctccgtctcccctaatcctggacgtttctccagactcagctcaaatagtgctgccgcctccaacccttcccttgcccccagcctgaggtgctctctcctctgaaacacgagagtagtgattgttcagtttacttcatagtcgcctacagtggtgtgaacctttctgttgtctgaaacttggatttaaagttaaatcacttgggagcagcctgggtggctcagcagtttaacaccaccttcagt

SEQ ID NO: 8745 - DNA, 559 bp, Canis familiaris
  misc_feature (1)..(559): n = a or c or g or t
agtaccaccacctccagctcctcttcagattgcccctggagttcttcacccagctcctcctccaattgcanctcctctagtacagccctctccaccagtagctagagctgccccagtatgcgagactgtaccagttcatccactcccacaaggtgaagtccaggggctgcctccacccccaccaccgcctcctctgcctccacctggcattcgaccatcctcacctgtcacagttgcagctcttactcatcctccctctgggctacatccagctccatctactgccccaggtccccatgttccattaatgcctccatctcctccatcacaagttatacctgcttctgagccaaagcgtcatccatcaactctacctgtaatcagtgatgccaggagtgtacttctggaagcaatacgaaaaggtattcagctacgcaaagtagaagagcagcgtgaacaggaagctaaacacgaacgcattgaaaatgatgttgccaccatcctgtctcgccgtattgctgtggaatatagtgattcagaagatgattcagaatttgat

SEQ ID NO: 8746 - DNA, 572 bp, Canis familiaris
  misc_feature (1)..(572): n = a or c or g or t
actnntnnatgagaagatgaagggaggacagacacgaaagcggaggagtgtcaacccatatctgcaaggacagagactggacaacgtggtcgcaaagaagtcagtccctcatttttcagatgaggataaagactcagaataaagagaagatgctggtagaaacccacaccgccggttaggtctcggtactgcttatgtgcacgtgcaattagagcccctgtgaatggcagcatgtttctaatttagactagtatggatgaaaagcagctgtgtttgatgttgcattgtcctttccactgacagctctgctttctactaaattagaataagagcctttttctttttaaatgtggatctgcgatgggcattgaaattaaagtgtatatatcaacaacagtaaaaagcaaggctatgaatgaaatgtcctcagatttcttgcagcttaacatggtgttttgggctgcactcctttggccaagtatgtaaaaaactggcatttgattttgattatgtagttcacccagcccttgggcgtcgttacacatcaataaagaagattgtactcaagagga

SEQ ID NO: 8747 - DNA, 405 bp, Canis familiaris
  misc_feature (1)..(405): n = a or c or g or t
ttgtatgagtcttaggtgtgacattgcagtagttggcatacccagtaaaggataacctagtgacaaatcactganaatggcttcctctgtgacctcaaaagaaaaatccagacaaaatatagcatttatatttatagaaaacggaggattggctgttttccaagaacttcaagttaatgcaagaaaagttcttaactctgaagacttgttccgcataaaggagacattctttactaatggaagaggtggttttatttttacaacaagcctactcatattaccaaacctataaccaattgctgatctcctgtgtaaagcatttttttctcttatctgaaacagtgatttatatgaactgttggaataatggaacctcaaactacagatgtgtatgtaaaattgcat

SEQ ID NO: 8748 - DNA, 239 bp, Canis familiaris
  misc_feature (1)..(239): n = a or c or g or t
agtgggnggtgtcctcannntgctggagnctgccctgtcccagtagnnnggnnagnnngattggaagtgggggtctcccanacnngcnnngcatctctccatgaactcctgttaggtgccttttgttgtctgctnnnnnantnnnnnnannnnggcccagnggcccnggtnnnnnnnnncaagattgaggnnngnngnnnnnnggccannatgggaccacctctgnnnnnnngnnnagg

SEQ ID NO: 8749 - DNA, 617 bp, Canis familiaris
  misc_feature (1)..(617): n = a or c or g or t
gnctgacccagcgtancagcntgtacngcaannagcatgcccannnngccatcgtgtnnnnncagccaccgcccactagcccnnagccccccgagnaggacgaggatggnngaacggatgcagagctgcggcctgtgcccagcgaggaggaggaaccagagttggnnaggccacacaacggccgcgtgggaggttccccagggcggcacctgtactccaagcggctggaccggagcgtgtcctaccagctgagccccctggagagcaccacccctgacgccctggcctgcgccaaggcccaccacaccctggcggagctgaagcgccagcgagccgctgctaagctgcagcgacccctgcccgagggctccgagggtgctaagctggggctgcccgtggaccccgagagcccccagccatgcagccccagggccgccggagacccgcccctgctgaggctcacagcgccctcggaggaggcccccacggagaagaggccctgctgtctgctcatgtgaggctgcccttgggcgaccgacgacgccctgctccggaccccggtgctgctgatgggggacggcccctggcagaagtcgtgcggggggacctgctgcgga

SEQ ID NO: 8750 - DNA, 540 bp, Canis familiaris
  misc_feature (1)..(540): n = a or c or g or t
ttcttcctcgtgcagctgtnnnnngcgtgggancngcaggcgnccctggaaggggcccnnttcgtgctgcttatgttgctggccagnntcaacagctgcaccaacccctggatctacgccttcttcagcagcagcgtctcctccgagctgcgcagcctgttctgctgggcccggagtcgggccccacccagcctggggccccaagaggagtcctgcgccacggccagctccttcctggccaaggacacttcctcctgaggagccaaggggcgccttccttccagaggctctgcgaggcccggctgcctacctggggctggccctcggacccctggggggaggagaccctctgggagggggctctgggactaggagccagaggtcagctccttggggcctagcgtgggggggctagggcggcagccgggggcctcgtctggggggcgcacaaggcctccacgcagcgggtgcctgcccctgacatggaggctccccggagcccgggaggaaggaaaggggtagggggcctctctgctcccc

SEQ ID NO: 8751 - DNA, 609 bp, Canis familiaris
  misc_feature (1)..(609): n = a or c or g or t
cccggccctgcccccggccctgcaacagaggtnggaccaggtnnngcaggacctggnngacgagctgatcacggcccagggccatgagaagctgctcagggcgctttttgannatgcaggctacttaaagaccccggaagaaagtgaatcggtgcaggaaggaggggctaaggccccagtgttccagaccttggagaactgcagtgaggcacataaagagctgtcaaaggagatcaggagactgaggagtgtgctgacacagcacggcatcccctacacgaagcctgcagaaacttccagccctgagcacatgggccccaagacacccacagatgggaccgcagaacagctctgaggcgacgtgggactgcgtgggaacaccttgtgacctgagggccagagggcagcaccagactggagatgggggacctggggcgtgcatcctctgccttctggcccgtgggcccccaggctcagctcaaagaggcagacaaataaagattcaaagttttaattaattcctgtactgataaaaataattccatgaattctgtaaagcattgcataaatgctgtagtgtaaaaaaaatttaaacaattgttaacttga

SEQ ID NO: 8752 - DNA, 711 bp, Canis familiaris
  misc_feature (1)..(711): n = a or c or g or t
cactgctgntntgctgggatcnnctgannnngctgannnggtcaatttaaatggnnnnnnnnnactgcttaagattacannctgtacaagccnnnnnaaaacagttacaattgttgttcgtngatctaacaaattggtgattgaagaagctgagcgctctattcatgatgccctatgtgttattcgctgtttagtgaagaagagagctcttattgcaggaggtggtgctccagagatagaattggccctgcggttaactgaatattcacgaacattgagtggcatggaatcctactgcgttcgtgcttttgcagatgctatggaagtcattccatctacactagctgaaaatgctggcctgaatcccatttctacagtaacagaactaagaaaccgacatgcccaaggagaaaaaactaccggcataaatgtccgaaagggtggtatttccaacattttggaggaactggttgtccagcctttgttggtttcagtcagtgcactgactctagcaactgaaaccgtccggagcattctgaaaattgatgatgtggtaaatactcggtaatcggattaacaccggtcaactggtgctgctgtggccactaacagtgcatctggagtggaagatcaccttggtgttcttgctgtttggaagatttgtttcctttacgaatccctaggcctggtcttccagtggcacttgcttga

SEQ ID NO: 8753 - DNA, 542 bp, Canis familiaris
  misc_feature (1)..(542): n = a or c or g or t
gtntttggtgcaccaagagacagctttcacatccccacaaataggacaagaggggaatggataagaacaaatatttgaatattttatttgttaaatgaccacagcttttatactgactgctaaaacttgtagtttttaaactcaataggttaaaagatactttctggcattagaataacctgtgaaacttcttgttttgaaagaaaccaatagtccacccaccccagagattatgattcaaaacatttgttgtgcaaactggacatcttaaaaaaatatctgtatagagcccctgataaagacatacaggataggagaagatattcctgagtatagcaaagtcatgtaatatgaatgcttgtgagaatctgaaaattagcctaggcattatacattaaactattctcaagctgtagccctgaaaaaggattcattactcccacgtgcagatatttgggaaaaaaaccccaacatgctaggttactatattacaagnnngatggaatcttgtctcaaaaagtagagaaaattataaagctatt

SEQ ID NO: 8754 - DNA, 671 bp, Canis familiaris
  misc_feature (1)..(671): n = a or c or g or t
atngaaagtgcagatatgactcaaaaaagcgagctgccacatgttcaaagtatactgaacttccctnnnnnagtgaagatgcnnnaaaagaagctgtnnncaatanaggacntgtgtctnnnnntatagatgcgagnnactattctttcttcntgtacagaagtggtgnctactatgnnncatcctgtactcagaatgtgaatcatggagtattagtggttggctatggtaancttaatgggaaagactactggcttgtgaaaaacagctggggcctcaactttggtgaccaaggatatattcggatggcaagaaacagtggaaatcactgtgggattgctagttatccctcttacccagaaatctagacctcttcattttataacaagtccaaaaaattgaaacactttctcttaatttaattttacctgctataatagtaaaaataaatgtgtcatgaccattgtatatgtgctctactaacagaatatatagtttggttctctatttttttaactttgaagatattggaaaatatttgctacataagttaataatgcgctatagatataactgtatgagaattggtcaacctaagaaatctgtcatgtttgttttgtcaccatcttgttttacatgctttgtcattttaagttcccttatgtcctttc

SEQ ID NO: 8755 - DNA, 650 bp, Canis familiaris
  misc_feature (1)..(650): n = a or c or g or t
gccagagccccaccagtactgcacagctccannnnnngctcgacacactctacagtcaccggcagaannnnngagcctcaccctgtatccagtgccagcatgacccctaccgcctgctgcggtatgatctngacagccccctgcagagggaaccacccctactggtgaagaagtatgctgtggtgcaggggatgattctgatgtttgctggggggaagcttctttttggaggctgtgttttgaatggatatggcttcagcaagcagaatctgctgaaacagatcttccaggctcgacaagactgcaagatgggctacttcctgccagacaactacaaatttagcctttcaacctatatcccgggcccggaagaccctgactcagccaagaaggcgatatcagaagacatccaaggaagcttttcctcgttggccctgggggacaagctggaggagtcccctcctgaggctgagaagaaaatgaaaccacctgaagtggacctgcctactctcagcaaaaccaggaggggcagtaagaaggtggcttcctggaaaaaacagtcctccaagaaatgatgctgcccctatggctatccagggctccaagcctggacacagctcctctcacagccaccacagccctgcctccaa

SEQ ID NO: 8756 - DNA, 696 bp, Canis familiaris
  misc_feature (1)..(696): n = a or c or g or t
ctccgctacctgctcacgnnnaccacctgaccgggaccatcgtnncgtgggatcccgctgccgaactcccgtcattancagcgtgtgcctttctgcagaacttcttgtgatncntagttgcgtttgaactaaaatggttgaattttacagtatttctaagaatggaattgtgggtttgttttttcatattgattttaacagaaaaattttgatttatagatattaggaattcccaactacagaacacatgtttgtttgtactgtcagattttagctgtatttgtagcaatcatcaggtttgctagaaatataacttttaatatagtagattgtaaataaaacaagccgttccctatgatattcagcgttttacaaccgcagtattcgcctaaagtagaaataatctgatacttactgtaaatactgctctagtgtctccatggaccaaatttatatttataattgtagatttttatattttactactgagtcagttttctagttacgtgtaattgtttcttttaatgatgtaattcattatctggtcttactttacaagccctctgacgttctttcgtggtatcttataaattaactctgttttagcatgtaactttaacttttatgggaaatagaaatacatttgtttcaaaagatgtttttatgagaataacaccttacccagcattgtttcaa

SEQ ID NO: 8757 - DNA, 632 bp, Canis familiaris
  misc_feature (1)..(632): n = a or c or g or t
cagcagattggtnngacggagnannagnccttgaagctttgannagaaggccggggtttcagannncnggactctaacagatgaattccatgtgaatctttgggtttcagtgtcccctacagtgagggtgctgagtcaggtagtgtgagattctcaccacctctgacacatttgatgcgatacggtccccaaatcaggcttggtggggtggggtggggggagagaatacggacgcaagaggcagcattcagatggaagcctcccaaggctgggggccgagcaccacccactttctcttccccagccctatttctgggctcccagcggggcgaggggtggtggaggcggtgcccatgctgggctgagcctgcatttttcgtgagctctgggctcgtctccatgggaacagggggtgccttcctagtgagttcattctgcccagaacttgggggcatgcgtgggggagtcgtaagtaagctcagcttcttcatgccaggcccctcccaggacggagtgaagcccctaccccgacccctgatccctgatcccttctacccctgagggctagctagcaaccgaagagcccaccctccatcctgcagctcctgcggccaggctggccgagctcttcc

SEQ ID NO: 8758 - DNA, 486 bp, Canis familiaris
  misc_feature (1)..(486): n = a or c or g or t
tacctgtgctacagnntgctgacactggctggggtggtagtcagctgccaggatattactccagaccaatggggagatctgcagctgctctgcctgcagttggaccgccatgtcagcacccatatccgggagagtccccaagccatgcactggaccagactcaaggacctggctgcccagacctatatccgctggcaggagctgctggctcactgccagccccaggcccagtacttcaacccctggaaagacaacagtctccggctgttggctgaggcaggaagtgaacagggctcaaggaataggaggaagcaaagaacagaggccagaggaggaccagtgtgatgaagcaagagcctgcctccacgctgcccctgaccccgacaggacaatgaacatgatgcctccctgcctggcctacccctcagccctccttcccatcccggcttcctcctctgcccccaggcctttatgtccacactccag

SEQ ID NO: 8759 - DNA, 496 bp, Canis familiaris
  misc_feature (1)..(496): n = a or c or g or t
ccctngccattnnnnnnncttcgtgtagtgtgaccatttagtggnnggtggcaaacggtttctgtacaggtgtatatagctctatattctatatcgccatgcatatgtatacatctattttgggggctgggagacagatgggagctccctcctgtcctgtgcacaatacagaagggcctggagaccaccgctcctggggttggagcagcttacctcagccccgtcacgcgtgtttgacatgtagacaccctgccaccgcctgtgcccccacctgcgtcctgctccatactagtgccacgagggcagaggtgcttcctggccacccaccccacccacattccgtcccgctgcctcactgcggccaccgtggccctgggacaggaggggtgtcagcccctaagctacggccgcctcttgcccaggggctcagcctccctctggcctgtcactatcttaacagggactagggatggagtcactaaaccagtgctgggac

SEQ ID NO: 8760 - DNA, 493 bp, Canis familiaris
  misc_feature (1)..(493): n = a or c or g or t
atccnagtgagggannnatgaatgtgctaaagnaaattnnnnnagatnnnnatgatgatannnancgaaccattaatanngcctgggtnnaatcaagagagaagcnnnccaaagnngacacagaattttaagactttaaaagtcattttgggaactgtgatgtggaaatattgatgtttccaatgannnaatgttggtgnnctgcacagataaatctgacagataactacttacatagcnnnnnnnnaagtaaannnnnnnnaactctcccatttcctnnngnnggatttatttaaataaaatatgcttattaaaacacttcctccaaagatggtttnnntagtaatctgggcatttgttcaaaaaaggataatattgtattcttgtgtgaaatgtaaaaaaaagcnagtcttgcctaatgataatgccacattgtgtgtatttttgttctgctaagaggtnnaaaagttattgtttgcctataagttcttga

SEQ ID NO: 8761 - DNA, 561 bp, Canis familiaris
  misc_feature (1)..(561): n = a or c or g or t
agaggcggggctctttcttgccaagttttcccatcagtgtctcntagctggttcctcctgttaagtggccaccccctactaacagagacattttgttcaagcttgcaggagaaggactgtggacagactgccaggatagttttccctccagcccatgggtcagcctcacaccaggaagtcttaggccacagtgaaatttggggtttggtttggttttgttgcttttctccttctccatctgtgtcatatatttttaaacagaagtttatttttaaaataaaagttctttataagacaataccttcattacactcctgcaatatacattattttattgtatagttctagttatctgtattttatgtaataaaattgacagggtggctgctgcagaatgctgggtgtcacaggggcacatacagctgttccctggaatttgtccttgtaattccaactgtggcccttttatatgtgccttcactttagctgtttgccttaatctctacagtcttgctctccagggtggtgaataaaatgcaacacttggcattttttatgtta

SEQ ID NO: 8762 - DNA, 538 bp, Canis familiaris
aaaaaaggagatgtgttgtgttcaaggcattttaagaagacagattttgatagaagtactccaaatattaaactgaaacctggagtcataccttctatctttgaccccccatctcacttgcaggtttgtttgagacactgcttaccatcattactccttttttatggtactactgaagaactaacatttttactgtttacttatttctttgaaatccattttttgagtttttatatttgtaagctactgcttcagcttttgtaatatgtagtaggagtaccagtagccactcagaaatattttacgttgctaagattgatgaaggagactgactttaggagttcatataactcaggatttgtatctaaacaatggaggaaaataagagggttgaactgaagttccaagttgccagtcctcctcacactgaaacaaaagtcaagagcagaaccactaacagaaccaaagtatagttttagagccaaagcctaagtagaactgaaaggaagaaaagccaaagagatgcgaacaggaggat

SEQ ID NO: 8763 - DNA, 545 bp, Canis familiaris
cacagtgttggtttattagtgactgatttctgagttttgtgattattgaactctaaaaccccaagattaaaattattttatctcttgctcttcaagaggaaaaaaaaaaaacaaggaaatgatttttcactttctccaggtctttgaactgcagtggaaaatatgacagctacagcccagacctgagcacctgtgactgtgtgtctctgcgcatttctgactgcagcagttgacttttggggtcacatatggtcaaaccaaaacattgtaaggaaaaggcggtcctttgcagcacctttagtttccaaagtcaaaacagctggaggctctttaattgaggttataatgctaactatagctgaaaaatatgtttttagggaaagactaagcagcatttctgacattgtgtcttgtcctagcatctgctttgtcttgatttcggagaggctagggagtaaggaggttattacaatactctggccattatgtacatcagagaggaaagttgtgtgaagaaggagctaaaggaaaccgcttgactgaat

SEQ ID NO: 8764 - DNA, 509 bp, Canis familiaris
  misc_feature (1)..(509): n = a or c or g or t
tcccttccctcgccctttaantantgcttgtnnnaaaataatgaacactacagatagagggtatgagatattgctgtcctcaatcattncnnnattataaactgactaaactgacatcagggagaaatcggtgtttatgcaaaaaaacattctgttttagtcctcgtgagtccctctaacatcacaattaatcatgtggctgtgaaattcacagtaatatggttcctgacgaacaagcttacccagcctgctttgctttgctgcatgaatgagactgatggttcaccttccgaagtaacgattaacggttctgtggtcacatgtgcatagagatagctgcggtgtaacacgctacactannnngtgctcaaaacaaaaaaacaaaacaaaacaaaaaatctgtgtnactgtaaagcattgaatgaaactattttacctgaactagattttatctgaaagtaggtaggattttnnnatgctgtaacnngttgtatnnnntggtatttgag

SEQ ID NO: 8765 - DNA, 501 bp, Canis familiaris
  misc_feature (1)..(501): n = a or c or g or t
gctgtgcacgctgagctgtctcctgtcactgacttccgnnagtcgtgctgccggcagtatgagatggggtatgggtgatgagtaccagggtggaatcggcacctnnagccccagactcctgtgtgttggggtgctctcaccggcagcagcctcccccatccatctaccctctacccagggaatgtacccgcggtggtttctgcaacttcatgcacctgcggcccatctcccggaacctccgacgtcagctgtatgggcggggacccagacgcaggtcacccccgaggtctcataccggccaccgtccccgagaaagaaaccgacgacgttccccagaccaccggcatggtcgcttctgagaccctggctcccttgacccactcctgacaggcatcagtgttcctggccaggacccctcctgaaagctcccttacctcgccagcgccgtcttccccagactccggggctccaagatgtaatctgttcaacacagggatcntc

SEQ ID NO: 8766 - DNA, 597 bp, Canis familiaris
  misc_feature (1)..(597): n = a or c or g or t
gagaaagaaaggtgttttccntaatcccaagctggtgttttccttcatttttaaattttattttatttatttgagagagagagagagagagcacaagcgagtggcggggggcaggtgggggagcgcagagggagggagagcagcaggctctctccctgcggagctgggagcccaaagcagggccctggactctgaggtcatgacccgagccaaggtagatgcttgaccaactgagccaccaggcggccctgtttttcttcatttatgggctacagtgtcctctgtctcctcagtagaaaggaagagagggtgaatggcttactgtcttctctgggactcccgaagagagaggttcatgatgtagccctgccacgggggctgaacatgggggcacctcggcttcctcccctgtccggagggggcttcacacaggccccttcccttcgagaaacatcgctgtaccatctgggtgcaatggatctctgcacggcagcctgtctgtgtctttggttttggtggaagtcagtcggtttgtaaagatttcttcctgggagactgtggaaaccatccctttaactaaaaaccaagccagacatc

SEQ ID NO: 8767 - DNA, 638 bp, Canis familiaris
  misc_feature (1)..(638): n = a or c or g or t
attctgttccattgagctctgtgtttgtccctctgtcgatattgcattgtcttgattactgtagctatgtaatatcaaggcnacaatatctgtcaaataggctgatttttccactttattcttttttgtaaaataaaattttattttagtccttctagggcctgtgtctttccatgtaaattttagagtaagcttatctatatatacaagaaactttgttggaattttgctagatactataataaacctaagtattagtttgaggaagattgatatctttactatgtggatttttttgatcagtgaacacagtgtgtgtctatttaagtctttgatttcttttgtcaactttttataattttcagtgtacagatcctctatgtggtttgttaaatatatacatttcattttcactggaatatttataggtggtattatttttaattttggtttctgcatgttcattattatatagtaatgccactgattttgtattttgattttgtattctgtgaccctactaactcacttattatttctaaagagtttttttgtagcttccttgagatttttatacctagataatcacattatctgcagtgccttttaatatgttctttttcatgctgtaactgcaa

SEQ ID NO: 8768 - DNA, 577 bp, Canis familiaris
  misc_feature (1)..(577): n = a or c or g or t
atagntggtgnntcacagggtccctaggtgnctcctatctngnnggtcatcaccctgtcacttcatgctgatcagaatgccatctctttcatctcctgttttctcaccatccctttctttttgttaccaaacactgtgctccttctcctcccctcccccttgctccaggctaatttttctggaatgaattgagaaggcagagcaccggcctgagctggtgttttgcattttggtccaacttttctgctcctgcctgccctgtcctttggcctgtttttttatagtgtcttccctgtcttttcctcttggtttcgccttctcttgtgctctttcccctggagcatatctgcctcctcaaggtgttgccttttcattgatcggcaccgaagagttacggttgcctatttgcaagctgagctccgcagagtgagcactcagacagtatttaatgagtttctgggggtaaaggtggctgaagagctgccctttgacccaggttcccagagaagcagcccatctcccccgcctcccaaccagctcatattcctaagtgctgagaagccctcacgggaacact

SEQ ID NO: 8769 - DNA, 467 bp, Canis familiaris
  misc_feature (1)..(467): n = a or c or g or t
cttgaaggtagntagatcaagtaggatttcaaaatgtcaaatgtcnnctannnnnggtttgctgacnncannatgcnncntgtattaaataagtgaatcattttaattccaaatttaaaatcactngaagcacaagtgtttggttatgtaaatgaacgagcagtcttacctccgtttaacaaggtcaaggaatgatattcttaatggactgtttttnnnngnntaannaaatnnagcagaagatagcatctgaaagtgacgtntactaaatactttattcttgataaacagactgagaaatctcannngttgtatacagctttatttttgaagtcacagtatttaacacactttaatctcagganngagtttcattactttagtgtaatacctgtggtggtgatctactggatggtgagtggatggggcatagggctggggttcaaaggcatagaaacactcnngtc

SEQ ID NO: 8770 - DNA, 545 bp, Canis familiaris
  misc_feature (1)..(545): n = a or c or g or t
tcccctctgtggctgccatggtnnagcactactcacagcaccccctgcctcttgtggacagacacagcggcagcnngcagctcacctgcctgctcttccccaccacgccctgatgccccagcagattatacacacccacctctgcgcccatagtctgcgctttgccctcgccaccttgggctgtctccccctcactgctcccaggtctccacccctccaagccttccccttcccttgccccagtccctgcaggcctggatgagaggctttggtaacggttacccagaagcagaacccctgagccccccaccccatattcactgcccctccctgctgtatctccaaggctaggaagctggggtcaggcaaggcccccactcccaggccccactcatggctgtgttgccccgtttactagggcctcccaagctgctctggataagggcctcctccaggaagctgagcctcaggaggccagccaggggtactgcttggacacaaagtnannccctttcacattctnnnnnnggcttagcacagggctg

SEQ ID NO: 8771 - DNA, 536 bp, Canis familiaris
  misc_feature (1)..(536): n = a or c or g or t
gatctctgtttttatctttctaataccaaacacacatgtaaaatgtcaaccagnnntgcatggcttactataaagacaccagcccttaccctcatttcccccactccgcaggagatcacttaaaactcctgtagctgattttttggaaattttctcccaaatatgtcaataacctgtgtgtaatattatttgatattttggttttatgaattgttgagttcccactatggaagacaaaaatttggttctttctcttttcttccactaccctaccacccagtcactatcctaccacccaggcacttcccatccctacatcccccagggtaattatatcattgttttggtccataccatttacattattgattctgatcactttagaccaatatttctcagaggctgttccatggattacatttccaaagagttagtcggggtatgtctgtgatccaattcgtttgtttgaggaacaacccaattaaagttaaaaatgtaattcctgggcagcctgggtggctcagccgtttagtgcc

SEQ ID NO: 8772 - DNA, 395 bp, Canis familiaris
  misc_feature (1)..(395): n = a or c or g or t
cangtcatggccccaggatcctgggatcgggccccatctctatctctgtttccctcttaaataaaacctaaaggnnnaaaaaagccctttnnaattttttttcttttccttttttttgccaatggactgagggttaaatggtatttcgtgatggttttcattttcactctcctgattactgggaaagtgggacaagtttcattatgcgtattgtaccctcaagtttccttttctattaaatgcctgtttgtgttcttggggcacctgagtagctcagtcagttaagcatctgactcttgattttggttcaggtcatgatctcagggtcctgggatggaggctctggctcagcagggagtctgtttgaggatcctctccctctgtctccccccaac

SEQ ID NO: 8773 - DNA, 688 bp, Canis familiaris
  misc_feature (1)..(688): n = a or c or g or t
ctnnatactaccccttcccctgannagagggacatttcctcttccannnagcagtcagannaacctctcaccactgtcttggagaatnnagcagccatggtcacctccacttccttcaatggaggggtgtctcctcacacctggggagattcctgtcccccctgcaagaagtctcggaaggagaaggaaactggagcagagccattaggaaacagctatgtggaaaggcaaaggtcagtgcatgaaaagaatggaaggaagatacctactctgcccagcccaccttctcccttgacttccatggccccagttgcggattcctcaacgagggtggattctcctagccatggcctggtgaccagctccctctgtagcgcatctcaagcccggttgtcccaaacccctcattcacagccctccagacctggtacctacaagatgagtgtggccacacagtgcgatccagaggagatcatcgtgctctcagactctgattagctgcctctcctcccactcccagcctccaaagtgttttgggatagtatttggaggatggtgggaagctgatgactgaggaagggattgactgagctaatcccctttttggtggtgtttctttaaaaaacaaaaacaaaaaaccaacaaaaacttaagttttacacagaaacattaatanacaatannnnnn

SEQ ID NO: 8774 - DNA, 420 bp, Canis familiaris
  misc_feature (1)..(420): n = a or c or g or t
tcccctcccagagcgggtctcccgtgagtgtgctagagccggtcatctccttcagcatccccaagccctcncttntacacacacacaccacacaccccaaacaaagcgggactccctgaatgaagccagactgaacgtctggggaaggtgccctgccccccaccatggtgcaggctggcaggaaacccgcaaatccgtgcccgtgtacctccagccctacatttctgtcacttctcacatgcatcacccctggccccgagacgtccccccgctcccctgctcactgccctccgcctagagctttcatctttttaaatctcccttccgcaggacaaaaatctgcttttctgccatctggcacaagggctcacctaactcgggagggagggagctattgttacctttnnnnnnngttgccat

SEQ ID NO: 8775 - DNA, 536 bp, Canis familiaris
agtccatttcctgttgccaagccatgcataaaacaccagactttcttcacttggcatgctgtatcctgtgtcacccacagcaccaaatttaagggagtcctgactttaatctctattgagaagtaaactctcctccatgtttttagaagttattttatacctcacctatagtactcatttttatatgtgttgttgtaaacttcctaaggacagggattgtgtcttggtgatttttgtatctccacctcaaccccagcagctagcccagtgtcttgaataaattaggtgcttactttatgttgaactaaattgaataaaagagtactactagcataagcatttctcatgccttggttgtataagctgattgttttgttgactttgcaaatatttatgattatcatcccacacacactaaattattttttaaagtttggctttctttcttttagatactaccccctggacatttagctctagaaaatgtgattgcttccaatgaaatgactatcccaaatgctctgtccctggatata

SEQ ID NO: 8776 - DNA, 601 bp, Canis familiaris
  misc_feature (1)..(601): n = a or c or g or t
ctgcccctgctgcttcaaggaccccatctccagcccccgagatcctggacttggaggggcctggatggcagacccaattgccnntcacagagaannnagccggtgcccgtgtgcgggaaactgccgtggcccagccctggatgccacccaagttgtatatttttttaatctcttgactgaatggactttgcacacattggcctagggtggccatgcctctgtcctggcttcagtatttggggggagacacactcgggggatgagccatgtgaatcctcctgagtccccatgagtgagacaacagagccacccgagccttcaccctggcactggcgaataaggcctctaagggcacacgggctcaacctagctcccgcccactgcctcgggagggggttttcactttttttttaatttatcctcttgattttttttcttttgctttgtgggtttggctggtttttcttgcatggtttggagccgatcacttttctcccactccctagggaccagcaggtggagatccctgtgtctctgctcagtctggggtctagggggatgggcccaaggtctctgctcagagaggtgctaggggagctgt

SEQ ID NO: 8777 - DNA, 537 bp, Canis familiaris
  misc_feature (1)..(537): n = a or c or g or t
ggaatattttgtttttttcttccctttctatgannnnatgctatcttgtanaccgagccaangactttagatgttttccttgctgtcangtgacaaaggggataatctaggggccaactcacatgtttggagcctgtcccattttcacacatgtactgtagtccaatttctttaaggagcacatattaacattgtgcaggtactgttactcctcatgccattgcccatgactgctgggtgggagacagtaaagggaggagctgactggatatataggcatataggcctttatgtaaaaccgaagactgccagcaacccaggctcactctctacctaacgtctcacaacttggagtcctctctggggggcttggctggcctaaagggatgcctgttttgtcttgttggtgacttcctttattctgatgccccttgttttctgtcttctagaaatttgtcagaattggaaaaatacttgggtgttcctttttgctctctatattgtttggacttttattttacaaatgtttgctgtcat

SEQ ID NO: 8778 - DNA, 613 bp, Canis familiaris
  misc_feature (1)..(613): n = a or c or g or t
agatcanggtcatgttcctcgnnactgcttcccactgnnnnaggaaattgatcanctcttccgatgggacactgacgattacgtgctgcccttttctacaggacagaaaccacttagtttttaataagtggctcagtattataattgcagcgatgtctggcaaattgaagttgcaagcctttgtctcgccctttcagacaggacctatttcagactgttgatgacattgacatttcatggattaggatgatgcaagggaccggtgcacgtaagtgcacacacagcacttatgttggcttctgaagccagccagccatcttagcaggggagaataaccttctcaaccaagactgcaatcagggaagcctacgcccactccttcccatggaatctaagcagcatctatcctctgatgggggatctcaggctgactcactggacactttgtattcagaggtggcttccaagcaaggcagctccatctcatgacatggaaacaataaattctctgagatacattcatctaatctgtggtaataataggaatctctgtctacccagatgatagattgttatttttggactccagccaagaaaaagctaactctgggga

SEQ ID NO: 8779 - DNA, 302 bp, Canis familiaris
ctccccacctcccccacctccgctgcagcttgcctggacagactgggtgttcgcctggttacaccgtgctctctgccagggcctggctcacgctgtatagccagatagttacacgtggagaaacgcccccttggacgaactaccaaagtacaattgtgtgtctcccttgccagatgccacatagagaaacggaaccttagatttgtagtcaaaatctgtaaactggccggcttgccgaagcgtatgttggatgattcaggaagccccctgcaagctgatgcatggtggtttattttactttg

SEQ ID NO: 8780 - DNA, 508 bp, Canis familiaris
  misc_feature (1)..(508): n = a or c or g or t
gaaggntctgtctgtgaacgtggtgcccgctgactgtgcccccagganngtgcgggagctggggnntcagcccggccaggctgcgttgctgtccactggtggggatcagagaagccgtgtaggggacttggaccacttcccctgcggggctgaggtacatgctgaccagcaagaactggagagtgttgtcgctgttggcgaagccatggcttttgaaattaccaacgggtgccacgagctgctgtctcagggacaagaacagatgtttcttcagacttccgacgggttgatcttgtcccatccaggctccatagtgtctggggaggaggacatggtcctagtggcaggtgcggaggggcctgccctgcacccgggcccccaggaaggggctcctctagaaagcacagaggcagaggctgcacagtgaggtgccgtcagaccacggtcccggacgtgcgggtattttatccagagaaggtctatttgaagtaatgtatatttttctatg

SEQ ID NO: 8781 - DNA, 576 bp, Canis familiaris
  misc_feature (1)..(576): n = a or c or g or t
gaggctctgcatctgcnnnnnncatnnngagcctcccccatcccctcgcgctggcagagctagtccctttacctgatctacttgcacgggttccccccatgtcactcagtccatcagtgccccctgccaagtccaccatctgtaacctcacgaatccacctctgcctctcatcctcaccactataaccccggttcaagccatacctcctcctcatctggaccagacagagcctccggcctcctgcctgacctcgggcgcttgccctgaccagtcagtcgcaagcagcagcacccaagcaggccacctgaaacacaaatctagtcactcccctttgaaaagtaacaaaggaagacctcacgaagatggagtagggaggccagagaggggagctgcaccattccacgtcagctacagaccctgatggcacagaagcctcaaccccacgacggggaaagatgcgcatcacatcccctgcaggaaatccgccagccctgcactcagccggtgagcaccggtcatcaccctgcgcgcctgcctttctgtgatagacttctattccaaacaacccttcccac

SEQ ID NO: 8782 - DNA, 471 bp, Canis familiaris
tttgtgtgcaaagaacagccctgacggaacggccccccccccccgcgccatcccagcccctggcgtgcaacccagcagaaggtctgaatgaagagggagccctcaattggatgcaagcaaaaggggcagaattcgtttgacttctagagcgaaccttaggggagtttcttttgattcatagtagaattcatttcagattcctttccagtgtaccaactagctttagtagtgctgctacaacaaactttcgagtgaagaaaaagagtgttcttttcttcttttaaaaaagaaaaatgaattttttcttgcttatagttaattctagaaaggcaatactaaaggtatatattttttttaagatgctattttttactgcactgataaatatcatgacaactctggtctctataatcgatccactcttcagctctgggtagaaccagatgcgagattcacaccaaatttgtaaat

SEQ ID NO: 8783 - DNA, 437 bp, Canis familiaris
  misc_feature (1)..(437): n = a or c or g or t
attgaatatatgtccaacctggcatgggattttgcagtcaaagaagggtnncgggttttcaaagagatgcctgccacaaaaccaccaatgaggatataactgctgtgcctggggnnctcagcagggcctgtgaccagctcgagtgtggtaggacctcagtggtcaactcagccctcctgtctcttccctgctgattgaatatctccatggaaagcagcatgttgcgagtcagtaagacgacattaacacagcagaaccttagctcactgactggatacatctgttaccctcctagacaggtaaaaggagggctnncttgaatgatctctgggacgcctgcatggctcagtcagttaaacatctgccttcagctcannnnncgatcccagagtcctgggatcgagttccgcatcaggctccntgcttagggaggagcc

SEQ ID NO: 8784 - DNA, 523 bp, Canis familiaris
  misc_feature (1)..(523): n = a or c or g or t
gattaaagatttatccnnatagaggaagagagagagaaaaaaagtcatcgtaaaatgggatcagctagggccaagcaatcagtggttgctgtgggcagaggctgagacaaattctggaagaaatgcaaaaattccttcttcttttttctaataactatgattttaagaaacaagcacagacttacaacacatataaggacctatttcatatgccagaattggtaagcaactggtctgggaaaatgattcaaatgataactcaaccctccgaatggaaataatattaaacaaagtagaattttataggtcatagtgtatggtgtgcagttctcttaagaattattacctccaaataaataacctattccatctgtttggaagacaaaaggaattgtactttttagtaccttgggaccttatccagaggatttcactgaattagattttgagaaattcttatacttcttgagaagtaaggtaatgagtagaaatatggacaaggaggtggctaagataagcatat

SEQ ID NO: 8785 - DNA, 241 bp, Canis familiaris
  misc_feature (1)..(241): n = a or c or g or t
tctacctctgttgtnnnttttctttcnnnaaggcagcttgaaatgttggtcctaatcttcattattttttcctttttttctagacttgtgaatgtttctatcacttctcttttctaaatgagagaaagatttnnnnnnnnnnnnnatttgaaaagaaccagataattgtctctttttctaatgaggaatttaaaattttaatttctcatctttaaaaaataacctagactatgcaaacatt

SEQ ID NO: 8786 - DNA, 564 bp, Canis familiaris
  misc_feature (1)..(564): n = a or c or g or t
aaaaaaaaaaagttttttttttctcttccagctctcctgtgtgacttttaggcatgttatttcacctcatctaggtgtcaggttattcatctgtaatatgaggttggcttaactatgtccaaggttcttttgaaatctatagtatttgcactatagtgaggattttaataatcaaatgacttgtttttctcttttgttaattttgtccgtcattctgagatatgaagacggtttaaaggtgatatttgagacaggtaaatgcacaacagttgattaacttctgtcttaaggatattttgcttgatgactggaaccagttggttatattgcttcttgagcgagaaatattagacagcatgatgaagaatttattttattgtaacatagttgagttgtaaaaaaaaaaaattcttttctctcttgagaatacagcattttgtcttagtgattacatccttattactaggatgagctctttacctgacaccattaaaaatatccatatgtgcaaagtctccaaaagctttcagatgtgactgtgtagaagtcaacactttnnnnnnn

SEQ ID NO: 8787 - DNA, 621 bp, Canis familiaris
  misc_feature (1)..(621): n = a or c or g or t
tggtcnctgccctggatngctgcgtgcgccagggtaantggctnnacccacaggcccaganctcagagtctacccctgcnantagcctcagaagctgtgctgtccagtcccaacctgggacgttcttccctccaggaactcgtgcagaattcagtctccaagacattccccagcctcacgcagagccctgggccttctctctggacttgggactccagctggcagcaggttccggccacctccttgccctggggaccccagaaaacccttcctggctcagcctctacctccaagaccaaaagatggtgctatcctctgggtcggggctggagctggatctgcccttggtcttgggactccctcttcagctgaagctggctgtgtccagggtgatcttgacccagggttataagaaggagatccttgctctgcctgccttgcaccttggcttcctcctcaacctgtgggcccagccccaggggttcctattcctgggagctctgccaggagaggcttcttctgcctccttttgcttggatggcctttgggcacaaggccagaagctggacatggaccgggcccttagacgaagtcaggacatctggactcacagctgtcccc

SEQ ID NO: 8788 - DNA, 541 bp, Canis familiaris
  misc_feature (1)..(541): n = a or c or g or t
acatgaaaaccccatgggtgtgnnnnactgctatgcagattttgggggtcatgcgaccatctnnnagctcttcctccgtttccagcagaacttcctggggtttctccttccactccttgtcatgatcttcttctactcccgcattggctctgtgctggtcaggctgaggcccccaggtcagggccgggctctaaggatagtcgtagccctcgtggtggcgttctttgtgctgtggttcccatacaacctcaccttgtttctgcactcactgctggacctccaagtctttggggaatgcaaggttgcccgacacctggactatgcaatgcaggtgacagagagcattgccttccttcactgctgcttcacccccattctttatgctttctccagccgccacttccgccagtacctgaaggctttcctcgtcactgtgctcaggcggcaccagacaccttgccctgcacaggccccgctgtccagctgttctgagagtaccagtcttactgctcaagaagaaatgaccaacatgaataacctt

SEQ ID NO: 8789 - DNA, 388 bp, Canis familiaris
  misc_feature (1)..(388): n = a or c or g or t
ctgcnactgtnnctatgggtggtccccancctntnnnntacacagaggttatnnnggtagtgnngagagtggcnnagcatctnnnnaaaaagnnnnnnnnctactagnngtgagtcttattttatctnnnnnncttttattgtcaactgctgtatttatataccatagaaaaactttcggtctcaannagactaaggctcagtcttcaggttannaaactgcctccattttaatatcctgtgcaatattaagtnnnnctctcttnnnngtgaaaatgttactacatgcctngaactgagcacattnctgactatacagaaaaatgcagggaccttcccttttgtcagtatcagaaacatcagaaacattgccattaagcaaaggtaat

SEQ ID NO: 8790 - DNA, 619 bp, Canis familiaris
  misc_feature (1)..(619): n = a or c or g or t
atcaccatgccccttgtaacaaaagccagagtcaaacagcgtagtttgtaacctggttnnnnnctgcattgggggagaggtatgcnnnatgtggggagtgggccaaacgtggtcccacgtctctcttctacctcaaacagagatgaattatatggtaacttcacgctgttggcgatgggagcacccccctcctcctcgagagcaaactttccccaatttttcaggaaaagatacactgtggcagattagaatttggtctaaggggcaaggtatttgatgtcacccctggccaaagcctagcccccgattccatctgataccccgaaagcctcacacatgcagcctcttagagactcttacaggcagattaggaacaatctgatggacatgctctagggccacgtgaaggaggtcaaagataaagcctgctgaaaagcccatgtctccagaagctccaggccaaagagaggtactaagactttgtttccatggagcagagctgggagggacagctctgggacaaagaacacaaatactggacttgaaataaaattctgggttcaaagcccagctctcccatgcattgtgtgaccttgggcaaatcctgtcactgaagttt

SEQ ID NO: 8791 - DNA, 375 bp, Canis familiaris
  misc_feature (1)..(375): n = a or c or g or t
ctctgcacaggataagnncgcgtnnatgatgtagtnnnacggagcannagcannngatcttgcaggnnanntatgnnntgagggaaaaagagaaagnagtgtgggcttccagccccagcnnttcccctgctcttgccctgtccgctcttttgagagcccaggaaaaggttgggcctcnngtctcaagnnnacttccctctcctcccttctagaaattccctgcaagnnnaagtttccaggtgcccaggtgcacaggctacccagaccccangagagggatggggtgcaggaggggacnncgcacccctgtttcctgtgcactaggaactgcctnnncttgnnnanngcagattgccgcgaggnnnngcataccat

SEQ ID NO: 8792 - DNA, 685 bp, Canis familiaris
  misc_feature (1)..(685): n = a or c or g or t
attnntgaagagnacaaggagacagtacaagaaccagattctnnagcnntcatgctcgtccccaattgccagcttactgctgagtattttgagaaaacnnggtnnnnnctgaaagttgctcatcagcangtattcccnnnnnagnnagcagtccatcctgacaccctccagatggccctgcaagtagtgaatatccagaccatcgcaatgagcagggctggggctcacccgtggaaagcctacctcagtgctcaggatgacaccggctgcctgtttctaacagaactgctgttggagcccgagaactcagaaatgcagatctctgtgaaacagaatgagccgaggactgagacactgaacggttttatttctgtattagaaactgtgcttggaaccattggagacataaaatcctaacaggttcttgctgcctgtcctgagaggagtagctatcagagttctagtttttctgattagaattgcttgaagtccagatattatcaaatgcaaaagagaatggacaatctcagaatcaggattcttatgtttttgtccgaagacaattgacttcttcctctcatacctctaggtgaatgaccccatttttccaggtgttgttgaaaaggttaatgttggtaaggggatgggatggggtgaggataggatttggattcttttctaatcc

SEQ ID NO: 8793 - DNA, 593 bp, Canis familiaris
  misc_feature (1)..(593): n = a or c or g or t
gtgaaatgatcattcntgtgcatgtcataggtnnnctgatcccgctaggctcaaaattgagggcaagtaggtccatctgtgcaaactgtcacttccaaactattagcttccaaatcctgctcttttctgaaagtctgattttaaatattcggtgaagtgcatttcagtgtatttgtgaaattttcttgttctccccttcctgttagggctttgtgatcctctcgtgggaaggaccgtccgtaaatcaaaagcaattgggagttgcctcaggagattgacgaaatagaagagctgaagggaaggattccagttactcaaaagaaaatacttaatcgttggaaaaatacttcttcgatagccaaggaatgttgttattgtggatcatgtctagtgttctaggtcagagcaaatacagtacaaaattcagaacccgtttacgaccaaaatcatcacctgttaagggtgtcaacttgtgtcattttaagctaacgaacatttttaaatgaaattaagacttttgctttgggaatcacttcataaagatagagctacagacacaggtacacatagagacacagttctgtgtcgatcac

SEQ ID NO: 8794 - DNA, 340 bp, Canis familiaris
  misc_feature (1)..(340): n = a or c or g or t
tgcaggccaagggaccttcctggggtcagagtnnngaaggcatatgnnnaagggagnnnnnngaannnancccgccgannnctctccagcgnnnttgccacccttcaccagctgccctgcccannngcttccactgctgctccgaccccngngcccagccctactcccccctcccccgcagcctgaggaagcacaagtgtgtatgctgggccttggcaaggacagcccctgcctggggattccccggagccaggggcggctgagacccttcctagcactctgccctgcagcagactcccccggagnnnnngggtagagaccctnnnnnnctctattcttg

SEQ ID NO: 8795 - DNA, 647 bp, Canis familiaris
  misc_feature (1)..(647): n = a or c or g or t
gagagaattngtgatgatgaactgatcttgatcaaanncactaaggctcgtacgtctgcatcaannatcttacgtggggcaaatgatttcatgtgtgacgagatggagcgctctttacatgatgctcnnngcgtggtgaagagagttttggagtccaaatccgtggtcccaggtgggggtgctgtagaagcagccctttccatataccttgagaactatgcaaccagcatggggtctcgggaacagcttgctattgcggaatttgcaagatctctccttgttattcctaatacactggcagttaacgctgctcaagactccacagatctggtggcaaagttaagagctttccataatgaggctcaagttaacccagaacgcaaaaatctaaaatggattggtcttgatttgatcaatggtaaacctcgagacaacaagcaagcaggggtgtttgaaccaaccatagtgaaagtgaagagtttgaagtttgcaacagaagctgcaattaccattcttcgaattgatgatctcatcaaattacacccagagagcaaagatgacaaacatggaggttatgaagatgccgttcactcgggagcccttgatgactgatgtgctttcttttatttataacaatgttggatgca

SEQ ID NO: 8796 - DNA, 78 bp, Canis familiaris
  misc_feature (1)..(78): n = a or c or g or t
ggcacatctccccttccctttttcttcctcagcatgagggactanncaggctgcttgctctaccactggtaatatcta

SEQ ID NO: 8797 - DNA, 240 bp, Canis familiaris
  misc_feature (1)..(240): n = a or c or g or t
ttgctggagcagttnnagaagccctggcctgtcctagtnnncagctggaggaccccgttctgtaggggaactctgagaggccctgtgtaacccaggtcttagtgcctaagtgctaggtgctaatacgtggtggtggtttttttttttttttttaatgtatttttaaataaagacagttctgtaatgcccttcttcagaacgagccatttgctactgtagcattcttttttgtnngtgggg

SEQ ID NO: 8798 - DNA, 545 bp, Canis familiaris
  misc_feature (1)..(545): n = a or c or g or t
cacgagnnagagcngcaggcatcagcccctggggggttcaaggccacagagggataggtacaatctccacctccccagaaccaggggtctttcacaccatttacccagtgctgaagtatggctgccacctgtccccacataccaaatggagcagtggccatctttcccccccaaagccccacccccataacctatctcttgggagttagccctctcctccctctcatttcccattgttaagtttgagaggaaagagctaggttagggaggaaggtggttggcccagagaggtggggagcagccaggagccccaaacctctcatttttcctccatcctgctcaccacctcctttgggtactcacagccccctcttgggaacagccggggccaggactgggtcacctatgagctgaatcagcatctcctcctgagtcccagggcccctgcagttcccagtctcttctgtcctgcagcccttgcctcctgcccacaggttccactttatatccaccttttccttttcaatttttatttttattttttt

SEQ ID NO: 8799 - DNA, 579 bp, Canis familiaris
  misc_feature (1)..(579): n = a or c or g or t
ctgatggcacggnnnngnctcgagcaggnnctagtaagaatataccagatctttcagnntcagcggagacagctactagtacttcgacggatatgactccctctcctttaacatctttattaacaacagccactttagaaaagcttcctgtaccccagcaacaggaaatcagtgcatgtgtgattttcacctagagcccacaacaggaaaatgtatgaatccttctccttctggtcccatctcttccatctggctgcagagcaggactcagtttgggaagccagaaggaatgatagagttgtctggggaaggaaggtcacgtcaacaagtgtactgacttgagagctcctgtcacgttgctgccagattcctctccagctggagtgccatcagccccgttccagggcatctgttctcccgcagccccatctcaacagggtttcatttttatgtattttggtttgtgtaatggtaccttggaattatttcactgatatttttaaattgctaatgaggttctgtgaggattcaattagatgatatgcagagaggtcagagcacagagcccggcatataggg

SEQ ID NO: 8800 - DNA, 673 bp, Canis familiaris
  misc_feature (1)..(673): n = a or c or g or t
ccgtactccgccaagttcgannngagcgnntcnacgnnnnagacctgggcccggttcacccaggaaaacctgtgnngcgcagagcgcgagcgccgggcctccgccaacctgcgggtgctcatcgactgcatcctgcgggacgtggccgaggacctgcggctgcagtgcgacgccgtgaacctggccttcgggcgccgctgtgaggagctggaggacacgcgccacaagctgcagaaccacctgcacaagacgctgcgggagatcaccgagcaggagcacaacgttgcggcgctgaggcaggccatcaaagacaaggaggcgcccctgaaggtggctcagacccgtctgtaccagcgctcacacaggcccaacgtggagctgtgccgggacgctgcccagttcaggctgatgagcgaggtggaggagctgaacatgtccctcacggccctgaaggagaagcttctagaagcagagcagtcgctgcgcaacctggaggacacgcgcatggatctggagaaggacctggccgtcaaggccaacagcctcttcatcgaccgccagaagtgcatgacccaccgcacccactaccccaccatcctccagctggccggctaccagtgaccggggctggcgccacggagggtgcctctgtggcctggccggacatgcggcg

SEQ ID NO: 8801 - DNA, 633 bp, Canis familiaris
  misc_feature (1)..(633): n = a or c or g or t
gcgggcctgtacaatgactcnnagcccccccnnaagaccatgcgcaggggggtgctgatgacgctgctgcagcagtcggccatgaccctgcccttgtggatcgggaaacctggtgacaagcccccacccctctgtggggccattccagcctctggggactacgtggccaaacctggagacaaggtggctgcccgggtcaaggccgtggatggggatgagcagtggatcctggctgaggtggtcagttacagccacgccaccaacaagtatgaggtagatgacattgatgaagaaggcaaagagagacataccctgagccggcggcgcatcatccctctgccccagtggaaagccaacccagagacagaccccgaagccttatttcagaaggagcagctcgtgctggccctgtatcctcagaccacctgcttctaccgtgccctgatccacacgcccccacaacggccccaggatgactattcagtcctgtttgaagacacctcctatgcagatggttactcccctcccctcaatgtggcccagaggtacgtggtggcttgtaaggagcccaagaaaaagtgaagtgggctggcagactcaagatctcctgccactcccccaggggaatgcaac

SEQ ID NO: 8802 - DNA, 585 bp, Canis familiaris
  misc_feature (1)..(576): n = a or c or g or t
agttccagaagagaaaagaaggtnnagagtgctacacattttcattcctccaaagttcaaggggcaaggancagaagtgtttcatatacatttctgcagtggccagtcttcctacacatctctcttcttaagctcaacacagactcagaagaaccagaagcttactatctgacaaacagaggaactaaaggaagcagaatcaagtgaaaaacatggaaagtgaagccatgacattcaaataaatacggcacacaaaccaggttactgctttctaccagggctagcaactctctgagtgtctaaagaaaaaaggaaaaaaaggtggaatgagatctgtaagctggaaaacaaggagcctgataaaaatatcatcagttactgtgaacatacaatccaggaaactaccatctatctacttaacaccatgacatcaattcagattcacaatgggtaccttggaaatagggatctaatctctagatctcaatgtagattttagtgcctcaagtctgacgagcatcctttcagatactgaggagaaagattccaaacatggagatgataatgttcactgaacgccaaaaa

SEQ ID NO: 8803 - DNA, 481 bp, Canis familiaris
atctttgtgtttctactgtcaacaaaagctggtggactgggaataaacctaacttcagcaaatgttgttatacttcatgatattgactgtaacccttacaatgacaaacaagcagaagatagatgccacagagtaggccagactaaagaagtactagttataaaactgataagccaagggacaattgaagaatccatgctaaaaattaaccaacagaaattgaaactagaacaagatatgaccacagtagatgaaggtgacgaagggactatgccagcagatatagccacgttactaaaaacgtcaatgggcctgtgaaattaagaattgtgaattcctaattgatgaggaaatatcaacttggtgcactcaaggacatttacattatgatgaccatggggtttacgaacatttataactttttataatttccatattacatttctcatagtatggacaacttttttgccactaactgaat

SEQ ID NO: 8804 - DNA, 302 bp, Canis familiaris
  misc_feature (1)..(302): n = a or c or g or t
cccgccattcttcctctaccgtccacaggggcggggttccaactgtgccgacccaagctgctgcgaggtcaggcgctaccgccgacgctgcccggggccaggccagtggggctccttctgggcttctgtgggcagcccctcctcggtcccgcggagtgaatgagcgcacaggacggcagcctgagcggggcgagatctcagggagacaccgcctgctgggaatagtgaatacacggaagggacggatggacagaagcaggtgnntnctgagctcctggnnnnngctgtgtctgaatcctact

SEQ ID NO: 8805 - DNA, 44 bp, Canis familiaris
  misc_feature (1)..(44): n = a or c or g or t
acaggagttgatcttttnngcnntttnnngttttaatgtctata

SEQ ID NO: 8806 - DNA, 445 bp, Canis familiaris
  misc_feature (1)..(445): n = a or c or g or t
tccacanntctgtactttccagatgnaggtcattcgnaccattttaaaatgatttttgcttttaaaggtacaatgtgaaaatctccctgactctatagtagtgattgcatttgaggcaagcagttccagaactgttcttttaggattcaaagcctaattccagcttgttcttatgctgacggatccaaagggacatgaaagattaagactgaggatgacctggaattgagcgtgacccttcgacatgcaatccggacaattttatctataaatctgtgtgacatgatatctgttcaaactatctgataaaaagttttttaggcaaattctattttcatacagagaaattaatttttttccactccatggctttttcagtgcctgatggcatgtttctatttcttccttttcttcctcgtgtttctannnntaaccatatgatgat

SEQ ID NO: 8807 - DNA, 515 bp, Canis familiaris
  misc_feature (1)..(515): n = a or c or g or t
tcattcaaaaaatatgatctgctttctttatgttcagtctttgaagatcacaagactgttagaangtctatgaaaaccctctggatgtcntgcagaaacacaactgtaaagctgcttccatttccaagacaaaatataccaagatgattagtgaccttttgcatgtttcccctccctccccaatcccttgtcattatgtaggagctgggacgtgccacatggatgatgtcaatttgtgcgctatatatctgaggtttggtaaggtggcatgggagggcattcaggggccggccctggccgcggggctgttgctgatagccatgaaagactggttcagcttgggctgtttgcacagccccatactgcctacgtgtagccatctttgccttttgctgcaatagagacgagcaaagggttcaacaaaggcccacggccagtttgcggaaccactggattttaagtgcagttgaagttgctgagcagaaaaccatgtgtggggactgcgattacaggaa

SEQ ID NO: 8808 - DNA, 515 bp, Canis familiaris
  misc_feature (1)..(515): n = a or c or g or t
atcaactctgcatcatctggtcgcttgaccctcacagtcttagagcacaaaatacccaatttcaccacccccagtctgagggctgggcccgaggtgtgtcggaggannagctcctgcctgcggttttgtgtacgtgtgtatgtgtgtgtgtgtttgtgtgtgtgtttacttccacagaggacactctacactcggtgtaacatatgctgggaacagggccactggggtggttggatctctcagtctctcttctttcccttttgatgtatcaaacatttgattgacaaagtaagggccttgatgaggaccaaatttccatgtctgttgctatggtctttatttaggacaacagttaatgcagtggcccattcttgtcactctatacatatgactatacaggacatatgtaatatataaatatatataaaaaacattaccctctgtctccttggctttagatgaggcctctctgttgagctgaaatgcacctgcagcttggtgctgccggcagcctg

SEQ ID NO: 8809 - DNA, 473 bp, Canis familiaris
  misc_feature (1)..(473): n = a or c or g or t
tctctttcagctgttggaatgggnngcagctaagattgttngagctaannnnncttagctcnnnnnatctggattcannnnnnnncactcnnnnggttcnncatanttattaacattagtangacgacacattaataaaaatggagcnnnnnnnnntgtataaggtgaagtaaagaggaannnaagnnncatgaatatatttnnnnnatggnnnattaattaaaaaagtattatttcnnngttttatttttaaagcgggcattctcnnnnnnnnncaggccnnnnnattttttatccctcccctgtttgtttggtttttttgccaaataaggtattataaagttatgtttaaatacaaccaatcaggccctaaatgcaaaaaactcatnnnggtgcttatcactggnataattattannnnnnctcttagnngcannnntttgtagntntnnagtaatnnnatttttcatagt

SEQ ID NO: 8810 - DNA, 449 bp, Canis familiaris
  misc_feature (1)..(449): n = a or c or g or t
tgttcatcgttnnaaagcaaaatgtgtcagggnnnggcatccaatagctacttacgnatggtaaacaaaatctagnntctgtctctctcccctgcaatttntagtcaaccttnnaatcccacgggctttttttcattgtgaaaaccgtnnctagcatttcaaagnngctctctggatgacctccttcccccgcccccatatcccttactagagaagcaaacttcacatggaattggggaaggatcaggtcagttctttagactgttttaacgcctagaaagggtttcaagctcttgaaggatatttggatagcaccaggcatcctttanncttggcagccctgctttcaaagagcagtgggcactctcnnngagggcaggggattcctcccaccctttgcctagggaaagcnnnnnngggtcaggccctcnnnnnattgtttagaacag

SEQ ID NO: 8811 - DNA, 477 bp, Canis familiaris
  misc_feature (1)..(477): n = a or c or g or t
agtctnnaccagctcttgacccagaaggtgagggtgcttggctacttggcagcatctgggcctggctcctgggggcagcccccagnntcaggnnnnnctgctcccttcggccttgaactcacaggctgtggacctctggcctgatggggccgtggcttttccctccctcacctcaggcccagccattctggggcagagacaagaatcagggacagggcaggggatatagccattgcagcacaggaccaggtgtccgtccatcggagccccccgcaggcccccacctgggcctcctgctccctccctatcctcatcgggtttcccttggtgcctggtagagaaagcccagagccagacggtggcgggactcctaggggcagcaccgatgcccgaccctcctttcgtccttcctctgccaccatcctgggcctggcctttcctgctggaagccgggtggctctgggaagcgcctcaggc

SEQ ID NO: 8812 - DNA, 645 bp, Canis familiaris
  misc_feature (1)..(645): n = a or c or g or t
atggncatgatgatnancgcntgtgatcnctcagccatcaccaagcnntgggaggtgcagagtaaggtagcnctactggttgctgccgaattctgggaacaaggtgacctggagcgcacagtgctgcagcagaatcccattcccatgatggacaggaacaaggcagatgaactccccaagcttcaagtcggcttcattgactttgtttgcacctttgtctacaaggaattctcccgtttccacgaggagatcactcccatgctggatgggatcaccaacaaccgcaaggagtggaaggcgctcgccgatgagtacgacaccaagatgaaggccctggaggaggagaagcagaagcagcagacagccaagcaaggggcggcaggagatcagccggggggcaaccccagcccggccgggggcgcacctgcatccaagtcctgctgcatccagtaacgctgcctggcatcagctgcaccgaatggtaccacccttcctggaaagagaccacccaagccagcagaaaaccaaaaccctgcttnnnagtaaaatagtaatcggatttgaaagctgggagagaatttagcttactttcatctagtggtttttgaacattttttcagttttgaatactttttactgagctaa

SEQ ID NO: 8813 - DNA, 538 bp, Canis familiaris
aataatcatttaccattttaggataattgaaattcagttgaaagttcagttaaacctctttacacttcattttaggtgaatggagactatttgtctaataatttaacttaacatcatatatcagaattttattatatttaaggaacaaaatcaaaaagttttttattcagtgaatttaatatctttccagagttctataatgatagttttttttaaacaaaaccttaaactgctggactataagggtaatttagcagaaataggatcataatgtagaaaaatagtcaagtatcaacttaacatattttagattccatatgggaatagacgtgtaggtctagatttgttactagaaataaagggatttgaggaaaaattatgagaccattcaacatttggtcttccagacacttagcacaaccccttatacttcacttatcactgaatatttgttgaattgatgtttggtaatcatgattttatagccccaaggtggaacatgctgtagtagtctctagctaacaggaaattagtctga

SEQ ID NO: 8814 - DNA, 513 bp, Canis familiaris
cctttccccaggccaaaagaataaggcagggatatctccatgtgacatgcctccagaagtggcctcactctgccaagctaacttcatcatggacaatgcctacttctgtgaggcagatgccaaaaagtgcatcactgtggcccctcacgtcgaggctgaatcacgtgtagagccaagctttaaccaggaagacatttacatcaccacagaaagccttaccactaccgctggccagtctgggacaactgagagggctgtgagttctgagatgcctgtcccagactatacctccattcacatcatccagtctccgcggggccttgtgctcaatgcgactgccttgcccttgcctgacaaagagtttctctcatcatgtggctacgtgagcacagaccaactgaacaaaatcatgccgtagcctttctttggtttcccacgagctgcatatttaatggtgaagcgtgggctagggcgtgagtgcttaaaccaaaataatgtttaaaccttttcggg

SEQ ID NO: 8815 - DNA, 497 bp, Canis familiaris
  misc_feature (1)..(488): n = a or c or g or t
agtgagcactcctggggccgggagaaatactacccggnnaaactgaggtgggacaagtgcaggtantaccacgacaggtacgcccagtacacagccagnnagacgcgtgagtggaagcccttccacagtgcccgtgactacaccaaggcaagccagtacggcagccggccctccaaggactactacaaggggaggaagggctacgagccggtcgccaagggcagggagcggcaccacttcagtccccgggccgccccccatgccctcctcccataccccgaaaagtacccccatgagaaaattgcacttgtagctgatgacgccacctgtaacctcgccgagcggtttcatgagcacgagaacggcaagtcccggaagcggagatatgacagcatggacgacagcgatggtcacattgagaagaaggcctggaggggcatacagaaggagcccttggaagagcccagagcgaaaaagcacaaaaaatcaaagaaaaa

SEQ ID NO: 8816 - DNA, 528 bp, Canis familiaris
  misc_feature (1)..(528): n = a or c or g or t
aatccgttagttatgcatgcacctgtatgaaagcagtgcaggaagttgaaaagaactaggtaactgtnnnngtgataaatgatgatcctagtagcacattttttttcattttcttatattaaaaaagtctgcatgattatgtttattttctttgtaattcacattttaaaaataatgatattagtatatgggtgccaagactgaacatgaagtaaaaaaaaaaaaaaagttaagtgtttgtagtattctagttttaagcatatgtgtgctggtacagccataagaatagnnatttacaaactctgtgcacatgagattttgtacagagaatctttttaattttatatattgtatatgaaaatgtaaatttaaaaaatgtacataaaaatactgtatttttttaccgtgtgcgtggtagtnnagtcattgcatgtaaatataatttattgtgtattctgtactataaatcatacattggtgacttacttttttaatgtaagtcaacatccattggatgttttctgaagt

SEQ ID NO: 8817 - DNA, 328 bp, Canis familiaris
  misc_feature (1)..(328): n = a or c or g or t
tgnnngaggcgggannacccagcagggcctggtgggctcgtcccacctgctgggtcatctggtggaatcagtggctcatcttctgatgttaatggcgttgacgaccnnnnnnaagcccacgnnatacttnnncaagactgcatctcatgccnnnnnggttgtggccaggcacaatgactttggttccaatggttaggaagagaaagaggtntnnnngaccctcaagcaacctggcccagggcagctgangcccccccagcccacccagaaccctggctccgcnnntagctggcanccaagactctgcccaccttttggcttttggtct

SEQ ID NO: 8818 - DNA, 517 bp, Canis familiaris
  misc_feature (1)..(517): n = a or c or g or t
acacggagatgggacccnaggcaatcatgaagtttccaccttccacatcagttggctgcatagtnnnnncagacacctctcagttaatgaggtttgaggctctgcaatttgaagaagtcactccaaaactctaagcctcagtgtcctcannngggttgtgggagaaataataagatgggtaccctccgcagaagctggtggccagaattcaaggacatcatgcacaagaggaggatagtgcagcctctggcaaataagagcctggtagctgttagcttattatttctatcaaatattactaattattataattacccgggcctttggtcttccacctaccatatactgtttccaaaatgaaaatcaatgagtgggaaatatcagaaagggagacagaacatgagagactcctaactctgggaaacgaacaaggagtggtagaaagggaggtgggcggggggtgggggtgactgggtgacgggcactgaggggggcactnnnnnnntgagcactgggt

SEQ ID NO: 8819 - DNA, 628 bp, Canis familiaris
  misc_feature (1)..(628): n = a or c or g or t
tgtgccccaggactgctactggcannagtggnctgcgaccaggnatgccgctcacagtctcacaatgcccacaatcggnctcctgcctctgagaattttctgccccagatgttggtaaacgacagtacaggttgtgtatttaacatgtaagttgttatttgactcacgatgacgtttgcaggaggtatagtctgagctggcggtggtgagacccagagctgggccaggagggtaggcatgggaaaatgagaggttgcagagaccctggcgcccagctagacacagaaggtggtgggtatgggaaatgccagattggttctgggaaatggggagcagccgaggggccaggaggggaggaagagccatgtcttgtgaggacgagtgcagtagggctgctgagtagcctggcctgcgaagcatcttccgggcaagctgggaggtgtcgccaagccctgcccactgcccgggcttgctcagccgctctggggctcaggtcagccagcaggccctgggtcaccctgagcacgctgccgtccttcctcagggaccaggatccccctcctcctcctctcgcccaagaatggattaagtgaaattgcactggcgcccagtccagggtccnnnaann

SEQ ID NO: 8820 - DNA, 629 bp, Canis familiaris
  misc_feature (1)..(629): n = a or c or g or t
tctgcctacccagcagcagatttgagccatctatcggaaccttgtgctgggtgatcgggtggggatataaaaatcctcnngtctcttcagtaaccccaaagagcccctacagtcttcaggaggtggctgtcaagatcataaacagtgaaatctgccgtcagcagtaccagttcctcttcttgaaggaccagaagcagttcattgggaatgacatgctgtgtgtcagcnnngaatggggcatggactcctgtcaggacaactctggcagctccctcgtgtgccaggtgaacaactcttggattcagataggggtggtgagctggagccttagctgcaaccggcaccgcctcccaagcatctataccagcacctcccagttcacccactggatcaagaggcagatcagcgacatgaggttcatcagtaggggtgatcctgccttcctgagcccggtcgcccgcactggttacattctgctggtgtccttgggctccctgtggctcctttgagtgatgtttctggggcaggtcctcccagaggccacttcttcctccctctggctccctcaggagatgtgcagacctagggagcatatgacatcaggacagagtgccctcgggggagggtcc

SEQ ID NO: 8821 - DNA, 557 bp, Canis familiaris
  misc_feature (1)..(557): n = a or c or g or t
ataggatttaaatatcaagattctttcagaaaccttttctactgaaagttnnnnatcagtaagcctaggaagnnnnnggtgcctggaannannaatctcacagttctgagaaccaggatggggaacagctctgcacggatgacagccttccctggcactgaactcaccttcccagccttccccactgcccagatagtctcaagttttcgtttttaggcaatatagtataagccatatgctctcattcatctttttgtaaagatctgatgtgctataattgctttaaaaggggaacaatgtaaaaatatctagcactttttaacttttgataattttgtaaaattaagttaaatgttttttaaaaggaggatgtcatttttatattttcaaaatcagttgttgaactatataagtaaccatgtatgaaagaaattttatcatgtatttaccatttaaaatgattttatttataaaagtatcaaaattttaatgtatttaatgtagaatgtggcttttagtaaggtatgttattannnnnntgtagaaaaaattttata

SEQ ID NO: 8822 - DNA, 387 bp, Canis familiaris
  misc_feature (1)..(387): n = a or c or g or t
tcccccccacccccaccagnnctgtgcgccctgccgccgcgcttgnnnagnnnngcttcanacatctctggtnnntagtttctgattattggggatggggggtgggaggggataggaatcnnnaatccatcgcgtctgcgtntctgttgtcctttctttaccacaacaccctagttnctggggaggcggggacgaatttacgggccgggctttctgtccttcccggagggaccccgactcttcggcccctgtcgctgaagcgggtgggaagggagggagagggggcgcagctcgcaggcgcagaaacttgaccttggggggacatttcacagccatccagtgctcggaatctgcagccccnnncatttccaagcaagagtgcttccc

SEQ ID NO: 8823 - DNA, 359 bp, Canis familiaris
  misc_feature (1)..(359): n = a or c or g or t
ggcccccccccaaaaaaaaaacccaaaacctactttgtcctcctcaagtcctcgggttgagcgtgtacatatttgcccttgggaaggttctcgctgtccaaagggggagaaaaggtggtacaaagtcacctagcaagtggcccttaaaaactaaagagggcatttggtgggcaaacctggtgggccctctgctgaggatggaaggagagagaaaaaggctgcccggggtggcagtgagatgtggggtacgtgactctcacacccctgggttctctttccttatcggtgaacggaagataagctgctggatatacacaagcannagtccagtggtgtggacaagctacctaacccctgcc

SEQ ID NO: 8824 - DNA, 551 bp, Canis familiaris
  misc_feature (1)..(551): n = a or c or g or t
ccaagtttcatttactgtggattggtgacaatattttnnnnnnncaaatgccctaaganntcagtttttatctcagagcctcatggattgccagcctaaaaatgcaggaaatcaaactgttgtcctgaccttcttaaagcttggaacagggagagttcaactcctggccctagttccctgcaccatgagatcaaaagattgtctccacattggaaagaaattggagggggaggggcgtattcatggaggcagtggctcagctaatcgagtttcctcgagttgtggggaaagtggggctggtttccctccttaatgatgcaccattatgtactggtccacctgttctcatgggtcagttctcagcagccactcagcatccctgcgctcttgccatcttccatccacgatgtgggaagggacccttgttaataagagcaagtgtcctaagcaacatcatccaaagattgtcctttccatcctcaaatcctgtgagtgggatcactcgtcagcactgtgatgtattattttcannnnggtgcctttcttaaccg

SEQ ID NO: 8825 - DNA, 650 bp, Canis familiaris
  misc_feature (1)..(650): n = a or c or g or t
actnnagtaaatnntgtattanngctgtccaccaagnnattgaaagagctggacacaccatttagactctatggactgacaatgaatccnttaatctataatatcacacgagtcgttatcctttctgctgtctcaggtgttataagtgatcttctaggatttaatataagactgtggaaaattaagtcctaagctgagccatgtgcctggaatctccccttgctggcatcaggatttacccattaaggaaggagatgactgcagaaaccatgagacacctacctgcttgttcacacatagaggtgctctccgctctgcctaatcttaggagtggtgttttcagaggaacaaatccttttccagctgggcatgcatgccaaaaactgtattttcatggttttcaaacaatatgaatagtcagaaaactaaagatcatgtattatggtaacataaggacaactttctcagttaggaaattgatttggggcatttcagcgctgtgacggttttatttactgcaagtagtttttttggggttactatggtagatccccaacgcatgaagaaaataccttcttttggaaatggcaaattcagtacttttctttaagtctatacaattagagatttctttcctctagcaaagagag

SEQ ID NO: 8826 - DNA, 659 bp, Canis familiaris
  misc_feature (1)..(659): n = a or c or g or t
ttngacttaatggggcataaataaaactttcagannacacatgnggtnnntnnntatgtgatcngcagaacattaggatgggggggttnnatgcagacccacacgttcaacattccccgtgttaacgaccactgctggtangagggcaatgcagcgccagtactgggcctgttcctaaactagtgtattaacccgagtcctactgctggatgtgtgctttttaaagtagccacagtgaagtgttctggtccttatacttcaagaaagctggtctttacttccggttgtctgtctgttctgttagagatggatgttaaaaacttggagcctgaaagaattcacaaccaaaattgagtcttgtctgtcttaattagattaattccaaaaatgattcagtccacaatagctcaaggggatgaagaatttgccttaataaattaccttgtttgttcactcaacccttagactgagttgtcagcccccgactgtcagcttctcaaggggcaagaaccacattttcttcaagtcctgtacatgttctaaggtgcttggcagcgctctgtaccctgtggagtactcagtaccttctgtcggatgttgctgacgagacctaaaaaaaataatcccttaaagtacctactattaaaatnnncaannnn

SEQ ID NO: 8827 - DNA, 610 bp, Canis familiaris
  misc_feature (1)..(610): n = a or c or g or t
gtgtactaaggggtaaagactgctagtactttgtttcagtgttaganntctttgtttntagntcctgctctaaaaataactattttcagaaaccaggtttgtgtagctgtgggatatagtggctaaaaccaagggnnctggagacatcactgtcttgaaatcccagtcatgtagctttgcagccatgtgacctatataacgaagccattttacttttaagtctcagttttcccttctgtccaatgagatggtatctacctcaggatgggtatgaaatgaaaagcatagcacaatgccctggtgcacaggggatgatagatagaacaacaaatatcagtaattataaggatagaagaatctctgcacaagtgtattttcaccatgatttacatgttatcaccacactccataaaatatgtttttcttaattatcccattcataaattgctgacaactggcaattagttattgttttattcacatctacatataggttaaattctccaactagaaattataaaattagatgattggttttaaaaataattttattcatatcacaaaaatatcaataaaagtataattctttggaaaatagtaccaacacatt

SEQ ID NO: 8828 - DNA, 445 bp, Canis familiaris
actaatgtgagggaagaagtgttccagccgattttcatgtgcaaggtggttagaaaagaaaaggaggaaccagactcgatgactgaagtcctgtatcgcagcttgttgaccagctcactgtctccagtggagagactctccagatcccagcagaggctcttccagtgtgggattcctcctcctacccacacttttccttatgagattctcattgatcactccaaatctttgtcaccggtccccatccccatagaggagaagactcagagtgccaacatattacacgtgctgggcatttccaggatcaggccacaaaattttatctttggagacaaaattgctaagtacttcttagttaatccagaagaaactcctcccttcatttctgattctttaataggaagatgttccttaaaaccaaagacctaaatcagagaaagttaaa

SEQ ID NO: 8829 - DNA, 611 bp, Canis familiaris
atgtgcattttgattgtaatctgtctgaagtaattatttacactcgttatcatagcagattcctccattgagaactaattcccttttttagtctgtgcgtttctgtgtattttctaaaaagctttacgcccttggtgccttggagcaaacatttcttttgaaccttaccattttcgtaaagaattgcctggattgattcacttgtgaaggggacagtgcttcctccgagtgcatgctgtgttcaccatggccacacgggcgagtcctgagccattggacgcgtatgtggcctgtctgtgaagtgctgcagggagcagcacctgcgtcttgcctttctgagaacatttgctacctgcagcttcaagccttaccctacattttgggcacgacctaaaatgtcatgtctttattcagctcatgctgttggattggtgggaatacctcccatgtacttggttcgcagggagaggcttcattcatatccagaatctgaatgattattgtctgactgtctcttttttttttttttttcatgagaaatcattgctgcagactgcctgtaaattgattctaataaaatgcaatcttttaatatgtgaaaatttgaatca

SEQ ID NO: 8830 - DNA, 591 bp, Canis familiaris
  misc_feature (1)..(591): n = a or c or g or t
cctgcnggcacgtgcatcacacacgtgatgccccccagcagggnncggctggggacccaggggcgtctgtggtaaacagtggcccgtgtnnnccnccactcgctggtgcagcagaagtgtgtatcttgcaatgagtaacgcagaagtctcgtggtggtcgcttcagggtgtgcccgggcgtctgcacgtctgcacacatgggtgtgcgcgtgtcctcacagcccgtgcagacctcagggccatggggaccgtttccccacgaaggacagccgcggtgtgctgaccgatgacagcgcttgtaaaacaaaaccccaatgatgagattctgaaaagcatttttccattttccttgggaatcacggttaccgtggaagagtgagctggcttaaccaccccgccgccagcggcctcgccggaaggagggcccctgcccgggacgaccccctgcagcgggcccggggcgggcggggcgcgggccggtctaaccggggcccacgcgaaaatccaatcatggagttaaccggggctccacagagcacgccctgaaggttcgtttatctctatttattttaccaaatgagaattgcggag

SEQ ID NO: 8831 - DNA, 491 bp, Canis familiaris
  misc_feature (1)..(491): n = a or c or g or t
tctttgacaactagaatgcttttaattctcacttttgtctnnanncatgagatttcttttaanagccccaatctcgcctaggaaatatgaaaagcagaagttgattttgctttgttgcttgactgtttagtatttgtagctcttttgactagagcatgactccagtgagatttgatcctaaggccagttagctttttgcaggtagcaaacaaaaaaaacaggttctaaaacttagattatcctagccaattgtctcccaaatgtgtgttatgggtcaccagcggggaatgggcaagagtgtgcacagaagggaggacagggggtatgcaggtagttctgagaaaatgagggtgaggtgcccatcaccactcaagaagaagaaacttcatatgttcttgtatcaaattcagtaatcttaatttgtctagaaaccagtggatgtctttgaaccatctttcagactgcatttggagtgctgaggcagcatatat

SEQ ID NO: 8832 - DNA, 598 bp, Canis familiaris
  misc_feature (1)..(598): n = a or c or g or t
agcagaaacccaagaagaaagtatagtaaagcaaagatatgactttctgatctttgcctatcgggaacctgattattcatatcagatggctgtacgttttaccacaaagtcttgtgaaggaagatataatgacctgctttttagagtgctgaagaaaatcttggataatttaatctctgatttgtcatgccatatcatagaaccatcatataaatgccattttgttaaaattccaaaacatggcctcctacatgagctatttattgcttttcaagtcaatccttttgcaccagggtggaaaggtgcatgcaaggattctgttgattgtgaagataccactaatcataatatcctccaggcaagagatcggatagaagaatttttccggagccaagcatacatttactaccacgactttaataaaactatacctgctatgcactttgtggaccacagttttcaagtagttcgtttggatagctgtcgtccaggctttggaaaaaatgatggtctacacagtaattgtgctagctgttgcgtggtttgtagtcctgggacttnnnnncctgatgttgatgnnncttgtcagaactgcgtt

SEQ ID NO: 8833 - DNA, 450 bp, Canis familiaris
  misc_feature (1)..(450): n = a or c or g or t
ttgtggctgtaagcaacctggtgctaaagcctggataagcccccactnnnncaccaaactcgcactttgcaatctctgcccctcggacgaggccctcaggggagcacagctcctggggtcccttgagggcagggggcatttctgctcctgcaaaatctaaactgttttgtttcagcagcaaaacaaacaccatcatcccattgccccatctagatgcagtctgcttccgcgttgctccctgcggctgtaagccagaggggattcaggggaagttcactttacagcaaatcccctgctcccctctgcccagtgctgacggaagcccctcctccataagcaagttcattctttcagtgccattggcatctacatagacaggtgtgagagtagatgtgtaggttactctacatgtatnnnnnctttcttcaaaancatgttaactttgtgaaa

SEQ ID NO: 8834 - DNA, 592 bp, Canis familiaris
  misc_feature (1)..(592): n = a or c or g or t
cgagtgcagggacagctgaggnccgtgctgcccccacagtcggaagacccgtccagctgcccgtggctctcaggacctggggggctggcctctggctcactgcaccccgtgggcatccgcagcgccggccaccagcacgggagccccggtgcccggggccgcagggacggagaggacgcagcggcggtggcaggagttctggacgtgcctggttgggccagacgctgaaggcagggctgcgggtgagcggggaccccgagggccgcctcgggggtctctctgctcgggaacctgtccacctggaccccgacggcacagcctcgcccggaagcctgaagccaccaaggatgccagacgcctcccggtcacgctgacgagcaggacggttgcaccaccacacacctgaaccgggcgggccaagtccgcggttcatctgagctcgcgggcaacgccagcgggagggggcgcgcagcgtgggcaggggtgtccggggagggggcaccgcccgacacctgcccctgcgcccggcagacggaggactccgtcgccgcgagccgtgggggaccgtccccgcgggctggctctcgctctt

SEQ ID NO: 8835 - DNA, 285 bp, Canis familiaris
  misc_feature (1)..(285): n = a or c or g or t
cccccccccaccaccgtgagtgagctggnnctagnctcagcaggtgcgtcctctctccttcccactgctgttccgcagagtcaagactgttgcttcnnnnnngagnnngacgctgctgcactggtcactccacntgcagagacgtccgccccacnnnnnnccnnnnaacccagggcttctgnnncgcgcagagccagttcaggaggtnnnagtcagttacaaacaggaggatgtgatcgttaantgtaaagcgctttgtaaaattcacatttacagaataataaa

SEQ ID NO: 8836 - DNA, 598 bp, Canis familiaris
  misc_feature (1)..(598): n = a or c or g or t
agctgccnaatagcttcgntgataatgttcacggggaccacggtgcaccctctcctgaccctcatcatcaccannnagttgtccgtcttctgcttcttcttcattacctacaccttcgccatcaacagatatatgcctttcatcctgtggccgatttcggaccttctcaatgatctgtttgccttcatttttcttgtgggggccgtgatcatagctgtgaaaagccgacaaaccatgcccatgcactacttcattgctgtgatccttattggtgtggctggactttttgctttaatcgatatatgtcttcaaagaaaacatttcaaaggcaagagaatcaaaaggaatgtgctgactcctcctcctccaggaaaggaccaaaaggctgaaaagccaaaggaaggagaaaaaccaccagaaaaggcagcagaaaaagcagaaaagcccaaggataaagaaaagggaggcaagaaatgatgggaaggagacccctgctgtcagaaccggcaatgtgttttaccacaaaacttaatgtccactntgtgtcnnntcttctctctagannngttttcttttccatcctaataaccacctttgc

SEQ ID NO: 8837 - DNA, 362 bp, Canis familiaris
  misc_feature (1)..(362): n = a or c or g or t
tcnngatcttcccgttccgacgctcagtaccccaagccgctgggcgtgggatcaagaggaggagcgcaggcggcaggagagatggcagagggagcaggaccgcctgctgcaggagaaatatcaacgtgagcaggagaaactcagggaagagtggcagagggctcagcaggaagctgaaagagagaactnnnnntacttgaacgaggtagtctaggaacatgctgtgttctattctgtcttggtgaaattagccgaaaaacagaagatatgatatctcacctggcttttgccgcatattcacttatataagctttttgaaaaatacagtgagctctgatttgtcggaattttgctctgatgtt

SEQ ID NO: 8838 - DNA, 698 bp, Canis familiaris
  misc_feature (1)..(698): n = a or c or g or t
aaatcatcanatcnctcagnatcccagcatcttcatgtatacnntgggaattttttnnnnnnnttnnnnnnnnnnnnnnntngaganacacnnnnagagagnnnnngagacacnnnnnnannnnnnnncangctccatgcagnnannccgatgtannactcgatccnnnnnnnccaggatcacaccccggnctgcagncagcgnnaanccactgcgncaccgnngctgcccacaatgggaatgtttttgagagaccaaatacattacaaataaagatggcagcaaaacccactgccagtctccaagctggcctcaatgacccttatttcctggtatatcctcatgcaccctttccaccttgtattagggttggcctgtcacaaatgacagtcattctgaggttaggttataaaagttctgtctttgtcatgctcactgtctcttctcgcctgtctcttcctatctgtctgtccctttctccctctctttaggggaagtcagccatgttgtgagcaacctttggagaggctcatgtggtgagatgcagaagccatcaaccagggccacaagagtgagcttggaagcaactcctctcccctcatcaagccctcagatgactacagccctggtcaacatctttgagttcaatcttatgaaggtatcttgaaccagaactgtctacctaagttgtttccaga

SEQ ID NO: 8839 - DNA, 628 bp, Canis familiaris
  misc_feature (1)..(628): n = a or c or g or t
acancagccttgtgattgggtgnagggcagggaactcccnngtgcnngcatcagccaagtcagaagagctcgtggcanctgaaatcaaagtgcagnnagccatgaggcgagcgtggaaaacaggncagtgcatgctgatnncaaggacactgcccttggaccagccccgtcagctcatcttgtcgaggtggctctgggtgcttgtgtcccgcagctgatttctttgactctggagaagagtgatggagaagagcgcctttatctccagtgacagtgacatcggccaccccgcctggtccgctgtctgttaaccacagtgcagataaccccaggacaggcctgcagttgagacgacgctgctgtcactgacactgtggccacgtgtttgccaagatggcaaagggcccccaacttccgtcttatcaaagtgtgtgaaatgccatatcttttgggtctgggcatgttttacttctcaggcctatggtgtcctaggcatttgctgacaaacaagaactgcttcacatctaaagcagacgggaggatttgtcgtctttcaggccaggatgcaaccgtgcgttggctcgggtnnnnncaggggagggtcaggaaggattgttcaaagttttac

SEQ ID NO: 8840 - DNA, 514 bp, Canis familiaris
acgtcggggaggagggcgtgcagcaggcgctggacttcgccgtgcgcgagtacaaccgggcgagcaacgacgcctaccacagccgcgccctgcgagtgctgcgcgcccgcaagcaggttgtgtctgggatgaactacttcttggaggtggagattggacgaacgagatgtaccaagtcccagcccaacttggacaactgtccctttcatgaccagccacacctgatgaggaaaacgctctgctctttccagatatatactgtcccctggctgggcaagacctccttggtgaagtccagctgccaggatgtatagaagacctgctctagccccctctcccactcccctattcccttgtagacctcctaagccctagaaggttggccctgctcaagtgacatcccctgtgtgctggtgatcccaggagacagagaaggattctgaggcttttttttgaacaactaaataactgtaactcttctcttttcattgctctccaaatgcataagtatgta

SEQ ID NO: 8841 - DNA, 565 bp, Canis familiaris
  misc_feature (1)..(565): n = a or c or g or t
cacgcatgaacacattcacacaaaacatcnngcatccagactagcttcattaagttgtataagtaaaaataagattatatgcactaaaaacatttccttaaggagtgtccgggttggcttcatggagcccacctgtcaccagcatcataccccccaccaatccacacaccacctgggagagtgagttcttctcttgcctagcttagtggatgagggggtcatccgtgcactgaactagaagaaagatgcttaaaccttggcagaggagaatacatgggattgagggagactcaactatcctgaatccaggtgccaatttctccatggcaggattagtaatactaagagcagctggtacagaggtcctggaaaattcactggcaccaagcaaacacacgagtatcatttctaattctctgtgnnnaaaactataaaccacaagttaagcactgaagaaagaacagcttagactatatgaaatgctcagattatgcagccaaagaaatatgtgaattccatcaagtatgtgaattgcctttgtgtgaagcctggctcatgattagag

SEQ ID NO: 8842 - DNA, 568 bp, Canis familiaris
  misc_feature (1)..(568): n = a or c or g or t
gacacacannacacagagcnnaccctgcaccaggtgcaggcgaagatggcaggtgcagagcaggcactgagttctgcaggtgagcgggctcaagaattggatggtctcctggaggctctgaaattgaaacgagcagggaatagcctggcagcctctagtgctgaagaaacagcaggcagtgcccagggtcgtgcccgggaggctgagcagctgctgcagggcccactaggcgaccagtaccagacagtgaaggccttggctgagcgcaaggcccagggtgtgctggctgcacaggtgcgggcagaacaacttcgggatgaagctcgtggcttgttgcaggctgcgcaggacaagctgcaacgactgcaagagctggaaggcacctatgaggagaacgagcgggcactggaaggcaaagcagcccaattggatgggctggaggccaggatgcgtagtgtgcttcaagccatcaacttgcaggtccagatctacaacacctgccagtgactcttgcaggattcctaccccagcccccagccccgccgcacccccgttactgcctctgcat

SEQ ID NO: 8843 - DNA, 566 bp, Canis familiaris
tatttcctacatccgcatgtctaccaccagagctacctgacacatagtgatcatcatgttgttattcattgctttgagtacacaaaccctgaagatggtgtcacttaccaagtcaagggagtaactgcaaaactagccctgttccttgccttaattattttggggagaaaacccatctttgaaatggagtttaatctcaatgacctaatttcatcctctgaagagaatttcctgaaacttcataaacatgctacaagcaagttgtgatttgtgagaccaccacccaaataactaagaggattttgtgggtgctgatccagaagaacaacaacaatgcaagctattggaatttgacaggtgcagctctttttcctgcaatatgaagaccaaaaaccttgactttttccctacttgccttgtattagctgaaagagcaaaaagtctttcaaaagtggaaaaatgtgttcaaagtgttgcatcatttcacccacaacatgtcagtatttgttctacacatgtaaggaaaggtatctggcacaaagtaggcacttaataaatatttgctg

SEQ ID NO: 8844 - DNA, 606 bp, Canis familiaris
  misc_feature (1)..(606): n = a or c or g or t
agcagcagcaggncgacttcctggttggcccctcgnntcaggnnttccccaaggtctgtcacctgaagtgacttatacaggtagnnngcactgaaaatcaagtgttctcagagcactttgtaactcactgggtaagagggacaatacctttggtttttaaataccgatcacatgaagctcttctgtcctgggtacaatgaggacttttctagaaatacaaagcacagcaggccaagaatttggtaaatctggatagacttattgccaaaaacacaacaaaaaaaaacctgaagttcaaaagcaatctaggagaaaaacgacccggtcgctgcattgaccaaatcacactttagcaccaccgctttgccccacgcacagcggcagaacttgaagggttactgacgtataaacgctggtgtttgatttcctgtgtgtgttgcctcagcattaagggcattttacccttgcagttttactaaaacactctgaaaaatattccaagcttcatattaaccttacctgtcaacgtaacgagttcatgaacattactgtattgtcaaactcctactgacaacattgctataggggagcttaactttataagga

SEQ ID NO: 8845 - DNA, 608 bp, Canis familiaris
  misc_feature (1)..(608): n = a or c or g or t
gagttgcccccgctcnnnnnnncgcgcnnnnngcgctgacgnntnnnncgggcgnntgctgccccccagnnnnggaatgcggaagcgcaggcgnngcgcaaaccgtccccgttagccgctgaccacctcgtgggtcatgaatgctgcagatatgaacccctttaatcctcacaacgaccccatgggcagggctttgctgaggacctcctctgtgccaggccctgcggtaggcaccgggcatccaacatggaacagaccagacaaaactccctgtcctcatgaggctgacactggtctgggagagacagacagtagagaaagaacataagtaacaacaaaaaggattccactacttccgtcaaggaaaatcctacgacgttgcgttcggaaatcagccaagggtgatgcagcattttggacattttggatgatcgcatcacccctgcaaccccagtcccgctaccaaagtcacatctgagggtctcaccacagcatccagctgctgacacgtgtagacaagcacggaacgtgggtagacacacgcgcatgcgcacgctctcagccctctcaaaataactacaacaaaagggtgttgttccattaacaag

SEQ ID NO: 8846 - DNA, 504 bp, Canis familiaris
  misc_feature (1)..(504): n = a or c or g or t
agggacagtcaggacaccctggctggcgncgacgctgnnnggtgaccgtgtggctcgacggacctgggagcagacgggggctgtgccggcctgtcttctgtcccattctgtcaccgccaagctccttgctcggcctgcctgctcagagaggggactcaggggatgaggctcaggcctggactgaccccactgtccaggaagtcccagaagtcagatgggcatcacgtgggggggctgggtctccaaagacccctggaatcctgtgcatggtaacccagggtgtgtggggggtagggttcgaccctgattctaggagtggggcacggaagccctgggtgaggtgagtggctggccttcaaggaccacccgtcggccccacgcctcggccagctcccctgcggcttgggatgctctcccccagccctggaaccgccacccccagagccccccctccctgcctgagggcacccctgcctctccctgctgctggaaggaagcagtgct

SEQ ID NO: 8847 - DNA, 587 bp, Canis familiaris
  misc_feature (1)..(587): n = a or c or g or t
ctngagagaattcnnnnnncccatgggagnnnnncaagatnnnnnncangtgctctcccaatgnnnagaatttccaantgctctggggacccatttccagactttccttgannnagaagaaagagcaggaaggccctccatgcggggccaggcactggctctcctgtccagcacctcntggccaagaggaggtgtgcacactggggagtgtgagttcacacctgtactccagcacatgctggttgtgagggtcaccctttcagctcactggcatcccacaggcacatctctatgcatcttttagccatgtatgtgtgcacacaggcgcacatacacctgaagacacttgaatttgcacttttatgtgcagatcacccccatttggagcttcggatattcccaaagaatatctgctggcctcctttaggagtcagacttcagagaagtcagtggggcctctgatcaaaaatccacatggctcaaggcatctgggtggatcaatggttgagcatctgccttgggttcagttcatgatcctggggtccttgatcaagtccctgcatcggagtctctgcagggagcctgct

SEQ ID NO: 8848 - DNA, 494 bp, Canis familiaris
  misc_feature (1)..(494): n = a or c or g or t
aggggccgcggggctgtgggagtgcagactgagaaaatgcagaccaccggggcattactcattcctccggctctgatccgctgctgtaccagggatcttatcaggcctttgtctgcctccttcttgagtaggccagagatcccatctaaacagccatcctacagcagctccccactccaggtggcccgacgggagttccagaccagtgttgtctcnnnnnnacattgacacagcagccaagtttattggcgctggggctgccacagttggtgtggctggttcaggggctggtattgggacagtgtttggcagcttgatcattggctatgccaggaacccgtctctcaagcagcagctcttctcctatgccattctgggctttgccctgtctgaggccatggggctcttctgtttgatggtcgccttccttatcctcttcgccatgtgaggctccgtgagggtcacctacccgtccctgctgcttcgacttcagg

SEQ ID NO: 8849 - DNA, 574 bp, Canis familiaris
  misc_feature (1)..(574): n = a or c or g or t
catggggctcagggggagggnnaggatcaagctcctccttccccaagggnaggtaaaggcaaggtgtctagcaacttngaagttgtctgtaatgacctttaaaggcccaacggtctgtccgcatctcctgactaaaaggcattgcatccctatttcatatcacatgacagagaaacctgttctcgtggcatgtaacatccctgtaagagcattgtatatgattttgtattttttaattcattttaatctacaggttggaatctaatttttaaattttattggaactcacattttaaaaagaaaaacatttaaaataataataaacctttgaccggtgtcttccaagtagtttgatcaaagaacttataaaatgtttttaaagcacagcctggagtgtaaagattggaaagccccatggcctcgccttgtgtgtatgaagtgtaaatctggttttgttttgttgttctggattcttttgggtttttgttttgttttgttttgttttgaagatcagatagtgatcactctgaaagattgaagccaagaatttgtaactatgatatttactgtaagc

SEQ ID NO: 8850 - DNA, 288 bp, Canis familiaris
  misc_feature (1)..(288): n = a or c or g or t
tatngtgggggggagggaaagggggaccatggagcatcctggagtcacagggtcaagggtcaggtggttgtagtctgtacctgaagtttgtgtttgtgttgttgtggggaccaggcctttgtcctagcacctaccccacttccctaaggacgtgccctatatttctaccctcatccctccgattcctccttgggcccccccccccaccccaactggattctcattgaggagggagtgaagacgtaagaatataaggtttttattttaannnttattttttttaaatgg

SEQ ID NO: 8851 - DNA, 407 bp, Canis familiaris
  misc_feature (1)..(407): n = a or c or g or t
acaggctcagnngacaacctgaccttggactgttttactgctaagcttagtggcctgcaggtggctgtggagactgccaatttgattttggacctttcatatgtcattgaagataaaaattgataggatagcatgtttatattttttaaaaacctagtcaggtgtcagttaagaaaaatgttgaatgtattttttttctctcccaaaggcctgctatgcatatttggatagattattcataaaattatagagatacttagataagggggaaaagtatgattcttaaatagaaataccatagcatattaaaaatatgaagcattgttattaaagatagtacagttatcttagggcttccacagatgcctctgtatgtcctaagtttttgttatttttacataattcaa

SEQ ID NO: 8852 - DNA, 43 bp, Canis familiaris
atttatttattcatgagagacagagagggagacagagagaggt

SEQ ID NO: 8853 - DNA, 555 bp, Canis familiaris
  misc_feature (1)..(555): n = a or c or g or t
gtacgtcccaatcccgtnnaaaaagaagattttcaatccacgtaanctgaagatcaccttgtttaatagtgacgtctgctgaaacaggagcacttggtatttttatgaggaattttatgttttcttactggctcagcggggtagctggagcccgggaccgcgccgtgggcatgtttcctgggacgcccggggcaaacctgtcctgcgccaacgggcaggggtctgaccgctttagaagactgtgtcctcgggcagagccgtctccacaggaaggggccgcccagggtcccaggagctccgcccccctgacacggaccacggtggcatgaggggcctggctgccagcgtggcaccgcccggggcacaccaggctggaccgtcacggaaggcagccgtttgcagctcaggaagtcccacgtgcattgctgtcacctggggcagggcacctggtgggtcagagcgaagcgtgagcacctgcctgcggctctgcccagccnnnggcctggtctgcgtccggnngtccccccgactctgcgcaagcttcgctggttctgg

SEQ ID NO: 8854 - DNA, 413 bp, Canis familiaris
  misc_feature (1)..(413): n = a or c or g or t
tagnnaaacctgcaaattgcctttgctcccctagccccccctcctagcttacgtttcctcaggtcctcagcagcgagagacaatgagatgaaaaggccaagaggtttggctcctgctcactgctagtccctctcctttcagtgtttgtgtgtccagtgacaaaggtgttcttcctggtgaccctgagcatacccagtatcttctagactgtacgcgtaggcctgcttggtctcctctctcctgggctttgattttgctttttagctttgcttttagtttctctgtcccttttatttaatgcaccaactagacacacagagcagttgaatttttatatatatatctgtatattgcacaattataaactcattttgcttgtggctccacacacacacacnaaagatctgttanna

SEQ ID NO: 8855 - DNA, 82 bp, Canis familiaris
acccccccactcccagggatgtgccacagagtggctcactgctcactgtagtctgttcccccccttcctggctaccagacat

SEQ ID NO: 8856 - DNA, 677 bp, Canis familiaris
  misc_feature (1)..(677): n = a or c or g or t
ctccaagttttnnnnncatgctatgatataagaaatttataatattgatagcatatttttattttactaaaacattttnntagtcaaccatcttgttttgatttgtgtaattagggcttagatgtttattagntgaagttattctgtagctttttaatttagttcccaaacatatgtttgatttctagtgatttctgttataaattgccaacattttagtgcaagtccagtgacatgatgggcacactttatttgaacctacctcttacattttctgaaccaaagagaaatgttggagctgtgtttgtgaaacatattctaaaatacaggtttcatacattagttatgcctgataaatgtcttggtatttatacctgtgataaacatgagactccactatttcttcatggttgtttatatttttgagtaatacagaaatgacaatattaaggtacatgattagctttttctttttctactcataagaattatggagttaatgaccagaatttcgagctactgaaaaacagtcattgttcattatgaatttaagttgtctgctatttagtattataaggtgtgaatgtgatttatctgtgcatcttgtacctttgaaataatcttgtgtcttttgaaaagagcccagagttgaagatgtttattnnnnnntgttacta

SEQ ID NO: 8857 - DNA, 459 bp, Canis familiaris
  misc_feature (1)..(459): n = a or c or g or t
tttgcaatattnannnnncatgatcatcccacagagtnnnnngtcagcagccagctccantgtccctgcaagttcagcatcttcatgcactcttggggatcataatgtgacacagatgcttcctctctttggcagttccacctccctctccctgctctcatcttgctgttcttgtctggccccaccacctctttaactggttagaagaagaaatgcaatctacctttagttggctttcagcaactgtaaatgagtcctattgtcagtgagccacaaaaaaccctaaaggtctgtatgtaatagaagatactattggtgaagtttctagaggtatacagttcacttttattgctgatttaaattatccctctgagataccaccattaacaggtgacagggtgtggataggtgagttgtttttaactgctgttagaaccagccaagttgggatccctgggt

SEQ ID NO: 8858 - DNA, 23 bp, Canis familiaris
  misc_feature (1)..(23): n = a or c or g or t
gnttggaattctttctctctctc

SEQ ID NO: 8859 - DNA, 597 bp, Canis familiaris
  misc_feature (1)..(597): n = a or c or g or t
gcnncagcccaggccccnnagaatgnnacgcctgcccccaaggggccagccccagaccccagcaccacaagccctggcacccttgccaagaccccgaagccacagaagaaaaagcggaagctgtcccaggtgaatggagccacccctgtgtcccctgtgccatcatcgggcaaaaagcctcagaaggatgtgcctgagaagggggtgtctggcaagtcaccgcaatctgccctgccacggaagaaggccaggctgtctctggccagcaggagccccagcctcctccagggcacggccaagagaaagaaggctctcaggaaggccaggaagccctgaacctaggcggcccctggcccagagacccccgtgtgcagcacgcatcctgcacaggccccctgcagggtagcagcgcccagccctggagcgagtgcacccgccatccacttgcccccaggactccaggaaggggcaagggcccatgtcccccacccctgggctgctctgtcccgggaggcagcactccgcgatttaagtaggtttattccttcgtttacaagaggaatatatttggcttctctcttaagattctgagattca

SEQ ID NO: 8860 - DNA, 74 bp, Canis familiaris
  misc_feature (1)..(74): n = a or c or g or t
tgccaggttttcaagtatagtccttaaaatccaagaggatttgtccatgnntaaagagnnataggcnnngagat

SEQ ID NO: 8861 - DNA, 531 bp, Canis familiaris
  misc_feature (1)..(531): n = a or c or g or t
agcacacacgcatcctctgcccctgccaggaccccagaggaaccctcagcnnnnnnggtttggggcctgtcccctcagctctccccaccctgggcagggcagttcacacagcctcaggataccccgctcgcaggcccgaccacctgccaagcctgagaggtggggacagcctacctcggccggtgggctctctctactaaagaccctgcggccaaggcaggggtgtgacaaggtgcctgggtggtggcctcaagagccctgcagcccctgcctcctggtagctgtcaccctgggccgtgctgaggatggggggtaggggacggacgccgggggcacagagcatcaggtgggctgctctggtctgttgccccccacccctcccctgctcccaaatcagcccagtgccttgagaccgcgttaagagcagggacggctgtgccaggaagatacacatggcgtgcccgtccacgctcttcacccccccgccccggtccccttgtggggagggtgttccagcgggtccatcccact

SEQ ID NO: 8862 - DNA, 612 bp, Canis familiaris
  misc_feature (1)..(612): n = a or c or g or t
gtagtagaccagnntcntaaacttatgcctcaagactgggatcgggtngtagcagtttttgtgcaaggtnctgcannnnagttcaaaggttggccatggcttttgcctgatggatcaccagttgacatatttgctaaaattanngccttccatctcaaatatgatgaagttcgtctagatccaaacgttcagaaatgggatgtaacagtattagaactcagctatcacaaacgtcatttggatagaccagttttcttacgattctgggaaacattggataggtacatggtaaagcataaatcccacttgagattctgaatttacttggtttcccctttttctggagatctggattaagaagcatggatgtactttgatctaaagactgaaactcaagctttatgaatttatcaagaacttacaaatgaagaaggtcacagatcgatcttttataagaccttatttgatgctttatgcttcaaagggatgatgcttgtcatccatataagcaaactttttggcttacaactatttttttaatattagccttctagtctgtaatggaaattgtatattttgatagaagttttttctccattggttaaattagca

SEQ ID NO: 8863 - DNA, 577 bp, Canis familiaris
  misc_feature (1)..(577): n = a or c or g or t
cccagttgatgtccctcatcatcaacacgttctactcgnnnnannngatctnnntnngnnngctgatttccaactcgtnnnnnnnnntnnacaaaatcagatacgagagcttgaccgatcccagtaagctagattctgggaaggagctgcacattaacctcattccgaacaagcaagatcgaaccctgaccatcgtggacaccggcattggcatgacgaaggccgacctgatcaataacctgggtaccatcgccaagtcggggaccaaggcgttcatggaggccttgcaggctggcgcagatatttccatgattggccagtttggcgtcgggttttattctgcctacctggtggctgagaaagtgacggtgatcaccaagcataacgacgacgagcagtatgcctgggagtcttcggctggagggtcgttcacggttaggacggatacaggtgaacctatgggtcgtggaacaaaggnnnnnnctgcatctgaaggaagaccagactgagtatctggaggagaggaggataaaggagattgtgaagaaacannnnnagttcattggctaccccatta

SEQ ID NO: 8864 - DNA, 500 bp, Canis familiaris
  misc_feature (1)..(500): n = a or c or g or t
aaggtagagnngagcgagtngaaatcatgtcatctgatctctacacatttcgtggaatctcaatcaaaattcagacacatatctttaggaaaggtgagaagctgatgatactttgcaatgacaggcaaaagagccaggaatacccatgactcctttaagaactgcttctctaagatggacgtgtcagagcgcttgctgttgcttctccgtgtaaccacgtcaacaacgtccattctttcatcctgtgatcgtgtgctgagcccctgtggtgtgctggcccaggccccacggactttgaacccaggtcgccctccctccccctggggcgtccttctgatgcccacgatctcctctctgggtcagcccggaacgtgatgaccacaggctgaaccatgtcagggtgcacagcgatatcgcgctccacaacgctaaagtgtggagcttgggagaagatgatcgccacacggagtgttcagcgcgcatctcagcctcgttcctga

SEQ ID NO: 8865 - DNA, 666 bp, Canis familiaris
  misc_feature (1)..(666): n = a or c or g or t
gcagcatcgggttgggggtgttctccctcggtgactggttntcatcagaaactnnncagannnnagaggggtccagngcnnnnnncnccttcctctcagaggctgtgccatcggttgctgggtttatggaaccgctgagaacgttctagttggtgccannagagcgtccaaggggagctcgtcctgacatctatcccctgtcctcacactggtggcgtgcagatagcccccgaggagctggcgctcgtgtgcagcctgaggaagatggtgagaaacgactggcacggaggcgccattgtgttgacgctgagccagactgggtctctctttaagccaaggaaggcctatctgccccaggagctgctgggaaaggaaggatttgatgccctggatccctttattcccatcctggtctccaactataacccaaaggagtttgaaagttgtatccagtattatttggagaacaagtggcttcaacatgagaaagctcatacggaggaagggaagaaagagctgctgttcctgagtgacgccaaccctgggcagctggagcggctctgcgcctacctttaggtcactgcgcacatctgctcccagccttcgctgaagagtgaccagagcagccaggagatgccctcctgttcctaaaactagttcattagc

SEQ ID NO: 8866 - DNA, 532 bp, Canis familiaris
tccccggttgccaaccctgcccaagagagtccccagggcaggcgaggccaggagccttagagtgttaagggcagaggccagagcagaagcagagcagggagagcgagaagaccagctgtgaggtgagggcaggggtgccctggggctcgcagccacctgccataccatcaccactctgggctcggccctccctcccctgcacttgggtggagatgcccttcctgccaccatacttgaaaatgcaagtggacaagggtcgggcagtggtcctcccatctccacccagcacccatctttcctgttaaaagtttatctttcatgcattgattttttgtttttaaagactctttctagtcacccaaggaatgtaaagaaacagagccatacaaaggggttgcatcactcatgattttaacttctcaaatgcgactctaggtgctcagcttggcgggggcaggatgctagggagaaatttcctcccctccccctttctcttcttttctcctgcacacttaacattgaccgcctcctt

SEQ ID NO: 8867 - DNA, 548 bp, Canis familiaris
  misc_feature (1)..(548): n = a or c or g or t
tgcggatgttgcagcaacgatatgcaaaagaccatgctgcttggatggaacagttctaccaactcatggacctgtaccaacnnaagtcacntcgaatccagaagctgctacaggagctattactgagagaggaaccccagtcccaagagatcacctccatggaggccctaaatgccacagagctagctcctggggagcggttgttctatcatctgttttgtagtggctctcaaaaacctaaaggtcctctggagttccaggaagtggtgtccctcccaggtcagaataacgtccgtaccatgcttcccaggggcattgctcagtatgggatcttagaactcgcttggaagagcctgccccaagctgatattcaccttaccaaggaattgccccatattgttgcccccaccccctaatttgagactgactggaggtcaggacttttcattcccacctggaggaaggccttgtnnncataanctagacccttatctctaggacccacacagaggtagggccaggccaaagccctttccctacctagctgc

SEQ ID NO: 8868 - DNA, 513 bp, Canis familiaris
ggctctgcggctcttccaggtgtccacgctggatgccgccttgtccggcactctgtcaggggtggagggctttaccagccaggaggaccaggagcttctgagccgcatcgagaagcagctgaagcgccgctttgccatcggctcccaggtgtcagagcacagcatcatccaggactttaccaagcagaaatatccggagcacgccatccacaaggtcctgcagctcatgctgcgacggggcgagatccagcatcgcatgcagcgcaaggtcctctaccgcctcaagtgagccctgctgccccgtggacttgcccttgcctcctctgcgtcccaccgcccaaatggcgccagcctctgcctccccaccgctgtcttggacatcccacgcgctatgcccctcctgggtggaggggtccccacctgccctggtggaaggagcaccctgcccgcctcactgcctctgggtgtctgcttctggtgcagctccaggaaatgtgcttttagagtttgttg

SEQ ID NO: 8869 - DNA, 532 bp, Canis familiaris
  misc_feature (1)..(532): n = a or c or g or t
gggattaccaagggnnngcacttctnnnnnttccgtgtnnagncgtattcgtacctggtaaaagcaggagttgcttccagtgataagctacaggagtggctccggtctccccgggatgcagttagtccaagatatgagcaagacagcggccatgacagcggaagtgaagatgcctgctttgattcttcccagccgttcactctggtcaccataggcatgaagaagtttttcatacccaagtcagccacttctgccaatgaacctgagaatagggttcttcccatgccaacaagtatagggattttccttgactatgataaaggcagagtggctttctatgacatggatcacatgaaatgcctttatgagcgtcaggtggactgttcgcacacaatgtacccagcatttgcattaatgggcagtggaggaattcaacttgaggaacccatcacggcaaagtatctagaataccaagagcacatgtagattaagcatctgatgtgacttagggtngaagagaggagcagaataa

SEQ ID NO: 8870 - DNA, 366 bp, Canis familiaris
  misc_feature (1)..(366): n = a or c or g or t
catttcccttgccatcgtccctggcacagatnaccnctgggaggcctgtnncaccctcctcccagacnnggcacccgaggcgcccatacttataggccctgctcctacctggttgggcgcccgatgcnngcccacccatcagctgacaggcagcctacaggccggcttnnnnnnnaagctctgcccaatcagagaggcccggcctgaagtggccnatcagattgctctcagtcttgggnnnnagttcagggaaggngnnngggtcctgggagcaggtgctcgannngaaggtgctcagagaagcctggggtggaggccttcagccctnnnnncagaggggcatcgggccctgctacagannntcct

SEQ ID NO: 8871 - DNA, 481 bp, Canis familiaris
  misc_feature (1)..(481): n = a or c or g or t
ttcttctctttcttctctctttctctgtgtctcagatggcgattttgctgacagctgccaagaanacgcttccctccacagtccacctcagcccagggtgtttgtagaactctttgagttgcagccactcccccctcccccagtctgaagacgtgttcgttttaagttgcctcagaagtggcactgtcttgttcccagagagtcgaacgcgtctctaagagttcaaagcacatcactgcgcagacgcctgcagggttcctcctgagtgacacggcgcctggttctctggttctccttgaggggccgcgggcacacggacctggactctgcccctactgtccatgccctgacttctcacactccgcctttcttctgcactaagggttcttttggtctcccctctattactagtgtcttaactcacttttcttcctaaattcattatttgcatatcaaattctgtaaatgttttgtaaacata

SEQ ID NO: 8872 - DNA, 579 bp, Canis familiaris
  misc_feature (1)..(579): n = a or c or g or t
gagtgccnacgaagaccagacttacagagggtgtcaattctgtgcttttggacagactgggtannagactctaggggtacagagtagaggaaagcaaaattaacctcttatttacccaagcttgttggctaaatttttttttttttataggtctgggaaataaaccttttctgaaaaaggaatagtttgtagtcttggaaaaatggttttcctatttttctcctgttaggatcagcatagccccccccgtcgccttaagtgtcaaatccctattttgattaacaccccagcataagagttacagcaataagagacactgaatctatttttgtttaaattctttacctcatagtatgaaattaattaaattgacagttgataaattttaccctgaatactagtgcatataggtatgttgttccgttgtgaatggtaatgattttaatggcctaaagaaagctggggttaatcctggagctaggagtaaatgtttaatggattttgttctgtggtacaaataacatccgtgtatatcatatctgtatatatctgaaccaagctgtgtgcagaggtggatat

SEQ ID NO: 8873 - DNA, 606 bp, Canis familiaris
  misc_feature (1)..(606): n = a or c or g or t
tctcagctccatttactccccaaaacgtttgttctgtgtcctgnnngcttcagcggacatccgatgccacgcagtcnnnctgatacagcccatggccacgctggaggcgggggctgggccccggggtggggggtaaaggcaggtggggcctgggggcgccatcatcttgccctgccatgactcttctctgttctgcggcagcctcctcttgtccactgtgcccagcggatgtttgcctcgcagactgagggggagctcaaagtgacccggattctcaaagaaaagtttcctggggctacagctatcaaagtcactgacatttcaggaggctgtggggcgatgtatgaaatccagatcgagtcagaagaatttaaggagaaaagaaccgtccaacagcatcaaatggtcaatcaggcactaaaagaagaaatcaaagggatgcacggattgcggatatttacctctgtccccaaacactgaccatggcctggctacatagatgctgctacttaacgcctttggatgaacttggctgacaccatcctttcctaggcatttatcaaaaaagttatgtattttgttcatagacatttctgtattataatc

SEQ ID NO: 8874 - DNA, 440 bp, Canis familiaris
  misc_feature (1)..(440): n = a or c or g or t
ccgtgggggggttgggcctcgcgtctcatcccagaagcatcgcgaggcttggggcggtgctctcgcggagggcgtcacangagccgggcgccggggtccgggtgccgggctaggggcggagctgggaaatggcgtccggagcggctcgctggctggcactggcatccgtccgatccggggttttccggagcgggccgaggctgaggaaaggtggcgatgtctccgccggagggggtggctcaggtcggagcctggtaccgtcgaggacatgnnngaagtacagaaaggagacagcctaacttaattatgatatggtgatgctcacagcctctcctatctccctatcggaagggcccagggaaagccttcagcctccctactccagtgaagcctcnngcaccacctgtgaccntagcccagatccccaggctctgggaggt

SEQ ID NO: 8875 - DNA, 626 bp, Canis familiaris
  misc_feature (1)..(626): n = a or c or g or t
gncctcatgatgtgtgatgacaggatctccatgnangagagacgcaangagatcatgctnnnactgnngcnncnnnntgatnngantaaggaagtactgagcatggatgatgaaattcagaaactggcaacagaactgtaccatcagaagtcagtgttgatcatggggcgtggctatcattatgctacttgccttgaaggggccctaaaaatcaaagaaatcacttacatgcactctgaaggcatccttgctggtgaattgaaacatggccctctggctttggtggataagttgatgcctgtcatcatgatcattatgagagatcacacgtatgccaagtgtcagaatgctcttcagcaggtggtggccaggcagggacgcccagtggtgatttgtgataaggaagataccgagaccattaagaacacaaacagaacaatcaaggtgccccactcagtggactgcttgcagggcattctcagtgtgatccccttacagttgctggctttccaccttgctgtgctgaggggctatgacgttgattttccccggaatcttgccaaatctgtaactgtagaataaggagcatctgcaactctgggcgattgagcaacacaagacacctt

SEQ ID NO: 8876 - DNA, 593 bp, Canis familiaris
  misc_feature (1)..(593): n = a or c or g or t
gcacattttttacatttgccactgttgantagtcagtgagcggaaagcctgacgaagctacagtggtatcctcctatgcaggcttatttcagagcacgtctcatattccagattcttccttcttgactttgtactctgagctgtcactgtaaatggtatataaatcctctgtgcatttttctgtgcggacctgctcatgtgcacaacaaacccgcatctttgtgttctttatttttacaataagaagcaatcaagaaagataatgtgaaaaagaaaggaattttagaggtagggaagaaatgaatgtcaggcattcacagagctataggaaaatgatcaacactattatacttgagaaaatgttcttgtcatgcaaatgaggtaggtctgatctttgaaaaagtgaatagaaatataatccatttcctcgctgatcgccagtaagaatgaagcagtgggatcctggagaagctggtattgtggagttttggaacccctccatctggtcccctggacctgccctggggaccaccacacccgggaattaggaatgttccaagccgttgaccgaactggtagaaacaacttttaca

SEQ ID NO: 8877 - DNA, 395 bp, Canis familiaris
  misc_feature (1)..(395): n = a or c or g or t
aatcagtgttgagtaccctcagtcataagtgcccactaatgctacattgtacaanntacaaaaaagagaaatgggggggggggcgcgcggaaatgtagtggatctggagatggcttcatccaaggattcacaaaattccaaatgagagattttcaaagtggtgagaaacccaacaaatgctttttgtatacaggaaccagatacactcagaattatcattattgcacattacattcttgggaagggtgcttatgaatggtgcaagatgacttcatataaatttctctacaggactcacaggcattagaaacacagatgttgctgtttcacaaaaaggaagatttcttttccctttgttaagccatcatcttatgaacaatagcacctccgtattg

SEQ ID NO: 8878 - DNA, 538 bp, Canis familiaris
  misc_feature (1)..(538): n = a or c or g or t
ataaattgtatgtgtctgtgtgttttattttctctctctccntatagcagagaatgttcctactcacactnnagctgggtagactccatccttccatccatccttccattcatccatccatccatccatccttacaacatatatttattgagtacctattgcgtgtcaggggctgggatacagtggtgaggtagtctctgccctcacagagttgattgtctagtaaggaagacaaacattaaaaaaaataaacttacatctctcattcatcacaagtggtttttattgcaataaccccctggtttgcaacctcatttctcaacatatgttgcaagacactcccatgggggcacttgggttttggcaaagctgggatggttctgggttgtgcacacttctttgcagtccagctgtcactcctcccctttccacacctgattgcaacagactgttgagtcatgataacaccagtgggaattgctggagaaaccagagatgcttccgtttaagcttggannnttttcgtgcagcctcacct

SEQ ID NO: 8879 - DNA, 528 bp, Canis familiaris
  misc_feature (1)..(528): n = a or c or g or t
ttcaaaagcacatgcgcnntcgggcgcccaaaccctgggggccaagtggatggctgtgaagcacccgcgctgcccccacttccctatgggggtttgcctctcctgttcccccaatataccccatcctcatatcatagagttcaatccacccatttaacagatggcaaaactgaggcccagagagctgcttgaggctttgccgaaggtcccagtgccataccctctccccactccctttggcctgtgtgccccatttaaaggtgggctgagatcggatgaccgacacnnnnnnnnnttgctgctaacccctcctcaggggacctcccccaatccttacaagggatgggggttctgggccaatcctccactgccccccctcccacgtctggctgccaagtgaaacccctgccctcagccctttcccctgggaccctgtggggaggttccctgggattccctggacccaggcagtccccgaacctcttctccgggnnnnnnaagaaagagaccagaaactctaggtgtgta

SEQ ID NO: 8880 - DNA, 518 bp, Canis familiaris
  misc_feature (1)..(518): n = a or c or g or t
actggnngcagaaccngccaccctgtccccgccagacgaccgccagcgaggnnngnccgacgactgtgccccagtnnagagccatcaggcccaggaattcggaaactctggaaccttagcaaactctttagaagagaaggtaatgggagaatcaatcagcagtaaaaaaaaggaaaaaaggaagcatgtggaccacgtagaaagttcagtatttatagcacccggcaccgtccgatcctcagatgacctagaagaagacactggtgatcacaaagtcctctccaggactagtcacagtgactccagcatttacgttcgacgacatactaacaggtctttggaatcggttagtatgtgaatttcttcttcttctgcgtggcccctgctaatcaattcatttccatccttcctcctcctcagcccagagctttgaaattannnatgtgcaacaaatatacttttggatagaagacaagcaaattcaaaccttgtcgttaagcgtagtccagttggatgtc

SEQ ID NO: 8881 - DNA, 650 bp, Canis familiaris
  misc_feature (1)..(650): n = a or c or g or t
ctttgacaagcacagcnttnnanncgaaaacaatcagaactnngccacaggctgcnntcctcgctgcccagggcgggccaagacccagagtctgcagactcctgcttccttgcccttaaaatgaacctctatctttacacccacttatgctgtaccaataaagtgacttgtagagacaatgtacttagcctcgtgttaacaaggtctttttgtccaacatcaagatcatttttccagcctgaaacgtagcccaggatattatgatataaaaatgactgtggaagagcactgcaagtagaggcaaactttctccagttgccaaatattattccgatccatgaaccttaactaaaattctgtgatttttcagctgagaaagtgccccttattttcaaggcctcatgctaaagctaaagtgggaaaacatgttaagataatatgcaaataactataacacgttggagaatatatatagtactgtaaaaaccacacatgtaaaaatctagggctacttataccctttcccagtatgttccaagaaaaaaagtaatgtctggcggtgtttttaaaggattttgtgatcaaataaattcaagaaaagctgtgcaaagtatcaatactggccttggaaagtcacaatctgtatgaac

SEQ ID NO: 8882 - DNA, 525 bp, Canis familiaris
ttgtggaacagctgttgaatgtaatacttgcaaaatgtacatatctttccccatgtctgtttcactggttcgttcatttgtttgtttcttaaagtcaggtgctttgtcagactaacctagagagctgttatggtagagaaagttatcacatgtgtgtggcatgacatcaagagtacacctatgaagttagtccatatacgttgcaactccttagggttcttttttccttaattaaggaagtagttcttgcacttttgagcttgaatagtatccatatttagtatttggcatataatttgggattttgccaatatacatcaaaggcctttaagagtaatggtgaagagattggtgaaggaaaacttagcaacaggtcatacaagtcccattagatctttcatgtttaaatagatcaaattgcagaatttaggatatgaataacaggatacctgttcttatatacctgcaagaaaagtatgctttttttttggaaaaaaggtaaatcataatgagttctatcccatt

SEQ ID NO: 8883 - DNA, 596 bp, Canis familiaris
  misc_feature (1)..(596): n = a or c or g or t
atgtatcacctgcatgcnnnnatctttcanngctggggtacagcctgggtgttcctgggcccacagctcctcacatcgnnntcaactcagagtagctgctggtcnttgcagattagncttgctgttgcctggctcggccttgggaatgggactgaaaggaatagcggagaggctggaattagggacagttagccagaggttctctccccttgtttttggaagccaaagacccagcttgaattctgctgctgtgttcatggttataagttttctgtgcctaggtactggggaatttatctgtgcgtgtatatttttgaacactgtatcctgggtactgggcatgtgcctgtcngagccccaggcccacctgtccacaccccacccatcgttcactgtgtttgtctctccctgggcacctcctgagatggtctcaagtcagtgccctgttggttttcaggactatggcccatcactgttctcttctgccaggaaatgcagtttaacggctcaagatggcagagggcaggagttttatagatgatcttttccttgtnnncttatttgtttctgttttagaaatgaaatgggggttttaa

SEQ ID NO: 8884 - DNA, 461 bp, Canis familiaris
  misc_feature (1)..(461): n = a or c or g or t
tactatttcgagtacactacnnacaaggaaccccgaggaattatccccctggagaanctgagcatccgagaagtngatgacccccgaaaaccgaattgctttgagctttatatccccaacaacaaggggcagctcatcaaagcctgtaaaacagaggnngacggccgggtggttgaagggaaccacatggtgtaccggatctcggccccgacacaggaggagaaggaggagtggatcaagtcgatccaggcagctgtgagtgtggaccccttctatgagatgctggcggcannnnagaaacggatttctgtcaagaagaagcaggagcagccctgacccccgcccccaaccccattatttattacggagctgccccacccgggtggccggacccctgggccctggggctgcggatcctggttctctgtttnnaaaattcaccacctctagctcctctctcg

SEQ ID NO: 8885 - DNA, 570 bp, Canis familiaris
  misc_feature (1)..(570): n = a or c or g or t
gcagggcccgaggccacccccttcctggtggcccacacgcgggccaggccgcccagcggaggggagaggacccgccgctccgcctccccgctgccctggccgtggtctccggccgcgctgcgnctgctccagaggtcccccgannagccngncgcccacgctgactgtcacagggcagccctcaacatctccttccaggagctgggctgggaccgctggattgtgcaccctcccagtttcatcttccactactgtcacggcggctgcgggctgcctgccccaccggacctgcccctgccgggctctggcgctcctcctaccccagtccaacccctttctttggtccccggggcccagccctgctgcgccgccctccccgggaccatgaggcccctacgcgtccgcaccacctcagatggcggttactccttcaagtatgagacggtgcccaacctgctcacgcagcactgtgcttgcatctgagggagtcctgctgggggccaggcccccgcccatcaacagctggaggaaagggccgagctcagaaaatggatggctcccatctccccc

SEQ ID NO: 8886 - DNA, 613 bp, Canis familiaris
  misc_feature (1)..(613): n = a or c or g or t
caggcacagattgaccaatatctnggacttgtgangactcacataaatactgttgtggcgaagattcaggctaaaatcccaggcgctaaaaggcatgctgagtaaatcgatgtcccaccggggattggacacaaaccagaatgtctggagtggtaacagctcttcttacatgttactgcaaattgattgtttctccccccaataccgtaatcttagagacaaactttaaaacagctgtttttaggctgttcctgtactcttaggatatttgagtcacttgtgtcaagcactaaagtatagagaaaagtgtattagatgtggttttaattttgtgttgctaaaaaaaagtgcatgatggtgagagcccaacttattttctcttcttnggtgttctcctcctcctctctgcaatgcttctgtagcttctaatgtcccctgtggctaggcctttcccgccgagtgcaccaatgccgtagtggaaaccgcttatatgtccttgggttgctggttggattcatctttaataacaatatatagaaatgtagactgatgttttagtgtttttccaacacnnnnnataaaaataaaaacnnnngaccgtacttctggtaat

SEQ ID NO: 8887 - DNA, 400 bp, Canis familiaris
  misc_feature (1)..(400): n = a or c or g or t
cagggcgcnnngtcccacgtgctnngnnntgtnnnnnagacacttctcatagaaacgnnccgnnnnnnnccatgggaaggggggaggagnnnnnnncnnnnnaactctcaaacatnnnagactccnnnctnnncaatagacacgtgtgcccagcaataatccatccctccctgtgtgtgcctgtggtatgtgtgtgtgtgagagagagagagattgaacgtgtgcatgaagggggtaggtcgaggtgtgtgtgtgnntataccccaggccccannnntggtnnttcccagattgtgatggccatcctggtcccagtgttagggtagcatgggattacagggcnctggtntttccatatttanagccaatttttattactcattnngtccaatgnaagctg

SEQ ID NO: 8888 - DNA, 592 bp, Canis familiaris
  misc_feature (1)..(592): n = a or c or g or t
ggcagaagccaatcaggcatgaggcagccaagcctcatgaaatctttccgagtaagacctgcagaggcacatgactgcccagaaatcctgcgcctaattaaagaattggcttcctgtgaaaacatgctagattcagtgaagttaacagtaacagatttactcagggatggctttggggacaatccccttttctactgcctgattgcagaagtacacagtcaacaaaaaccatcaggcaaagtgactgttggatttgccatgtactactttacatacgacccctggattggcaagttactttacctagaggatttttatgtcatacaagcttaccgaggtctaggtattggagctgaaatgctgaagagattaagtcagatagccatcagaagccagtgtaactgcatgcactttcnnnnnnnnntttggaaccaagcttctattgactactacactcgtcgaggagctttagacctttcatctgaggagggctggcatctgttcagatttaacagagaagaactcatggatatggcaaaggaaggctgaaagaggattcatctcaatttgtcccaacatnnnnncaacattt

SEQ ID NO: 8889 - DNA, 222 bp, Canis familiaris
  misc_feature (1)..(222): n = a or c or g or t
tccccctctctttcccccctcctccctccccccaacatctctgggtgtgtggaccttagttgtggctttgatctgccggccccacctcctgtactaggtagttcagagagagacatcctagggtggggtgagggtggtttgggtgggggggggtgtctttttcctttctgtgtgtgtatgtnnnntatctgacaattcnnnnnnnccctactggccttcccc

SEQ ID NO: 8890 - DNA, 709 bp, Canis familiaris
  misc_feature (1)..(709): n = a or c or g or t
ccaactgctatgccanggtgatcaccatcgagtcccagangnagatcgtgatntactccaagcagccgattggtgnnnncgannagatcacgtacgactacaagttcnnncnnnaggacaacaagatcccgtgtctgtgcggcaccgagagctgccggggctccctcaactgaggtggggcgggaccggcgcccgcgcctctatttatttccctggggtctggggagccctaagcccagtgagggagcctcagtccccggaggtaactcctgcctcccctgtcgcccctgcccacccacctcctaacttttttttctttgcggagaagaagctgtaaatgttttgtagctgccagcagctgtttcctgtggaaacctggggtgccggcctgtacagatcctgttcttggggggctgcatagcccccttgctttgtgttaatggggacttcccctttgtgccctgcgtgcacccctccccagttcaggggtctctaggggcagcggccatgttctccccctggggggggtgccctgtgcccccagtcctagggactccgtgcctggaaccctgcctcatcttctgttcctgccagaccctgtgggtcaccctcccaccctggttcctggaagcttctgctctgccagaccaggatgatggggggtgggcccttcctattnnnnnggattgtacatatgttaatagcgcaa

SEQ ID NO: 8891 - DNA, 593 bp, Canis familiaris
  misc_feature (1)..(593): n = a or c or g or t
ctttctgattggcgtttcagngtctcgnncaccgaaaagacaagaactggttcttacccnnnaaaatcaggctaattatgatttgggtcctggagttagaattagtttctcnnaaaaaacacacttggaaattataagcgttcctccaaagataaaggtggtttgtctgcagagacccagagtcctcgagtggtggtcagagcccagtaacaaggaaggaaggacagccctcctctcctgccattcctcccagcaccatttttcttatagtccaggcccgtggcgtcgtggtgttcataggggtcctgccttcaaagaggggctctcgtgtctcccctgagagcaggccattgtcacactgggctccgtcctgcggccctaggaccagaggtccctgcatccccagaccagacccacctttgtgagctctcacgtcgggaggtgtcggcctctgcactgcgttgtggtacagattttaatgcatatttttatatataaatgtttctaaaaggccaagtttagtgccaggttttatatgcaggtcaccatactttatatgacaccccctgattcaatgaagttctctttagact

SEQ ID NO: 8892 - DNA, 518 bp, Canis familiaris
  misc_feature (1)..(518): n = a or c or g or t
atgcagtcagcnancgggctcctgccatcatatatgacttctatctgaggctcacgggaannnngcccaggatgacaaaggtcatgaatcggcttttaagaacagtttccatgctggaatattttgtcaaccggagttgggaatggagcacgtacaatacagaaatgctaatgtctgagctgagtcctgaagaccagagagtattcaactttgatgtgcgccagttgaactggttggaatatattgaaaattatgttttaggagttaagaaatacttattgaaagaggatatggctgggatcccagaagcaaaacaacatttgaaaaggctccgaaatatacactacctcttnnnnactgccctctttctcatcgcctggcgccttctcattgcaagatctcagatggctcggaatgtctggttcttcattgtgagcttctgttataaattcctctcctacnnnagggcatccagcacgcttaaggtctaagaacatttggcnnnctcctttcacctg

SEQ ID NO: 8893 - DNA, 661 bp, Canis familiaris
  misc_feature (1)..(661): n = a or c or g or t
cctgtgtgtgtttnaggtctcgtgagcaaaatttttcccgtnnngaccttggntgaagnngccatccggtgtgcnnagaaaattgccagcaattctaagatcgtaacagcaatggccaaggagtccgtgaacgcagcttttgaaatgacgctaacggagggaaacaggctggagaagaagctcttctacgcgactttcgctactgaagaccggaaggaagggatgaccgcgtttgtggaaaagagaaaggccagcttcaaagaccagtgagcgcctccgcctctgccttgaaccctcgactcgaagacaggaattacggtctgacggtcttagaagcaaataaattctctagtaaagggccctgtaggcggcacgcagtctctgacgcacggggctctcgctctcctgagtgggggcggtcttcacccggcggtcctgagactccgtgtctggagcctgttctcattctgactgagcagattcttaatcaaaaattctcacacacacacacacaaattcttacgaggggagcttgggcggcgcagttggttacgtggctggcactgagcccaggtcatgatctcagggtcgtggggctgagccctgcatcgggctccctgcttggtggggagtcggcttcagaccctccgtctgctcctcc

SEQ ID NO: 8894 - DNA, 608 bp, Canis familiaris
  misc_feature (1)..(608): n = a or c or g or t
tggtgggtgctgtcnaccaccaccnagtnntgctcttcttnnntatgatcatncnnngtttggtcntcatnnnnnagtnnnnaatctcttgttcatgtctggctattaaccgangcaaacagacagatgtcatcaatgcttcttggtgggtcatgagcaacaacaccagggatgaactggaaagaagttttgattgttgtggcttgttcaaccttacaaccctgtatcaacaggattatgctttctgcactgcaatctgcaagagccggagctccacatgccagatgtgtggagaaaagttcctcaagcattcagatgaagcactgaaaatcctggggggtgttggactcttctttagctttacagagattcttggtgtttggctagcaatgagatttcggaatcagaaggatcctcgagctaaccccagtgcctttctatgagactctggacccttctgacttttgctctctgttctccctaagcttttcttcctcccttagggaaaacgtagggtctgtagccctttttgtttgagaaaaaggaaaggccctttgccacacatcccaaaaggactgaacagccaggctgtgtgccttgacatgttt

SEQ ID NO: 8895 - DNA, 702 bp, Canis familiaris
  misc_feature (1)..(702): n = a or c or g or t
gactcagtacacgtgctgctcnnctgccatcggctccactggctgtcaggtcgccaagcaacacgtgcaggacggncngaaggaaaanntcgaaggctttgtgaagactttcgataaagaactttcagaagacgcccacccggggatttacgcccttgactgtgaaatgtcctacaccacgtatggcctggagctgacgcgtgtcacggtggtggacacggacatgcaggtggtttacgacaccttcgtcaagccggacaatgaaattgttgactacaacaccaggttttcaggggtgactgaggctgacctcgccgacacgagcatctcgctccgggacgtccaggctgtcctgctgagcatgttcagcgccgacaccgtcctcatcggacacagcctggagagtgacctgctggccttgaaggtcatccacagcaccgtggtggacacgtccgtgctcttcccgcaccgcctgggcctcccctacaagcgctccctgcggaacctcatggctgactacctcagacagatcatccaggacaacgtggacgggcacagctccagtgaggacgccagcgcctgcatgcacctggtgatctggaagatccgagaagacgccaagaccaagcggtgaccgctgccgcctgcccgccttccccgcagccccggcccggcctctaccccaggcctcttccaaaacag

SEQ ID NO: 8896 - DNA, 656 bp, Canis familiaris
atgattgacgtcaccaagagctactaccagaagtttttgcccttgacacaggtctaatgtctctgcctcgtgtcttgaattcatttgagctctaagatgaacttggggacaaagtgagccagccagcatctacaaagagctcttgtgtctttgatacattctgccctctttttttctttgtctggttttaattctttagaatttcccaatccttccaggttctaagctcttaagactttgacaacagaacgtctggaggaattgtgtccaaatgctgtgcttaatggtcttatctattaacagtcacttcataacattatctgtggaacacagaatcatctgttcccagcactcccaccccttggtgctgtgggtgatgggatcctgctgaaacaggcctgcagagcagggcgtgtcccaggtggaggtcgtgaagctcgcatgctactcatggccattagctgctcacacagtgagcacctcccacatgggtcactctcagcttcaatgagagcaacatttggccagttgctacaattgctaatggtcgtgggggggaaaaagtgtttgtgacttttcagagcccagattccttttggctactaaaacttgaaggtaggagtggttagcatttctcctcttcccaaaatgatctt

SEQ ID NO: 8897 - DNA, 408 bp, Canis familiaris
cgtcccttcccttcagtgtgcacgtgtcccccacgtcctaactgaggcccgggctcccatgtgtccagcgtcccctgcaccggggccccccggaggtgggacgtgtcacgcgtgttgggcccagggccgctctcctgtccggcccgtgtccccaggcggacgggggtcggggagcccgtgtggacgggtccagtcgccgtctcaccgggcggcagcaggtggcagcacgcgcccggcctcgggactgttggcaacagtgttccgtgttcgcggctgtcgcactggcgggttttacgggcgtcctttaattttagatggagaaatgttttctgagcgtcatgggatcgttcagacccgttatttttgacttcgtggatcgccgttgcggaatgccagtcgtttaaaaac

SEQ ID NO: 8898 - DNA, 523 bp, Canis familiaris
  misc_feature (1)..(523): n = a or c or g or t
gatgaatttgagcagaagcttcgggtctgccacaccagagggnnnnntgcagtagaagacntnnaggttggccaacggggtagccagagagccccatccaccaagaaaccctccactgtttcaaagcggcaccagcatctggcttctgcagcctcatcagacagtgactttgtcacccccaagtcctgccgtactgcccatcggcatccaaatacccaacagcgagttttcaaaaagaaacccagaattgtcttctcaagtgatgagtccagcgaggaagagctttcggcagagatgacagaagaggagacacccaagaagaccacacccatccgccgagcacctctgcgaaggcacaggccctaagaggtcatcctccctgtccccgtccctgctgtgcagggtgtcttgtgggggtgaccttgaagtctgttgctcctgtaaaacacttgtttgcctgtcttcctttctttttttaaagtatggttcttcaactagcctaactgagcaggattgagctgct

SEQ ID NO: 8899 - DNA, 646 bp, Canis familiaris
  misc_feature (1)..(646): n = a or c or g or t
cagtggcagctttggttagggttgtcctgcatagaacaatnnaaaattgtgttaaatcttgacccctgagaacacagctcacntgnngacagtnnnaagcaggataaggccctctgccatacactgaattaaggctgtcttgacgaaaagcagatgtgtagtagaactgcatgctgaactgtcttcatggccccttttttacgtgaaaaaactggcaaattctgttacttaggcttggctaattggcagatggttttttcaggaatagatggagtgagccttttgcttcaagggaaactggtggtgttaccaatgaaaaaatgccctcaagcaaaaattagaatttttgaaacttgtattgccaccatgagcttgacatcttcctaacacttagactcttctgatgagattggtggtattaacagatgtgatctgtatgatgtattatttagaagatctgcctaaataagtgaaccaatatttggaaaatgactaatgcatattacaagatcattcatggtgaagagattcagtcaaaagtgtaagaccaaataaatgaaatcttaaaaaataaagtggggggctcctgggtggcatggttggttgtgtcaggctccttattcagcnnnnnnnctgcttctctctg

SEQ ID NO: 8900 - DNA, 603 bp, Canis familiaris
  misc_feature (1)..(603): n = a or c or g or t
gtgtcnngcaaagtactgtgagcttccagttgaatgtaaaatctgtggtcttactntggtgtctgctccacatnnggcaaggtcntaccatcatttatttcctttggatccttttcaagaaattcctctagaagaacataatggagaaagattttgttatggatgtcagggggaattgaaagaccagcatgtctatgtttgtgccgtgtgccaaaatgttttctgtgtggactgtgatgtttttgttcacgactctctccactgctgtcctggctgtattcataagattccaacatcttcaggtatttgattccagcaattagtagacagtggatgcaataaaaggacatttgcaactgtaaataaaatgagtcttcagaagaagctccaattaaaaatatgaagatggaaaatctgatttaagaagctgtttggtaagaagacttaggattggggtgcctagctgggtccttcatcagagcataagactcttgatctcagggttatgagtttgagccccttgttggattactaaaataaacttttaaagaggggaggggcggggggaaaacaaagaaaatgngggattttactaaattttaa

SEQ ID NO: 8901 - DNA, 284 bp, Canis familiaris
  misc_feature (1)..(284): n = a or c or g or t
ttttactgtctccatatttttgccttatccagaatgtcatatagnnnnnatcatgcgtatagccttttcagattggcttttctcacttaataatatgaacttaagcttcttctatgtctgtttgtggcttggtggctcatttatttttagcactgaataatatttcattgtccagnggtaccacaatttatgtacccattcagccattatagaacannntggttgtttcnnnnnnncnnnnattataannnnnnnnnntatnnnnnnnngtgtnnnnattttnn

SEQ ID NO: 8902 - DNA, 520 bp, Canis familiaris
atccatgttgaatctgtgaatggttttccgtttactgtgatgtgctactgtaaatatacctctttaattacttctggtctctttggtgacctatttaaatttgtgtacattattgtacatagaataaaatgttttcacgtttttatgacaaaatttgaacaaatagctttttaatagatgtaatgataatacagtgcgtcaagtgtgccaaagattcctcaatgaaagcatataaaagtatctaaccctggaccctagtttttctttaaaatgggtggaagaatgaaagtatgaatcaaaggaaaccatattaaggaaataaaataatttggaccacaggatgaggctatatgtagaatattttaaaatgaaggaggaaataggctgccagaagagacttttttgaaatttgagtgtagcatgtggttgagctgggttcgaaagtcatggttcagagattgtgtaagagttgaaaaacaggcttttatcaactaaactttggtataaaagccagaatgtg

SEQ ID NO: 8903 - DNA, 375 bp, Canis familiaris
  misc_feature (1)..(375): n = a or c or g or t
ctacactttcaaatggtgttttntntgttggtagcatttatacttacacaagtatcaaagcttaaaattgtactaagacttgagagatgcctcgtaccctcccctttttaaaatagttctttgtaggggctttgctgttcacctcttttgaccatctgagtttcttttttctacatttggtaaaacttatgaagagccatggtaattcacatggaataaactgaaaggaactggacttttaattgtagtgatctgaaagtaggtgatctgaaacagctcttcgagcctacgggttaacctggctggaggggttctcatttccagtcctgctgtttaagaggaaccctcacctcaggcnttaaannnnagggagtt

SEQ ID NO: 8904 - DNA, 623 bp, Canis familiaris
  misc_feature (1)..(623): n = a or c or g or t
catcaagtcaaaagctgctccatggaactcntnnctccctccaccacccccaatgtcaggatcgggactgggaccaggaaagcctggtgtaaaattcagtggcccaccaccacctccaccaccaccacacttcctatcatgctggctgcctccatttccttctggaccaccaataattcctccaccacctccgatatgtccagattctcttgatgatgctgatgctttgggaagtatgttaatctcttggtacatgagtggctatcatactggttactatatgggtttcaaacaaaaccaaaaagaaggaaggtgctcacacttcaattaaggaattcaggtgcagctctctcccaaggagaatggtattttgatgcgccacggtcaatgtgaacaaaatttcatctttttcttcatgaagagttggttgggtggcacagtcacctgtatttccgcatgttgtatgcgactcatgcttaaataacaagctgtgtgtttcaagggaatcatcagtttaactcagtaatggaaatgtgagtaattaactcagtcacatgtagtacagaaaagtcaacctgtgaaaatttcgactcagcacatttgtatattgtaactnnnnnnag

SEQ ID NO: 8905 - DNA, 637 bp, Canis familiaris
  misc_feature (1)..(637): n = a or c or g or t
gagcacgagatgcnnngtcatccagttttnggtactccctaccccngagacctgcccgnnnnnatcccaccccccatgnctgcagcccaccagctgcaggccatgcatgcccagtcggcagagctgcagagactggccatggaacagcaatggctgcatggacacccccacatgcatggtggccacctaccaagtcaggaagattattacagtcgactgaagaaagaaggtgacaagcagttataagttatttatttgttagtgctggctgtggaaaccccagttcttggggggagaaacaggactttttacatacgatatgagctacaaaagaaaaagaatatcttctaaagatttctttatatatttaaaaaccccacaactaaaaatgttatcagcataatagtgtttgtttgtagagaggattccttgagactggtttgggtctccctgcatgacagtcccccagaaacttagtcctggactggactgaacattcagaaaactttccctgcaatcttggggtttggctttagttttcttttccttccttgatttcttggtaggtgctagaatccagttcacacccttcactgtgcgtgcagacacactcagttatgtgtgttccagaacccac

SEQ ID NO: 8906 - DNA, 563 bp, Canis familiaris
  misc_feature (1)..(563): n = a or c or g or t
cgcctgnnnctgaatacaannncaagaaagcaaagggngatgtgaagangaaaggtcggcctgacccctatgcttacatccctctcaacagaaccaaactcaaccgcaggaagaaggtgaagctgcagggacagttcaaaggcctggtgaaagctgcccagcgaggatcccaggtgggacacaagcttcgcagaaaggatcgtcggccctgaagggtcccccagagggctctgtgatccagtctaaggtctctctgtggctcccacgctgctttgaccacaactttagatgctcgaggttttttctgtcacagcctggactcaaaatgacttgttggatgggacttggtttccagagaggcacccaggattttggaaatgccaaactggaatcacccttcagagctgtccctagagcctagagatgggaatatagcctcactgtctccaaataggccagctgtgtttcttccccgagtggccatgtgcaccagagcagacagtttccatttcttccagactcttgtagccacgtgacacttagcctggctgtggtctgggcat

SEQ ID NO: 8907 - DNA, 574 bp, Canis familiaris
  misc_feature (1)..(574): n = a or c or g or t
acatcgcactgatcnnntcagagggatnntaaaaatgtcctgatnncnnactttttnnnnngtgtacggaaagtggaaattacaacagacactattagtttgcagccggatttagaaatcacnnaaagcagctataagaaagaccggatggatgaggaactaatggaacctctgaaatatgctgaacaacttcctgtagctcagataatacaccagaaaccaaaactgaaagactggcatcctcctgggggttttattctgggattgtgggcactcattataatggttttcttcaaaacgtacggaatcaagcatatgaagttcattttctagacatgatgtgtgaagaagactacatggaagactaccaccttggataaaatttaatgtcattatacttttaaaaaaaatacattgttcttgttgaattgggcacaaagtataggaaaccaaatttgagtgaactattgattttataacttaaagaaaaataattgttaatgcaaatgctaagtggcactgattatacttgttttttgttgtgtgtgttattaaaaagatgggacaaagatca

SEQ ID NO: 8908 - DNA, 448 bp, Canis familiaris
  misc_feature (1)..(448): n = a or c or g or t
gtatcacatgtagatatgcatgcatctgaggatctgcactacagacgtgtgtgcacacgcatgaacacacacacaggtctgcctatgtctgcatacacctgcagctgcccatcgccgggcactgaccctccctgtacctgctgcgagtgccatgtgacaccaccgcnnngcanncgaatcaagtttnnaaacnnactcnngtngaggcagtctgtgaacagacactaaagtctgtttcaaagggcctgggctccccccatcccctgactgccccatggtgacgtgccacctggatgggccacgggagnntctggaggtntcttacagccctctctgggacagaacctgagccatatggccagaacctgaaggagcaaaatgcccgggtgcccatgctgtaggggggcatgggcagaacacaaaccaccatgtgcccctcggtcctgaa

SEQ ID NO: 8909 - DNA, 619 bp, Canis familiaris
  misc_feature (1)..(619): n = a or c or g or t
cctcctcctcctcctcctcttccagcagtgactctgactgaatgcagggtctggacccttccctcaagcctctccagtnctgctctcccatcaagcttcaaatggcatcttgtacgggggaaaattagcccttgtaccccttctcccttaccccccactctgagccttactctgctgttcagccctaactggctagggaaaatgggccaatgaattgccatgggctagcaaagaccatcttctaactacttgaaaagaccttttagctgatgagcttagcaggagaactatgtttttgaggctgatgagacctttgagctaaatgctgaagatgagtttaagatctgtaaaatgagattttttttttaactttcttttgtaatacttgtagttgggaggggttgtggaaatttaattatggaagaaaagaaactgtgccgttttgtaatggtggctggcatactttggtgatttagtggcaaatagatttcccaccagcctctattgattgtactaactgtaagcctgctgggaggtggagtccatttggttcataagctctacctgccggtttggaatctaatctcacttcttagcctcagtaggctggctcagggcc

SEQ ID NO: 8910 - DNA, 569 bp, Canis familiaris
  misc_feature (1)..(569): n = a or c or g or t
gcagtgtttcntttggtctttacccttccagggttgagagtagnctaattttgccttgaatccattcagtttcttagattaaaagtgttcattgttttatacgtggtagcatgttagaacttttatatatggctttgcatcttcatttacctttttacagagaatacggcctgcacatgatttatgcttaaaatctgagatatcaccacattgagggctgtgacttcgagaagagctgaagcctttacaactaaatagggagtttggcagggaagatgactttttttaaaaaaattcagaatcctatttatatactgttaaaatttgaagtactatagtttatgttaaaattgaatatttagatactatatttcagtactagaaattttttgtagccactaacatgacagattaataaatatggtgaaaatgattgtcagtaaattatcatattgaattgtttgtagtgtttctgtatttgtcttcactttgtgtatatatacacacatatatataaaacatgtaaataaccttatgttattcctaatctcaattgccacaatatcttt

SEQ ID NO: 8911 - DNA, 621 bp, Canis familiaris
  misc_feature (1)..(621): n = a or c or g or t
aaganntgctgttcagctttcagccccaagaattagtgttctgtgtaaaacgtacatttattatcttcttgacacagattgaaagggacatcagagtaattacaggtccttatactatcatatcatggttataaaatgtttctaagattgtgaagtgtacaaatggcacagcctgtccctacttattacctggaaacctagttctaagaaatgactcatggctaatatctgctgagagggtaaaaattgaatatgacatctttaatttcaatttgagacattaagactctataaaacttaagtatagccatagatatgtttaaatcaatgacaaagagaaattaaaaaagttttctgatagttttaaataaacactttgtattttgaactgtttgtgctatgcaatggtattgactatatgcagataaaatattctgtgttttttggggaaaaaacttttgtcttttgtaaatcagcatatactttaaaatgttttttgagattgaattttggaaatttattaatttgtgaaattataacttatattttatttaaaatttatgtactgtatttctacttatagatgtacaaatgtttatgtattgattaaagagtgaatta

SEQ ID NO: 8912 - DNA, 555 bp, Canis familiaris
  misc_feature (1)..(555): n = a or c or g or t
ccactaattgcnnacacactggcctcttgttaggttctccaatagactaagcagtacatagctcagggcctgacacaggtaattttctccatctnnaaagtattttccaatannactcccactcccacttnnnngnnnancaagannngtcccacttcatcttnnngnctcaacttaaatgtcactttcacttnctgatttctcctgtttcagtagattctctacttagaaaccaaccaaccaactaaccaacaaagcatctcttgggcattttttaaagcttttataaatactttcatgttttcatttttacaattgtttatttgttctgtgtctgtcactttgactcaattgtaaacttcaaccatgcctgacatgtagtaggcacttagatatttgttgatgaatgaatatcctatgttatactctctaattggtctttagactttagcatcacttcaggacttatttataatgctgttttgttaactgctatttgtaggcgtttattttctgcttttaatgggattgtggnttgtagaaattatatttcat

SEQ ID NO: 8913 - DNA, 574 bp, Canis familiaris
  misc_feature (1)..(574): n = a or c or g or t
cactgtgagctcgtngactggctgagttccccgtcacccaccctcatggagggtcccagccaaccaccgtcatctcttgttgccttctgcccctgggacgggtccctgctggtgtgtgcgggcctcggcgtgcgtccagaggtggtcttctatagcctgcaccagaagcaggtggtggagaggatcccgttgcctttctttgccgtgtccctgagcctgtcccccggagcccgccttgtggccgttggctttgctgagcgtgtgctgaggctggtggactgtgagtcggggaccatgcaggacttcgctggccacgatgacttggtgcagctctgcaggtttgccccgtccgcccggctgctcttctccgccgcccacagtgagatcctggtgtgggaagtcgcagggccctgggccgcaggtggggcctcaggctcagggcccctgcttggctgagatgctggcacggccgagggcctcctgcggagccaggaaggcttgggtctctccacggtgcaggggcctgtgtgggtcaagaccctgaacttaggggggtgctgtttgttctttacct

SEQ ID NO: 8914 - DNA, 487 bp, Canis familiaris
  misc_feature (1)..(487): n = a or c or g or t
gaatttgcaaattctaacanaagccatgtaatatcttaaaaacaactagagtaagtagagcgnctgagtaactctttcctgccntgaagnaaactgcatgttaaccaattggcatcttacacatcactgtcacccacgtcccagaaacggacagcagcacgtgtcctaccatccactggtcaaacacagtagggtcagtccacgcctaagggcagcctcagctctttgtagcatttatgcaggtgtgaagtataaaccagtggcagctttactccaagaaatgtggtagtgcatgcagtcacgtctaaagtatcctgtggacacccagcgatgctggcgacccaagtacagaaatctagtcccccgggagcctggaaggccatcggactcactgacgctcaaccgccgtcaggcgggttccacgagcccggtggtcctgtccacgcacannnngtccccttgttttcnnnnnnaggccgtccttacc

SEQ ID NO: 8915 - DNA, 626 bp, Canis familiaris
  misc_feature (1)..(626): n = a or c or g or t
acatcaagatannctngtnnatnnagctgatagcatatattcatanntattgtacacttgggtgaaaaatatggcagtnnnagagtggtgtcagactattaccctacctgtgacttgtatgtcgtagaaaacgctgttaaacgttggacaggacttgaattcaaagcatgtgaagtggatatcgtacacgtgtggtggaatgcaagagatgcagtgcctttccccattcattcccgatggaatcgttacagtcggttaaagtctgtaattttttttttctagttgtaacgtgtctgtctggtaaataggtatcctattttggccttacgataccgtaacaaaatgcatcattttgaaaatacctaatgccaagtaacagtgcatgctttggaaatttggaagatggttccctttaagaagcaaatatatatttgattgttcatatccagaaactgactgaatgttctcaaaacgctgtttacagtactcggtgaggtgggggggcaggtgagggagagatcattgcccagctgttcaagtgttcctggttaagtgcttttaaactggagaggctaacctcaaactattttttttaactgcagtctataataataaannnncacann

SEQ ID NO: 8916 - DNA, 569 bp, Canis familiaris
  misc_feature (1)..(569): n = a or c or g or t
caacattttggtttttggncntagctcaaccatnctaagaagctttataaaaataagtgtatcttagaactgaatcagcaagattcagagaaaagtgaagtgtagtaattcacaattttacaacatagaactgtcatattttataaggctagtttgaaattgttttaaaaggtagcctataaatgtataaatttatataatttggctcttagtcattttatgtgagaactggaagagaccttaaggataatatatgtcgttcagtgaccttcttttatagataaggaaaacgaaatcctgaaaggtaaatttatttaatttaatccattaaagttgaatcagttaattaatcaaagtcacacaattacaacttaccgttcttcacacaattaattgtagtaacggtcaaataacttaatgttaacagtctgtactacatagcctagtgcaggagtctccctctaataggaagtagaaattaatactaaaaaaatagtagaataaattaaaataggggataataataacaaatttaccaaatattgttaattaaaattttagatattaaa

SEQ ID NO: 8917 - DNA, 621 bp, Canis familiaris
cacaaatgtaggacagtagctacccagctgttcatttaaggtaaatggattaactcttggcctttggtcatgattttaatatatgagggtagaaaacaacaaggactaggatggactcttagaacaatgaaagatcatttatcatttgtccctagaatatagaatttggttttactttcataattctgctagcaaacatgacagttaaaatggtgtatttatatatataaatatatagtataattttaaaatttccattttctaattttcctattccaaggcaaaataatgcatttagtaatctggggggtagtggaaatactatgtttaattgaagttgtcaggtcgggagtccctcagaaattaaaatttttttctgttttaaaaaagatctgatgtttagctcttggaaaccattgtcacttaaaattctttttaaattggaattgccaatgccttgacctttgagaagggtttcttagaaataagtcctacatttaaacttttttctttaaaacatggtattggatgttgactttttacacagttctaagcactgttgttaatatctggaaagcattttgagagattaatggacagtaaacattctacatttaacgt

SEQ ID NO: 8918 - DNA, 505 bp, Canis familiaris
  misc_feature (1)..(505): n = a or c or g or t
tcagagannnnntgtnnnnngagctnntaggaatnnannnnnnnnctttnatagcatttngtctgnnannnaccggctggtngcccactctgtttaagtancagaaacaaggcccagatcaaggatgcttaacctttcctgttccctctggattacttccacattactgccctctctgccaatcctcctgttctccaacaacaaaagaccaaaaactctctagcagtacgtgataatatagcagtatataatgatgccatcctagggccgtgtctgtcatatgtctctaagcctcttcctcacctccatccaaagctggggaaaccacacattctagcccaagcctgcaaaccctagggtgttagccaagcagtgcatcttcccaagattatgcagaactgttagattatttcaaaacctacatattcatacaatcatgcccaattcatttattatgttaacaattagcttagggcaggcacctgggtcctcaagtggttgagca

SEQ ID NO: 8919 - DNA, 549 bp, Canis familiaris
  misc_feature (1)..(549): n = a or c or g or t
cggagaangctgctagaanannatccaatgcaacttcagnntnnagcccagaccgggcntcnnnnnnnaaannncnctccaagaagctggcntctccgacaagcagcaggaagatgtttcaaaggnntggtacaaagaagagagcccgagcaaggtccctaggcccccagggcaagaggaagcgagcctgaaaccccaccagggcagggccaggcagtcagcacagcccaggcgagctggcaggagtctcccttggccttttctgtcccggtggctgacctggggacgtgccagcggagaaccacttctccgtgtgcaggctgctgctgctgttgaactcaggccttagcagtatgtgagctggaggtggaggtggaggtgggggcaggtggagggaactgcaccccgggccagtgtggttgtcctctgcacgggaatcttgctctctgaatggacggatgctccatatctgcttctgccgggagaccagatcccacattgccgacgcacctggctaaccttgtgcggtggtctggaagtcccactgcg

SEQ ID NO: 8920 - DNA, 441 bp, Canis familiaris
  misc_feature (1)..(441): n = a or c or g or t
tttgtgcaccactacgggcgggctgtcatcatgttcggtgtcccctacgtctacacccagagccgtanncnnaaggcacggctggagtacctacgtgaccagttccagatccgagaaaatgacttcctcaccttcgatgccatgcgccacgcagcccagtgtgtgggtcgtgccattcggggcaagacggactatggcctcatggtctttgctgataagcggtttgcccgggcagacaagcgtgggaaactgcctcgctggatccaggagcacctcactgatgccaacctcaacctgactgttgacgagggagtccaggttgccaagtacttcctgaggcagatggctcagccattccaccgggaggaccagctgggcctgtccctgcttagcctggagcagctggaatcagaagagacgctgcggaggatagagcagatt

SEQ ID NO: 8921 - DNA, 650 bp, Canis familiaris
  misc_feature (1)..(650): n = a or c or g or t
gtngatccaacagagtggatgcctaccttgaagggggtaaaatttggttttgcctcatccctttttgttgggctctgaaggccctttgtattgggtttcggcctcttctgcttttacatttataatcctgctgggtatttggcacttgtggcttggatcaggcattgatggatgtttagtgcccgtggttgtgggctcagccctgcctaggtttgctgccgtaggacacaaactggaatggattatagatggtctgcctgtaacaggagatagaattgaacaagtatttcaagagtcctcacccatgaccattcagtacctgactgtgctagtccgtgctagtccgtgctaggcatcagctcgcattcagaggtctgtctgccgtattgatgtagagaacacagccctcttctggtgaaaggttgcctgttgggaagaagagctgaggaaaactgtgaagatccagtgccttgatttagctccatgagagtcagagtcctttctcagctcccagttgagcaccagagatgatggcctcacaccttttgcccctgtcatcagtccctacctagcatgtggctcctcacgcctcccaacttcatgagaggttccatgtnnnnnttgtaatagaaatnnnattgaaaagctgc

SEQ ID NO: 8922 - DNA, 481 bp, Canis familiaris
  misc_feature (1)..(472): n = a or c or g or t
ctgtagcttggtctcactctggtctggtgatgacctaggtagcttttagagatcaatttaaaattcctatctgtatctatttantgtnctttctgaatacacaagtgtaaatagtataatttgcagtgcaaagtccttggcaataactttatgttgtgtattatgtcgaaaaccttggcaaacgcaaccaccacggcttgtccttcccctnnggggcaatgatcccatgtaggactctgaacgtgaaaccttcggcgtggttgaagcannnnnnctgcgtgtgtggacagtcaccagtgcctcgcccagagatgcctggccttcatccaaagggactctcttccactccaccacccacactgcggctcttccgcactgactatgttggactttgccatagactgatcctcttgtctggctgctgcagtttgtctgtaatgccctgacatgttgcattctnnnnnntttggatgaataaaaa

SEQ ID NO: 8923 - DNA, 324 bp, Canis familiaris
  misc_feature (1)..(324): n = a or c or g or t
gnttgtttaaatgnnnnnccatgtannatatgtnnntnnnnnnnnnngnnntcctttcaacnnnnttttatttngnnnntgnnnnnnnccaggtgttaagnnnnnnnntgggnnnttagtnnnnnctnnnnnnnnttaagttttnnncacttctgttaacctcaagaaactcttatttgtantngattgtttctctcttggaactnnnnnnnnnttctttctcnnnnncatgaatgtgtcttcctccaaggtatgnnnnnnnnnnngncnnnnnnattctttnnnntnnnnntggtttactccaacaaaacacactgtgctggc

SEQ ID NO: 8924 - DNA, 652 bp, Canis familiaris
  misc_feature (1)..(652): n = a or c or g or t
ggcatagnttttttaaattttttttttttttttaatatttttaaagacgagatgagaaaagcaacttnnnnggggcaaactgacccttgccatcttatgatcctgggagaaaggaggagaagggtgcgtggtgttttcagatggcagagcaaggaacaaggtccggcagagtgccaggtatctgactaaacctgctttgtaaacatctattggccgtgccccttcttcctttcccgctattcctgcaggcagacccctcacagaagacttcaatgaagaagcagtggcctcttctgatgccatttttcacctctgctggcagtttcagtcccctgcagctccctgcccccagccccagggtcttttagctttctactcttaaaccttcatgaaacacaaaattagattcacagaatatattcataaataatagttccaccaattccacttacttgtgtagtaaatatcactagagatgtttttaagctagaacaccattttgtttcacctgctcttagtttattcccagcctccttcccgaaatattttagtaacaaaaccaacataacacaggcagatactgaaatacttcctttatatggtctttacctcacataaattctgtgcacccagattnnntcccggcagaatc

SEQ ID NO: 8925 - DNA, 593 bp, Canis familiaris
  misc_feature (1)..(593): n = a or c or g or t
atctgtcatccagtttatgannngcgnnaaggtcaaggtnnaccctgcnntgagggtggnnnagatagccaacgnnaacccagaagagatgacggtggtcttcgnngccttgcacaatctnnagccccgtggctacgtcgtggggtggatcattgccataagtttactggtgggaatccttatcttcctgctgctggctgtgctgctctggaagatgggcttctttcgccgaaggtacaaagaaattatcgaggccgagaaaaaccggaaagagaacgaagacagttgggactgggtccagaaaaaccagtgacctgccacgccagtcacgtgacccgatgattcgcctgtatcttgatctttgtatcttccatatttggaagaaagaatcttctccagatttttcggaggccccactgatgctgttctcttcctcatttcaccaagcccaggagccaacctgaggcagccactctggccaggtcacatgactacagccaccacccatttccttttagagatgaactccgaactttggaaagcaagctacagagatgagcagtatttatggnnnnnncgtgtgtggtcaaccc

SEQ ID NO: 8926 - DNA, 643 bp, Canis familiaris
  misc_feature (1)..(643): n = a or c or g or t
aaccctgttgtacggagtccagcggacagtatggnncannnctgtgcaggggggnnnnaagttgtcagcaagcagtctgggacttccacacctcaggtgggtgttcctcagagtggtcttcccaggaggtctggactctggatgcagggaggcaggcagtgatgtcgaaaacaccttatttgcattcttctggaattatatttaaacccaggagcctgctctttggaacccccacagtgggggcagatcttgataatgtggaagggagcctggggttttgaggtaactctcaagaccagggaaataggtgatggcacaccagcctgtgctcctttgctgcaagatgggccaggtgctggcccctcatgagtgagtgtcctcaacgaggagtttccagaatgtctgggacaaaagcaaaagtgtgctgcccaggggtggctttgtgaaggggtccggctgtcatctgtgttcctgcccatgttataggcagatggtttatgataatgtgatgcagatcacagcatgaaatattcaccagagccttaactgtttactggaggtacccgagatcccatttgaaaactgcaatgttaataatttcatatcggtgaacaagtatctaatgttggtgactttttcttga

SEQ ID NO: 8927 - DNA, 511 bp, Canis familiaris
  misc_feature (1)..(511): n = a or c or g or t
ttgcnnngcagaatggcttgagtgangacgaggcnctgcaacgagccctngaactgtcactggcagaaaccaaaccccaggtcccaagttctcaggaggaagaggacttagcattagcacaggcgctgtcagccagtgaggcagagtaccggcagcagcaggcccaaagccgcagcttgaagccgtccaactgcagcctgtgctagggccctgggcttggggagggaggctcaactgaggaggactgtggcccccacacctctagggtacactgggagaggaggctgggagcagccaggagtgaagacgagcaggccacctccagggagcagcaggagcagcagcttgtggagcggagcctacagatggccctgctggcctctccagctgcataggagagagcagttacaaccgttggtggttgggccctgggagagtgctggccaggccccacgcagggcagccccctgcatcgtgtcatccccctttacgctggggctgcccccatctc

SEQ ID NO: 8928 - DNA, 573 bp, Canis familiaris
  misc_feature (1)..(573): n = a or c or g or t
aatacagaagaatatttaagagggctactctagnntccctcgactaccatagacaggtacattnnnaagctgaactattaattgttggatgatatttggcaatgatagtatgacttaaggaaataaagaatgtcaactcaatttaatacaataaagtaattactgattaccttcttatctaaacattaacaacagacataatgtgacatgagactatatacattttggtgtgtctcttgcttggccttaccacatagactgagttcagatttattgaacataataggatttcaaattgtatttacatgccataatttacagaattgtgttgagcaagacggggcctggaacagctgattggatatgaaggtggatagctagaggtcataagggcagggcttttcccttgggttcacagaacattcaacatagctctagagaaatagtatacactgctggggcttgtgggaatcttcctatagcaagcactcattgtttgttaaataagagcaggtgggggtgggccccctgggtggctcagtgattgagtgtctgcctttggcagggggtata

SEQ ID NO: 8929 - DNA, 692 bp, Canis familiaris
  misc_feature (1)..(692): n = a or c or g or t
atcagcanngtgatctgtgtgannntcatcgtnctcatcgnnctcaatgtcttgctcttnnnnnnnnnnnggtccnnnnngnnnacggccnacannnnngagtnntggcacagtctggccctggccaagggcaagttcccccagacggccacggagtgggcnnagatcctagccctgcagaagcagttccacagcgtcgaggtgcacaagtggaggcagatnntgcgggcttccgtggagcttctagacgagatgaagttctcgctggagaagctgcatcaaggcatcactgtctcagacccccccttcgactcccagccacggcccgatgacagcttctcctgagggcagacacccagccctgcggccaaccccccctcccagtggacagatggacacagagcctcggcggccactgctggcacggtgtgagcgccgggagcctcccgcccacccctcccagaggcccagccaggggccacgcagacatggggaccacagaaccgagatgcactttagaccagcgtgtgcgagtccagctgccatcgcctgcccagccagggagctggcccggcctacggcaggccccttccgctaacttattttgcccagctggggttgtggggggtgcctctggggtgcacgattccctcagctctgggtttaatgtattatatttatttggggtgaca

SEQ ID NO: 8930 - DNA, 603 bp, Canis familiaris
  misc_feature (1)..(603): n = a or c or g or t
atgcannaacagctccacctcccctcaccttcccacatgctggttgccatgaaagctgcctctggcctggtcttctagttgctacccagttaaaagttccgcctctgccgcttgatctgtaatgtgtgcacttaacagggcattcagagttgttaggcccataggacaaggactgtctgctttggggggcacagacccaagtatatgcagggagggcccccaataagcaaacactaaagatttctagcactgccactgcttttaaaggcagcccttgttgagcctaccagagcagctgatacgcctgcagaacagggagccattgtgtctgaaaccggggctggagcttgtttcttgaattgtctgggagcccagtatctgcctggagaaatccaggaagtagaagacaacctccacaggactagccggaggccagcttcgtgaactgcagcctggcagcctggcccaaggtccccctcgccctaggatgctggctcttccttccctccttttacacactccccaccctacacagggggatacagtgggtactgactctaattattgccaggataaacatggaaccagacgtttctctgtaac

SEQ ID NO: 8931 - DNA, 420 bp, Canis familiaris
  misc_feature (1)..(420): n = a or c or g or t
ccccaaatnnggcntctcttgagttagttgnnnnnagttcagtgttggtagtatgggggnnnnnaangactggtacggagtggggagagctgtgcaggtgtcctgtgggagcctccagggaggtgnnccaggtnggggggtggnnnnnnntgnnnaggggaagcttgacagggaagtccctttggccacacagtttacaaacccaacatcatgtctgtttgtgtgtctctcaaggtgagagtctgatttttataccaaagaggaaatgattttttttcatatttgatttgtctatattatataaatatataaatatatatatatatacagctatatatatattatttttttggttctctctcattnnnnngnnnnnnnnnnacgtacnannntgcattnnnnnnntnnnnnnnnnnacat

SEQ ID NO: 8932 - DNA, 283 bp, Canis familiaris
  misc_feature (1)..(283): n = a or c or g or t
cctgcccagtaatngaattgannnnnnagctgcagaaccaaaaccaggtcnctaaggtgtcagannnnnnccnnnnnnnacacccgacaaattcagnnagtaaagatacaagcactttttgattcacacagcttattacttacacaggcagattagccaaagatgccagctccacatggtccttgttgcacacaacagaaggatgactacagtaagggttnnaggatctcctattcctaagaagccagnnctggnnacacctgggtggctcagcagttgagca

SEQ ID NO: 8933 - DNA, 629 bp, Canis familiaris
  misc_feature (1)..(629): n = a or c or g or t
tccaaaganncagccgatagncagacatgcctgcatatgttgaaattccttacagtcaatgacgttacacattccatccctcatcataccaaccacagtgccagagcccagtagagcatgttgaaaacacagatcatttccatcatcatgaatggctctcctgggcagctgctctgagtctggcatagtggctgcacatggaccccatctaacctagcgggtgtccaccacccatcacaggtgggtccaggtggatccgtgtccacgtgagagctatcatgatcttgtggaaatggggaaatgccaggtgaaggggcatcctctctctctcaaggaaggtttgccactgtggtcaatgtcttggtgaagggttctaactcccaagagcccagggaaggtctgaggatcccaaggaagagcaggtgttgacaggtgttccaaagtggcctcagttggaatagcaggaacacggggcctcactgtctaatcacctcatcctcgtgtttgtatctctaaagattgggcggtggagaatattgaggatgaaattcctgaagaggaagaaacctcaggtccggaagcacaatgaggcgggaatcaacaggagggggtccctggtgcagttggag

SEQ ID NO: 8934 - DNA, 566 bp, Canis familiaris
  misc_feature (1)..(566): n = a or c or g or t
tgttttgatttcannccattctgaaaaacagtacagtnnnaagcacttaatgtgataaccacttttttctcatcatccatgtctagatttctgtttcccacatgccccaggggagannctgcacataccttgcttattctgcattttattggaaactgaggcatcacgatggctctggaagttagcaaaaggcaagatgctctgcacacagcactgtgataaagtgtccttctatgcaataaaatgaattaccttctagaatgtttagagatattgaacagatatagttcacagccaaggnnnnatnaattagtggactgatcgactctccaccttttcctcaggaatacaannnaagttgcctgcctcttcgaccaccaaaagacttccaatttcttgttttctcctgaattttggtaagccaggatgatctgtggctaaaggcacagccttcatgatctcagggaaacattttnaccacagtgttatggtactgaaccttgattagaggtcatagaaattcaggatgtgaaaacagaagcagaggatttattaaaatgggagat

SEQ ID NO: 8935 - DNA, 624 bp, Canis familiaris
  misc_feature (1)..(624): n = a or c or g or t
aggaganntttgggctaagtgcacagcagatctctnncntagatgccctcagtgctgggtgggttataaaaataaagtaggcctttgagttgtgaggcctctgcagtgcaactttgatttttcccactattactggagatgggacacagagtcattgctttgtgataagaaatacttgcatgattgagtctgagtcgctaatggcaactggccttgagtgacaataaggtgtggtggggatggtggcaaagcacagatttccacctgaaactggcagctgtcattcagctgtagctaatcgctgtaaagcgggaacatagaacataggtaggtctaatgcaagaaatgtggagangacaaaaaagctagatttttatgtgaagtattctgatttttaagttgttggcaactaataaaaaaacatttaaaaccctgctagccaaacaaaagaggtaggggcccctgtgccatcattatctctatgggacagtcacccatgggggccctggcgactctgccattcaggaatgctaggagctcctgcagctgggcagggtgtggggcaggtgcccagcatcatggnnnncagacacaggctgnnnnntgtcctcgggtctctgaaag

SEQ ID NO: 8936 - DNA, 201 bp, Canis familiaris
  misc_feature (1)..(201): n = a or c or g or t
gcctcttcccctcactttcagggcttaccaggcactggcagggagggtgagggctggctccagacacctctcccccacagattcccaccaattaaaatctaatatattcttctgttgcccttgggttggtagagtcagtgcctgcagtcaagtgcctcccagcctcggctcagcnnnnntgccacaaatcagnnnnnnacc

SEQ ID NO: 8937 - DNA, 533 bp, Canis familiaris
  misc_feature (1)..(533): n = a or c or g or t
tttggnntctactccctcaaatttagtnnggctctatcgcttttgactttggctgtcagcaggaatttgatttttatgtctgagttgattttaggaaagcctgaaaactatcaaagatctcatccgggttctgggcctctactctctcctccttttctgcctcattcccactcttttcagtcttctgggtctagttttcagcctttctggcgtgccctacctggttccagacatgcaggccccaggcggtgggccagttcaagagtctcaggtcgagcctgcccaattggagctgcttctgctgcctggtgggttggctgcagggcatgaggaggcctgggaacagcaggggtaaggtccacaatgctgtgcgtttggcctaatgcagagacactttctgaatattttcccttttgaatctgatttgaaatatgtagcttccctctctagcccaaggaaagacaggaacatagggaaataaaagcatttatctttgttttggaagtaattacgttgtgcagctatttacctat

SEQ ID NO: 8938 - DNA, 493 bp, Canis familiaris
  misc_feature (1)..(493): n = a or c or g or t
gtaaaagccccgttcccctgtgcccgcttcccactcctgcaaggacnnnngtgcttgggtttccgagaaannagcggacacaccggcttgctgccgccgagggctctgcccagctgctgttcctccaagagaaaggagccccgggtacttgggcgtcttttgaggggctgggctctgcagtcctgtgcagtgggtgcagtttgccctggggacggggacagccggcactgcactcgctcccgggccttgctgactccacagacgatggacaaggagctnntctcctgttgcttggcaggttcaagccactcgtttgtgcttaggtgaaaggaccaaccgagtcacatctgggaccactggcgacaccngnnnggggggtgatggggaaggggaaggccgctctgtcccgggccattctcttggcccaggaaggatccttccctcctggggagcccggtctacgcctgcagcggggatgttacactttcatgta

SEQ ID NO: 8939 - DNA, 514 bp, Canis familiaris
  misc_feature (1)..(514): n = a or c or g or t
ccatnnngcttatggagaaggcctannnagtgtgtttccgctcatagccaaaggccagcgnantgccatgtctcaggccatgtaccagctcttcgggctgtttgtcactctgatgtttgcctctgtgggtggggccctcggaggtctcctgctcaagctgccctgcctgggttccccggcagactgccagtgttatgaggaccaggtgtactgggaggtgcctggggagcatgaagatgcagcccagggacccctgaaggcggaagagccagatacccaggcctaacttgcttccagtcctcgagaggacgagaggatgctcttgttttaggagatggtgactggctgccatagggatgttcttttnnagctcctgactctcctgatacaagaaaggctgagagctgcctggggtactgggcacagggcggtggaaggnnnggcgatggggggaagccgcacctggcccaggttggggggagaactcacatcaaccccaccccacccctgggcc

SEQ ID NO: 8940 - DNA, 561 bp, Canis familiaris
  misc_feature (1)..(561): n = a or c or g or t
gagnnngcgaagcaggcttttgctcatgtgtccaagttactgtcacagtgtaaatttgatctgttnnaagaacttgtggccaaagaggtgctacatgtattgaaggaaaaggttacttcactacctgacaaccataaaaatgcccttgctgctgacatagatgaaattgtatacacatcgacaggagacatctccatttactatgatgagaaaggaaggaagtttgttaacatcctgatgtgcttttggtatctaaccagtgccaacatccccagtgaaactttaagtggagccagtgtattccaggttaagttgggggatcagaacgtggaaactaaacagcttcttagtgcaagttatgaatttcagagggagtttacacaaggagtaaagcctgactggaccattgcacggattgaacactcaaagttattagaatgatccttcttggaaaaatcagcttattggacttctggcaattactatgaaaaaattaaggaaagtgatttttggatgagttgatcttcacttagtcaagnnnnnngcttacttttgtattat

SEQ ID NO: 8941 - DNA, 625 bp, Canis familiaris
  misc_feature (1)..(625): n = a or c or g or t
tgtccctggctgccctgcgtgacaaccacacccactccgatatccaggtgaaactcttcgtggtcnctgcnnnnnnggcccaggcccgaatcccatatgcccgtgtcaaccacaacaagtacatggtgaccgaacgtgccacctacatcggaacctccaactggtctggcagctacttcacggagacggcgggcacctcgctgctggtgacacagaacgggcggggtggcctgaggagccagctggaggctgttttcctgagggactgggactccccttacagccacgaccttgacacctcagctgacagcgtgggcaatgcctgtcgcctgctctgagtccccagcccggcagacaggccgaggccttcgaggcccccgtgaggcccagagtcctgggtcctggcccctgtccccgtgtccccgcttctgtgtgccccattgtggctccactggctctcccctgctctcctgcctctacctccacccctgccggcctgatgctgtggccccaggacccagcccagctgggggagggatcagcccccaaagaaatgggggtgcatgctgggcccggccccctggcccacccccctttccagggcaaagagggctcaaggttacaa

SEQ ID NO: 8942 - DNA, 722 bp, Canis familiaris
  misc_feature (1)..(722): n = a or c or g or t
tccctgggtacacaggnnnngtaccccaggcacagttcatctttgccaagaactgcagccannncngggctgaggctctaaatgatttcacacggtggnctgggggacaagnnagtccagagccgccaagggaggccaacggtacaaaagatgtggagaaagaccaagagccaaagctnnagccagagcgagaggcagagaaggagccagagctggggcaagagacagaacaagcttccccctattccatggatgacaaagatcctcgcaagttcttcatgccaggcttcactggttatgtgccccgtgcccgcttcctcttcggctccagctttcctgtgctcaccagccgggcattgcaggaatttggacagatgtactcaggggacagaccccagaaggatcccagccatctccctccactttctaggacctaccctcaggacctgggccttttacctaattatgggggctatgtgccaggatataagttccagttcgggcgcacatatgggcatctcacccatgatgcactaggtctcaccaccctccagaagcagctcctggtgtaggtacctggactccaaagtctctcttctctttcttcctatcccagacatccttttggaaggaagagagctgggcccgagggtggagggggaggcacaaagagaaatggtttggaggccgagcacctttttttattaataggtgtaataaat

SEQ ID NO: 8943 - DNA, 606 bp, Canis familiaris
  misc_feature (1)..(606): n = a or c or g or t
caagggctattccaccgacgtgtgtgtgcccatctcccggctgccggagatcctggtgcaaaccaannangacctgaaggnntcgggactcacaggaaccatcgttggacacgtgggcgacggcaatttccactgcatcctgctggtggacccagaggacaccgaggaggtccgcagggtcatggcctttggagaacagctgggcaggcgggcactggcactccatggcacgtgcaccggggaacatggcattgggctgggcaagcagcagctactccaggaggaggtgggtgctgtgggcatggagaccatgcggcagctgaaggccatgctggatccccaaggcctcatgaacccaggcaaggtgctgtgaggggctcccaggacttggcccacaagctccagacagtggaacctcctgttctagaaccttccttcttgtcacaggacagttctgccttggctcagaactgctgggctccttacctgccttccccttggtctggtcctccctgctgccggggagctgggggcggggggagggaggcaaggcctcagagactcagctcccttagccctactccacctgcctggtgacaggaacat

SEQ ID NO: 8944 - DNA, 610 bp, Canis familiaris
  misc_feature (1)..(610): n = a or c or g or t
gcgaaacttcangnacaagtatcagaaaaaaagatcacctgttatcctgcctgtcagagatnactactataaaaattnnggcttctttccttccagtatttttttctgtgcattgggtgcatgaagtatagatntaataaaaccaaaattaagattgtaatgtatatatggattatatactgcattttaacatgtaatatgaagttgggagcattccatgttgttcaatactgatttcagtgcctgagattatctgtcatctggctgtctaaatcttttatttacgtatttttgaagtataatgtccagctttgtgaaatttctacatgttgcatacacccataagaccactacccaggtggaattacagaatcctgtggtcccttcctgtccataaccttcctgtttgtgagtcgacccctaatttatttacatcctcaccttttactgaacacttgggttgtttccagtcgtttgcccttgtaaatgatgccgctgtcaacttgcccgtatgcacacatttgtctggatctgattgcttgctttggatacatttctagaagttgtgaaatactggggcaaaggatatgaacatatggaaatgatgtca

SEQ ID NO: 8945 - DNA, 206 bp, Canis familiaris
  misc_feature (1)..(206): n = a or c or g or t
gnnnnccgctgggaccctccccggnnnngccccgcgctgcctccctgacacctggnnngtggtcgcnnnnnnnnnacnnnnnnnagatgcctgccccccccgaccccccacgcggggctcctggtccaggcacgtccaggggggtgatgcagcagccccgcgggccggggatcacgcgggactgtttgtgttnactccgtgtccga

SEQ ID NO: 8946 - DNA, 634 bp, Canis familiaris
  misc_feature (1)..(634): n = a or c or g or t
agagaaatctancaagcacgtgnnngactccgctcccagccactccatttccgcccgcaccaagannntcnnnnnnnncagcnnnnnnngccccgctgcctacatgctgcctgtggtaatggggccccacactgtcggcaaggcctcccagccctccttctccatcaagggtcgcagcaagctgggcagcttcagtgatgacctacacaagaccccaggtcctgcggcctaccgccagacggatgtgcaggtgacgaagctcaaggctccacggtacaccatggcagcccgggtggagcccccaggggacaagaccctcaagccaggaccaggagcccacagtcctgagaaggtgacaatgaccaagccaagcgcccccgtcgtcaccttcggcatcaaacattccgactacatgacgcccctggtggtggacgtggagtagccccggccgagcccggcacccagagccttggcacgtcccgctcccgcaacagcagaggccggggtgggccccggaggccgcggcaccccctgcgtggctgggctgtggccgccggggctgcggggcgggacacacttggacaatggggaccggttattttttctactctgctttcgcatgtgctaatcttct

SEQ ID NO: 8947 - DNA, 583 bp, Canis familiaris
  misc_feature (1)..(583): n = a or c or g or t
ctgcnnagcgtggagtgggagaagtcgngcgncacgatcccgcnggtgggccaggacatcatcganctccagactgaggnctgagcaggtnnncggcggccacgcaccgggccacgannagggatgctgctccgcctgcccccgccacaggacgggcacagacatgctctcgggctgcgggccaggcccgcgtcccggcctcagggcgctcggacggcggccggcggaggcccgcagtgctgggaccagagccagacgggacaggaggcaccggcggcccgggtgggcccagggctccagaggcccaagggtgcnnnnnnctctgccctccccgagcgcagcgccgnnnnnnnnncgggcggacagtggccgggccgggggcggccagcacccnnnnnnnnnctgcccgagctgccgcagcagaggaccagcctgcttggcccagctggcctggcaccattttttagacaccccaaccccctgggaagcagccagcgcccccacttccagggcccggggcccctccccagacccaggtggagagcacagccctctctcccacctgtgccgaccccaggggnnn

SEQ ID NO: 8948 - DNA, 661 bp, Canis familiaris
  misc_feature (1)..(661): n = a or c or g or t
tgtgaganngaatcttccacaagcccagcacaagctgccaggnntgagctacttgaagggggnnnnctagctccccatcccatggattttacttcaggtgtttttttggctcctcctcctttctccttgtttttctcggcttcagcctggactcaaagctaaaacctttgtatggtggtggaggctcctccccaaacaaggcatcagggatagagcataatggccatcctctttggtcacctgccccaagaaagcagcagccgctgagcaccttctccctcgaatacttattttctcctcccctccccccataccgaaagtgtgagctctgttcttcttccaactcagtcttaactgataaagtgccaccatcttccctggctcagaacctacatctactcaacattaaatctttaatagcaccaccatcacaccatattcaacacttagcatcacctccaggctgattccccatctgccatgtcatccccaagatggtgcaaggttaaggccagttaacatcctttctgaaatcttcagtggctctctttcagcaaactgaaagcctagactttaaacctgcttctaactcttaggcaggtccttgccccagtcctccctcccataagggcctctgtgacactccatcaaannnnntgca

SEQ ID NO: 8949 - DNA, 516 bp, Canis familiaris
  misc_feature (1)..(516): n = a or c or g or t
aaaaaaattgacataagagcttctggtgcattctacaccaatccgcaataggctcaccttccctccagaagaatctgttgtccctgatcctgctctcctgacctgcttttgaggccnntagagggtgaagccactgatcttcctagacaaatcttcggaatacaaccccagaggctctgtttccacttctacactttttgacatgaaagggctccctgtgatagcatcagcaatcctttgtgtctctttaggagaagtctctggtgctcctaaatttgaatgggctccttaaggttgcacaagcatgatgtctgccccattgccgactgaagaaaaaattcatatcgaaactcttaccacaaacctgacaatgccagaaaaccagagggaggagtgtgtatttgtgtgtttgtgtgagtgtgtgtgtgtgagataaatgacaaagctagctttattgtatctaaacaaaatctttttggccacagtaggaagcacnnnactagttcctgtaggaat

SEQ ID NO: 8950 - DNA, 553 bp, Canis familiaris
  misc_feature (1)..(553): n = a or c or g or t
ggcctcatcctgctcgggggaggagagggctggggaggggagagtcactgcaggtcactgcgggtggctttgccagctcacccacaccctccacctcatcgactcccaggtgcatctcccagccgtgtcgggggtatttgtgaggacacagcttcgcgctcctggttgctctacctccccccgcccccccctcgggacattgcagtgaaggactgactccacatgtcccctccctgcttgctcttttctttctgcctacttgacatcgtgacatctccactgcccctcggggtacaacgcccagggtggactctgggttccccatcctgccctgcctgcagcaccacctgctgccaccactcactcaaggctcagaacagctttcactgcaggcaccggcaagccccagtggctccctgtgcacccaccccaaatatttccagtctgtctcttgacctgtctccgtcccatcctggagggagccacggtctgctctctgggcagccgaaccccgtcctgaacttctttcccannnnntcgctgtctcttcccc

SEQ ID NO: 8951 - DNA, 622 bp, Canis familiaris
  misc_feature (1)..(622): n = a or c or g or t
catcacagtcccataatcaaagcctcannnctctagctgtcagattttttcaagaagagaaagcagaagcntgcagtcntaaccaagtcctcaatgtgaaggcattaacagagaacagtgaacgagcttctatgcagcacagatctggctgtgggccccaagtatcacaccatgggtgccagcagaccttacattcagtcctgcctcacgcctcctccagccccttcagtcagatgggcgttgttgataggaagaccctttcaagcaccctggggctggagtggtttccagagctctatcctggttatcttggactaggagtgttgccagggaagccccagtattggaatgcaatggcccagaagcctcagctcaccaatccccagggagagagactgtcacaaggctggatcaggtgcagcaccaccgtgaggagtggagttgggggcgtcaccatgctcttcacggggtacttcgtcctgtggtgcggctggagtttccggcatctgaagctgcagcgctggcgcaagtgacgacgtggacaccatgtaaggaagctcggaggctgcagggagcgtgcggtagaggcagctgcggtgcatgtttaacaatgtaaaatggt

SEQ ID NO: 8952 - DNA, 594 bp, Canis familiaris
  misc_feature (1)..(594): n = a or c or g or t
tgaagacatgcaccgggacctggtgacgatggtggagcagctggccagattcctgggggtgtcctgtgacaaggcgcagctggaggcnntgagcgagcactgccaccagctagtggaccagtgctgcaacgctgaggccctgcccgtgggccgggagtcgggctgtggaaggacatcttcaccgtctccatgaacgagaagtttgacttggtgtataaacagaagatgggaaagtgtgacctcacgtttgacttttatttataataacagcaacagcaaacttgcatgctcacaatacccagacactctactagctaaaagtcccgtatgcactcatttgttccctgctggacgaactccggaagcagtgaggcccaggggagggagggaagcagccgagacgccggagggagaggggccctgcttccgacccagagcagctgtcttgccttggggattggaagtctccacatgtctgattacaaacgtggtaaagagcgcagttctgatggcccgtatcatcagtataaagtctgtaacatatgcagctagaatgtctaccttttacaaccccacattatttattgtatttta

SEQ ID NO: 8953 - DNA, 613 bp, Canis familiaris
  misc_feature (1)..(613): n = a or c or g or t
tgctgtcagatcaatcactgctgctgctnnnagaatatcatcagcgagtannnnnnntccgannnnnnngtnacgtagatgnnnnnnnnnnngtgnagcnnnnagggagggtnncnnnnnncatgagcagccatgagctgctcctcactgagctcatgtttgacaatgctctgagtgccctgcggccagannagattgcagccctactctccggcctggtctgccagagccctggggaccctggggagcagctcccaagtaccctcaaacagggagtggaacgtgtccgggctgtggccaggcggatcggtgaggtnnaggtggcctgtggcctgaaccagacagtggaggaatttgtcggggagctgaattttgggctggttgaggttgtgtacgagtgggcccgtggcatgcccttttccgagttggcggggctgtcagggacccctgagggcctggtggtccgctgcatccagcgcctggctgagatgtgtcgctcgctgaggggggcagcccgcctggtaggtgagcctgtgctaggtgccaagatggagacggcagctaccctgctacggagggacatcgtctttgctgccagcctgtacactcagtg

SEQ ID NO: 8954 - DNA, 616 bp, Canis familiaris
  misc_feature (1)..(616): n = a or c or g or t
gacacatctccacagnnngtcatgcaaatgcacacaaaggcatgcacnnnnnnaggtctgtgcccctggctggcgtcgtggnntggggtaaagctgccgaagggagactaggaacacaagggaaccctggcacagccnntagcctccaacttaagggcaccaggctcagctgctcccaatgctgctctttatgacctaaaggactaaacaggctctggtctgacagcaagtccaaaaacagttttaaaataaatgtgtaagtttgcttttggtccccaggccaacctgccctgacccattccccactcaaatatttctaggaaagaaaaacctgctcttctgtagaagccctgggcatcccgtaggcccgctgtgcacagctcaaggcaagttccccaatgagaaaacaggcctcagaaatgctgggggacactgcctgctgcctgtacacgatgagcatcaactcaaggggcaccccagcaggcatcacccagaagttcacttaaaatcaaaccctataagggcagctgcgtgccccaccgaccccacccaccagggtcaccctccccaatctccagccttccagctatggcttccttccttctgcagagcttat

SEQ ID NO: 8955 - DNA, 472 bp, Canis familiaris
  misc_feature (1)..(472): n = a or c or g or t
tccaccactgcccctgcntgcagggcagagccacgcgagnnaggctgcagcgccccncgccccccagcctcccgctgccgccgcacctnnagggccaggaggagccgggggcgcaggcgggggaccccacctccgntgtccgcannnnccccgggtcttcccggagagcgtgctgcgatcccgacaggagccagaggggaccgtgtggggacagcgccgtggggggcggcccggggccgggggctgcggtggacgaggcagcgaggcacacggagccgcgcctgtcacaggacccggaacactggagccccagtgggcccaagtgcgtgcgtagccacgtcacgggggacgcccggtgctgccccgacacccgtcacagctgcgaccaagggacgtgcggttccgaggacccacagacgccacacggcgaggccagcgcgcccccannnnnnacacactcggaacttgcggg

SEQ ID NO: 8956 - DNA, 580 bp, Canis familiaris
  misc_feature (1)..(580): n = a or c or g or t
tctgtccaagtggnncanctgaaactcaggnntcctgccntaggcacaggtgtggtctccacagggcagggctatcccanntnnntgggcactccatagtacctacccggtactcaataaatagctcttgcactggtcataatccacctccccctcttcgctggggagcacctgtggctgctctgtgggcacaggcagtcagaggctgggacttctgggcagcccgcttccaccatgaagagatcacctcaagccaccagaggtcttttgctttcccaggagcattagtgggctgcatgtcatggaggagcttcctggcaggaaaagccctctctgccgggtggctggtgccttcaggcttggctggaagagtggcagccgactgcagcaggggagggaaacgacagctggtgatggctccctcaaagtctccggcaccattatcaaatcagcaccataatggcaagaaaaagttatttctattttaaattgtcaatattaatctaatgctcacgatgaatggagtggtgatgataaatggggtgtttaataaagatgaaagctccagcagcctaggaga

SEQ ID NO: 8957 - DNA, 542 bp, Canis familiaris
  misc_feature (1)..(542): n = a or c or g or t
gcattgcaagatcaataaatgaaatgagacaggctctgacggaagacaagnnggtacctggtgtaagacaagaagtcgaggaggcttaccattatgaatacgttcatccccacatgcagtgaaaatnnaaggcgcgatgtgataaaggatcataaaagcaatgcaaacagaagtgctgtgggaatgcatggctggtggcgatctgtctgcgaggatgaaggagccccagatgtgtgcgaagctggcagtataactggagtaaaccaattactgagagccacctggaccgtgaacgttggtgggcttgctccatgcattaggcgacatcccctctccttcagactgggcctttctatgtaaaggtttgaagacctaaatcacaaagattatcagataaaataaatggacatggggattcctcaatgtcttcaagatgaggagcttcaagagaaaggcatcaatcacatgactgtacatcatactctgctggtctaacaggaagagnnactnnnnnnncaacnngggtcnnnantatggttctg

SEQ ID NO: 8958 - DNA, 606 bp, Canis familiaris
  misc_feature (1)..(606): n = a or c or g or t
tnngtactctttgaccacctttgtggtgaccaccatttttcccactccttaccccaaattctagaacttacaggcctattttgcacatgcccaattattgtatcagaaatctctagttcctttatatttttttaaattgaaaatttcagtctaaaacatgatttccttaatcatagtcttccctttatagactattttannnttagaaagcatgcactaatttatttatagactacaaattcaataatcctatgaaatcatgttattaatcatgatgttttgagtagatatagggggacttggtcaaaccagagatggtttttctaataccattctcaatgtggctagattttttttcaaagaagattttatttatttacttatgagaggatcacgacccaagccaaaggtagacgctctaccactgagccctccacatgccccatgatgagattaatatgcagtcttatatagaaactgcagacctctgccgacagaagggacagaatgaggtagaaacctgctatctagtggctcagggacctattagaaactgattccatttaatgtagcaaattaaaaaaaaaaataacagtgcttcagaat

SEQ ID NO: 8959 - DNA, 591 bp, Canis familiaris
  misc_feature (1)..(591): n = a or c or g or t
gagagaaaccccaatgacagctgcctctcccgggcangacgcccagttcctttgggacagcagagccccagccagccctggccccctctaacttgcagctcttgtctggggagctcagaacatctccccagtctcttaaccactcccgctcaaaactggggccccagccccctgaccctggtgaacttctaacatcacccaagggccgaggcctgggcagcccatctgtaacagcccgcgcggtctctaaccacccgcggggacggggtcaacctcccctaatctctaactgctcctgaggccagggctgcctctaaacacctaactgttctggacaggggccccaagggctccccagggctccccagagccccctgggctctctactgctcctagggcagcctgtggccaagtagaccaagtctaccctgggtggagtgtggaccctccaaacgtaacacactctgggggcagctgagcctgaaggcctcccaagtctgtgcctcccaccaccaaagtgggtgctgggccccttccctggggacccacttcctccgtggggaggggcagataacgttgcttattgaatac

SEQ ID NO: 8960 - DNA, 608 bp, Canis familiaris
gccagttctgaaccatttgatcgataccaagtgaactgaagagctttttctgacaccctttcttttcatttgctgtttgccaagtttacttcttcaattatttccttaatgtgacgcgacagttgccttatttacatgtcagctaaccttgcgtccttggaagtgctgtgctgtcacctgccttcacgtgtgactggctggttgctgcagggccgcagccggagagccccggtgcttgaggcagggagggcttccagagtctgaggccagcaggccagcccagccatactgcttccaaaagtctcttctcatcatgagagtttattctgagtccatgtgtctcctcgccctcaccactcccattccgtaggccagcctctgaagatgtagcgtgtgactccgtccataggcaactggttaaatcagttctctcatcttaaataaggagtctgaatgtgctcatgtggaaaggcatccaggaaatggctgggttttttttttaaatgaaaactatttatgcttatatccagagagattgatgtctgggagtgggatgaaggaaggagctttcctatgtacaccttctaccgtttgaattttttaactat

SEQ ID NO: 8961 - DNA, 626 bp, Canis familiaris
  misc_feature (1)..(626): n = a or c or g or t
ccaaaatttcctcaggcacatactgctgtcatcatagacntgcaagcaaaccccctcaaggatgacttggccaacaccttccgtggctttacccagctccagactctgatactgccacaggatgtcagctgtcctggaggtattaatgcctggaatactgtcaccttttatataaacaaccaaatctgccaagggcaaaggaacttttgcaacaccactggggaccaagaaatttgtcctgagaatggatcctgtgtacctgatggacccggtctcttgcaatgtgtctgtgctgatggcttccatggctacaagtgtatgcgccagggttacttctcactgcttatgttcttcggtatcctgggatccaccacattatctatctccattctgctttgggggacccaacgccgaaaagccaaggcttcgtgaaccacataagtcttcatactgacataaagatcttcttgatcttagcccaacccgggagattttacccctagacaaccatggttggcctgcagatcttcctcaagactgaagccacctttgacagaaagatggacggttgcatagccttggggtattgtggacactgcagtccaagaatggactagaatcggtgc

SEQ ID NO: 8962 - DNA, 446 bp, Canis familiaris
ctctgcccctgctgaggtcattgctccggttccgtcttggcggcctggcctgccagaccgccctgctcttccacctggacggcccagggctcaggctgggccccagcgcagccctgagaggggcagccctgctgagcctgtgtctgcagcacttgctggggggcctggttaccaccaccacgttcaccctgatgatgcgctgcagccagctgacacccagtgccctgcaggccacgcactacagcctcctggccactctggagctgctgggaaagctgtttctgggcacgctggccggagccctggctgacagcctggggctgcatctctgcttctccctcttcctcgccctctcaggcttgcccattctgtatctgagcctggctcccagcaccctggcctgagctgggtggccagcctgcctaataaagctgagcgtgcgccta

SEQ ID NO: 8963 - DNA, 558 bp, Canis familiaris
  misc_feature (1)..(558): n = a or c or g or t
taaaactcatagnaccctgattgtgnnatgttctatcatcaataattttgtgtattnngcgaattctatatanntcgtattgagatcagcattcaagacagctctatttctatctgcaaataatnncaaatgagttaaaaaggacatctgaagagaattactaatgtaattgtttaacttatttagcaagggaggttctaaaacattcttttgacctacatccaagtcagtttcatagatttgtagttagaacatcctatgctggttatacttgacatggaatgggtggtaatttgattctttgtgaagcaaagagctaagagatatgtgtctgtatgaaatttatagttacctccaaagagttaatggctctgggtcagtttgaatgtccccaattctatagattcaggactacttttctcaatttatagaaatcgcgaaggaaaagtaaggtatctctttcccctaaggatgaacagaaaagagacttgccaaaaaacaaaatttatcaaatgatgtgttagattggctttgcttctagtgtgtaaatggaagcac

SEQ ID NO: 8964 - DNA, 627 bp, Canis familiaris
  misc_feature (1)..(627): n = a or c or g or t
agctgcaaaatnnnctgtgactatcagagatgancaagtttaaantnnnttcgactggttttatgatctttgagatgaaacttcaaagcaatcatagaaggtatngacttggtgtctttatccctttccaaccccttttcctaaattttatcaccttatatgattacccttgctttccatctccttcatttcctttcacagccaaatatgaacaaacaccatgtgttgggagagaaaaggcaaaaagtggtatgaagagataaaaatggctttggtgagaggtaaaaaaatctagattaatcagcagctgctgcctccatgtcccaaaactcagcgtaaggagccatcagctaggagttagggccagggctatatctcagcaactgcaaagtcggcgttcctttttctatctttgttaaaaaacatattaaaatgcaacaccttccgattagtttgcaagaacaagttgactcctatcaggaaagacagagaaccaccagcacaattccaataaggacctctgcataaaaatgggacccaaaaataagtatacggattccacaggcagaggccagcaataccctttcttcattcaaaccatgtttccagtaaacagaatctcgtcag

SEQ ID NO: 8965 - DNA, 626 bp, Canis familiaris
  misc_feature (1)..(626): n = a or c or g or t
ttttattttttttaannnnncaaaaacaaaaacctgcactaatttacctggtttcgtangagaacttttttttttattttttacattttttggtgtccgtttgtattgaataatttgctacatttgtaaaatgtaagaggtatatataatatatgtatatttctaacgtaaaaaacgtaatttttttcttttcaagattttttcttaaaaagaggagagaaacagatattttttcaggaaaaacaaactttaaaataaaaaaagaggagaattaaacctatttctcccctttccccatcctctctgtctgcccctctttcccaggaacaaatcaaaaaaggtggatcatcttgtaaagaatgtaaacttttagtccagaatgatgtatttttctcaatgcagtgagctatagattctctagttgacccctcgggatgggaaggagggcattgaggcaacgtggagaggagcttgggggagcagggtaatgaacttgttttctttagtgaaggaggaatacaatcgagcgttttgtattcagaatgttgtgcaatattttggaatgggacattggtgtgtttagagatttagtttaaaaacaaaacaaaaagattgatcaaatctgt

SEQ ID NO: 8966 - DNA, 528 bp, Canis familiaris
  misc_feature (1)..(528): n = a or c or g or t
acccccaagcagagnntactgacagccatccatgtggtgctaacagagcacgacccttttaaacgcagtgcagactcagagttgaaggccttggtgtgcatggcactgaatgagcagcgtcttgtgtcctgggtgaacctaatctgcaagtcaggatcactcatcgagccccactaccagccctggagctacatggcacacacaggcttcgagagcgccctcaacctgctcagtcgcctcagtagcctcaagttcagcctccctgtggatctggctgtgcgccagctcaagaacatcaaagatgccttttgatgagactgtcctggccctacaccagcaccttcttcagtagagtaggggtagatggttagtcttctaggataggaacaaagagtaggaggaggggttaannnnaatttccnnngccaaatgactacaaagtttgttttccccatcaactgagcatctcagagatgctggagaccctcttgttcaaaggttccacnnnnnnntataacacatgggcac

SEQ ID NO: 8967 - DNA, 603 bp, Canis familiaris
  misc_feature (1)..(603): n = a or c or g or t
caggangagtgatgtggttttngataagggtggtaaatctcgtgaaaaagtggtgaagctattagcatccacaactgctgaagagatcttggagaaattaaagcaacaagtcgagaagaaataaaagcaagttatgagaaatacattcttgagaagctttttaaattgctattagtgaagaggctgttaagtaggaaaatatatttcagtgcatggaagaatatgaaaaaaaaattaagaataggactcaaaaaagaagcaggaattttaaaagtacttctgttcaattcaggttctaacatccctgaccccagagaggttggaacattagtccaatctcatcgcgctacacaggaacagctggaagggatctttaagcccctttcatcctgtggtggggcttccagaagttgagagacttgttcaggatcacatcgtacaggatggcagctagaaccaagaccctttgactcctggctgaatgcagtttatcctgattgtaaatgaagattatttccacagcacttccagtgttctgaggattcccttctctagagtttacaagtgacagaagaaaacccgtcacactgttttgtggtctta

SEQ ID NO: 8968 - DNA, 311 bp, Canis familiaris
  misc_feature (1)..(311): n = a or c or g or t
ccattcagttgngatntgtttccagaatcagggggaatntccgtatttattattgcnnntgcnnnncctttcccctttcatccttatctcgttgtnnttagaggagacccccagccaggaaccagcctccagaagctaannncgaacctgaacctccctcggcttccccttggcttccaggggaaagttcactgaaaaactaccttctggccccttgtttatgcagagataacaacttagcgggacaggggtggggggatcttttttgtaccaaagctgcttctgaagcagaaagcagcagggctctcagt

SEQ ID NO: 8969 - DNA, 581 bp, Canis familiaris
tgttactgcaataaacaactagtgttgtgccgtgccatttttttcttcgtttgaaaaataataatctacagacgttaccacctatgataggtgtgaagtagcatctcgctatcttttttaacatgctgactcagcaattctgtatattaggcattgctcaccacaataagtacagtcaccatctgtcacttacattaatgcaatattcttgattgtgttccctatgctgtacttttcatctctgccactgataattggaagcttatacctctcgacccctttatttctttcactcatctccccactcacttcctctttggccagcagcacttctgtatttaagactctgttttttaattccacgtataagtgaaatcatacagtatttgtctttctctgacttatttcacttagcataatccatgttgtcacaaatgaccagactgtggtcattttttcttacgactgagtaatgctgcagtgtgtggtatacacaagcgcatgtgtcttggggcggggggggggatgtttttatatgtgccacatctttatccattcatctatggagggacacttgggtt

SEQ ID NO: 8970 - DNA, 546 bp, Canis familiaris
  misc_feature (1)..(546): n = a or c or g or t
caaatgctgatttgttcctgtgtttgaaagaatgtgatnnactttcaggggctatagctaaaagtgaatgtttnnnnaggggtcccccagaagcagagggaaacattgactttttgagctcactgtcaactcataccagttagggtccagaaccaatctccagccaaatacttatttggatataggccctaaaagtccntcttaaaaaccagatcatgaatctgaggctcttggttccctttgagaaggaaggaacaacttccaagataagtgtgcatctatgcacacattcaggaatggcttgcttgtttagtctttctactttgtgtgcctggggggtcttggccctgcatgtcagcagcagacacttcccatctgctgtcagctgcacaggatcaaatgtgcctcggcttatgtggaaaacagctcagaaacacaaaacccaccaaaagctcaaatattttttcaatgttttcctacaagagccaagtagcaccatgtacagaatatgccttttttttttggaaatattgaaattgctctgca

SEQ ID NO: 8971 - DNA, 654 bp, Canis familiaris
  misc_feature (1)..(654): n = a or c or g or t
attctgntatatnatgcatccagctggtgtgtnnatcaaaacactttatatgctctcannnnnnanttcatttttcatataatttggggacagtcaacntagataanttttatgtgaaacaaagactcaccaacattttgtaccttcctggcatccgattagtaaggtagttcttattaactcttgctgtctttcacagctcatttgactaaattttattaaaactgctgtctatagcttcccatgagcaggttttcttagcatagaagtcctgtagacaaaatgaaactacaaatgacatgtctttgtaacttacgtgctcagctaaactgacatcaaatattaataccagcaatttaatcttcagtggacttttaggacaaatacttgcgattgtaccatttgaagcttttttattttgatggtgaaatacatttaacaaactttgccattgtaaccatttttgagtgtacaattcagtagcataaattactttcatagtgttgcgcaaccatcactcctctatttccaaaactttgtcatcaccccaaacatgaactctataaccattaagcaataattcttcattcccccctccctctcccaattcttagtgtgctccaggcttctttctgtgtctacgaatttgcctat

SEQ ID NO: 8972 - DNA, 518 bp, Canis familiaris
  misc_feature (1)..(518): n = a or c or g or t
ttcagggcnngactttttgtacaaattttaactataaagtacagatttgtcttatatgtctncatgaaaatgtaaatcanngctgctagtgctttttattttaattatcctgctaagggtatatgtcaatggtgtttaaaactagatttctcatttaaattattggtgaaataattgattgctagacatattgtaaaaccaatagatcttggttatgcagtaaaatgtcagttcgttggtagcctgaatcagttatttcaagtgtaccttattaacagaggattaagcataaaattttatagtactaaatgtcaagcctaactgtgaattttgttnngtatcttgagtaaatttaagataatgttctcatgagctatcaacaaaatatatgtacttttgtgaactatgaattttctaattaaattttacatgcgacaacatgatttttacatgaatgatactttgtttaaactatcaaatgtcagtattttactacaattttattataaaatgtacat

SEQ ID NO: 8973 - DNA, 552 bp, Canis familiaris
  misc_feature (1)..(552): n = a or c or g or t
atcatttagatgcatggnaaaatgggctttgcacacaatgggtttnnngctgactgggaacaatggaaaaaaaaataacattagctgtggttgtanngtcccccccccccctttttttttaccatcttgtgaaaggtttctgaaactcgataataaaaagcagttggtataaattattctttgtgtcacatttttagaaggaagaacatactttgaactgtaaaatgtatccttaaactggagaatgtatccttcattctggttcttaagcagcccttaaaaacccattggcctgaagcttatgcctcaggtatgtgcccattttatagtcttaaaaggcataaagaaagtttgatatgttggtagaaacaggctttattggcttcaattgatgcttgtacagtcaaggacatctgagttctgtaactcataagttatgatcctgagcgttggggccaggttaacctagcctctgtatctccccacaactacccccttttaaaaataaggtaacagcaaatcaatattagaaccannnntgcatagaacctg

SEQ ID NO: 8974 - DNA, 642 bp, Canis familiaris
  misc_feature (1)..(642): n = a or c or g or t
aaattttcattacaatgttttatgctttcttaaaattatcactgtgctgcgagcttnntattttcatataaaatcattgttaatgctatactttatataagaaagtnnatcttgaacactgttgttnaacagtattaaatttaaatttacctttgttttgttatgcttctctttggtagaaaagagaaacgtttaaacttataattattaagaagcagtcacatatttcaactttatagaaatagaagaagggagattccaactgcccttccatccccaaaaatggactgcacttacggaaaattcttagcatttatgcctaaaataataaaccaaattccgtagtagtttttctactacatattacagccatttatctgggtgaaaagaagggtgaattgaaactttctctatactcaagtggtaaagaagcatttatcctttatttaagcaaaacatatagtagcaactgaaaagcacttggctagaaattatgttttcagtgtttctgaaagcaaatagtctaaatctgtgttaaattttctaacatatacatttacttccttatgtgtgtgcacattttttaaaaagataatcaaatattacatgtttgccaccttccatataatagacatttgattt

SEQ ID NO: 8975 - DNA, 632 bp, Canis familiaris
  misc_feature (1)..(632): n = a or c or g or t
gtattttagtgnnngatatgtataatgctnnnnattttaaaggggtttnctcaaaagttgaaacttttgttatgactgcatttctgcacataatccatacttgctgttgaaattaatctagaaatttattcatttgtactgtgaacacctggaagcaaaatcatagtgcaaaatacatttaaagtgtgttcaagaatatgtnctgaattggtaaataacaagcattaattttttatagtctgcattccaaattttgcagtaccttattctgtgttatatacctaaaaaattgtaaaggtggtgtcactgtataaaataaaaagggcaaggacaaatccaacttaattactaaaatgcaattcttgacattctgtatgattagaatccatacccctcccccccttttttttttaggtctcctaatagttaggccaggggctggagtagggagggaaattaggtacgaaggtgcaaagaaagaattagtttggaacttttgagatgatccctaacatactgtagtagtactacttgcttttacaatgtgttagcagaaccgatgagttataaacgtagaatgatgtgctttctgccaagtggtaattcaccttggtttgctatgttaaaactgt

SEQ ID NO: 8976 - DNA, 629 bp, Canis familiaris
  misc_feature (1)..(629): n = a or c or g or t
catggtnnttgggttccngcaggtgatgtgcacagactgtgaaaaatcatttacagacaaaaaaaaaaatacagtattttaatggtcacttgccttctgttgatgtgattttttttgttgctattaaatcagaagtagtattgtccacacaagtctctatctagtgttacttttaatgggaatctgaatgtttattgaacactagtacttgaatgagcgtttctaagtgtaattattataattactagttaagaatgttttataacatccatatgtattattttttaatgatcaaaatgtagtttgctttttcatttcttaatgaatgaatgtttgggatttttattttctacttttctgaagataagccctaggtcttactgtattccttataacctgaatttgtttgcactggttcatttttaaagaaaatccttgaaaaactccccccacccccccttgatactcactggtaacggctttttctataagtcattgcaaaattgctgctactaagagatcatgatggaggggaaattattggagatcaaatatgtaatcatttcatatgtaaaatccagtttactcatggattttagctattttttcactgggcaaatcctacattt

SEQ ID NO: 8977 - DNA, 540 bp, Canis familiaris
tcatgcagatgacttcagacctgattaatgcgaatatagagagacctgtcaacatagacatgtcctgccttggtgcagcttcactagctggccttgctattgggttttggactgacaaggaggaactaaagaaactgaggcaaagcgaagtggtttttgagccacagaagaaatggcaagaatatgaaatgagtatggaaaactgggtcaaagcagtgaaacgctccatgaattggtataacaagatgtagcactaacaggaatgacggaaaccatatatggctggttgatgggacatgctgatgagacacagctcagggataataaccaatatgacgatgactaagaagatttcagatgagctttgcaacctgagagaaaaaacattgctcttttgaatacaaaacaaaacaaaaaatccctaatttttaaatctaaagcctggtaagattataaggcaacagtacctcagaactttatatcttctgttttgtagcagattccaaaggatgttaaccatttccagccatactttgacag

SEQ ID NO: 8978 - DNA, 707 bp, Canis familiaris
  misc_feature (1)..(707): n = a or c or g or t
atcacaaaagctcaaacatacagagacangcatatgcatacacacacagagatgcacacatacgtgtcacacaggnnnnncagatgannncntctgtatcagttatgttggttgctgtgtnctgaattagnnctaaaatgacaccagactttctccacttggnntctgcagctcctgggcctgacccttccctttgagtgctgtccatgtggctcctagggcctgttctaaacaacacactgtttcctgcctgcttgtggggggtgggggtggggcggtttggggtggacagggctgatgcttcatgagcacagagtgctttataaatagcgtctgcttttactgagactatgttcacttccattgaggaaaaggcctcgcagcaaaggaggagcaagccagtggggacttgggttcactgtggggtttggtgttcttgcccccaggggtgaccttgagaaggaggaggcaggactggagggagcctgctggggcgggggggagagcttgcacagagggcaggtacaggtgcagagagagaccacagtgaggccccccatagccccgcaggagggcagggagcaactggggccagtttgggggggagggggcagggctatgggggcgtgaagctctgttgccgtaatcttcgctctcagactttgtgcagacaacagcattctcgctgtcatgcagctcattctcat

SEQ ID NO: 8979 - DNA, 669 bp, Canis familiaris
  misc_feature (1)..(669): n = a or c or g or t
catgnangagaaatttccctaactgtccctcctcacatctgcccctctccctgtcatcattccccaaacatcctaagggtattctgtgaagatcccggggactgacctcttggtctctcatctggctgtaccaggtgaaggcaaaattgacaagaaaaagtctttgtaaagacagtacgataacactacctttgccctgagtctggatggatccagtcagtctcagattcacaatatttagaagtttaggtaaagctgcttgttttcttttaaaagttttgtttatgacttatggtgatggaaaatttcttcccagttaaatggcattttataatactatgtgtgtagtgtttcagtgttaaagatactcccataccatcttccatttgatcccatcagaaagaaaatgtacttcagccagtactctgggtgcaataaaccatgcttatgaagtgtcccagtgtccacacgtgcagtgtttctgtggaatgttaagggtatacacttgtactttatgtaaagtggtccttgttctccataaatgtgacatgaaataattgtgcttttactgcacaccgggagttaacgggtggggaagagatgtagtttggctcctgtgaggtcccgctagtggtattacaagtggttataactgagcttttggtgccc

SEQ ID NO: 8980 - DNA, 539 bp, Canis familiaris
  misc_feature (1)..(539): n = a or c or g or t
atcacagctgtgctttttgttcatcacttgctgtgttaccttgaggaagtcacttaacctctctgggcccttattgcttcacttatggttattttgagattgtgtgtgtgagagagagagagagaaaagtttttatactctgaaaggtaaagtgttttaaattgctaacacttacttcatgcctaatatgtgccctgtctttttcttaatctcattttaaagggatccttttgctttcccatcctcttggatctatcatttaatgactttgccacctgttggacttctaggcatcttggaaacttaaaggcaagtcaatttggttcaacctgtatggatggtaacctggatatttatctttaaaaatgacctataaaaatactctgacttagtaattccccatgtagggatttatcttccaaatacactgcacatatgtgagctatggataaacaaggttattcannnnnnncnnnnnngataacaaccccacctggaatccacctgtaggcctattcactggggactgactgactgaa

SEQ ID NO: 8981 - DNA, 544 bp, Canis familiaris
  misc_feature (1)..(544): n = a or c or g or t
gnnnnnnnnntgnnnnnnnntctgctgtttcactgctgtgtgcttccacccacgccgnnagtcccacnggnctagaacccggctctgagggcactggnntagttcccatctngnnntcagcttcaacaactggttgctgggcccnnnnngatagccatgggagaaatnnngacaccccaagcccagggaagggctctgaccagaggaactggccactcaagatcaacgttgcttattttcnncaggnntaggctccaccaacctgggataggagatggtggaatcctctttgcctttcttagatctgagtagactgggaaaggaaagctctctggctcctggtggatcctggggtcctaaagccactcacccagtcccaataaacacttggacccatctatagttgccacttcctctgctccttcctcactgttttcnnncatcccagannnncncccaagggacctctcatctgccctggtttttagtctttttctccaggtnnnnnnnctttttctccagccnnnnnnngagttggaagaga

SEQ ID NO: 8982 - DNA, 620 bp, Canis familiaris
  misc_feature (1)..(620): n = a or c or g or t
aagctgcggcaccaggacgtggtcaactcggtggncttcagcccccaagagcaggagctcctgctgacggctagtgatgatgccaccatcaaagcctggcgttcaccacgcattgtgcgcattcaccaggccccgcgtccgcgtccccatcactttttctcctggtttgccagccagaggcgttgagggggggccactggccaaaaggagtgtcctgggcatccttgggctgccgggacccgcggaagatgccacagaggtctgcagccctttcccaagggcccagccactgcccagactgcgtgctgggtggagaaactcgttgacagtcatgccttagcagggggactacggggctgccggtagggcacagtctgccccccaccacgctcaccccccccacagcccccgcagctgtgacattcagcactggcgcagccccctggctggcttggatgcaacagacactggggccccactcttcacgcaccctcttcccctggggcctgcgccccggtcagcaccacacgtaccctccagttggccccaggtggcctctcctctgggaacttgtttgcacaccagcagggccggcagcacaagtcagtctgccacgggcc

SEQ ID NO: 8983 - DNA, 530 bp, Canis familiaris
  misc_feature (1)..(530): n = a or c or g or t
atagatgaagactcaaaaatacntaaaattaattttaaatttactactnngagcattggtaatggtngaatatttcttaaaagcaaaataattgatcacatcccatatagaaaaattgtagtgcctttgtggttgggatagttcttaaaattatgtatctaacttaaagcacagaatcatctgtaaggtcttgaatctggctaaaatatagtagatgtgtatattaaaattatgaggcataattgacctatgtccacagttagaatctattaggcctcccttttacatgagtatactggaatgtaacagtacttggtgccttcaaggttacctctgcagtggtttagaggtgctgtttcaagcacaatttaagagtagggttgaaccactcattgctcaaatcattggtacattcagatatggtaaaatgttactccagtccacaagcagcagcaaggtttagatctaccaaaggaaatggaattacattttttttagagtataatgatgcatgttggtatcattgagta

SEQ ID NO: 8984 - DNA, 505 bp, Canis familiaris
aaaaagaaccctactgaaaccctagatgacaaaaggcatgccttctgttgctccatttgacctaccacaggattcactggactggactttatttatattgtattaagttactgatacataaatatatatattatttttttttgattgacgccaaaaaatgaccttagcacaaacgccagacctgtataggtcggaggcctgctgcttctcccaggagagagggaactttttggttgtctgtggcaattcctctgtacagattgtaactttttttttttttaatttctcccctcccctgtcactttaatatatatgttcatggtaatttgtaaaatatttcttttccttattttggttgcgaagacccttccgaacacattcctgtataaagtattttgcactatttaaagaaccccatatggatgaagtcaggttgtgcaatataaatggagagtcacaatgttcatcattgtacctgtaatgtaactaataattttaaatgtac

SEQ ID NO: 8985 - DNA, 527 bp, Canis familiaris
  misc_feature (1)..(527): n = a or c or g or t
tccatgtgatnngcatttattcatctttattagcaaggtttaaaagataaacaaattattaagactcttccatcttnnagccacactatgtattttgacagagtatgtgaagaggagacccaatttccaaatgaaggaatngcgnnttttttctgtcatgtcgcaaagctgataaactgtgtaggtgacattccttcccttaatatgccttttggctttgtatattttgaaagagataatatcttttgaggaatgtgtgtcaaacagaaaccttgacatggatttggtttcagtggttttaaggcttaatgaatgaaatacctttatcagctttccaaacttttttatatatgaacacaacagaccaagnagctggatctcctgctatactcacatgnntgctacctatcaactaaagctatcatcactgacttgggaaaaatggcaaaagatcgaataaattctttgtgtgaannngccagtagggtctgacatctactaacaagnnnnctgactagcacctcagt

SEQ ID NO: 8986 - DNA, 639 bp, Canis familiaris
  misc_feature (1)..(639): n = a or c or g or t
ggactacatnnaccccatgaacgagtnnnatgccctanncgaggccnngcagatgatcgccatcgccgatgagaaccagaacnnnnnnctagagcctgannaggtcctcaagtacagcgagtncttcacaggcagcaaactgatggactatgcccggaatgtgcacgaggagtnnnnagcccaccccacctgccacctgccctgcacacctcggccccctggtgcctcctaaaagccccccttcctgtggccccgacagctgtggctccaggcttactgaagatgtgcttgaacgggcccaaatccccgaggtgcagttgtgggctggccaccctccatgcatggagtcccacaggactgtgcaggtcacttctgagaactgactgcatcaaggcgctgcagcctcaccatatctgtggggagtaacgcagttcctgccgtttccttgaagaccaagaagtgatcatagtattagaatgagctctgctgagagctcttggccggcctctggggggtgcctgccccttcccggggtgctggggaggggccgccacaatgtttagtctccgaaaacacaaacgcttgtgacgagaatctcattaatgtactttaaattacanntgcttttttctcctagct

SEQ ID NO: 8987 - DNA, 488 bp, Canis familiaris
  misc_feature (1)..(488): n = a or c or g or t
ttgcctgtctactcagccaccttngacatagctgtgtcctctccctgagaccccaggtcccagtaggagccctgagagggagcagagctgctatgtgatgtggttgacgaccatgcctcttggcttggccagctgccatccccctctcaaggatggatgtccaggtctgaccaccaacctttgtgcattgatttcatttgacacctgcgatgacagggccatcatccttcctgtcctgccccaaggtctcctgagtccacacaccacagcaagcactggtgtgaggggtgtcattgtccaataccaaggccaaggggtgagtgtagaggcagcagagaaaactgcaatgttacaccccatctcacctgtcccccaccccctgtcctgtgggggtggcagccctaaccctcccacagtggtgaatgggccagtgagcccaaaggctggagggacccccatatgtcatgttactaactacagtctgtgtc

SEQ ID NO: 8988 - DNA, 449 bp, Canis familiaris
  misc_feature (1)..(449): n = a or c or g or t
caaanacaaaatnactaagaatttcaggacagcaagggcagagcattggatccgagagcaggggcccccttaggagccatggagtcctgtgcgactgcactggtcacctgagcacgaagccggccctccctgcccaggggaccccacctgcagccctctcctccaccctcgagaccttcatccccagcttctggaaggcagagtttaacagcatccatnnccatgggagagaaaacaaaaggagtgaaaccggaagctggtannnnnnnnnacagaggaggcaacacttggtgtggggggtacggggcagacacagaacacaggccacagatacagccaccagaacaaacaaagccttccccacaagcgaaatgatgtcctattgctgttttttttcccccaacaaaactcttactttgattttctnnagactgtcnnctgacattcaa

SEQ ID NO: 8989 - DNA, 592 bp, Canis familiaris
  misc_feature (1)..(592): n = a or c or g or t
cgttttgccaaanngcgcnactggnaccatnnnntttcggcccaaatccttaatgttaaaagctaaaaggctgtctggaaccccccactcctctcaggctggactcccaccctccacaccccacacagctctggcatgtgagccccacggtgatgcttgagaatgtgcggctgtgctgggggcgcctctgatagccgcctgcctgccccagagccgacagcaaaggtccggcccccgccccgcccgccccgccccgcccggctacacccctcggcacccctcacagggcccgagcctctgccccccgcccaggcccttcgccgtagatcagaggtcggggcagggcttgctgccaagtagcccagacccaggggaagcgggacgtgcccctggcccagtgccagcgtcctcgccccggagagaggcgctctggcccgggccgtcccggaataagcccacggagcggcccgggcggccggagcaggctctgccgagggcatgcgtccccggggcaggcggccgaggctccgcaggccgcagtgacgctggccgtgctcccccgcgcnntgtgctgtgtccctagtgctccccc

SEQ ID NO: 8990 - DNA, 629 bp, Canis familiaris
  misc_feature (1)..(629): n = a or c or g or t
cactcnnntcaccatcaagaagtaccnnnnngtgnagtttgagtacctgtnntactgcctgaaggtgaannaaatggatgacgaggagtacagctgcatcgccctgggggagcccctgtacngcgtgagcactggcaactatgagtatcgcctgatccnnngctgtcgccaggaggcccgtgcccgcttctcccagatgcgcaaggatgtgctggagaagatggagttgctggaccagaagcatgtccaggacatcgtgttccagctgcagcgcttcgtgtccaccatgtccaagtactacaacgactgctacgcggtgctgcgtgatgccgatgtcttccccatcgaggtggacctggcccacaccacgctggcctacggcctcagccaggatgagttcaccgacggggaggacgaagaggatgaagatgacgaggacacagctactggggagccgtccagagatgcacgaggggctgccgggcccctggacaagggtgggagctggtgtgactcctgagtgccccatggggtgcggatctggggggtagggtgagtgggaggacagagcatgggagctggggcggggccgctgcagaacagggtggcgcataaaggcctgnnncnnn

SEQ ID NO: 8991 - DNA, 639 bp, Canis familiaris
  misc_feature (1)..(639): n = a or c or g or t
cacgtttatcacagtcgcgcccgaggctccaaacngcgctcccgccccctttcgtcacttcctcccttgcccctgtgcagtcgataannaaacccgnacgcccttccggctttcctttttccaggcggccgggaagatggcagacattcagaccgagcgtgcctaccaaaagcagccaaccatctttcaaaataagaagagggtcctacttggagaaactggcaaggagaagctcccgcggtactacaaaaacatcggtctgggcttcaagacgcccaaggaggccattgagggcacctatattgacaagaaatgcccctttactggcaatgtctccatccgagggcggattttgtctggtgtggtgaccaaaatgaagatgcagaggactattgtcatccgccgagactacctccactacatccgaaagtacaaccgctttgagaaacgccacaagaacatgtcggtgcacttgtctccttgcttcagggatgtccagatcggcgacattgtcacagtgggtgagtgccgccctttgagcaagactgtgcgtttcaacgtgctcaaagtcacaaaagctgctggcacgaagaagcagttccagaagttttgaggcaagacttctgtctacacccctga

SEQ ID NO: 8992 - DNA, 517 bp, Canis familiaris
  misc_feature (1)..(517): n = a or c or g or t
ctatgctgnnnnncaatgtaagctnnngctacagggtattaagggtacaattgatcatgcagcagcttttggaagaattgccttttcttgcccccaaaaagagttaccagacttagaagacttgataaaaagggaaaaccagaagattctgactcccctggtgagtctggataccccagggaaagcaacagtacaagtgatcattctggctgaccctgatggacatgaaatttgctttgtaggggatgaagcatttcgagaactttctaagatggatccagagggaagcagattgttggatgatgcaatggcggcagataaaagtgacgaatggttcactaaacaaaataaatccaaggcttcgggataacagaagacatgatgtggaacagcatttgtgattcctgtgtagcacctgcaagccctgatgtgtctgtgcatgataaatgttctcacaacttggttgtttcctgtataggcaaggggggtgtggtggtaaagatctgtgtgttatact

SEQ ID NO: 8993 - DNA, 657 bp, Canis familiaris
  misc_feature (1)..(657): n = a or c or g or t
gatggatccctgcagagacctgcccagtcagggatccccacccnngtggtgggctccctcagacacaatcccaccatggtcgttcggnctcagcagttccagttccaccagccacagggggtcccctcctcaccttcaacagtggtggcagagctgggacctaagcccactcccactggagagcctgccctcacgtgcgtcagcaggggcagcgacaccaggatccgctcagcagccagttccctcatcatggaaggcaaggaaatccccatcaagagtgagcctccacctaaaccacctgcatctgccccaccatcaatcctggtgaaaccagaaaactcaagaaacggcattgaaaagcaagtcaaaaccgtgagatttcagaattacagccctcctcctgccaagcagtacacctcccatcccacctcaggaaagcctgaacagcctgccaccctgaaggggtcccagcctgaagcagccccctcaggcccagagatgaccgtcctattcgcccaccgaagcggctgccattctggacagcaaacagacctccgaaggaagtcaagtttgggcaagaccatgaccccggtgcccgctgcctcggccatacagaccgtgttccccagcaaatgaatctacaggtggcttttctca

SEQ ID NO: 8994 - DNA, 486 bp, Canis familiaris
  misc_feature (1)..(486): n = a or c or g or t
acggctatggannattccaaatgaggagaacannnnnncctggggatacactaggtttctgtgctttttctcttgagtnctgccccagggggaagtaaatttgacancttgccagtaataaaattataatagagctgtgtgataaaaactccttctgcacaaggccagtgccatagnnngtgtcccttcatgcctttcgattcagagtgagtaggaggaaaagcaaacattgaaaaagtgcttcagccaaattccatatgtaatgccattgggagagtattgactaaagtaattgcagtcagggaaatatagttgtaatatttttacaagattttcctaagtaaatgaaggagccttcagttctgtaaatnnnnnnnngccccannnnnntatttgctacattttgctgttgtttgaagtattacctcttaaccttttgttaattttttttcattttgnnntatatagtccagttttccaagataa

SEQ ID NO: 8995 - DNA, 533 bp, Canis familiaris
  misc_feature (1)..(533): n = a or c or g or t
aatattgannggtcagactnntagactccannngagaccaacactctcaggcctggtgcagttaaangcannngacacagtgactacatgcagacagtctggtaactgaagaatcagaaccataaatgcacaaggattgacgaagtacatttattttatgagaaatacctagacttggntatcaggaaaaattcacctaggacttagcagcagttctttgcattcatatgataatttgcattttacaaattctttggtataatatgatcactcccttgggctttaaaacaggtacagagggggtggtatcatccttgttttgagactcagagtgtggccagaagttgcacagcattggagtcagggcctgaactctctctgcggatcactgccagccgccagctctgggagaccacgaggacgttaggggagtatggggttagtcacaactcaacttttaaagtgacagggaaatatatcaaaaataaattttaaagtaagattttgaatttttaaagaacaactttactact

SEQ ID NO: 8996 - DNA, 605 bp, Canis familiaris
  misc_feature (1)..(605): n = a or c or g or t
actccggaannnatttgtgtggccactntaaaaaactgtgtgtttggtcacttatttctctaaaattatctcattgcctggcaatcagtcttctctcgtatacttgtcctagcacattatgtacccgggaaatgtaaacagatgtgaaggaggaccagaaaaattagttaatattaaaaaaatatattgtgcgttttggcttcacatgtttaactttttttaagaaaaaaaagttgcatgaatggaaaaaaaaatctgtatacagtatctgtaaaattgtctttacctgtttcaatttcttgctcataccccattcagactagaattaaatatggtgcatggccatattctaacacctaagagtcaagcagttgatactttggtttgaagcacctcatcctttctttccaagcgaacactatcatattgcattcttactgaggattttgtccaaccatatgttgccatgaattaactctaccacctttcttctcaagaatcaaaaccaatttgatttgggaatcttcccctttccaaatgaaatagagatgcagtacttaactttccttggtgtttgtagatattgccttgtgtattccatttaa

SEQ ID NO: 8997 - DNA, 538 bp, Canis familiaris
  misc_feature (1)..(538): n = a or c or g or t
aggctgccctacccacatgcgattgacagagggcctgggcagggccnnngagaggcagaccccaaggggcnaggnctcagacgcgtctccgagagcagggctggccactagctgggcatgtacctgctaccagactcttgccaccatctgagcaggcctgagacttcattgcagacccttctgcccgctggggctgcggcagctcagcttccagcacggacaggacatatgatgctaactgctgcccatcatgacactctgaactctcagtgtggcgcagaaggatgccagccacgtggtcacttgcaaggacatcagtgggacctccagcagactcgtgatgttcatcccccagcttcagaggccctttgagagcccacacttcacatggactgaagtagacccttgcatgaagacagagttacgtggaggaccacccctcccctctcctcccagacaagaaaaggagtcattaaacactggggatttggatacagttactagggagaagggagagttttggaggggaggaaaacag

SEQ ID NO: 8998 - DNA, 613 bp, Canis familiaris
  misc_feature (1)..(613): n = a or c or g or t
aagatccaaacccagacntccgccgcagagacaaagtgattgtgtgaaaccgncccgctcagggataaccaggggcactcacctgtttcctgggacatgttgtgtctccactcatgtccccagagagttagaaacctgctcatgccatcgtgtcagtagagatcattcacgtattaatactgtgctctctttaggcccaatgaggcaaaattattgagaagaatctaagaaaccagtgagggtagtttcagttaaaacctggaaaataggaggcttagccttgtcatgacagctgcgcctccctacaacgtacatggtgtatgagtgccactatttgaaatggcttttattttcatgtcttcaaaaatcttagaagaggtgatggacttgaagattcaggatatgaaggtcaggggcttgtgttgtctactgacccgttctacaacgttaaagtaatattcttgcagaggattggcgggctcctgatggcttactaaaagtaaattataaagtgaaatctgtttttttttttttaaatcttccattctaacctcagaagtttgtgtgtctagaagaagtgatcatctctggctctaataaaatgtcccataaa

SEQ ID NO: 8999 - DNA, 199 bp, Canis familiaris
  misc_feature (1)..(199): n = a or c or g or t
gtgtctatnnctgctttgtgagctacatcagagtaattatgacagtgactgtatggnnngcaaagnntaatatatttaccgcctggctatttttacaggttttccaacctggccttaagataagtagttatgcattttttttaaaaaagattgtttgtttgtttgtttgtttatttaatttattcatgaggcatagaga

SEQ ID NO: 9000 - DNA, 441 bp, Canis familiaris
  misc_feature (1)..(441): n = a or c or g or t
gcaccagcactgccaccagcaccagcacctccaccagcaccaccagcagcaccagnnncgccannagcactagcaccagcanngccaccagcaccagcagcagcaccagcaccgccaccagcactgccaccagcaccagcaccagcaccagcaccctggcagccgaagccaccgggccttcaccccgcactgaagcatcaccacgccctccctggggagacaggatgagcaggggcttgctcctccagaaagggccggctcagtcggcaaactccatactccgggagggcagaaggctgttctgccgccagccaatcctgtttcaaatcttgctcttgcatgagttggcaggccgatctgggcagcccttaggacccctatgaacctccactgatccaccaagaagacaaccctttctagggtcagtctagaaaggcctgt

SEQ ID NO: 9001 - DNA, 532 bp, Canis familiaris
  misc_feature (1)..(532): n = a or c or g or t
cataaatnnntcacatctgcagagttgtgnnnnnnntcgctactttttaannnnnnncntatgccatnncagcagatatttatncncttaatgcacttcaggttcagtatctataaagcctttgacccaggcctnntgagtcaagtcaacattcaccgtaacattaaaggtagaaaccaaagggtttgagaaagatgaatgaagcccattctccttctgtcgcagactttatccttcaaaatcacaagaatgagcaatggtgatccagtctgggtatagacaagaataattattttgcaatcacattctcctgacagatttttggaagtgggaaaaaaaaaaagtgtggcaacagtgtcatgaagataaaaaccgtgggtgctttgtgtatgtgtgcatgagtgcagacgagtttgagagagaaacagtgtaattgagcccgccgcttttgtcagcctgggaaacagatgcactcttatttttcgaggttgtatgacccctgactgtcccacagcagaaggcagagcaaaca

SEQ ID NO: 9002 - DNA, 242 bp, Canis familiaris
  misc_feature (1)..(242): n = a or c or g or t
ggtgggtcacgctgggcacaggggctgnnncttggaggacatccctgttgnnnnnnnnnnnntgtgtgnnnnnnnngttacagggtaaaccagcctctggnnnnnnnnntnnnnnnnnnntggtaggttgagtactacctcggtactactgacattcgaacccagttctttgttgtggggctgtcctatgcgctgtcagatgtttgaggcatccctagccactacccancagatgccagtac

SEQ ID NO: 9003 - DNA, 603 bp, Canis familiaris
  misc_feature (1)..(603): n = a or c or g or t
gcgcccctgtgctgctgctcgtgcnnatttttagtgaatctaattccattaatgctccaagcattcccaaaaggcgtgcactcttatgtttatgtattgactcctatgtaaaaggagtacttggtgggtttatacattactgattaatgtgttcttaaatttttagagcactttattcaaaatgtttaacgtttgttactgtaattttaaatgtttcaccagttttcgtcgtgcagacaacgtcactgcagagatggtcaatgttcccaaaacccgaaggactttctgtaagaagtgtggaaagcatcagcctcacaaagtgacccagtataagaagggcaaggattccctttatgcccagggaaagaggcgctatgatcggaagcagagtggctatggtgggcagacaaagccaattttccggaagaaggctaaaaccacaaagaagattgtgctgaggcttgaatgcgttgaacctaactgcaggtccaagaggatgctggccattaagagatgcaagcatttcgaactgggaggagataagaagagaaaaggccaagtgatccagttctaagctttgcgattttgagaggaaaatgttga

SEQ ID NO: 9004 - DNA, 616 bp, Canis familiaris
  misc_feature (1)..(616): n = a or c or g or t
acaatcaaagcnntcatccccgccattgactcttnnngctttgagactgannnannnnnnnnnnnnnnnnnnnnnnnnnnnnnnnnnnnngncnncnnnnnnnnnnnnannnnnnnnggtgatnnnnnggacaagagcatngtcattcgcccccnnnngccacagnntgctcctcannnngnccgggaattcatgatcaaaacccgtcgcaggaagggcctgagtgaggatgtaagcatcagcaagtncttcgatgatcccatgttgctggagctcgccaagcaggatgttgtactcaattaccccatgtgagtgctgggactcctggcagcccctgctccctgcagcaggctgtatcctggacttaaagctgggacctggtgtgacccggactcccatgttgtcagcgagcgtctgagagctgctatggccatttttaacaaccccaagccctccgacccagagtcccagcaagggaggaatatttggcctcctggttcctcnnnnncctctgcctggctccattcccagggaacagagtggagcttgggctcagaagaagtggacgaagtgtnnnccccaaggggccctgtcttcaggatttacgtggaatttt

SEQ ID NO: 9005 - DNA, 585 bp, Canis familiaris
  misc_feature (1)..(585): n = a or c or g or t
aattcacattcnntgacnncgtgnnnnngggagccagggatctcatttcaagactgttgaaacataatcccagccaaaggccaactctcaaggatgtacttgaacacccgtggatcatgccanntcatcaaaaccatcaagtagccaaaaaaacaaagactcaactagcaaacagtcttaaggattgtgcaggaggagaaatctgagaggcagagctgctgctgatactgctgacggcctgcccgtgacggaggacgctgcagacaaaggcctactgcgccaggtggcgcctcggcctccccacttgagtctacttaagtgaacagtacgctctggagtgaaagtagccacaggaattgtggcagtgtcactagtttcacaatttggaggtgaggttcacctggacctccccacagcctgtttcgagtcaggcttccttgtggaagacccactccaggtcctactgcagggagagtggccacctcgccatgactccatcagtgaaagaggcgtgcaataaccttccaagtacctacgtgtgtgtgtaacttattgggtggccaaatctggtaaagctgtcaggat

SEQ ID NO: 9006 - DNA, 541 bp, Canis familiaris
  misc_feature (1)..(541): n = a or c or g or t
ctctagctacagtggctgtacagcaaggtangagagctgactatgtgcagggtcagaagggatggttggactngaactaaaaattggccacagaggtgactgtaccgacgtatgatcagagacttggttttggttacagattgtgaaggaggcttacccagaccacacacagtttgagaaaaacaatccctattatgacccatccagcaaagaagacaaccccaagtggtccatggtggatgtacagtttgttcggctgatgaagcgttacattaccctgactgagctcaaagccaatcaccaagcccacaaagccactggaggccccttaaagaatatggctctgttcactcaccccagactctccgttcagcccctgaccccagaggagtttgagtttattttgagcctggaggagaaggagccaagttaactgggaccctgtggctggaacgggcaagacaggactccaaagaaagcagcttttagaagacaaaagaaggtgtgcggcgccttgctcgtcggttcccctggggctgtg

SEQ ID NO: 9007 - DNA, 476 bp, Canis familiaris
  misc_feature (1)..(476): n = a or c or g or t
ccccccacccacccccacccagttttcagcagcactgtttatgcgatggagtctgtgttnnncaaatgcgtggcaatcctcaggtggaaagtgggtaggaatttttacaacaggtttctttttcttttttaatttattggacataaagccccaaaccaggatatgtgtgtgtctgtgttttttttttttttccctcattggaccctccccctctttcaatctacccccttttatatctaatgtagagaaagcaaatttgaatctggaaagcaaaccattgtatatagttgcggtaacaatcatgaagagagttgagttgtcccctcagtaattcgttttaagcaaaaattggttgacaatgaagtccatggcaggccagctgaagaggccttcctccatcactgccagaggcccctcttatctgggccctctgttccatcaggcatgtctcctcccggcaagattcatctgttcga

SEQ ID NO: 9008 - DNA, 439 bp, Canis familiaris
  misc_feature (1)..(439): n = a or c or g or t
ctctggtntctcccccttcanngcctctgccagttncagggccttccccaagttcccctctcccaggtcctcctgcagtggtgaggctggaggcagggactggggagaggcgagggtctcnnaggccaaagcagagnnngnngnnnggggtgccagggaagaggaaggagtttnnnnatcnagggcnnctnnnnnnggangagaaggaggctgtgaatctggaggggaagctggggtacaggccagggcttgaggatccagtggtgatgcaagggctgagtccaaagatggagactctggggcctttggggctggctgtggatagaaatgagctcagnnaattattnnnctctcatgctgtcccccatttgggcaacatcccccaagatctatcnnnnntgcttatgtgccaggccctggtccaggggttttntatata

SEQ ID NO: 9009 - DNA, 514 bp, Canis familiaris
  misc_feature (1)..(514): n = a or c or g or t
cgctcgcaaggnnactccttcttcaccgacaccgaggagaccaaggctgccatcaaagactatgctgattctaattgcttgaaaacaagtggcatcaaaagccaagactgtcacagtcagagtcgaacgagcctccaaagttctcatctatgggaatttgtgcgagacctgcttctatctcccgaagaaaactgtggcatcctggaatgggaagatagggaacaaggtatttttcgggtggtaaaatcagaagccctggcaaagatgtggggacaaaggaagaaaaatgacagaatgacgtatgaaaagttgagcagagccctgaggtactactacaaaacgggaattttggaacgggtcgaccgaaggctagtgtacaaatttnnnaaatgcacacgggtggcaggaagacaagctatgatctgctccagcaccgagctcctcttacagatgtcttgtcttctaggccatcnnnnnnnaatagacatttgaaagtctttttttgctgttgttg

SEQ ID NO: 9010 - DNA, 667 bp, Canis familiaris
  misc_feature (1)..(667): n = a or c or g or t
atgatcagcangcagttccatnnncagctgcgnntnnnnnngnnnnagcccttgttgggtccccntgagtccatgagagaacacnnngntgctgnntccaaggctatgaagatnngcgannngaagacctgtcacagttttatcatcaatgaaaagatgaatggcaaagtgtgggaccttttccctgaggctgacaaagtccgaaccatgctggttaggaagatccaggaagaatcactgcgaacctacctcttcacctatagcagtgtctatgactccatcagcatggagactctatctgacatgtttgaactggacctgcccactgtacactccatcatcagcaagatgatcattaatgaggagttgatggcctctctggaccagccaacgcagactgtggtgatgcaccgcaccgagcccactgcccaacagaacctggccctgcagctggctgagaagctgggcagcttggtggaaaataatgagagggtgtttgaccacaagcagggtacctatggtggctacttccgagaccagaaggacggctaccgcaagaacgagggctacatgcgtcggggcgggtaccgccagcagcagtctcagacagcctactaatggcctcgcttctgtgcctctggcccagaccattcagcctttaagtcgt

SEQ ID NO: 9011 - DNA, 600 bp, Canis familiaris
  misc_feature (1)..(600): n = a or c or g or t
tccagagctcaaggnnaaccnnnncaannagcgaatctgcagggncntctccacatcccccgccagggacagcctgagtttcgaggacttcctggacctcctcagtgtgttcagtgacacagcaactccagacatcaagtcccactatgccttccgcatcttcgactttgatgatgatggaaccttgaaccgagaagacctgagtcagctcgtgaactgcctcacaggacagggcgaggacacacgacttagtgcctcagagatgaagcagctcattgacaacatcctggaagagtccgacattgaccgggatggcaccatcaacctctcagagttccaacacgtcatctcccgttcgccggacttcgccagctcctttaagattgtcctgtgacaggagccgtggcgtgtgtcccagcaagcaccctgtcagagagccttcccactgctgagctgtggccgaggtcatgcctgtgttgccagggccggccaagctggcctagcccagagctggcactgtgtggtcctgctccaggcaggggaaggccctccatgctggtgcctctctccttctgtcattgtcatcgctgtnngtgttct

SEQ ID NO: 9012 - DNA, 544 bp, Canis familiaris
  misc_feature (1)..(544): n = a or c or g or t
atttaagaagctgtacaagtatanncagagttnnnnnnntgtttacatttnnntttttnnggtttgttnnnggaaaaaattggtaggtgtctaattactgtttacttcattgttatattgcagtaaaagttttaaaaccaccattgcatgtttgcttttgatgtatccctttgtgaaattagcactttggggccaatggagaaatgcagcattcactatccctctcttccccttccctctgcagaaatgtgtttgtcaataagtcgtgagttcaaattgctgccttttttttaaacccacaaaaatgctgattcagttcaaaattaatgcaaatgtttcaaaactgggtttctgatatttgtaagtgtttttccttattagataagaatgtatgaccattaaagtcattaggattatattactttcaaaaagagaaggtggacaaaagtataatccagcatcttttattgcattggaaaggctggtggaatcttctggaaaggttgggagatgcagctggaaaagtactttggaaaatatacaa

SEQ ID NO: 9013 - DNA, 513 bp, Canis familiaris
ttgagtttttttgccaacaactgaagccagcattttgcggccagtttttctcctctataaaaggaaggaattcagttactctaagattttaagcttgagtaggttttcttgtgattagtttttaatatagctctgtgtccctaagtcctaggaaatctcagcagacaaaatgtcactggcagattgcagcaaaggagaaggaagggcaatgtagtgttggggattgattgctgtcagttcaaaagggaggtaaaggttacctccctttagaggtgggaggtttgtaacaacaaaaggccagaactgagtgtaatctgtttgcacgtgtgttgcaggccctggccaacgtgaacattgggagcctcatctgcaatgtaggagctggtggacctgccccagcagctggcgctgcgccagcaggaggtcctgctccttccaccgctgctgccccagctgaggagaaaaaagtggaagccaagaaagaagaatctgaggagtctgatgatgacatgg

SEQ ID NO: 9014 - DNA, 579 bp, Canis familiaris
  misc_feature (1)..(579): n = a or c or g or t
actgatgagagaagctcagacatgagggggtacatagtcttcctccaatgcatacacataatctttgttagtattaaagaatattaagtataaataccaagaattaaatatataatttgctccaataagagtttggtacattaaaattatattttgtttcacttcatgatttttgtttcactacaaataatgcaaacaattttcaataaaaaagatattgttcatgtgtacttctaaattcatattgtcaatatttcttagtgttgtgtctgaataattgtctaaactctattgaagctatagaaattgccaagtctaataggctgggacacctttggcttgaaaattagcatgtgccagcatgactctaaaaggcaagaggccatcaaacatgttaagtgttatgtttttattatctttatttagattatcatttgaatttatgttctggaggaggggaatccaatatataataaaattataatgtaaaaatataaggacatngaaaaaagaaaactggcaatttagtttgattacctactttttcttttaaaagataatttgaaatagttacagcat

SEQ ID NO: 9015 - DNA, 308 bp, Canis familiaris
  misc_feature (1)..(308): n = a or c or g or t
angtcagcgtgtgacatcatcgccacgggcctcctgtctgtgtggtgtgagcgtggactgtgcgnnnnnnntagtgcatntnnaagcatctccttacactggcagccagagttgttacaagtacctctgtgggagatcatttggtgctaaaacattaaaattgccaaggaggaaaatactgaattactactaagaattaaccttaagactagttgataattaatacaggtttacagttcatgcctgtggttttgtgtttgttgttttgtgtttttttttttttagtgcaaaaggtttaaatttatagt

SEQ ID NO: 9016 - DNA, 688 bp, Canis familiaris
  misc_feature (1)..(688): n = a or c or g or t
tggacgagtgtgggatcatggactcccagttcaccgtcatcctgcctgccctgggccactgctcccagctcacgaccttcagcttctgtggaaaccccatctccatggatgtcctggagaacctgctgcgccacaccattgggctgcgcaagctgagtcatgtgttgtatccggcccccctggagagttatgaggatgtccgtggcaccctccacctgggcagactggcccacctgcatgccaggctgaagcagatgctgcaggagttggggcggcctggcatggtctggttcagtgccaacccctgccctcgctgtggtgacaggaccttctatgacccagagcccattctgtgcccctgttatatgcctgcctagctgaatacatgtatcattggctttactctgaggacttggacactgaagcctaggcatacgtctatgttacaagagcacagaagccacagtttgagaaattcttcctgatgtgagcagaaaaaggaaaggtgattcagaggggggggatgttgacttgggagttcataggatctttggggagatgcatcttatagtgttagaattatgaatctgaatttctagagggagattcaagtttgggaggtagatgtaggagttatccctgcatagatggttgtaaaaacatggtcagaaataaagagaacctcann

SEQ ID NO: 9017 - DNA, 598 bp, Canis familiaris
  misc_feature (1)..(598): n = a or c or g or t
catcagatccatnaccaatagatgtaattgatgatgatatatgcaagaaatcttgtagtgtagcanntaatgatattcnactgatttctagtnntaatctaattaatgaaatgaatggagttagtgaaacattaccagccacagagagcattgtggaaatagtaaaacaggaggtgttgccattgactcttgaattggagattctggaaaatgctccagaggaaatgcaagtggagtgtgtcccagctcccattaccccttccacagttccttccttttctccatctcctccaactcctccagctcctcctcctcccacaccagccattgttcctgctgctgccactaatattggtactgctggtgttcccaccacagtccagagggtcttagaagaggatgagagcttaagaacttgccttagtgaagatgcaaaagagattcagaacaaaatagaggtagaagcagacgggcaaacagaagagattttggatgctcagaacctaagttcaagaaagagccccagcccagaaacatcaaatgaatgctgacagtcgtagtctgatttcttcaatggtgtgtttatgttttagtgcag

SEQ ID NO: 9018 - DNA, 494 bp, Canis familiaris
  misc_feature (1)..(494): n = a or c or g or t
agaagacagaaaatggggcatcggcatgagcccccctgcagttgggctgggggtgnnnngcccctcaagggcctggaggtgggagtgggaacagacgagtgcagccactcttcacctggctcctggctctggacactgcaccagagctgccaccctctttgcccccagcctttctcatgtccgcctctccagacactgccccttccatccttactctgccattgttccacctcccgacctgctccatctgagctccccagctggtccctaattgctcctttccctgtctttactctcctcctctctccccattccctctggtagcctcttcctcctcacatctgcatcccagcctcatgtcctgtccatccctaccctgcctgatccctgggtctccctcagatcccctcctctcagacagcgccaggccggggtggggccagggttggggccgagccccacagctgcccccctcccctcccctttttgtataa

SEQ ID NO: 9019 - DNA, 529 bp, Canis familiaris
  misc_feature (1)..(529): n = a or c or g or t
ctgaagatcagcagtatcagtggctagnnnaggnctnnnnnnnntgtccaaagaagaatatgcaagtaantattctcacgtgtcgacatgttactgactataaaacttcagaatctaccagcagccttcattctcctttcctgaaagccctaaaaacacagaatttcaaagagcctccatgctgtccactgcttgaacaaccaaatattgtacatgatcttcctgcagcagttctgagttactgccaagtgtggaagatccctgcagttctgtacttgtgttacactgatgtgatgaagttagacctgatcacagtggaagctttcaggcctatcctttcttccagaagcttgaaaggtttggttaagaatattccccagagcacagaaatattgaagaaattgatgacaacaaatgagattcagagtaacatttacacatgattccaaagattgctttgtatcaagtgtgttattacctatgcattccttcaagggaagcagcagtatggttttgttggttacttttt

SEQ ID NO: 9020 - DNA, 551 bp, Canis familiaris
tagtccaagaagctcctatgcaagcagaagtacaaaatcctgttttgctacctccagtgaatatccagtttttgagagatttccttcatatgacacaggatatataccatatggttcactgggccatgagggccttaattcattttcctccctggcatttgatgatagcgggatgggcaactacatatctgttacaacttcaagtaagattgctaatggtagaaatacaaatacacagagcattattgagaatgatcaagaaagagaagttgttgaagatgacggtgagttgaagtccttctttataaatggtgtggcagatgaagagggctttgaagaagaatgcacttggagaagacagtcattcaacaattattcaccaaagtcctatagccccaaacatgcaactcaatatacttttgtggacagtgatgagcaagatattccttgggtcaccagcaactggaatccctctattttctcagcaggattcaaagaacgtggcaagagaaaaaaaaagaagcataaagaggtacagaagaagtcaacca

SEQ ID NO: 9021 - DNA, 620 bp, Canis familiaris
  misc_feature (1)..(620): n = a or c or g or t
aagcnncgttgcgctgcgccccagccgagctgctgtnnntcccannnngagggcatcggctcacgcnnncngacgacgagctgtatcagcggacgcgcatctccctgctgcagcgcgagtccccgcagtccatgtatatcgacagctacagcagccgcggcttcatggtcaatggaaatcgcgtccttgggccctgcgcgctgctcccgcactcggtggtgcagtggaacgtaggaactcaccgggacatcatcgaagaaagcttctcgctcttctggttgctggagccccgaatagagattgttgtggtgggcaccggagaccggactgaacggctgcagccccaggtgctgcaagccctgaagcagcggggcatcgcggtggaagtacaggatacgcccaatgcctgtgccactttcaacttcctgtgtcatgaaggccgagtaacaggagctgctcttattcctccacctggagggactatgctcacatctttggcacaagctccagagtgaaccagcaagaactgacctaacctgtccaggaaggccctggcactttttccagagcgcaggggtttgcagcgctcactagcccttccccctttggcactgtaactc

SEQ ID NO: 9022 - DNA, 623 bp, Canis familiaris
  misc_feature (1)..(623): n = a or c or g or t
tgacaaaggtcatatcatagtagatgaattccagaataccagcgtgaanggcatctatgcagnnnnnnnngtgtgtngaaaagctcttctcactccagtngcnnnngctgnnnnnnnaaaacttgcccatagactttttgaatgcaaagaagattccaaatnagactatgacaacatccccacagtnntcttcagccaccccccgattgggacagtgggactcacagaagatgaggccatttataaatatggaaaagaaaatgtgaagacctattcaaccacctttaccccaatgtatcatgcagttaccaaaaggaaaacaaaatgtgtgatgaaaatggtttgtgccaccatggaggaaaaggtggttgggatccatatgcaaggaattgggtgtgatgaaatgctgcagggttttgctgttgcggtaaaaatgggagcgaccaaagctgactttgacaacacagttgctattcaccctacctcttccgaagaactggtcacacttcgttgaaaacccagagacttgtatggccagcagctggaccagtagacctaaaacgaaccaaataacatgttttctcactgttcccattttatgtatctctttattgtaatcagaa

SEQ ID NO: 9023 - DNA, 635 bp, Canis familiaris
gcaacatggaaggatattcccaatgaaaatgaacttcagtttcagattaaggaatgtcatttaaatgctgacactgtttccagcaaattacagaacaacaacgtttatactattgccaaaaggaatgtggaagggcaggacatgctgtaccaatccctgaagctcactaatggtatctggattttggctgtactacgtatccagccaggaaacccaaattatacgctgtcgctgaagtgtagagctcctgaagtctctcagtatatctatcaggtctacgacagcattttgaaaaactaacagacgggtctggtgccctccagccaccccgcgatcggtgcaagccaagaattcttaactggaagaaatcgtcttgcctcatagaatctgaacccaaacacactgaggccacccaccaaggtagtgactagtctaacctgtgctaacattagggcacaagctgtggatagttttagcttcctgtgaacgtttgtaaccactgcttctgtcacttcccacctcctgccccctgccgctgctctgtccttacctgtgagcttcttcataacctgccggtggctggcatttctgagagtagtttcagattttgtcattgagagctcatttcaaaagca

SEQ ID NO: 9024 - DNA, 629 bp, Canis familiaris
  misc_feature (1)..(629): n = a or c or g or t
atannnacacagaaggtatagtagatttgaatgaaatgatcatggttttgnctctatgcccacntgatcaaaaagatgccaagannactctgatcagagagagaacaacagatcgttatctccccgtgtttgaaaaagtgttaaagagccatggacaagactaccttgttggcaacaagctgagcagggctgacattcacctggttgaacttctctactatgtggaagagcttgactccagccttctggccaacttccctctgctgaaggccctgaaaaccagagtcagcaatctccccaccgtgaagaagtttctgcagcctggcagcccaaggaagcctcccttggatgagaaaagtttagagcaagcgaagaagattttcaggattaactgaacaggaatggatgcccagcacatgcagggccaatctcctgagatgaaatgtgttacctaaatccaaatcctggctattacaaggctaggatacttctcaaaaatttaaaatctaatttcattacaaattcactatgcatatttagttgcaaagcaattcattttgttttgattaaatatcaaatcatgatcacctcctggggtttctcttggtctcaaaaatagataaaaggag

SEQ ID NO: 9025 - DNA, 488 bp, Canis familiaris
  misc_feature (1)..(488): n = a or c or g or t
cnnaagcagagaagagggactgctcacaaacctatgtgctttcatttctctctttagtccccagccacgagagccgagagtttcaggaacaacaataccagggaaatctttggactggtgtccatgccaggtgaatagagtttaacataaagaacaagtgtctcctttgggctttaaactatttatatatctaatccaaattcctgctatcaaaaaaaaaatcattggacacagaggaaaatcacattgatcccatttggcctcagggctctttgccattgtgtgggtagtgtgtgcgggtgttctcttctgcaagacctgcagaacggtgtgcagcaggccgtgtgaacctgtctccggtctcctgggggttcaggaaaggtgctgccctgggaaggctcttgaggccaccggggtccttacatcccaccacagggagcagagtgcatgtttcccctccgacaggcgtagaaatgaatgtttgggga

SEQ ID NO: 9026 - DNA, 424 bp, Canis familiaris
  misc_feature (1)..(424): n = a or c or g or t
ctccccatacgcatctctgcnagtgctnnngatgacatcgcggcatgnntgaacacgaatgacnnntcacnnnnnnnnaaactgtnnngtcccatgaaactgcccnncccctatgtgtccctgcctggtcctgtttccatctcgnnngnaccatacaaggacacagcactctggcagccccaaattcctgcagagacgagggccctgcaggcagttggcagaagaggccggcgaggattcctgtcccagctccggaagcttctctcttgtagtaataaagcttgtctgtgggcgcttgtcttgtgtgagtngaggggaggtgtcatgtccagttgggagttctttccagccacaacctcccacttcctcccccaagaaaaggctgccggttcaaggcccaccccnnaggctctaatccaaattt

SEQ ID NO: 9027 - DNA, 590 bp, Canis familiaris
  misc_feature (1)..(590): n = a or c or g or t
tggggaacgtgagttctnnnagctcctccgagcccctgacaccccgctcctagaaggtattgctgaatacacccccaagaacggagaaaccatcgagctgaggctggttagctggtagcccctgggctcacctgcccacagcctggcctactccctgggcttctgccttccctccagacatcgctgtaacaggcacacacccaactctgctgctacctcatgtgtacttggagcagtgtcccctggattacccacctatcaccttcacagatgtcctcagccatcatccaccctggatcagggaaccaagcaccttccctgggaagggtgccttctcaagtctggctcagcctggccacacaggcatcccctgaaggccactcatagtctgaagggtctaaagcagactcctcgacacaaggagaagtcaccggctactagtgttgtgagtaccgccccatatgggattggggtcctgcgaggagacctctgtggcccaggggctgtggccctgaccccagctctgtccctggccttcagggaagtggccccagtcctggtcgtggcatagtggctggggagggctctgc

SEQ ID NO: 9028 - DNA, 342 bp, Canis familiaris
  misc_feature (1)..(342): n = a or c or g or t
agtatacattnnngttacgtcacggctttaacatctccatctcgcncgcgaatgcttagcgtgacnangacgtcgccgtctacaaaggacctggatgtttccaatgtnacaacagaagctgacactttgggaactcagccagggacgcctacaaaaaaaaaaaattttttttttaaaattacaatcgaaaaacaaaacaaaaaaaagttctttatgtgccatacgacggatggctctactggaggaaagaaagagtctgtgtgggcttttacccagcatacggagctgtaatccagagagaaggaaaagtaggannnnnntattaaaagagctgnnnntgta

SEQ ID NO: 9029 - DNA, 570 bp, Canis familiaris
  misc_feature (1)..(570): n = a or c or g or t
tattcactctgtattcccaactttgtatttttgnngagttttgatcatattttccctgtctatgggnnnacaacaggaatagtgaaggaactataatgctctctttaaatctcacatctcttaaaattaatcatgccttggaacgcctgggtggctcagtggttgagcatctgcctttggctcaggtcagatcccggagtcctggagtcctgggatcaagtcctgcatcaggctccctgcggggaagctgcttctctttctgcctatgtctctgcctctctgtgtgtgtgtctctcatgaataaataaataaaatcttaaaaaaaattaatcatgcattaaaatgtgattagtcatcagtgattatatttcacccattcaattgtttttttttttcctcaaagtgtagtaatttcttaatcatttgatatgggggggaggttagggtctttgctgtatgaatgctgctactcctgtacaaatcaatcttgacagcttattttaaaatttattggtattgacaatgagttttgnnnntactgattttcagttttngaaatctctagtattt

SEQ ID NO: 9030 - DNA, 628 bp, Canis familiaris
  misc_feature (1)..(628): n = a or c or g or t
gccactcaccnctgtccgcactanagtngagagggatgaattttgcccccagatttgaaaccaactggtatctcccaggatgtcactctcccagnnagcagatattagcctgtggaatgctgggaaaaccacaggtctattttgcggtgatgacatacttgccaacacaaaactgggcagccagctagcacgctgtatggaaattgagcaagattttctattttagcctcatgttgcatcgctgtggctgatgaacgtgttaaatctgctcggagaaaggacaaaaattctttgaaaattgtctccacagtgtgggtgtatgtgtgtggctgcatgtgtgtttttgtgtctctgtatagttagagatgttcattccatattctgactgtaagatgattttatgtcatctctgcccccacacagttgtcattctgtaatgtcattccaacatggagaagacttgagccctgcagttggcactcttgtctttttttattacctcattctccagtgaactccatccgaccagttgatgcagaatcaggcgagattccctccctttggcacatccagtgaaaggccaaatggcaaggccaagtgagttctaaattttannnaatcacccttt

SEQ ID NO: 9031 - DNA, 566 bp, Canis familiaris
  misc_feature (1)..(566): n = a or c or g or t
tctctgtnnagttgttcatgtcgtgccatnnnaggggaacattctgtggcttctgacgtgtactgtggagcatgactaggaatgagcaggatctgcatgtgctttgtnnaaaggacccgcacagccagtgtgccccgccgcccatcacgatgaggctgctgatgtaaattacactaatacgggcgataacagtaacctcgcgtgcaaactgtgctctcaatgctgggcaccaaagtcggcctcagtgtggcacagcgcacaacctgacgtgtgcggctcactggattctgatacatgtgtgtgctgtgccagccactctctgaagacaccaccgctgtgacctctagctctgggcccaccttccagcaggtggaccgcccagtggaaggccactgaatgtcgtgcaaatgaaatcccacagaacgtactctttcacatctggcttcctcactgagtcacttgacacactggaagactttgtctttttctttgccatgtagcatttcttcatattcatacattgcacttcgtttctgtgtcctccaagatgggcattctggcnnntc

SEQ ID NO: 9032 - DNA, 574 bp, Canis familiaris
  misc_feature (1)..(574): n = a or c or g or t
attcccaccacatgcacaagctgccatncagcagcctcaaaatgggtcagtattaagggtttcaacccaaaggaggtcaacgagcctggcagtgccaaccctgcctccaccctgagggacggacaaagaagtggagaccgtcctttccctaccattcctgcccttaagccaaagaaacaagctgtgcagacgtggcctcttaagaccagcactgtgggaatcaagctagaaggggcctggggtcatgcagatggacactgagtttggcaaagatgcccctccaaagagaggcaggatgcccagatgaactgaccgaaagaaaagcatgagacggtttcatgcttgggaggcagagacaggagaggcagcatgcttgggctgatccagcatctctcccaaggcttctagaagtctttggagctgccatggagaggtttgtaaccaggcactgcatcctgtcccatctggggactgcactacccagagctgtgccagcaggggggctgtgccaccctgtgcctagagtgtagctgtcagggcagggcccacgtgtacaggatctgtatataaactt

SEQ ID NO: 9033 - DNA, 480 bp, Canis familiaris
  misc_feature (1)..(480): n = a or c or g or t
gtggtnncaggatctaccccctccctgggtgcaggagctcagaatttnnnnntggcannnnnggcccannntnntaagaatggaaaacaatccttggcatctggcccctgaggcgtgcaaggtccttgacaatcaagcattattatcctctctgcctcacccagtgcagaggnnaaaccgaggcaggtggggnctcngnnnaaaccaagaacctgaatcggcccctggcagattccagcggtcctcgtgtctagtgcaggaatgtcagtgcagcgacagccaccagggcggagcctgggtcagccctggcagggcaggcgggagcggagaccaggaccagagagtgcagtggtttgcccaaagccacccagtgcgccgcagcagagcctcttattgcctctacagactcatctctagggccccctcttctaggaaggctcacgcccccctgagaccctgtgccccttaagactttaccac

SEQ ID NO: 9034 - DNA, 632 bp, Canis familiaris
  misc_feature (1)..(632): n = a or c or g or t
gacntagnccaaaaatngctgacttttgtttaaaaatgcaacttaagactatggttgaccatcttcactgagtttttatttttacaaagggcttgtgtgtcttacctgcagagtcctttgctttggacaatagtttgcttgtgtaagtgaaacagaagagaatggccacagttcatagaagtgtttaataataatattaacgcaaatgagtacccacacattttacaggctcacagttttggtctccaccttctgcctttaacagatttggagacgattttcctgcagagatctcttgggcagctgctatttgatttggctcattcttttggcagaggtcatggatcagggctaggggagggatgagagttgaggaacagtgaacctcttcctatcacaattagaaacaaagcaaaacttgtgcttcctggtcactacacttattttggaaaaataaattagcagcatgctgaccaatgattagccttaagatactgtcagagcgggcagccccgggtggctcagcggtttagcgctgcctttagcccagggtctgatcctggagacccgggatcgagtcccacatcaggtgccctgtatggagcctgcctctctctctgccnnnnnnctgc

SEQ ID NO: 9035 - DNA, 608 bp, Canis familiaris
aaaatgtgaaattcccataaagtacccaacttacatgattaaacaggataattttttttttaaaagagtgatagaaaataagccattttgttatagtgcattttaggaagtctgcagtaaagtaactgtcatcactactaaaccaaaattgttttttactgcatggttatgttttttccccttatttttcagaggtaaattttactttatgtccttcagtattttaacactattttgggagtttacatattgctttttatttttgcttccattttatgaaatgtattaagttcttattcaaacagtattatataatattttgttgaatgatatcatgtggtgatgctcagttttattttgatttattcattagtatcattcaccttttaaagtttacttgtagcaaatgtttacattgctaaagccagatgtttgacaatgaaatttatatcgagtactgcaaataaaaaggtggtgctatgataaatgcttagaaggacagtttgatgattgtacttgcatgaacacaatcatatgataaaacaaacttaaaaaaattgtttatatgttatattcaattaaataaattgctctgttccattttattt

SEQ ID NO: 9036 - DNA, 565 bp, Canis familiaris
  misc_feature (1)..(565): n = a or c or g or t
tttacacgcgcacaccaacnttatatttggacttcaaattggaccaaggagccaagcattcccagcctattcctaaaggatggacaagcttcatttataccatatctggaaatgtgtatattgggcctgatgatgcgcaacaaaaaatagaacctcatcacacagcagtgctgggggaaggtgacagtgtccaggtggagaacaaggatcctgagagaagccacttcgtgctaattgctggggagccattaagagaaccggttgtccaacacggtccatttgtgatgaacaccaacgaagagatttctcaggctattcttgatttcagaaatgcgaaaaatgggtttgaaagagccaaaacctggaaatcaaagattggaaactagagcacaagaacagatctcatgctttttagagttttgccagttgtggcatcgtccattcagcacattgagtttccaaagctgactgagccggtgcttccaaagcattccacactaaagtgataacatgtgataacgtgcatttgtagcaaggcacatgagatatttcctggtgcgtgcaa

SEQ ID NO: 9037 - DNA, 524 bp, Canis familiaris
  misc_feature (1)..(524): n = a or c or g or t
aagtaagctaaatctggnctactatgttnctaggggtaagnnnnatgacaaaaaaatatagtgttattcctcacnnntgagactttgtcccagtgtacagaattctgtgattctgacactaattctctgagaagggttgctgctatcagccnngcccantgttacttctccacaccgaaggaggaactctnnagattgatgcccacagcactgtgatcagagcttccagacattgccttgagaaatgagagggcaagtgnnntcacccaaagcccccagggctccctttcttcccaatgttaggaggcagggatgtcnncagccctctcactgcagcccctagnacttggtcagtcaccctcagccttagcactttgttnantgtcctgtgtcagagcacngagctccacccttttcngagaaagtatgtcggctgaaggtggttcatttgttttttaattgtatatctttttgtatgatannnnnntatattttgtacttaaccagatatattttcaccccaa

SEQ ID NO: 9038 - DNA, 557 bp, Canis familiaris
  misc_feature (1)..(557): n = a or c or g or t
atanggtcnnagcgnctacanncaaagcagaagttgccatnnacacccaaagagatcaagcccagattcatccaggacaggatatgctcttatattaaggatttgttaattctctgttttaaaaaaaaaaaaatcagaatatttaaaaaaaagacatctctgtatcatgtggtttctagccttttctgctgtggcgctgactttcctcaggaagcccatgacgagcactccctcccttggctcacttggatgaagagtgtgccttcagaacaacctcacacctgcatttcagcagtgcctccccggtcttcatccctgagcttctgttgttggctgttttccagacctatggagtctcttgctgttcttcctgtaaggactgaccactttgagcctcggtttctgtatggggattaaatgagataacaagtggagggcacagctatgcactcgccagaatgggatatggaactaatttgtccctcatcttctgaatggactgacatcttggatgtgggtgccgctccctgtctgattcactgtatgaatctatgggg

SEQ ID NO: 9039 - DNA, 568 bp, Canis familiaris
  misc_feature (1)..(568): n = a or c or g or t
caanacatcccagatcactacagccatcatcagcatccccacccccccagctctaaccccagagggggaaagtcggccagcccccgccagccccggccccaacacgaacattccttccatagccagcaatgttgtcaaggtctctgccttgtaaaccattggacagagggccagtgcagggagtgagggtgaagggggctggcctgcaggtgggcagccaccggcaccactcccccaccttccccactctctctgcctgccctgtcacacccctagcactgacaacttgtgcctggaaggaaaaaggaggtggcaaaggggcacctgaggttcaccgctgctggcggggacatggacaacggccgggccctgtgatcctgcacctcgctggggccagaggaagggagggtagtaagggacnnnntggcagtgggtgatatggaggcagcgtgccagggcagggcctggaagggggagttgcctcagacccaagaacagctgtttttggagaccctggtgaggaaaatacaagatcaagggcagcacaggggccgagttgtcacatgca

SEQ ID NO: 9040 - DNA, 110 bp, Canis familiaris
  misc_feature (1)..(110): n = a or c or g or t
gcagggggactggcttggttcccagaggtcacggagtccaggtgggtttggggaggccagtnnnnncncgtccggcccaggccgggcnngactctcngncctggtggctg

SEQ ID NO: 9041 - DNA, 426 bp, Canis familiaris
  misc_feature (1)..(426): n = a or c or g or t
gnnnnggccactgaggcgctgnngccaaccacgtgtgcgggactnnactccagaccggccttgttggctggacacccccacttgttccacctctgtctgccannaaacccgagttctttatagtctcctctgtgccaggaatccattctcatttccaggttatttgaaatgagtcttaaaaagcaatagaagaaagtgagtaaaacacgttagctgtcgttccgagccggaactggacagacgtaggaaattcccgtatgatgtatgaaaatttcaccgtgcagggaaattacttccctctgagatctcctcttttcctataaaaattattcaaaattgtactgttactgtcaaattactcaaaatattgttactatgaaattattcaaaattgtaccgttactatcaaattattcgacatatcat

SEQ ID NO: 9042 - DNA, 499 bp, Canis familiaris
  misc_feature (1)..(490): n = a or c or g or t
gaggctnctttgcagttgagataantacaactcngngatgccntcactagaagtggactttttgttaaaatnnaaagatgagnntacaggtannnnnnggtgtagttacctaatggttagagtgtgtaggagccagttagcnctcagggctgcttatatcttaacaaacaacaatagggctgatgacagtgcttttcactgaactatgttaaaaaggaatcctctactctcttgagcttcctctttgctttcaaaccactggtttctaagcactgcttccttgtacttgtctctaagtaagtcagaacacaaggacagacagatggtcctacttgcagatgtaacagcagggtgagtggcaagcagggatctccttttctgtgcttcagttcctcagcataaatgtggtatgaaaggacattttgttgcagagttaaaacattacagttttgtatttgaacatagaaaattatttcaatatcatcattttgtttaaaaa

SEQ ID NO: 9043 - DNA, 619 bp, Canis familiaris
  misc_feature (1)..(619): n = a or c or g or t
aaaagttgcactgaaaaatcacattctgatggtgtgatgagannnnnngacattatgcctaggtttatgtgctgcaaaagattcagtgacctgtgaaccagattgatcctgttgtgttagatttgtaagaatgatgctgaacttcttgcttccaagcagttcatccctgacatgaactacctgacaccaggtaaatgtcaggagctcctaaaccactagtaccaaaaggtcatgttgaaaagttcagactattttatatgtcagaacataataatttggcccctacccccatgtcagtgtttttgcactttggaatcatttaagggtactgttcttcagtagcattcctgagtgtttttgcctttttaaatgacaactattactttcttgtaaaatggaatataatcgtgaaggaaacgatgactagattaaaaaatgtaacatgttgattgattgtgtaggtttttttcctgtaaatgtatcaggggagcttccagttagcatacatacacacatttatcaatggctaagacttgcttatattttgctttatagaagtagtcatagcatgttgtaattgccttatgtaaatataaannnnnatttattaagttttcca

SEQ ID NO: 9044 - DNA, 579 bp, Canis familiaris
  misc_feature (1)..(579): n = a or c or g or t
tgtttatcctccagcccctcatatctcnaggatggggtttgttttgtgtgtgtggatggcagtgggggggggaggtgtctggaagcttctgaaagtcctgctggtctcccaggtgaggcttgagtcagggttggagggaggagagcctctggatccttccccagacctctgccgctggaagtggtgtggacttggatgagtgatggccgcagggctgggtggtgagcagctggctcagtgggactggaaaagagctagtatgggatttagggaagggtactggtgtctttagtgccttggctctgggctgagcagtgagggtacagcgaagccacaggaaaaagatggttgcttcagatgtgctttggctcctccccagtggactctacccctcttggagtggggtcttttgtcttttgatcttggcctccaaaacagatgctaatctttgaatgtggagggtgctggagtgagaggggagtatcatttctcttgagggtccacctcccatcgtgtagaggttaaaagggtcagaggggagggtgactatatgtacacatgcttgattcccactctacc

SEQ ID NO: 9045 - DNA, 479 bp, Canis familiaris
  misc_feature (1)..(479): n = a or c or g or t
gccttttcaaagatccagagctgccagtnngcacagtctggacctgtnngctctgcacaaattnnnnnnagctgagcctctctgcccccacctggncaggagctggggctcaggagccttcagagctgacctgagggtactttctcttcctggctggggctggaatggctgcctcctagtctgctggggcttggcctttgggcctggccctttgtgtagagggggtagtgaccttagcttggggcatgggggagaggacagccttggctgctctctttcttttagcaataagttgggaggaggtggggagggggctggaggggggaggtgggcacaggttcctttggggcccaagtgtggcagaactggatgggcagctctcctgtcttctggagcctgctgagaagtgctgaggagctctgagggtgcccactatacccacagcccaaacgcttagagaaaggagggctgggaacata

SEQ ID NO: 9046 - DNA, 558 bp, Canis familiaris
  misc_feature (1)..(558): n = a or c or g or t
acancntgcaggccctgcntnnggcatcgtcagcctggctctctgtatttcagttgctcacggggactgtcccaagcgtgtngtcntgtgtgacactaagaggctagcccgagacagtaaatgtgagagccccacccacacccaccccccgcaaacacgcacattcactgtcctttatccagaaatttgtatttgagggatgagccttttaaatgaagccagagttggcaaaaggagggagtgtttgtcctttgtcccggctgtggcagctggaaatggaaacagatgggtgcagagagcctgaaggggaggacacgtgatggagcctgttctgaaatcggagtgtggagaagccaggagcagtaagaggtcacgttctcacagcaaagcagcggggctgaagtgccacacgttacctttaagatgtttcctctgcaagtcacgggatccactgagagccctagcggttaagaattcctttaggcccttgactagtcaactacgtgtatgtgtggcatgggtgtggcacaccgaactccagacactgagnntccnnnn

SEQ ID NO: 9047 - DNA, 667 bp, Canis familiaris
  misc_feature (1)..(667): n = a or c or g or t
tttcatttagagtgtcccaggatgcttctccaggatcccccctnnagnagctggtgtctagtatgtcagacctgccaaaangtctcgcctcccgnaagcgtatgtcccctcaggagttcacagaaataatggaccaaagggaacaattctaccataaggtgaatttctcaccacctggggacacaagcagtcttttcccaggcacgtggtacctggagcgggtggatgagctgtatcgccgcaagtacgcacggcgaccagtgtaaaggtgatcctacagatggtggtgcctgggaaatctacactagcagagtttctgcccatggatcatgtttttaaaagcacactcttagatggaaacggattggattggacaccgttgtccccagaagcagcggccctgcagagtgaggggccatccttagtggtccttcctgcctttctctgctgcagtcaccgtcctgggctagtggtggggcaggggtcctctgtggaagagggagtgaggaagaggggaaggcctagcccagaatcaccgccctccagacctgggatacaaatccagataactgcctatcgtgttccctcgtggccattagccttattagatttctgtgctgttacatcttgattcctttcttaagtttttctatcaatttccaaatgt

SEQ ID NO: 9048 - DNA, 61 bp, Canis familiaris
agaccttcttcaaatgtcacctattcttatcgtggctacttgctaggtgcttcctattgta

SEQ ID NO: 9049 - DNA, 420 bp, Canis familiaris
cagggatccctagagggaacctgtaggaggcagtgacgccacggagctgcactcatgcctggcccaggactcaaaaaagctgaaggaagagatttgctgagaagtggagaagcatgagtctggctgctgcctcatgcaacagggtgtgccagcagatcagtgacctcgtgtgtaagccaacacactgctggagccctgcactgaccttcagagcagaaaaatatggcgaaggcttcacttttaacttccaaatatcatacacatttctcttatggccactgtcccaagaatatgcagggaagagaatgctggaaatgtattcgcaatttagctaagtcaatacaggacagtcatcatagcagcaaataatattttctgttttcatgcagcttatattctgtgaaaatgggtaaaagaata

SEQ ID NO: 9050 - DNA, 84 bp, Canis familiaris
  misc_feature (1)..(84): n = a or c or g or t
cccttccccccacccatggtgacgatgacacacatcctggtggcatgcgtgtgttggtttagcgttgnnngcgttgtactagag

SEQ ID NO: 9051 - DNA, 485 bp, Canis familiaris
  misc_feature (1)..(485): n = a or c or g or t
agcntcacagnaggcatgtgctctgtatannnaaaggacagtgagaaggttgtcagcatctccagtgagcacctggagcccatcacccccaccaagaacaacaaggtgaaggtgatcctgggtgaggatcgggaagccacaggggtcctgttgagcatcgatggtgaggatggcatcgtccgcatggaccttgacgagcagctcaagatcctcaacctccgcttcctggggaagctcctggaggcctgaggaacgcagggcgggtggacttggcagattatctggcagatagagagtggagtgtctgtccttccttcgttccatggcccttggctcttgacacagggtctggggtccggaccagggctaatctggtctttaggatttcttttattttccttttgagttcctatcttcctccctgatgttcatgggaatcagaannnagtctggggggagggnnnnnnnccttcttgtaccctccc

SEQ ID NO: 9052 - DNA, 631 bp, Canis familiaris
  misc_feature (1)..(631): n = a or c or g or t
tannaccaaggnctacaaaacctcagcacaaataccaccactttctatcttgctccccttgcaagcctagataatctagtacagcagtactctttacctctgaactttgttgtgcttcccaatacattactcaaactagcctgtaatgatcagatttcaaagtaaaacaaaacagatttgttctcaagggaaaatgtttggaatctgatctcatagtggtttaagaatttataattatatgactatcctgtgtctttttgcctgtttaataatttcattattcttagggaggaatgctctcaaaaatcttcctcaggtattcattacagctgcctttatcattggacttataacacnnnnnngatcattatgatcacaagtaaaagcaaagaactggttacctaatttaaactatctagattgaattcaataaactaaaataactgtcaaacagtgtaatatatgcaatgcatgaatcataattcttttatggtttaatcaatctgttttgactctatagaaaacagtctttttttcattgttccattgaggattaatattgtcaaaaactgctgttattaatgtttaagttatacattaacttttttctgttttaaaagtaattaaaagg

SEQ ID NO: 9053 - DNA, 25 bp, Canis familiaris
gccattgactggtcaaaacctgttg

SEQ ID NO: 9054 - DNA, 537 bp, Canis familiaris
  misc_feature (1)..(537): n = a or c or g or t
ttgctaggtttccttgtcannctgattgtgtcccattggcttccttttgaagggannacaatgcagttgatactcannagagaggcagtngatttgcttcttcaactcctgtcttccagttccacctcctgccttcctttcccctaacctgagcatgtcatgccaggcctcacttctaccaagacagcagctcactcctcagcaataacctcaagtgtggggaatgcttagggttatgggaaaggacaggagaaagaggggagtgctgtgggctcgaggcacttggccaactgctaaattggacaccagttttatatcatgccccctttttaagccggtgagctgggcttcagtttcccccaggccatgcatacttttaatttatttgagaaactcttaattgtattttcactgcagtatcttgtattttttatttgtgatttaagaaatgtgaagagaaaatacacagacacataatggctaacagtgtttctttcattccttgttctagagctaaccnnnnnnaaattgtttggt

SEQ ID NO: 9055 - DNA, 572 bp, Canis familiaris
  misc_feature (1)..(572): n = a or c or g or t
tgaaccaggccttgtgctngcgctacaagaatgaaaaggagctccaggaagtgatacaacagcagaatgagaagatactagagcagatagacaagagtggcgagctcataagccttagagaagaggtgacccagcttactcgctcacttcggcgtgcagagacagagacgaaggtgctacaagagaccctagcaggtcagctgaaccccgactgtcagcctatggccactaactggatccaggagaaagtgtggctctcccaagaggtggaaaagctgagggtgatgttcctggagatgaaaaatgagaaggcaaagctcatggtcaagttccagagccatagaaacatactagaggagaaccttcggcgctctgacaaggagttaaagaaactagatgacatcgttcagcatatttatgagactctgctgtccattccagaggttgtgaggagttgcaaggagctacagggattgctggaatttctgagctgagaaactgaaagctggaatctgtttcactccttttttttacttgcaatactcccttaccccaacaccaggaccaatgga

SEQ ID NO: 9056 - DNA, 518 bp, Canis familiaris
  misc_feature (1)..(518): n = a or c or g or t
gcccacacagagcccgggcctgcacggcagtgggcccagcagccgnnagggncnnagccccctggaagaggtgctgcaccagcagaggttgctccagctgcagcaccacccggcagggccccccggctgccagcaggccgccccgctggtcctcgccccgtgtgacggcgccctccttgtgtcgggactccagaaggagctggggctggggcccggcccgctgctgcccccccacctcctgcacgccggcggctccccggtggcatcggcggcccggctgctggacacccacctgcacatcagccacaccgtggccccccgtcccgccgccacgctgccccccggctttgtggccacggggctcccgcagggggactgtgagatggaggacctgaccgcgggccagctgggcacgttcgtgctggtgcagtgagcgccccgcccctgcctccgcctccgctcgggccgccggcccttcgnnncaataatttcagagnnnnnnnaagatgtttccggac

SEQ ID NO: 9057 - DNA, 531 bp, Canis familiaris
  misc_feature (1)..(531): n = a or c or g or t
ctgcccacacctcnncaccccccagccnntgnctgcagcactcgagttganctgtggtgcaccctgggacatgcccttccccatctgagcacagggggctgggtccctaagcgagggagcagcaggggcctcctcccacctagtacaccaggaccaaacccaggcccggggagtcaggccaaagcctactgacttccaaggagggaatgtggtccactgtccgctggatgaggcctggcctgttttagggccacctgtcttggggggatggcctggctcctccagccatgaaaccacctccctctcttctcctggttttggtgatttcagaccattttacatatcaccagcctcaaatagcattaacgttaagtagtgcatttcctggcctgaggaagcaggggaagctagaatgtccttgccacattccagatctcttctttcttcaagggctgagcttatcattgcccacagtggctcttagagacaggctgtgaatgtgggaaaaccaaggggcaatctagtctttta

SEQ ID NO: 9058 - DNA, 672 bp, Canis familiaris
  misc_feature (1)..(672): n = a or c or g or t
gtgcatgacctgactatcggtgtagagtnnggcgctcgnatgatnnctatcgatggganncnnatannacttcagatatnnnatannnnagggcangagtnctttcgttccatcacgaggtcatattacagaggcgcggcaggggcgnnactagtgtatgatatcacaaggagagatacattcaaccacttgacaacctggttggaagatgcccgccattattccaattccaacatggtcattatgcttattggcaataaaagtgatttagaatctagaagggaagtaaacaaagaggaaggggaagcttttgcacgagaacatggacttatcttcatggaaacttctgctaagactgcctccaatgtagaagaggcatttattaatacagcaaaagaaatctatgagaaaatccaagaaggagtccttgacattaacaacgaggcaaatggtgttaaaattggccttcagcacgctgctgctactaatgccatacatgtaggccatcacggaggacagcagggcgggggaggctgctgttgagtccaccctttttactgtctcgctgcccaaattcggcttctcacttcctctcactctcccttgctcagctgagacctgaaactattcgaaatggctttatgtcacaaggctttaatccttcgaattgtt

SEQ ID NO: 9059 - DNA, 640 bp, Canis familiaris
  misc_feature (1)..(640): n = a or c or g or t
gctcttggggatagannagataacangacgtttacagnntccatatggatttagtgttcatnnanntcagtattaccatgttcatttttgtcctcgtgcttacagttagctccctgctgcctcccacaggtcttaactccggctcttgcctgtgacccacacagcctctggccctgcctctgctccaagaaatgctgtgggggtggaaagccagaaaggacgtgctgttgggaatgtgcacctgggcagaggtagccctgttgggatatgactcttagccaaggccagggactgggtccttgggatcttaaacctcacaaacatcagtccctgacccctagcaacagagatgagattaaaggggttgatttggtattaagtcatatggggggctctctccttgtcatgctggccatttgggtcacagacagggattgaccatcttgctgttgtacaggtagtttggtggtgttcgattatcccattgaagcagggacagctgttcccttctcatagtgataacttgggtctgttgtcctctaagagacgtgaaacatacttcttaagctgaaccacgtaaacttgaattccgcgcactgggagaaatgtgtcctgtgtttcaaggataaaactgttccaa

SEQ ID NO: 9060 - DNA, 418 bp, Canis familiaris
  misc_feature (1)..(418): n = a or c or g or t
tgttgaatattctttcaagtgtntatcagccagcnntttgtgnnntgnctnnnnnaatcttctgcannntgaannantgggctgacnncnnactgacnngtaagagctgtncagacatgttcnnnnnacaaatnntnngtcatagatgtcnngtgatcttttcctcccagtgtgtngnnnncctattcatatttnnnnctacatcttctgatgggcatgaaagttttaagttttgatgaagtctactttctcaatcttcttaggattaatnnntgcttcctggacctagtctaagaagtcttggcctacctccgtcatatggatattttccaacactttattctaaaagcattatagctttaatgtggagatccaaggtccattttgagtatgctttgtgtgaggggantgtatggat

SEQ ID NO: 9061 - DNA, 598 bp, Canis familiaris
  misc_feature (1)..(598): n = a or c or g or t
gcatcttccagcacacacttcatcattgccttatgcttgttgatnaagtctgtgacctcctgcatggggtgggagaagcatacatagaaccctctcttccatggggagtggacctatattcttgtgctcatcaatcaagctgaaagcagggttcaaccaacacttgacacctgccccagcaggaaagtaatgctgccccggatgctctcgcccaagggatggtgaaactaaggacaggaaaaagaggggaaatgtggaacttggcagcaggaggagagcttggcatttggacagggacgtatagatcttgcccacacaccctgcaaactccgccgaggtgtctctgaggcctctctaggctgctgattttcctccagccagtctacctctgtgtcccaacagtaattactcaggcattggtggcacaccaacacatgtattggttgcagtggtgttgtttctcttctgggcatggtggaagttttttttcttttttggtcacagggggaggaagtggtcttttggaagtcctttgctaattgaaagggatttcaatcaaaatgggtttgaaaatctctgctatggatgatggatttgg

SEQ ID NO: 9062 - DNA, 607 bp, Canis familiaris
  misc_feature (1)..(607): n = a or c or g or t
cggtgcccgtcagctccagcgacctggcgtnagcctcatcccatttcaggccgcggtccacgctgatctgtgagagcatgtgcgcttagagcagggccaggggccccgggggtggggccaggcctgccatgctgggcgggccactgtctgctcaccttgtagaagaccacttgcccgtcctgcgggtgcccgggagccaggaaaacctgctggctctcctcatagatctcgtcaatgcctggagccaggtctgtggggaggacaagcaggggtgagaccctcctgcccaggggtcccccagggcgggtcctggctccatgggtctcagcatgccctgaggccgtgtgtggctcagcaggctctgggctctgggctgtaggggaccccaagttctcaggtccacccagagatgcccaccagggagcaccgtggcggctttccccagcattggcctggccccaaccctacccagcagcctggataggaagcggcccctcccagggtggcctggggtcgcccccgcccagtacctgctggacatgcacagtaggtgtgactacagacaacagtgctcctctctgcgcnnnnnnngtgggatggtggttat

SEQ ID NO: 9063 - DNA, 559 bp, Canis familiaris
cccccccccccccggtgtgctgtctcagagggtgaggtctcctcgtggggtgttagctcagctcagtgacctggggtaaggcccttttctcttactgccctctgcatcttcctccgcgggcattgttaggttcacagtgaacatgtcctgaatctatagagtgaaagcccctctaagggacattcctgcctttctcagatttgcagctctggccgtagccgtagtaggaactcagtgctaggctgtgatgggatagcagagcccgcaggcccaaggggagctggcaccaggcatcaccaggcactcttctgagagtggggaaagcagctctgtgttgatgttgggtggagactgtggcatattaattttgacctaactcgggcattcctcatgcccacagtgctgggctctcttaagtacaagcctgagaaacaagacagcagtttgaattctgggacctctgtgcagagctaccaccaagggacctttatttattaagagtaaagccagggcagcccgggtggcccagcgatttagtgccgccttcagaccggggtgt

SEQ ID NO: 9064 - DNA, 594 bp, Canis familiaris
  misc_feature (1)..(594): n = a or c or g or t
cagncaccacttatnggaaatgtggatccttccaaaattgatgaaattannagaacagtctatgttggcaatttaaattctcagacaacgacagctgatcnnntacttgaattnnnnaaacaagttggagaagtgaagtttgtgcggatggcaggtgatgagactcagccaactcggtttgcttttgtggaatttgcagaccaaaattctgtaccaagggcccttgcttttaatggagttatgtttggagacaggccactgaaaattaatcactccaacaatgcaatagtaaaaccccctgagatgacacctcaggctgcagctaaggagttagaagaagtaatgaagcgagtacgagaggctcagtcctttatctcagcagccattgaaccagagtctggaaagagcaatgaaagaaaaggcggtcgatctcgttcccacactcgttcaaaatccaggtctagctcaaaatcccattctagacgacaaagatcagaatcaaaacacaaatcacctaagaaaaagactggaaaggattctgggaattgggatacttctggcagtgaactgagtgaaggggaattggaaaagcgc

SEQ ID NO: 9065 - DNA, 107 bp, Canis familiaris
tcatagcccagtacactgaaaaagcctaaaagccatgatagcttcccccccccccccattccattatcaggatcataaaagaggaaaaagttggacagtcccgtcac

SEQ ID NO: 9066 - DNA, 83 bp, Canis familiaris
  misc_feature (1)..(83): n = a or c or g or t
cagaaatcatgtttcataaanaccagcaggnnngctgccactgcagtgaggaaaataaaagatgctatttcctgtcttatttg

SEQ ID NO: 9067 - DNA, 583 bp, Canis familiaris
  misc_feature (1)..(583): n = a or c or g or t
ggagaagctgcgccaccgcgaggaccggctcaaggcccagctgcgccgctgcatgtccaagcaggccgaggtgctgagcgagggccggcggcgcacggaggggaccctgcacagcctgcggcggcaggtggacgccctgggcgagctggtcaccagcacttccggggactccgcgtccacccgcagtctgtcgcgcaccgagggctcgctcgccgaggacgaaccgccggggcccagccagagctcccggcggctcccccgaggcccgtcgccgcggctggacgcgcaccgaccctgaggacccggaggacccggaggcccggcgtcccctcggaacgcttcctccgcgtccgcggacaccaggctcacgggaaggcgcgtccatgcgggaagagccgcgagcggaacccggatgcccgggctggtctctgggccttggaaacgtgttgccgtaaaagcagcgcccgcggctgcggacttgaagccccgaactggtaaactcggcggctgccgggcgaactgtactcaggacttttttcacggacaccgtcagattttatttttggannnnnattttcatatg

SEQ ID NO: 9068 - DNA, 639 bp, Canis familiaris
  misc_feature (1)..(639): n = a or c or g or t
aagaagnnctttctgtgctagaaagctgtttacatcgctgnagnacagaaatataaaatgacaccagagannnncaggaaagcatatccagaatccatcgaacaatagaactaatgtattctgacaaatctatgatccaagttccttatcgcttacatgctgttttagttcatgaaggtcaagctaatgccgggcactactgggcatacatttttgatcatcgtgaaaacaggtggatgaagtacaatgatattgctgtgacaaaatcatcatgggaagagctagtgagggactcttttggtggttatagaaatgnnnnnnnatactgtttaatgtacataaatgataaggcacaattcttaataaaagaggagttaaataaagaaactgggcaggctcttgttggaatagaaacgctaccaccggatttaagagattttgttgaggaagacaaccagagannnnnnnaagnnnnnnaagaatgggatgcacagcttgctcagaaagctttgcaggaaaaacttttagcatctcagaaattgagagagtcagagtcttctataacaacaggtgtgcactagaattatacgtgactaatggaaggtaatacaaggaagtcttcatagaatccannnnngt

SEQ ID NO: 9069 - DNA, 582 bp, Canis familiaris
  misc_feature (1)..(582): n = a or c or g or t
aacatggtgtgcccatggtggggattcccctatttnnagaccagcctgaaaaccnngtcngagtagaggccaaaatgtttggtgtctctatccagctacagcagatcaaggcagagacattggctctgaagatgaagcaagttatagaagataagaggtacaagtcagcagccgtggctgccagcatcatcaggagctctcaccccctgacccctacccagaggctggtgggctggatcgatcacatcctccagacagggggtgcagctcacctcaagccctatgccttgcagcagccatggcatgagcagtacctgctggacgtcatcttgttcctgctggtggtcaccctgggcaccctgtggctctgtgggaagctgctgggcatggtggccaggtggctgtgtgggaccaggaagcagaagaaggcctgatggaggttcagccttgacagatgtttggggagccactggttgtatatggttttccccagctcaggacacccgttttcttctctgtattggtacttgagggtggcactcaaattgctcttcactannnnnnntctctgtttagaaattt

SEQ ID NO: 9070 - DNA, 577 bp, Canis familiaris
  misc_feature (1)..(577): n = a or c or g or t
ggtccccnnnacccacctggnnnctcccaggnnntccgtcaagagatgctgcagcgccggcccccggccaggcctggcnntctgcctactgccaaccacacagccccccacggttcacactgactccttcctgcccacctcaatcatgaaactaaatcagaggggttgtgtcctccccaccctcagctcctcactgctcttagagggatgtgggggaactgaactccagggctactcactgttggcaggggcctcccctcagtgctggactggagctgggctccttcggacctgggggtccctctttctagggtcacctgccagggcttatgactgtgaatccctgatgtcatgattttatgtgatgactcctgaaagtccctggcccctgggataagagcagggctggaccccaagtcctttccttttccatggagagaagagtgatctggcttttcctgggatctctgtgaatatttattctatttatggttccgaggaagtaagtttggtgaaggaaccccttccctgggtactctctgccagtgctggactngcttcctcttctggacccgcc

SEQ ID NO: 9071 - DNA, 598 bp, Canis familiaris
  misc_feature (1)..(598): n = a or c or g or t
ggggcacccntcgccaaggtnnncttccgggatccgtaccggtttaagnngcngacggagctgttcatcgccgccgagggcatccacactggccagttcgtgtactgcggcaagaaagcccagctcaacataggcaatgtgctcccggtgggcactatgcccgagggcaccatcgtgtgctgtctggaggagaagcctggtgacaggggcaagttggcccgagcctccgggaactacgcgactgtcatctcccacaacccggagaccaagaagacccgagtgaagctgccgtccggttcaaagaaggtcatttcttccgccaacagagccgtggtgggtgtggtcgctggaggtggccgcattgacaagcccattctgaaggctggccgtgcttaccacaagtacaaggcaaagaggaattgctggccacgtgtgcggggtgtggccatgaatcctgtggagcatccttttggaggtggcaaccaccaacacatcggcaaaccctctactatccgcagagatgcccctgctggccgcaaagtgggtcttattgctgctcgccggactgggcgtctgcggggaaccaagactgtgcagg

SEQ ID NO: 9072 - DNA, 594 bp, Canis familiaris
  misc_feature (1)..(594): n = a or c or g or t
gcagagnnctctctgnngtgtctngtcctgggtacatgtactcccctcggtctgttcagccaggttgtgatttgggtgccttactgtgtccattgtttgtcccaacgactctgggaatccgtgtggctttctgttactgcttcctcacttggaatgttcagcaggagcatttggactcctgaggcccttgtgaccaaagaagggcagagtattctgggtaaccagctcatggcagcagaagactggtgagttgcacctcccttgaaagccctggctgggagtccagggcagtccagggcagccaccacagcacctctctgacagaagggcccgtgcacaggccaggcaagtaaacgtcaccttagacaaaaaggaaccagagacccgagggaaacagtaaggtggagtttgcagttcagcccaagtattggcagaggaaacagattctgaattcattttcccttgcagagattaagactcccccacttctgtccaagaaagaaacagagcctggggtctccagagggttccgtgaaacacagtgttccctgggaggcttggcaaatgcggatcggatcctggggaaattgggat

SEQ ID NO: 9073 - DNA, 314 bp, Canis familiaris
  misc_feature (1)..(314): n = a or c or g or t
agatttgcaancgcagaagaaatagcnnngctctgtgtgnnnttggcttccgatgaatcnnnnnnnnnnacaggtaatcctgtcatcnnngatggaggctggannntgtgattttagaanctgtnnnctggaagagcaggcccttcctccccacagtgagacnnnnnnnnnngaaaattcagccatcatgtctttcccattcatggcttatttatgacaattagccctttttaatgatgccattgttcacaaaagtcagattctttaaatatattaatctctttctaacctcttctgaaatcattatagggaga

SEQ ID NO: 9074 - DNA, 537 bp, Canis familiaris
acagtcagggtcaattgatctatgaatctcctatcacttgtgagtatctggatgaagcatatccagggaagaagctgttgccggatgatccctatgagaaagcttgccaaaagatggtgtttgagttattttccaaggttccatctttggtaacaggctttctgagaagacaaaataaggaagatggctctggcctaaaagaagaattacggaaggaattcagcaagctagaggaggttctgaccaataagaagacaactttctttggtggtaattctctttctatgattgattacctcatctggccctggtttgaacggctggaagctctggagttaaatgattgtgtagaccacactccaaaacttaagctctggatggcagccatgagagaagatcctgccgtatcagccctcctcaatgaggccaacacccttcgaggattcctcaatctctacttgcagaacagccccgaggcctgtgactatgggctctgatgggggcaagagtcagcaatgaaatgtctgatattttctt

SEQ ID NO: 9075 - DNA, 215 bp, Canis familiaris
  misc_feature (1)..(215): n = a or c or g or t
agaattaatgtattatgggagatgtgtcagtgagctagaaaatatcaataacctcaaaggatgaagggttttattttaaatagtttataaaatatatattaacacnnnnnnctgaagatgctgcataagaataaaaattgttttcacccctttcggaaagaagacattttgttatgactctagataattatgattttaaacattttgttttttta

SEQ ID NO: 9076 - DNA, 659 bp, Canis familiaris
  misc_feature (1)..(659): n = a or c or g or t
atgnactgctccagatactgtgaacttgtgcatcccacatgcatatgtagagtagatgtgttgtgtgtgcatatgtagagtatatgtgtgaagtttcnntctgaagataccaagccagaatcttgtcannnngcaaggccccaagtttcnagcaagcacttctgtgtcttgatgtgaacaggtctgctccgcacagaacggtggatgcataaacagtgtgtggccccgcccagcctgtccagtgcgtgtcaaccagccatggcacaggaggacaggccatgcactctgctcagcccactcagcaccgtctccagcgctgccctcggcactggcctcttcctccctctggggctgtagggggtggagggaggctcaaacccagctcttcccaagtcctcaggactccaggattgagcccactctcctgggctgcctctcagcccagagcggctccggctcgggggcacaggcctctcactgcactactcctcagcaggtatccctgcgctccctaccttctgcctcagaaggtctttctaaatatatgtaccctgaagatttttttctctttgattttcagaggactggacttgaacgaaggaactctgggttcagatctggccttggccactttatggttagcaaatgacaaatgttta

SEQ ID NO: 9077 - DNA, 469 bp, Canis familiaris
  misc_feature (1)..(469): n = a or c or g or t
aatccaaccagtgcccanacggctattnannncatgaatggctttcaaattggcatgaagaggctcaaggtccagctaaagaggcccaaggatgccaatcggccttactgatcttctctcactgaccagccaacaaaagcaactgaagagtgagaagaaaggaaaggaaaagcacagaaatgcttgagcggcccttcctgaaggagcagccacagatggaggtggatcagacccaaggccggtgcctggggctcaggccaagttaaggattgttttcatcaagtgggttgtcctgggcctgcagcatagagcgcaggctggcaaggcggctggggctggctgaggattggctgtctagggggaccagcggagggccttgggggtgccaagggcttctccgcgagggaagcccagatttacttctttcaaaatcatatcattccttagagtttagggaccaaaggactat

SEQ ID NO: 9078 - DNA, 533 bp, Canis familiaris
  misc_feature (1)..(533): n = a or c or g or t
atgggcanngagagagccccccagnnncagccatgcatccgntacntgcttgtnnnggtctcnnncttcctcagccnggtgggctccctggannnnnaganctcccacggccaggattccttngagaaatgtatgcatgatcctgactatgaggtgctgctcaaggttgtgaccttgggcctcaatcggacctcgaagccccagagggtcaccatcctggaggcagacaacaggatcggaggccgcatcctcacctaccgggaccggaagacgggctggattggggagctgggagccatgcgcatgcccaattcacacagccaaggtgtgtcaagactccacctccacctctgtcttctaatctaacttcaagatctcccagctccagccacaccgggtccagccagacctccagacctccacctctgtccttcttctaatctacctttaagatctccccgctcctgggcagcccgggtggctcagcggtttagtgcacccttcagcccagggcatgatcctggggaccgggg

SEQ ID NO: 9079 - DNA, 556 bp, Canis familiaris
  misc_feature (1)..(556): n = a or c or g or t
actagaaagaaaaaataggatattagntataccagaatcataagaaaaagatggaagagaaggaagaannnagacaaatgagaaagatngaaagagggtatgtttatgaggtagggcagaaggatttgagagtctatttgtnnagaagggatgggaaggctagtctaaggcagcagtaagcccaggcctgtaggacccagtggtcactggttatgagagggacccccaaataaccttttgttgttggccagggtggcccaacttaggatgacgaaacagtctgcatatctgctcatggtcactgtcaagtcttagtaagtcagattttctctaggatttcaagactataaacatttctcgtcctctcttagcatacaggtagtctagtgttttgtgagcccagttacatcctcttgcctttcagacccagagttcaagtgttaaaccattccggtttcaccatttcttgcgggcctgtttcatatgtgtgtaaccagcagatggcgtgaacattctcaagacttnnnaacagcactatcccattgaaataggacat

SEQ ID NO: 9080 - DNA, 449 bp, Canis familiaris
  misc_feature (1)..(449): n = a or c or g or t
tcgggtaccaaaaggttaaaggttgcnnnnncatttnnnnnnntgtggttgannnnngctannnnnnancnnngagccnnnagcctnnccctgcccctcagtnnntnnnctcccnttcncgttnnncatctgtcagatggggtggtcggnnagctctgatcccatcttcatggcagtctcttccccctcagccctgcccacatctaggcgtcccgggnnctgtgggatggcagcagccttccccatcccacccatcccaggtataacaaccacagatgtccccagatgttgctaaatgtacctggcggggaagggggtgggcaggaccgccccgatgaggaccctaccttagagtaacccgaagcccccagtgtaacanntggtagacccaccaactagaactctgccctttctcaaccactgtgggccttgtggctcttacacacctg

SEQ ID NO: 9081 - DNA, 253 bp, Canis familiaris
  misc_feature (1)..(253): n = a or c or g or t
cttggaatccagggccctggggtttgctgacagagctggggtggggaagggtannnagcaaccaaagatggannntgctctcccccccgaaatcagcttggccaatgagttcagactgtggggggctctccacctccccgtgaacagctatagggcctatgctccggtgccaacttccttccccccctcaggccctgcccgcagctggcacttgctgcagcccctgtgccttacataagcannnnatccttcc

SEQ ID NO: 9082 - DNA, 117 bp, Canis familiaris
tgtcaggtgcctcaggtgggcacagaccaagcacagtagtttttagcttccattgatgttgtcagagtaaggaagccttttcaataagacctctggaaaaaaaaaaagaaggacctc

SEQ ID NO: 9083 - DNA, 525 bp, Canis familiaris
  misc_feature (1)..(525): n = a or c or g or t
atggccaatgngctgcctgngccccgaggcccggccctgtccagctcttccgatgaaggcagcccctgccccggtgtggggggcctgccagaggcacctgnnagcccgctggccggcctnnngctcccgagaacctgggcacggggccggatggacacacagccagaccgaaaaccctcacgcatccccacgccgcggggccctcgccgcccgtctggacccacagagcctgggtcctggcatgccctgcactcagtgagcccaagggcagagccggattcctggatgtgatgaaccagcccagctgcccccaggcccccttccttcccttccttttcctttgtggccttaacccctntgcatcagggagcccccccacccctgcctctcgggtaccagacctcatgggaccagaccccttgggaccacatggcacaatgggacctctgttgtacattccggttgggggatgagcgttgctanttaattnnnaatattattgaatgccttagaggaggccaatga

SEQ ID NO: 9084 - DNA, 557 bp, Canis familiaris
  misc_feature (1)..(557): n = a or c or g or t
agcatgtatgtgactcttgatcccagggnngtaagttctagccccacgntgggtntagagatatttaanaataananatatatctaaaaaaaagnnnaatnnnagtatagattctatttaccttttacttgtccttaaagtatatattcaactctccattcttgggtttaagttttgtggggtttttttttcatttcttaataatgttccttaattttattatcttaacttcctttttcttgtcactggttacctatccagtcactgccttacagtagcataatgtctgggtcagccacccagattaatagtttgatgtattctagatgttgagggaggccgggaggggtgttttggtagtttttgtttttaacacccttgaacatttctaatgactgaagagctttcaaagaggatcccaaaaaaagaggatttaatatcaaaaacacttaaagaggggcccctgggtgctcagtggttgggcgtctgcctttggctcgtgaacccggggtcctaggattgagtcccatatcggggtgcttgaagagaccctgctt

SEQ ID NO: 9085 - DNA, 528 bp, Canis familiaris
  misc_feature (1)..(528): n = a or c or g or t
agaggnntgagacctgtctnnacccagccggcccagcccccgctgnntcnaaactgccaaaagtgaaaaacagctctggtccgctgttaactctcccttgaggaaatcgtaatgacagtcacccaactaactagagaggtggccactccttagctttgccagcacccaggacccctatcatgtcagctccactagatctgtactgcagagctgccttctttagtcagaacctaggacagagaggtgtccacagctgaccagacccaagcacctcctcctccaccccagcgtgcttctcgggcacaaaccgatactccctctgggggagggcagcagaccagggttagacactgtgactaagctacttttctccccagagtgctttatttgggcagaatgtgttctcaccaccatcctggactgcctctcggaaggcgtcttctctactggctggctagaggtgcagggaaagggaccactgcactttggtaaaagagaacagggaaaggccataaacaaacaaagaca

SEQ ID NO: 9086 - DNA, 549 bp, Canis familiaris
  misc_feature (1)..(549): n = a or c or g or t
cttccccacagtccagaggggatctgcctaggtacaggtnntcctgcctctctccgggtttcagcccacagcctgtcctccccactaggggactcctactacagaatgacttcagggtgtgcggccctgagggtcccagccctccgtcgtgctgcacgctcgctggaagtgaagacctccttcctaggagcatcattccaagggagactcctgattctgaagtctggtgttgacactggaatgacagcacagaaaaatctaggactcccaataccttctggaataaggaatttcccctccttgtccttgacctttgataaccgtggcaattgctaaatagaggaaacattaatgaattaaaaaagcattccttatttttttaactaatatttgcacattttcttagtatctttccaaatcttcgcctcttctattcctttgacagatggtatccctcctcctggatcattcgtttcacttggtttctaactttagatttacttcacttgttatttgacttagcaggtgcaacaacaacaaacaagtgtg

SEQ ID NO: 9087 - DNA, 644 bp, Canis familiaris
  misc_feature (1)..(644): n = a or c or g or t
ctcaatgccaagatggcactccgggggaaggnactgcgcacccagctnnanntgcgccggttccgaatctactcgaaccagtctgcattggagtcactggcactgatcccactgcaggcccctttgaagaccatgctgcagattggagtgatgcccatgctcaatgagaggatgtggcggggagtgcagatcccactacctgagggtatcaactttgtgcgtgaggtggtgacgaaccatgcgggcttcctcaccattggggccgacctccactttgccaaagggcttcgagaggtgattgagaagaacaggcctgcctccagggaccccttggcatccagtgccccaccaccctccacgacagctgcctgagccctcaagcccgccctggcaggggcattcaggactccaacacctctcagcccctccctcagcccctcccagcctatactgtccagtctaaccccccagtgccacagagaagacagggttttaagctatacccaatttaattccataatcagtcaatgcatcaattaccgtccatccaccctccccgtgggctgtcctgagctctgctatgttccagtgcgttaagggagggggccaggccccaccccagtcaggaataaagnnnnnccccn

SEQ ID NO: 9088 - DNA, 158 bp, Canis familiaris
  misc_feature (1)..(158): n = a or c or g or t
cttccatcggtggaactgttatcgctgttattcttctgttgtttcttcgtgtggttttcagttctatgtatgtcagggtatttttttcttttttgagcgaatgatggatagaaatgcccactcaaagaaaaataaacaganncaaatgttaaaattat

SEQ ID NO: 9089 - DNA, 636 bp, Canis familiaris
  misc_feature (1)..(636): n = a or c or g or t
atcttttaccacttcntagagttaaacatacnnaatctttagtgttcataactnnnnnntgtaggaatcaccatnnctttaaacacctttaaatacctttatttactaattttttaaatgtgtaaatttgaacatactacttctaattctttttcaacttccatcctcatatttttgttagttgtgttttggttaatgtagttcctgacaaattatgcttatgtaatcattatttaatgtagaaccaaacactatgaaagacatataatccaatgccattaaaatttgggattactttaccttctgtccttataattgttcagaattatgctacacttttctttgcctaaatgaagaccatgcttttatcatataactttagttggtatgataagatccatagactctctgtattttttatttgctttattgaagagatattacaatgtcctcctgattctttggtcatatatgtcaaatatctgtcagattccattttatgcataatcattgcaacagtgtttataatatggatatttcctatgataatatcagtatgtttttatgtatatatacctaaatgaatcactcattatacttaatgatttttatagataagataataattatttgtgt

SEQ ID NO: 9090 - DNA, 644 bp, Canis familiaris
  misc_feature (1)..(644): n = a or c or g or t
tcttnntctaccactaccttcnnncgctcannntccagatcctcctgctccctgtggtnnnncagcacgtcagcgaccacctgtgcaggtcccagctcctgannagnctcttcagcgccctggttgtggcctggtactcctgtgcctgtcacgtgttcaacacgctgcgcccactgacctacggggacaagtcactctcacccagtgaactcaaggcccttcgctggaaagacagctgggacatcttgatccggaaacactagcaggacacaaacggtggtaaagaacacgccctgcatccactgccactagagccccctgaaccagggcacatggagggctagcataggacttgtgacaccggaaggcagcgggcagccgtggggtgagttagcgctgaagctgctgaggccccagtcctggtgttgggcctggtcccctccctgggcgcccactggacccaatgctgagccatagctgtctctgctccgagtgacaggcctttgattctgatccctgcacaaagaccctggtgcacctcagtgccgccgactcttggcccttgcccccgcgagactcggctgggacgcacgagccagcagcacttccagcaggcaggacttgtcaccctcacatgccctngt

SEQ ID NO: 9091 - DNA, 336 bp, Canis familiaris
  misc_feature (1)..(336): n = a or c or g or t
atacnaagaaanntcatngagatatncatgggatcnnnnaggnnntaggcnctgcagctaaagtcatcactgacccagacatcctgaaaacctgtgtaccagacctgactgacaaacggctggaagtagttgggctggagggtgcaattgagatgggccagatatataccaagctcaagaatgctggacgtcggctggccaagtgctctgaaatcaccttccacaccacaaaaaccctccccatgcaaattgatngagaaccctggatgcagtcgccctgtacaatcaagatcacccacaagaaccagnnncccatgcttgtgggcccaccccctc

SEQ ID NO: 9092 - DNA, 680 bp, Canis familiaris
  misc_feature (1)..(680): n = a or c or g or t
acaactatgaagttttaaagnagtngttgtgtgcaaaatnnggnctatatgaaccaacatttatgatcaactnnacttcaggggcattgtctggttctatngcagctgttgcaactttgccatttgatgtggtaaaaacacaaaagcagacacaactttggatatatgaaagtcataaaatttctatgcctttgcatatgtcaacctgggttatcatgaagaacattgttgctaagaatggatttgcaggattatttacaggcctcattccccgtttaattaaaattgctcctgcttgtgccattatgatcagtacctatgaatttgggaagacttttttccagactcaaaatgctcgaagacagcaatactagtgatgatatttcaacttgaaataacaaccaaagccaaataataaggtggagagttaaaaagaacttatgctaaaaacagaagctgctttgcttccagaagaacaaaggaaaccaatatttaagagccccgatgttcaaagcagtcgtgtgacatttcagaggtaatccagctcatctgttgatcaaaattggagatttcacctaacgataggaagttttacaaagaatttccataagttgtaaatttaagacccacttttaaccacttgaaaacatgtgtggaaatctaataaagaggannnnnnn

SEQ ID NO: 9093 - DNA, 618 bp, Canis familiaris
  misc_feature (1)..(618): n = a or c or g or t
tgannagtgtnnnatggaaagaatagcagcacacttggatgaaaagtatgcttacaaaggaanngtcaggcaccttacctttagcccttgtatgcttgatctgtgagattgaagtttgtggttggagatggatttcatgccctgtggtgtttacagtgtatataatggttgtgttttcatagggctatgaaagtgcacattaaacccgagcgcctttaccttagatgagtgctttggcccctctgtaaataacactattaaatgcagttgtatatagtggacagactgaacataatccccacaatgcagctaggatagtgttgcggctacaattgtgtggtattttttttttcttattgtcttgtcttaaatttgtacatcctgtataaaatatgaatgtttcccaaataaactatgaatgtttcttgtataatatataatgtttctgagaagaaactctaaatagttaagaggttaacctgttgaagataccaaataatggtttaactggacaaccttaaaattagcatagagaacaatcctttgttatattttagtgatccaccaagaatgagaggatattatatagtcagataatannatccttgtctactttac

SEQ ID NO: 9094 - DNA, 644 bp, Canis familiaris
  misc_feature (1)..(644): n = a or c or g or t
acccgtttgccccaagggatactctnngctnctgagtatcaaatggggaanaggnctagatagnctaaaaatgggtcagacggctgtcctctggacagaggtaggcacatagtgcaatatatcattgctctggcaccagatataggaattttatgcatatttttgggtgatggttatctttaaaactcacccaatcttcaggtagaactacaattgtgtcatgtatcatattagaggggagagaggattttttagtatcacactctctaatatagtcttaactgactggctgtaggattgaaggcatattctcccagtactgataaaaaggactctcttggaatttgtgaggcccagagaagaatacatatctgttagaattataatttggaaaaatgtgtgttattgatggttgctatatttgcagacttggttgcttataattccaatccattactttaggataatatgattctaagaatgttcccaactttgagtggtaaaatctaagtagatgactttatattcttgattaaagaattccatagatattggacatattaagatatagtgtaaataatccaaactgatgtagatcactgtgattgtcctttttcttgtttgggaaaatatactagagctta

SEQ ID NO: 9095 - DNA, 463 bp, Canis familiaris
  misc_feature (1)..(463): n = a or c or g or t
ttcctgtctgtttgncagncttgtttgattttcccccggggggggggggggcgttagtgatttatatctctctctgtgcccctcatgagaagtaggcattattcccctcaatgtacagtgaccacttatttgtcttttatgcgtaatgcttattattcatttttgtttgtgtgcatgtgtgtagagtatagagcctggggccaaccccccagtatagattaaacaaagcttttaaaagttgtttttactcattatatgacataaaggttgttaacctggccacctcacactaattagaagccctgattggcagctttagatttcttgattaaaaaacccaaataaacgggttaagttttaggcagtcattcagtaataaagaggttcttactgaaaagattgagaactattccatttggtgcttagtgaaaatattttgaannnntgtaagtaccaattaatt

SEQ ID NO: 9096 - DNA, 99 bp, Canis familiaris
gttttacactttctgttgtccagaatttcactaatagcgtttctccaacgtttgttgcagttctttgatgatgaaatagtggagaaaaccaaattgctt

SEQ ID NO: 9097 - DNA, 436 bp, Canis familiaris
  misc_feature (1)..(436): n = a or c or g or t
ggggacggctcggcggcgggnnngctcggctcgggnncgcgcgcggggctggcgggcggcgtgnnggccgggctgctgctgctgctgctggcgctggcggcgggcctgctgctgctgcgccgcgctccgaggctcaggtggactaagcgcgagcgattggtcgccacgcnngtcgaggcgcccctgggcttctccaacccggtgttcgacgtggcgggctccgtggggccggttccacgcaccccgcagcctcccccagcgcagcaggcgggaagcagcagcaccagccgcagctacttcgttaacccgctgttcgccgaggccgaggcctgagcaaccgcggggctggccagcccctacctgcgcccgccgccgcccccgcgagatggccccggccttgcgaggtccccgccccctgccacgcacgccttgtccc

SEQ ID NO: 9098 - DNA, 609 bp, Canis familiaris
tgaactatttcgatgaaattgaaatccacccgatacatattgatgtaggaaaacttgaagactctcagaacagacttgccatcaaacagctcatcaaagagattggggagcctcgaaattatggtttaacggatgaagaaaaggcagaagaggagcggagggctgccgaggaacggctggccagggagatgatggaggaagcagagcgtgagcacaaggaagccatggaaatggccgagaagatggctcgctgggaggagtggaataagcggctagaggaagtaaaaagagaagaaagagaattactagaggcccagtctattcccctgagaaactatttgatgacccacgttatgccaacactgatgcagggtttgaacgagtgttgtaaggtcagaccggatgatcctgttgattttctggcagagtatctcttcaagaacaatcctgaaatgcagtgaaactttaaagatcgtgtgtgatatacctttacagagttaaagatgagattaacactgtaatttgaaattttgcttgaaaaaaatgcttttccagtttttggaaaattctttgttttccccacaagcaaatgctttattattaattttg

SEQ ID NO: 9099 - DNA, 625 bp, Canis familiaris
  misc_feature (1)..(625): n = a or c or g or t
catgcagtttctatcaattaaatataaagaatgagacttggtaccaacttattaaattactgcaagtttttggtttcctttcttaaaaatcacacttcttatttgtatgatttttatggatttgtaatggtgatatgggatccagggacgtgtgtatataaagaggaaataggtacatatatgtacatacatgaaattaatatatgtatatatacatgaaattcatattttgaaaacttagcttatgacacagaaagaaagtattaaaagtatggctctaattctgatatgcttagttagacctgaaaggaatatcttttttatcattttttaaatttacatcaagcttgtacaatggtggggtgtatctggataaccagatcctcaaaaagcagctcagaaagttaattttctagcttttacccaatctcactgaaggatttaattgatatttttaatggagctgtgaatcaatgctgcaaaggaattgtctctagaggtctaggatataatgcatttcattttttaatttacttttttatttgtcattttcttcaaaggatttttataggctgtgggttttcannntttgcaaacaggctnnnnnnccttcttaagcatatgt

SEQ ID NO: 9100 - DNA, 289 bp, Canis familiaris
  misc_feature (1)..(289): n = a or c or g or t
aaagaaatcagaaagttgtgtaaacagaaattctgatgaagaaggtacttcagattctgaactnnngaagggccccctaccagagacagatgaaaaatcacacttccagactccagcagaatcaaatgtctgctcctgcaactctaaataccagactctgaaccatgatgaatccaccacaacaaaaatcacctcataaggctgtgtggcatcactcctctggcaatctaccaaccttgctgtacattcttcaattcaaacttcttcaggtaaccaactaattgacgtt

SEQ ID NO: 9101 - DNA, 120 bp, Canis familiaris
  misc_feature (1)..(120): n = a or c or g or t
gagatggagatggcgatnnngatggctctgctgctctccacgaaggctgaagctaggcgtggctctaatggtgctcatnnngctgacagcatccacaatgtgaaatccctgcagtttcta

SEQ ID NO: 9102 - DNA, 551 bp, Canis familiaris
  misc_feature (1)..(551): n = a or c or g or t
gccccaccatgccctgcccttggtccagctgggtttgtgaggnaggccagatttggccnntctttgattgccagcgtcctgcccagagagccatctgctctctgcttgggatcctcttttcctccactccttcccactttcttctcttggacacggttggttgcagctcatttctttcagcccaaggctgggaaaagctgggatgggctgggaagccattgcatctgaattgcaggggtcatgctgactcttcccaagacacaaatccttggcgtgtcagcttgccaaggaggaagaccagggccagaacgtcagaatcttggttttgctttgaggggtttctcatgtcattccagcttcctgctaagtttcatccagaagcaattgcagaggctcctacagatgtttcagtgctttgattttggacaggcttagggtttaggaagagaagcttcccttaaccaggggtgccatttttcctcttggtttgcaagggtctgtaaatacctatatataaatttctgtgtattctcttgtgtcacattggggtt

SEQ ID NO: 9103 - DNA, 545 bp, Canis familiaris
  misc_feature (1)..(545): n = a or c or g or t
attagaatccagctgtgatgataaagtaaattataattcaggtgtgcccaagactggcctgttgatgactgtcctgggcgtgatcttcacaaagggcaactgtgccactgaggagcaagtctgggaagtgctgaatatgatggggttatatgatggaattaagaacttcatctatggggagcccaggaagctcatcaccaatgattgggtgaaagaagagtacctggagtaccggcaggtggccaatagtgatcctccacgctatgagttcctctggggccccagagcttatgctgagaccagcaagatgaaagtcctagagtttgtggccaagatccacgatacagtccccactgccttcccagtnnnntatgaagaggctctgaaagatgaagaagagcgagcccgagccagagttgtagccaaggcttgcactgctgctgtggccagtgcacgtggcaaggccatggccagcagcttctcctgccccaagtaaaagatgaggaaggttattactatgtgtttgaagagaacanataatgttc

SEQ ID NO: 9104 - DNA, 327 bp, Canis familiaris
  misc_feature (1)..(327): n = a or c or g or t
tggctggaagtgtttattgtgaccactcttagctgcaagagaggctgggagacagagcanntctttcctctcctggcagaaagagggagagatacatgtgggtnctgcacacatcacagatgtccactgcagtgcaaacagctggcaggagatggaccagtgtgccatttgttcactcatcactaactgctcatccatgtgccacaattagaccttagaagataaagctgtaggggcatctgacctctgctcaggtcatgatctcgaggtcctcggatggaacctcacctcagtctccccactcagcaggaagtctgtttgtccctc

SEQ ID NO: 9105 - DNA, 498 bp, Canis familiaris
  misc_feature (1)..(498): n = a or c or g or t
aaataatgagcagggtttttnnatctaaaaaagnnnctgtgacgagacagcactatattaattccattttgtaaaattttctgagacatattttataattagtttgttcccagtgtactgcgacttgatttgcttttcggtaactataaactttgatcaaagaaagcactgaaatatgataaaattactggattttaagctaactaacgtaatgctgaccagaatttaaatgctatccccttaaatgaactggtcagtggaagcagaatttcgatgttgttaactttagatgctatctcagagctttgaataccagtgtgaacatttacaccgtgccgtgtaaaagttgtgaaatgtctagtccttaaaacttagaaaaattgcctttgtggttttctaagaaattaaattgcattcatagatgggttaataagtaaggcatgctatgtaatagtagtacatctatctccatgatattaaagtgtgtgagccctgttt

SEQ ID NO: 9106 - DNA, 640 bp, Canis familiaris
  misc_feature (1)..(640): n = a or c or g or t
cacctgnncgtaccttcatcannnntttgtggtgatgaatngnnnnttctatgagcatttgggangagtgctcaaacactanagcatttcaaagactacagatagcatgctttccagttctattctatagagccccagatgtttcaccttttagaacatgcttctttagaggtgcaaagttatgggatatatagaagaaaatattcattagaattttccagagaatatgatcaggactcttatatagacccggtgcgaagttgtttgtccacttagtcacacaccacctggtaggaatggaaaaggaaagagatggccaaactctgacagaggcttttccttttagaagaactcaaagcctaggtaagggttaatgtataatgtcagtgatttaatataattgtgatatagggaagggaccaggaaaatgttctaatttcacatgtaagaaggtagttgcccgtttgcaagttccagttgtgtgtgtaaagcagaaatataaggtaccaaacctattaggaaataaacacaaacaaaaaagtggatttgactttaattactgtgtacttgaggttggttttggatatggattttctaaaaagtgatgttttattgtttatcatctaatggctgtaaactg

SEQ ID NO: 9107 - DNA, 439 bp, Canis familiaris
  misc_feature (1)..(439): n = a or c or g or t
accccaaacaggcccagcannngtgatgaacaagaccccannncagatgtatccggtggctgcagtgaccaagaccccaccccagccatgtccagtgcccacggtaacaatngccaagaccccaccccagatatacccagtgtcccggataaccaagaccccaacccagatgtacccagcagctgcaatgaccaagaccccaccccagacataccccgcagccgcgatgaccaagaccccactccagtcatgcctggcagccatgatgaacaagactccaccccagccgtgctcagtgcccctggtaacaataaccaaggccccaccccagacatacccggtagccccagtggccaagatcccaccccagacatgcccggtggctgcaatggccaagacctcacctcaggcatcccagccagtcacaatgatcaagagc

SEQ ID NO: 9108 - DNA, 577 bp, Canis familiaris
  misc_feature (1)..(577): n = a or c or g or t
cttgagcangcagtttgcaaagatatataaaatatatatggtcatagaacaaagaatagtgagagacacaaagcagggatgcaaannagaaccgggaatatgaataagagtgcgcaccaggtgacccaaattcttactacagatgggtcacagattttgctcagaacttttcagtagccagtgtagacagagttcatgtttccaagttcactgatacaattcacaagtgttaatagggggaatacagaaaaattattgctataaaggcaggtgttagtatatttcttctagagtcctctagtataaacagttcattgtggatgctgatacaatgcctcttacctggcttaatccaggggtagactttaaaacatcaatcttcctccctaatggtcccattaacccaatgatattgctcctccagactgttctccttcaccagagactacagcacaactggacacttgttcatctgaacccaaatgcaaatgctctaagttgagatggagtatcatcactactgttaccttttaaaagcattacaaattcattattaatttcattttgcttttgtttt

SEQ ID NO: 9109 - DNA, 624 bp, Canis familiaris
  misc_feature (1)..(624): n = a or c or g or t
agtgtggtgccagacgnncggtcagttgtcacaacagctagaatgcaggtnntcaaacgacaggtccagtccttaatggttcatcagcgaaaactagaagctgaacttcttcagatagaggagcgacaccaggaaaagaagaggaagttcctagaaagcacagattcatttaacaatgaacttaaaaggttgtgcggtttgaaagtagaagtggatatggaaaagattgccgctgaaattgcacaggcagaagaacaggctcgcaaaaggcaagaggagagggagaaagaagcagcagagcaagctgaacgtagtcagagcagcatggttcccgaggaagagccagctgctagtaagacccaggagaagaaggacgacgaaagcatccctatggagacagaggagacacaccttgaagaagcaacggaaagccaacagaacggtgaagaaggcacatctactcctgaggacaaggagagcgggcaggagggggtggacagtatggccgaggaagggaccagtgatagtaacactggctcagagagcaacagtgcaacagtggaggagccaccgacagaccccacaccagaagatgagaagaaagaataaatgttgccttgtttt

SEQ ID NO: 9110 - DNA, 460 bp, Canis familiaris
  misc_feature (1)..(460): n = a or c or g or t
cagctccaactgcaaaagacagaacacggtgccccaagtggcaactncnctggctctcagtccagccagaggcaggattggaactctgccttcagaactgcacatctccctcagaaactgggtgattctgctcccttctgatcctctttcctggtattcctcactgctttctgctctgctggatgctggtctcagaaggtccctcccagggcaaggccctctccttgctgaaatcatgtcttcagctctgtctcctgtgactctgaagcaacttcccttagagaccaagtgccannnnncnnnnnnnnnnnnnnnnncacccnnncnnnnnnnntnnnnncctnnnnnnnnnnnnngnnnnngggccaggannnannnnnnnanggggtggnnnnaannnnncctgtatgnnnnnnnggggnnnnggntnncngnnnnttgnnngnnnntgccaggnnnn

SEQ ID NO: 9111 - DNA, 609 bp, Canis familiaris
  misc_feature (1)..(609): n = a or c or g or t
ggnnctgcgacaaccagnnnagggtgtatcatcacaccacccnggtcatcagcctgtacagnntgagnnngagcntggccctcatagcggaacagggnctggagaacagctggcggcagcaccgggaggccacggcatatctgcatgagcgcctgcaggggctgggtctgcagctcttcgtgaaggatcccgccgcccggctgcccaccgtcaccactgtggccgcgcccgccggctacgactggagagacatcgtcaaccacgtcatggaccacttcgacatcgagatcacgggcggccttgggccctccgtggggaaggtgcttcggatcggcctgctgggctgtaacgccacccgagagaacgtggaccgcgtgacccacgccctgcaggaggccctgcggcactgcccccggcacaagctgtgacctggccgcctgctgctccccgacctggaggggccgagagcaaaggaccctgccagcggggggcgggggagcaggacagccgctgccccgggcgggccaggctagcgggagggcgggacggccgcggcacctcctggaaatggaccctgtgggctcaggacccacgcgagccgcagccccg

SEQ ID NO: 9112 - DNA, 290 bp, Canis familiaris
  misc_feature (1)..(290): n = a or c or g or t
taatatnnnnnaaaaaagataactaaaaagtagaaagaaaaacatttttagtgtgaagattccaacagaaggatgtgaatgttcggagaacaaccatttcagnnnnnnatataaaccaaacttaaatttgtgaaacaatgaagtngatgcccttgttgttacactgtataaaaataatttcagaattgcttttgcaaaaacacacaattttgcttaatttctggtgttaatctgtttatattttaacttctaagttgccttgtaattgagactgtnnnnnatcacagaaa

SEQ ID NO: 9113 - DNA, 538 bp, Canis familiaris
  misc_feature (1)..(538): n = a or c or g or t
ctgacccagaggagctactacccactctaccctcctcannaagacatggccattgactatgagaatttctacatctatgcacagttgcccatcaccccagacatcttcattatcccatcagagctgaaatatttcgtgaaggacgtcctcggctgtgtctgtgtgaatcccgggcgcctcaccaaagggcaggttgggggcaccttcggccggctcttcctcaggaggcagcaggccgtgggcggggaagggaggcagagtccgtgcactgctgcccaggtggtcaggatctgacgccgtgctcacagacatctgggatcccagccattgagaggtagaggagagaggacagccagctggagaggagaagctgtggggcgtggacccagcgggcaaggccccgtgcagctgggccctgactcnnagtcaatctgctctggcagaaagctgttgtttcttcctggacccacagtccagagcgaactggctgtggatgcannnnnctcagaaaagacannnnnactttgtgattttctac

SEQ ID NO: 9114 - DNA, 440 bp, Canis familiaris
  misc_feature (1)..(440): n = a or c or g or t
gtgccagaacagccacnngnctcagtgcannaactagcttttgtcnntgagcaacaccctgaaccanctcaagactcctccccagctcctagcgcgggcctgctgaagcacctgccctgttctgttcatgncaggctcaggtgtttgtgctgaggattggcccgattcgagatgcctgctgctgagtcaaagtcaatccacgtggtagtcactcctctgattcactctcctgatctggaggagccacctgcaaccttggccaccccagaaggaggagcaggctccggcgcccgctctcgagtgcatcgaaggcctggagcagccacttgcctcagtggagccaccagccttgtcccccgagcagcatctcatggtggctgcagtgcaacagaaggcttcctctcccctgtcattgcactgtnnnnatattttgtgttttt

SEQ ID NO: 9115 - DNA, 652 bp, Canis familiaris
  misc_feature (1)..(652): n = a or c or g or t
aattttttttttttcatttcacattgtgagcatcttcccatgatgnnnnctgnnctctnnnnncatgaatttaatgattttatagtagtccattctataaatgtcacataatttaaccattttcctactnnggggcattgagattgttttccattatatataaatactaccatgaatattttagggcgtaaatctttgtatctctgaatatttcctcagggttgatttattggaaggtgagaacgtctaactggttgttttagattctgcatgggaatcaccggtttgttttctagctcatattcagcagcatgagacaggcctatttatgggtggatgatacagtccatcaattaattacctttccaacttcaaagacatttgtcttataaagattattttggcctcctgctgcagatagctttattatgtctttcagcttgcacaatgtaattcaattgtaatttccttgaatattcttatgccaacttcaaaatttgaacagtatttacttatggggtacaagcccttactgcttcaaatatgttcatgagtgatgtacagggaaggtacttttgtcttcacaaagacataaatttataatgaaatgtactggttctgtccctattgattgatggatttttcaggtaat

SEQ ID NO: 9116 - DNA, 651 bp, Canis familiaris
  misc_feature (1)..(651): n = a or c or g or t
cngcagctcactgcttcgnaagaatcaagaactggaaaaacctgacagtggtgctnnncgagcatganntcagtgaggacgacnncgatgagcagnagcggcatgtggcccgggtcatcgtccccgataagtacattcccctcaagacgaaccatgacatcgccctgctgcacctgcgcacacccgtggcctacaccgaccatgtggtgcctctgtgtctgcccgagaagaccttctccgagaggacgctggccttcatccgcttctcaaccgtcagcggctggggccagctgcttgacaggggcgccacggccctccagctcatggccatcgacgtgcctcgggtgatgacccaggactgccaggagcagtcccgcaggagaagtggctcccccgccatcactgagaatatgttctgtgccggctacctggacgggagcaaggacgcctgccagggggacagcgggggcccgcatgccacgaagttccagggcacatggtacctgacaggtgtcgtcagctggggggagggctgtgcggccgaaggccactttggagtgtacaccagggtctcccagtacatcgagtggctgcgccagctcatggtctccagccataccttgagaggcctcctccgggccccactgccct

SEQ ID NO: 9117 - DNA, 552 bp, Canis familiaris
  misc_feature (1)..(552): n = a or c or g or t
cataaggcnnaacccacccacgggtggcaacgtggtcatcttcgacacggtcatcaccaaccannagggcccgtaccagaaccactcgggccggttcatctgcgccgtgcccggctactactacttcactttccaggtggtgtccaagtgggacatctgcctgtccatcgtgtcctccgggagggcccagatccggcgctccctgggcttctgcgacaccaacagcaaggggatcttccaggtggtgtccgggggcatggctctccagctacagcagggagaccaggtctggattgagaaagaccccatcaagggccgcatttaccagggtcctgaggccgatagcatcttcagtggcttcctcatcttcccatccctctgagccagcgaaggaccccgcccggcctggcctctcgtgcttcctgctgtgtgactctggcccactcacgccacctctctggtttctatggtccgctctgggggtgctgtcgctttagctgcctgaagggagggggctggctaccggagccctagagcctgctgcccaccgct

SEQ ID NO: 9118 - DNA, 517 bp, Canis familiaris
  misc_feature (1)..(517): n = a or c or g or t
tccancagaagagnaactcatatgagaannagagtcagtgtnacaaggtgnacagaggctgagggcaatgcaacttcatgcaactctttgagaaaggactatgtaggangtcatggagtagaagcagcttgggctggtggcagaaatggtcgggaagtcatggacagatttttcccactggctccagatcttctttcaccaagaggattattctatttagttaccattaaagaaaacaatccagaagaaattttgaaaaccatgacgacaagaggtctgcaagggactattgcactttctaggcaagcaggccaagaaattctgtcagtcctgagattcaccaagtcctgatttacagtgtgtgctctgtgctgtgtattaggctgaatatgtattgataataggtattatattgaatatatgtacatatgatgaatatatagagaaagaagctaagtgtatttggcatattttgaaactgcagtcatttcttggttaacaagtaaaattgtcaggt

SEQ ID NO: 9119 - DNA, 620 bp, Canis familiaris
  misc_feature (1)..(620): n = a or c or g or t
ctatggccccaccagggtgtgatgcttgnnnagccacgggatgcaggatgagggagtgccagagcctgatggccagctgggcccagaagtggggcgggagggaggatggcgaagaagcaagaggaggaggagagtcatgacaaagatggggagctctgtttcagccccaagaatgggaagtttcatcctggggtgcctgacccacaaagttggtcaaggtgagcggggtttccacagcttcgtctggtcaggggccacgaccccagcctgcgcggggccccctgcagaagttgcttccagggtgggctgcaccacacagaacacggtgacagagctgccgaagccgcgggaggaccctctctggcctcccacacacctgcctgttgaaccagccccgttagagcgttcttttctcacctgcaacctcttcgcattttcaatttgcagcactcacgaggtataattacagagctcattcagcgattttgttaatcttctcttgctgggaaaggagctaagtaccagcagttttctttgctggcctcaccctctggaatctgctgggttttgcaatccccaaaccagaccttccaggctgacactctaaacaaaaggagtgg

SEQ ID NO: 9120 - DNA, 523 bp, Canis familiaris
  misc_feature (1)..(523): n = a or c or g or t
ggggccactgcagctctgctgaggtgcctgtgtccacctttggttacctgtcatccctctttttcttttcaaagcagaactaaaaagtgacaagaaattaccagaagcctagctttttcctaagaacctgcacaaagagatgtgtcctagggtgacagtgggagcagaggacctgtcaactaaaagtaggccttggatccactctgctagggtcaggtagctcagctcccacaaaaggaaggtaacaacagctgtgtccttgggacttggggtggagagctttgtnnnngggttcacaggatttgggcctatcttcactaggcattagggtctttcacacgatctcaggccttacccttggctccactgacagcattctgtcagccaagaccactgatttgaaaaatccagcccccagtcagctgttgacagcactgctccttgctgaattggattaattcgtagttcagaggtacaaagttagttggtgantnnncagttacttgatgtcacaagcctgaaa

SEQ ID NO: 9121 - DNA, 536 bp, Canis familiaris
cggaaaccccggtagaagttcccccaaagccagcactgcctcgctggctggcgtctgtttttagcaacacttatgactggaaggaaaaagtacttaaaatataccaccctctgagacttttattccctgtaaaactgtcaggcttctcactcagctttctctttggaatgaagcattccggtttattttggcaaccagagggagtaacaaagaccaactttctcagagcggcatgggtccctcctatcaaagctatctgctgcccgccagtgagccagagaagcttgtgtgcctactccaaggaattgaggggaccctctttcaccagtctgatcccgatgatgcatggagagaaaacaccataagctcgaacaggtcacaaataacaaggctcacggggtgcgcacggaactgcgggggttccagggcaccctgtcagcgctccggttccctagtccccttccacgagagccgatgcggcacaatgtggtcctgtgtacctggcctctccatgggagagcccagcacaaacctgt

SEQ ID NO: 9122 - DNA, 501 bp, Canis familiaris
  misc_feature (1)..(501): n = a or c or g or t
actcaatttccccatgtgtaagatggggcttgtgccaggccctgctcacctcacaggnnactgcaagnnnaggtcatgggaagtatgataggtggtatcatacatgaatgatgaatgaagtnngagtcacacaaacttggggtgtagacatggcctgcacggtagatcagcaagtacttgggagaatgagtangnnnggtgccatcttcctggggcatctctgctcagagttaaggtctagccacacagatgctatgggagaccggtctcttgctacccaatgggagccagcattcagcttggcacagtgactatggatcctggacgcagggagtgacaggtgnctgggacaggtctccaggtccgtagcccttctgttaagtgattattttgtgacaccctctttcctgggccacctgccaggtttatctgttgtacctgtggcattccttattatgtcagataagttattacagtttattcaactctaacaggacaaat

SEQ ID NO: 9123 - DNA, 618 bp, Canis familiaris
  misc_feature (1)..(618): n = a or c or g or t
cccccaaatctcaggacctcagcaagatcatggcagatatccgggcccagtatgacgagctggctcagaagaaccgggaggagctggacaagtactggnctcagcagatcgaggagagcaccacagtggtcaccacacagaccgctgagatcggagaagctgagatgaccctcacggagctgagacgtaccgcccagtccttggagatcaacctggactccatgagaaacctgaaggccagcttggagaacagcctgagggaggtcgagacccgctacgcgatgcagatggagcagctcaacggggtcctgctgcacctggagtcagagctgtcccagacccgggcagaggggcagcgccaggcccaggagtacgaggccctgctgaacgtcaaggtcaagctggaggctgagattgctacctaccgtcgcctgttggaagacggggaggacttcagtcttactgacgccctggacagcagcaactccttgcataccatccagaagaccaccacccgcaagatcgtggacggcaaggtggtgtctgagaccaacgacaccaaaattctgaggcgttgaggcagcaaaacagggtaccctttgaggagcaggannnnnn

SEQ ID NO: 9124 - DNA, 561 bp, Canis familiaris
  misc_feature (1)..(561): n = a or c or g or t
accattcagatctcagtgtcactcactgaacactttnngaaatttgcancnnncntccagccaccnnnnnnnnntgactcaccaaggnactgtatgatctcagacctctnnnnngacaactatcaggttaaatgtattaatgggaagatgtgttatgtgcagaagcagccaacgccgcattcccacaaaatgagccctgaggaggtctctgcacacgatgccttaatttcaagagagagcaatacaccaaaaatagatcactgctcttctccctcgagtnctgaggactccgggatcaatgcgatcggggctcactatgtggaatcgtgtgatgaggacacggaagaaggagcagaactgagttcagaggaagattacagtccagagagcagctgggagccggatgagtgcacccttctctccccctcgcagtctgatctggaagtgattgagacaatagaaaccaccgtgtgagagtcgaagcaggaagccatggcctctgatccatgctgagcttttgtacttttgcctgatggatcctttttccaatgcagttggtat

SEQ ID NO: 9125 - DNA, 607 bp, Canis familiaris
  misc_feature (1)..(607): n = a or c or g or t
aaatattcataattaattnngnntcntanncctgctagnnnnnntcagaatgcnacaaacttggattcttgtgttatcaccacctagtggctgaagtggggcaatgccaacttttagtggatatttaggaaaattgatctgggaaaacaattttggattttctagaacagtgctagggtaacaagcaaaaactcttgtgccacatttgtgttaactctaaaacacagaacttggttctgtagcgaagacagatgagtacatctggatatggaatttgaattttaaagccaagattctaaatagtcatgttagaaaaagcattcaatatttttcagttcctaagaatatgaacaaatgaaggaattctgtgaaaataggtaaattcaggtgactatagcacagagcataaaattcatattagtacttaagaatttaccaaacttgtcaactgtacttccaagatgaagtagggcttttggagtagacttagaatgaacatgctttcaaaatggtagatgaaaaaccaaattatggccaggtgggaatttgccaattaaattttgctgtcctttgatctactatataacttaaacatggttcctatttt

SEQ ID NO: 9126 - DNA, 688 bp, Canis familiaris
  misc_feature (1)..(688): n = a or c or g or t
gtcctttcctctttctcggtctttgaagtccttcctttccggncctcaagccttttttgttgggtgtncttgtgccccatctcatccatgacttgtgcaacggagaaagctacaccagccagcccagcgtcggctttctgatccagtattgcacttggtagggttgctggggctgctgctaggccacagcaccaggctggggttgggggagaggcagatgactaggtgacctgctgcacttccagctggctggagagtaccactcccacttgggacaacatcaggcctcccctgcaaagagtgtactgtcctcaaagcagagcagttacacacaggtggccgtgggcggaattgtttgccaaagaaatttctggcctttccctttcccttaactgcatcagggaagaatccttatctctggcttggtttccacataaggtttttttgaggaaggggactgggataagaaatctgtcatgtagttaagtaggcaagaaatcttattaatccaattttgtttgaaagttgcttgtccatatgattttttttaaagttgtttagtttcacaacttttttttttctgaaattacttttggggtaatatttaaaatgagagacattttgtaaccctgtaaaatacatagggaatataacattccagtgtacacaaagaaggaaaattctttaa

SEQ ID NO: 9127 - DNA, 205 bp, Canis familiaris
  misc_feature (1)..(205): n = a or c or g or t
gcttcnggcttatnnnaaccaaatataattttatgccacttatatttgggaagataaaatgtattttttcctttaagttttagtttgttggaaagcaaatggattgttaaatatatgctgcatttggattcaaacattaaaatcaagaagttcggattatgttggacatatttctatacagttccataaatgttttattgtgact

SEQ ID NO: 9128 - DNA, 611 bp, Canis familiaris
  misc_feature (1)..(611): n = a or c or g or t
agataataatgttattgaatcaaangcatatgtgnncagaaatgtaatactgaccagtggttgcatcattggggcttgctgcagcctgaatacgtttgaggtcatccctgagaatacagtgatttacggtgcagactgnnttcgtcgggtacagactgagcgaccacagccccagacactacagctggatttcctgatgaaaatcttgccaaactaccaccacctaaagaagactatgaaaggaagctcaactccagttaagaactaagaacaatatatgacatcaagataacagtttgtctttgactactgtcttttgaaagggccacagttgttcacgtactcttagcaattcacagaataatatgtgttgattttattttgtaaaattgagtcagagaggaaggtaatggattttctttgtaactgtcctctataatttatataaaatgcattattttcctatatccttgctccttttctgagaatttccaggtttgatttatttttcttttgtcatataaaatgttgtcatataaaatgaattttagttgtataaaagactccgtgataagaaagggcatattgttatgtatttatattctagcata

SEQ ID NO: 9129 - DNA, 635 bp, Canis familiaris
  misc_feature (1)..(635): n = a or c or g or t
ttactgaaatatgtcagccctgaccagctgcctgtggagtatgggggcaccatgaccgatcccgatnnaaaccccaagtgcaaatccaagatcaactatgggggtgacattcccaagaagtattacgtgcgagatcaggtgaaacagcagtatgagcacagtgtgcagatttctcgtggctcctcacaccaagtggagtatgagatcctctttcctggctgtgtcctcaggtggcagttcatgtcagacggttcggacattgggttcgggattttcctgaagaccaaggtgggggagcggcagcgggcaggggagatgacagaggtgctttccaaccagaggtacaatgcccacctggttcctgaggatgggaccctcacctgcagtgatcctggcatctatgtcctgcggtttgacaacacctacagcttcattcatgccaagaaggtcagtttcactgtggaggtcctgcttccagacaaagcctcagaagagaagatgaaacaactgggggcagtcaccccaaagtaatgcctctcctcacagcagacctggctccctcagtgtctcccnnnnnnnttctgtccctgtagccatcattttcccagtnnccagatgcccaaaaaaagccgggn

SEQ ID NO: 9130 - DNA, 655 bp, Canis familiaris
  misc_feature (1)..(655): n = a or c or g or t
aagagcattaagtacctgcatttatcaaaagggaatacagcaaatgttgagtcatctgnnagcaattctgcatgtggcaccattatgtgaattattttaacgactttggcttcatgttaaggatcaccataaaactctaagacttggctaatcgtgtagaaaatgtggaggcgtcagtattccatgtgagcgctcggccgggctgcggcgagagagcctggctcagcctcccggtggcctcacgccctccgcgcttgctctgcgccagggctcctgcccgccggggtggccggggctcctcccgtgggcccagagccttgagcttcggttgcacaaggaaagccgcttcacaggttccggccagtgttcctgagaaggcccctcctttcaaaagaaacgtggagacccactaggaacgtgggacgtgacgtggattctgtgtaagcacgtgcagcacagttgcctttggtttcctttaaaaatgtacaaatattgtataatacagttttgtccccacacaattgtatttgccaagcttagtgcattcaagtacttttatttatttgttttgggtgggcagtattaatatatataaacatatagttactgttttatatattcttagctcattcaaagccatgtatgctgtaaatgt

SEQ ID NO: 9131 - DNA, 591 bp, Canis familiaris
  misc_feature (1)..(591): n = a or c or g or t
gaaccatagttgtttcttttatgatattaagnngcancttcagttttgcaaatgcccgtgaatctgagcaacctggcgttttcctgttgggtctgaaaacctggctggtggaggctctggattcagctagagaagccttaggaagggcagcttccgcacccggccacccttcacatctgtcctcagctccggactgcgggcgtcccttccccgctcccccatttccaagcttaatttaggaaaccctgagccacgtacccggctttgcagccgaatttattaggtgtacgtgatgcattttgccttggaacctgagttactcattttaaacaatgatctctgtttttttggtggtgaccagtgaggaccaggaaacaaccccacatcctggctaaaaatctcttctcggcttagaggagtaacagtgctttctgcttcttgggttttcctgtttccagataccaaacagtcttcacccctctgccttgtggcttcatagcccaatagggtgggattaaattgcttaagagggaggaagcataaggggctgacggggagcgtcggtgcaagatccctttccacgtggnctct

SEQ ID NO: 9132 - DNA, 576 bp, Canis familiaris
  misc_feature (1)..(576): n = a or c or g or t
gcattccccatagcagtngtggcatccggaatctgnnagctgcatcccagagtnngcgacctcatccttgctcacctccacannnngtgtccctactccgttcccttctacccagctttcaaggagggaatggcattggaagactatcaaaggatgcttggctaccaagtgaaggactccaaagtggaacagcaggacaactttctaaaacgcatgtctgggatgatccgactctatgctgccattatccagctccgatggccatatggaagccgacaagagattcatcctcatggcttaagtcatggttggcgctggttggcacaaatcttaaacatggagcccctgtcagatgtgacagccaccctcctctttgacttcttggaggtgtgtgggaatgccctcatgaagcagtaccaggtacagttctggaagatgatccttctcatcaaagaagactacttccccaggattgaagccatcacaagctcaggacaaatgggttccttcatacgcctcaagcagttcttagagaaatgtttgcagcgccaggagattcctgtccccaagggcttt

SEQ ID NO: 9133 - DNA, 71 bp, Canis familiaris
  misc_feature (1)..(71): n = a or c or g or t
aggtcaannagaacaccatctacatcgacgaggtgctctgcacccacatgannnagtccatcccnntgcnn

SEQ ID NO: 9134 - DNA, 710 bp, Canis familiaris
  misc_feature (1)..(710): n = a or c or g or t
caaggatggtgnctgaagaccccagatgtgagggtgctgcatctgtggnccatcccaagaggacaggatngagcatttccaggagctttctctgccacagccagaagctgtccttttttcactgcagaggtnntctaggggccatgggcctggcgtggccccttgaaaaaaagcaggttctgcccaagagccatgctaatggagggttggagaaggagtaggagagagggcccatcatccctctctactggatgagactaaaactaaaagcctactgtccctcactgcctcaaccagcagctgagagggtagcagaggacaagcctcctcctggcctcatccaagttccggagcttccagaatgctggcctgcaggcaggaagccaggccaggtagagtcccagagcagagaagaatatggcccaagcatttgggaggctcttacttacctcccccatcagtgccagtgcctggtggctgaggcttcagacagccctctgccccacaggtctggcctctgggggacctgggggaggagtcagagggggtctgaggcagcccatggagcgagacctatatgtgggacatgcctcaacagatggctttccccaacacccagctccccgcccccaccccggcagctgtgccctgtcctgtgactgtgtatagtgccaccacagcttatggtatctcactgaggaaaaagagaa

SEQ ID NO: 9135 - DNA, 566 bp, Canis familiaris
  misc_feature (1)..(566): n = a or c or g or t
cctcatattgaggtagntcggaaaaaagaagagagaaggaaattgctnnnacacacatgcaaggaatgtgaagtttattatgcagatattccagcagaagaaagagaaaagaaattggcttcctgctcaagacatcgattccgctacattccacccaacacaccagagaatttctgggaagttggttttccttccacgcagacatgtatggaaagaggttacattaaggaagatcttgatccttgtcctcgtcccaaaagacggcagccttacaatgcaatgttttctccaaaaggcaaggagcagaagacatagatgttgaagcaaaaacaggatggaagacagttcatttctttttagttatttatagttacagttggtattaaacattgattttgtttgatcttctataaactgacttataaatcatttttctattgaacgtgtttttaaatggcatttacccaccacacaactatttaaaatgtggatgtgcttatgttgtattgtcttgctttgcacctttaaaacagtaaggtgcnnnnntttgcactctaacttaagag

SEQ ID NO: 9136 - DNA, 744 bp, Canis familiaris
  misc_feature (1)..(744): n = a or c or g or t
atcatgatcctcattgactagactnntaanttcaccatttccttccaggtgcctgaatctatgtcacntagcactatgtagataatgtctggnnctgtcatnnccatgttttagggataacatctggttctctgtgatgcctgggttggtgtaaggacctgttctttgtaaggctgaggcctgtaacgtccagttctctgtaatgagtggatctgtagaatgcttgggtctgaccaactggtccttgtcttgttttattcggcctggttatcacccccaggaaggaggagggagtttcctcatctactccagcccattttgttgccactacacatctgacctgaccaggacctactgcttggtaggaaggagacagagctgtgagcagcagcttcccaagccctgtgtccaaccctgtgctggaagcaggggagaagtcgagggccgatgggggtagtgggggcacatgtggttctagccctctgagcagctcctgtagcagggccttgaggttctccttgaggtgaaagaagaagaagaggagggtacaaaagttctaactcccattttgattctactggttgatacctttaaatgttttataaatatctgagcctgtatttatcaatgccaagaatttcaaaatttcctccaacaagatgaagcagttcccatgttaatattccttctcattacctcctgtttcccaggttttgcagaaatnnnnnggaattataaacacag

SEQ ID NO: 9137 - DNA, 366 bp, Canis familiaris
  misc_feature (1)..(366): n = a or c or g or t
tgattcagtagttttttgtcatgggataaatnntannaggtgtatgtgcccnnntnnnatttgnnnnntttanntgcattnnaaaatatgaagcatttcaannntttgctaannngagtatcatttagtatctctcctaacattttgttnnnnctttaaattggatttataggttatcttgannnnnnnnttannnnttatgtctgtcatctggacatgnnnntgctatgcagtnntgataataaaaattctgattnnncaggtttaacctttaagttatggagaacattaatgnnnnnnttaaagtgtactcannnnngcaannnagtgttttaataagcatattgcctcattatccttggaaac

SEQ ID NO: 9138 - DNA, 610 bp, Canis familiaris
  misc_feature (1)..(610): n = a or c or g or t
taatatcaaggtagaaaaggnaggtaattnnnagttaattgtattttttagtgttagcttggttattcagtcntctattcaaatctgcttctgtaaagtatgctaaaaagtttgccttgaaaaaactctatttttttattagagttatatttgaagcttttcatgcgaaaagttaatgtgaatagaaaggaattttggtccctcatgacccatgttgttaattcttcagtgctttctaagttcacagagcaaattaggagaatgcatttcctatcattatttactgcattgtgggtagtaaatataaaccagtaccaaacttctctaaatactgtaacacaaccagtaaaattaaccatatacatacaaagggtgtattatatatataaatcaggaatcaagtccattcaccaaatttcaaattgatgtttactaatatttttgtgacagaatataaagaacctattgtgggtaaattacataccattagcatattattatttaatgtgtttatcattggatcttttgcatgctttaatctggttaatatatttaaatttgtttttttttcctctatctgaaggctctgtttatagtattttatgacact

SEQ ID NO: 9139 - DNA, 680 bp, Canis familiaris
  misc_feature (1)..(680): n = a or c or g or t
gtcaacttgatgaagaagatatgtgctcaacatgaacagtccagaatcataactgtnnttggntctgttcatcnnagtcaaactgattttgcttttgtggctggtnactggattggtaaattcttctccactcaaacccgtgnnagcttngacccctatgaaggtcaagagattatggtgagggccatgctggccttcctgcaaaagcaccttgacctgaaagaggactatgaccagtggaacagcctcattgaaggcatcggaccatcgcttaccccaggggccccacaccatctgtccagcctgtaggcacaaccggccatttgtgaaaggtcactgggctgagttaccatttggggcctgcacggggatacccgtagcctcctatcaagaactggttgagatgacccttcttcacagtttgagaggatgtaatcacactgctgattggataactggatactttgatcttggacttgttgattttaaactcatgctgagacttggatcacttactgattggcaaactggctttctgggaactgaaccctgatggtgtggggaacaaacagtggggtagagttggggtgccgggtttcttcaaaccccaaactgagcactgttaactcagtggcctactccctccccttgagccagtgtggcttctggcgtggaagaaa

SEQ ID NO: 9140 - DNA, 541 bp, Canis familiaris
  misc_feature (1)..(541): n = a or c or g or t
ttttctgcaatnnacaagataaatgggcacagctgaaannaaacaagattattccacttgtcagttttgaatatgcatttctgttttgcaagcatatagtacgtctcttggagctcttactgacttcatgagtcgcatgggagaaaacttcaggagtgaagctgttaggcaggccaaccctcttcatgaatggctttggatgccaggtgctgaggaacactgctctgcacgtggaggaatggcattccctaaggcagcatggtgcatgagaggagcaatcagttcttgattttgaagttggatgcaacaaccctaaccagaagggtgattggtgggactttcctcttccagagtctgaagatcccagcgcaggagttcaaaagtcctaaccacttcacagtggcaggaggagtgggagcggttcctttttcaatcctggggcctccacgatattggtgtgttgttaccaaacacaggaagctggttgactctgtttgtttaactcctgctgcagtggctttaaacccacagtnnnncctgc

SEQ ID NO: 9141 - DNA, 495 bp, Canis familiaris
  misc_feature (1)..(495): n = a or c or g or t
aataaagttgaataagtgaaaacagtgtggccacgtacaaactaacanngcactgccatgcaggtcttagntctctggnntagatgtcaaggaccttcctgggggtccctgggggaccttcctttcaaggtgtgctttttcccagctctcagagaagccctaacatctaggtattagatcagtggtggtctaagggaaaggcatgtggaagttttgagtgagtggtaggaggcaaaaaggtgcatctgagatgcttggaaacactgtcaaaaaggctgctctctccaaaaatgtttaaccttttccagtgatacttgactagtatagcagtaaaccagagatgactttttttaaaaaatcactcctctgggtatgggtacctgggtggcttagtggttgagtgtctacctttggctcaggttgtgatcctggggtcttgggatcgagtcctacannnngatccccatagggnnnnnnnctccttcggcctatgta

SEQ ID NO: 9142 - DNA, 630 bp, Canis familiaris
  misc_feature (1)..(630): n = a or c or g or t
gtgacccctgttgggaacagcctaaccaggatnataatatcccatttccacatcaatacctgcctctaatagcaacaaatcnnnnaagggtgaacataacagtcttgcagaaaatggatgaatacctctgtttaatagaggaaatatgcactgcccttttattagttaaaggaaataccaaagttccattttacaataaggctagagttttgtaaaatcttgggtccacttgtgactattataagaccagagtctatctgacttgatcccaagctcactctaggaatacggtcttctctgtgcattttgtgaatagtaaccatacttttaaatctgtattgtcaatgaaaattttacttgaaattgaagtgaggttgtcttttgttatgtttttaacctataggataagattcagtgttgtatatgaatttcagtaacaataaaatcaaatcatgtacatcggaaatatttgcacatatttttattaaatgtaaagttgcctttcatactacttggatgtgtccttcctgaacaaaattattaaatgtactaaaaatgctacattttaagtttgccattactctcaacagccatgattttgatgtattctttatagctccacttttattt

SEQ ID NO: 9143 - DNA, 111 bp, Canis familiaris
  misc_feature (1)..(111): n = a or c or g or t
cccatcccacgaggntgaggggaccaagtgatgcccagnacagttgagaccagggtggnnntggnntggcccatgccccagagcaggagacaccgggccggacatgccaca

SEQ ID NO: 9144 - DNA, 549 bp, Canis familiaris
  misc_feature (1)..(549): n = a or c or g or t
attacggagatgcatttnnnagcgccccctggtactcagcacacacctgcttacccaatgcatcactgtgactaaagccacatgcatcaanagtaactttgcttgccatggaaaaggtgtttttggaagacgtgggtataatgggattgcatgattgctttaaaccaaatcaggactgtggtgtgttttttcttattttcagaattgcctgcagttgcctcattcacctggaggtactctgacctgttacaggtgtgcttccttaataactgaaagataagtgggtggcaccattggagagaaaatgttggatctgccctaggttgtagttgatgccagtattgctcagacctgcctctctttaagttgcctggattgtatccttgaaattagtttgccaggctatcagaaatttttgatcagaaagaaaaaaagcaatgctggttgacaaagggctaaagatttttgctgcaaaagtcacatacatcactattccagtgnnnnnntaatagcacctatagaaaaagatgttctaaccacctttggcag

SEQ ID NO: 9145 - DNA, 595 bp, Canis familiaris
  misc_feature (1)..(595): n = a or c or g or t
tgatgatanngtcntctctcatttgtcacttgaannagcagaccgcatcttgtcagcagtgaaagaatttgggtaccaccgttacaagttcgttataaaagtattatttattcaaaagactggtcaggcaataaatatcgccagcagatggatctgggatgttgcatgggacagctgggttggggcaaaacatgaaacggaaacgtatgttgccttggccctggtgtttgctctctattgtgaatagctcattacatgtacgggagtccttgcttctcaacttttccaagatatgtgactttgaagatttgccaacttcacagtagctttgattagctatacttttgcctccagttgaagcttcattgtattcttgtaacaacaaacaaggccacgtttttaccttcatacttacttgttataatatttattaaagttctattaccccaaagtataaaagtatgaatgatacatacggggatagacagatatgagtatataaatacttctaagtagattctaatatagggaaattatttattctttttagatttgagacaattagaatttgctacaggaaatgtagcaattatga

SEQ ID NO: 9146 - DNA, 478 bp, Canis familiaris
  misc_feature (1)..(478): n = a or c or g or t
aaacatttcattctttaaaaaaaaaaaaaaaaaaaaattttttttttttctcnncttcctnttattggtagttctctgaacgttagatattttttttttccatggggtcaaaaggtacctaagtatacgattgcaagtggaaaaataggggacagaaatcaggtattggcagtttttccattttcatttgtgtgtgaatttttaatataaatgcggggacataaagcattaatgcaagtcaaaatgtttcagtgaacacgtttcagcagttcaactttataacaattataaataaacctgttaaatttttctggacaatgccagcatttggatttttttaaaacaagtaaatttcttattgatggcaactaaatggtgtttgtagcatttttatcatacagtagattccatccattcactatacttttctaactgagttgtcctacatgcaagtacatgtttttaatgttgtctgtct

SEQ ID NO: 9147 - DNA, 563 bp, Canis familiaris
  misc_feature (1)..(563): n = a or c or g or t
aaaggggtggnnagntttgggatactannnagcaagaactcttaaaaactnacatctcgagttcctgagtctgaacagtgagatgcagcgtgagaccacgttcagttacacttctaatgcagtgaactggaactaacttctactacaagtgaggaagagagtttactaataaattaatggggcaaacaaaatagaaattactgaacagactttgagagcttcttgaaacaatacagaagcagcactaatatgcagatggtgaattggaaataatggtttaactggtctttctttaaaataggcctttaagaatactcatttaggagcgatccataaatatttgttgtgaaaaattcaaacctcctgaaatacatgtaataaaatgttttatctcctcacattaccctcccaaaggttgccagtgtttgcatttaataatatatatccttttatgcttttttttctgtgcacttaccaagtgtgaatatgtaaagggtttgttttgtacatatatgggattatactaaaataagtagtgcctatttttaaggataggttaaatt

SEQ ID NO: 9148 - DNA, 673 bp, Canis familiaris
  misc_feature (1)..(673): n = a or c or g or t
agatttgtannacataccaagnatgtgctgagtgtggnnntctcctccgacaacnngcaaattgtttctgggtcgcgagataaaactatcaagctatggaataccctgggtgtatgcaagtacaccgtacaggacgagagccattcagagtgggtgtcttgtgtccgattttcacctaatagcagcaatcccatcattgtctcctgtggttgggacaagttggtcaaggtatggaacctggcaaactgcaagctgaagaccaatcacatcggccacacgggctacttgaacaccgtgaccgtctctccggatggatctctctgtgcttctggagggaaggatggccaagccatgctgtgggatctcaatgaaggcaagcacctttatacacttgatggtggagacatcatcaatgccctatgcttcagtcctaaccgatactggctatgtgctgccacgggccccagcatcaagatctgggacttggaaggcaagatcattgtagatgaactaaagcaagaagttatcagtaccagcagcaaggcagagccaccccagtgtacctctctggcctggtctgctgatggccagactctgtttgctggntacaccgacaacctggtgcgtgtgtggcaggtgaccatcggcacccgctagaaatgatggcagaact

SEQ ID NO: 9149 - DNA, 485 bp, Canis familiaris
  misc_feature (1)..(485): n = a or c or g or t
cctccgtgtnntcccaggcagtggggcctggcagcctgctgtcctcctgctgcccccgcagggccangcgccgtgccattcgccttgccaactccactgcttcagtcagtcgtggcagcatgcaggagctggacacactggcagggctgcggaggagccctgcccctcagagccgctcaagcctcaatgccaagccccatgacagccttgacctgaactgcgacagtcgggactttgtggctgccatcatcagtatccctacccctccggccaacacgccagatgagagccaaccttcctcccccggtggtggcggtggggccagcagcaccctcaggaactccagcttgggcaccccttgcctcctcccagagactgtcaagatctcttccctgtgagctgtgggcccgcccatccagagggccctctcagttcttggggactcctttccaaagccatattttggggaggcggagaggggcagg

SEQ ID NO: 9150 - DNA, 631 bp, Canis familiaris
  misc_feature (1)..(631): n = a or c or g or t
cactttannngctcttcagacaaaatgggatttcaccatgctgaatggaatgctgtttgttttactcttcgnncttatnatctatnnnnntctcnnactcttcatacgatcatannggnngcatctgttgtatgctggacttgnaactatagtcttctcactttacttggtgatggatgtgcagctcatggtgggagggcgccaccatcactctgacctggaccctgaagagtatgtttttgctgctctgaacatctacttggacataatcaaccttttcctttttattttgcaactggttggactgggacggtagtcatatgaccaagactagttcatgtcgaaaagagggaaggagggatgcctgcggaatgttgccaggctccgacatgtggaggttaccacttcataagccttttattaaaaaaattttttaaatacttattttttggtcaaatgaagccaagcattcagtagatggtagctgtanctatgatatatttagttccattgtcacnnnnnnaaactttctgggggacatttctgatttttataaattcaaaagatgactatcataattacatactaacaaacatttgtaagttgtccataacattgttgaagttttcca

SEQ ID NO: 9151 - DNA, 657 bp, Canis familiaris
  misc_feature (1)..(657): n = a or c or g or t
gnctctgatttggagaaccagcccagtaatgttgctattcacactgagccatcaaggcagnngccgtctcnnngnacatcgttaatgtcagtatctcttggtagagacnnnnatatgtcttaaaactgccaaagcatctcattgagaattctgatggtataaaaaaaaaaacaaaaaacaaaaagaacagtgtcatctactgcagtctatttaaagatgacttttggtgaaaactcttagccccttaaaaatattttaagttttttttttttgtgttaaaaatttgtaaaaatcattatttgttcaaaaagtatgtatgtcccaccctcagagatatgcacttttaagtgaggaaaatgatattgctagcagtttatttaaaacttgggatcctttttaaataaaaaaatataaattttagaagttatttcataaagccatatggtattgacatatttttaaagtagtcaatgagtatttttgaattttttttttttgagagttattctggaaatgtgttataagctaggagaatccctttggacagtttatttttcttcttaaaaatttgtatgattcaaaaccatttcttcaggttaaattgaggcatnnnnntctgcacagtttnnnacctgccannnnaaaaatttaaatatt

SEQ ID NO: 9152 - DNA, 571 bp, Canis familiaris
  misc_feature (1)..(571): n = a or c or g or t
tcatttgctttgtatgtttcatcaggacancaatgaaacgtgtaatttgaaatcagtattgtatttttgaaaatcccatttccaatcagagatcttttttggattttaatcaatttataatgtgtattactgtattaagtgcacttgaatgtaattcaactatttgactaataaaatgagttcatcatgtttgcatagagatgtagcaattatctctggtaacaaaaggataaagggaatagttctgcttgttaactaatatctggggaagacttgctactatgaaagcgatgaaattagtccatctcttaactgttggcaagaatttttttttttccaaatcagaatgtgttttgaggtcttctgtaattgataacatttgagaaaaatggtggcattttttttttttttagctacctctttgtttatgcaccagtaaagatcatgtctttttgcaataaaagtgtagattttctttgtgactttgctactgtgccaaaagttctacacgggtgaatgtatgatggatacttgggatatctgtctctctatataactaatttggtactaa

SEQ ID NO: 9153 - DNA, 648 bp, Canis familiaris
  misc_feature (1)..(648): n = a or c or g or t
tgtatgtacctnnaanctaaacggcannatcgtnaattaaaacatgttttnganngtgtacgtgggggagtataacgggcacagatgtatttcagcccgtgtctaaaaagacttaagagaagaattggcagctgatagctttgtgatgtgtttggctgagagcgcccccagctcgaaagctgcttttcatgtggaatattggcccgagttggccgggctttgttaaattgagctttctgtgggcaagactccagttcacttaccacgctccacaccatgcatgtaccgcactccagaaatcatgcttctccctgaatatactaatacttggtttccaccagataatcctccacactccgccctgaaagccagtggccacttcacgctggttgtgccagatgctgaggggtctgttgtctttgcagatgcttttgttttgacacttgactggcgaggaagtctctctgcacagagcagtgccctggggcaggtggatgtagctagaaagtgcggcagccctcaaagccctgagcggcacgtccacgggaggcctggttaatcgtgcgccctgtggagtttggaaaagcagaagacctatctcagggnnggcccttggttgagnnnnnngtgctttctggaggtgcaggg

SEQ ID NO: 9154 - DNA, 532 bp, Canis familiaris
gacaagcatgaagctaaattaaaaggagtaatatacttccaagctattgaagaagtatattatgatcacctcaagaacgctaataagagtcctaatccattactcacctttagtgtcaagacccatgacagaatttattatatggttgcgccatcgccggaagccatgcggatctggatggatgttatagttactggggcagaaggttacacccacttcttactgtagcgaactggtgcaacagtctacttcagggcgactgcaataacctcttacaagaatgaagccatattcaatcccagatgaaaagacccaatagacccatccctttaaccgtgtatactcggaactccttttatattaacaggaagtcacttataaaagagaaaaagggggttttaactcaaagcttcatgataaatagcaaaaggaccgaagcacctatgaggaaaaaaaaaatactattttggtaaatagcatcacttataggaacatttcttacaaactattttttatcgattgtttactttgg

SEQ ID NO: 9155 - DNA, 328 bp, Canis familiaris
  misc_feature (1)..(328): n = a or c or g or t
gatcacgatctccnnnctgcctttatnntcggagnntacgctgcacnnnnnnnnnnnnnnnnnctcctcnnnnncncncngtatnctgagcnncngnnnnnagnnnnnnnggnngnnncctgtaggggacggtgtgnngcttcgagttcaacagcctnnnnnntttgtaccacaagatactgggcacgtgtgccccggccaccngnnnnctcnnntccagggnnnnnnncacnnnnaccannagctctctnnnnnnnnngccccaacctnnctgctncnnctacactcccggnagnncaggtcatncgngnnnnnnttgtcagcacac

SEQ ID NO: 9156 - DNA, 566 bp, Canis familiaris
  misc_feature (1)..(566): n = a or c or g or t
ctattgaaggatttttcnnncatgctcagtggcagatgcgggtagcagtatcnnngcaacacaaagaaagggagacaacaggcataatgagaacaaagagctgctgggttccacattagcaagagaaattgggaataggcacatgaaagtgaagacggcacggattcagagcacaagtcaatgcccctctgatctacagaggatgccacatgggtaaaggatatctgcagaaggtacaccctgtttgtccatgccccgtggccctactaagattgtatcagaaagtctctgaggttgcatctctacaatatcaaagatacagatatttggaaacatccagatgttgactcaagtttttacttgtatccagatgtctgagaatgtatatgcccaggctaaaagcagcaataaaaaaatgaggaccttttccatgcaaaatgaaacaattgacccaacagaagcaactattctgccccggaatatccttgttgatgttttttacctctccttgatttttgcctaaatgaaatatgtgagattcgaatgccannnnnngagaaaaacaa

SEQ ID NO: 9157 - DNA, 513 bp, Canis familiaris
  misc_feature (1)..(513): n = a or c or g or t
acgggcctccaccaccaccaccngatcagtnngccccnnnnggngnnnntnntccannnnntactccaggggcagcannnnnnnnnttccctccgcctnnnnctcaggccgccccagacatgagcaagcctccaacggcccagccagacttcccctatagtcagtacggttatggacaggacttggctggcttcggacagggcttctcagaccccagccagcagcccccctcctacgggggcccctcggtgccaggctcggggggccccccnnccggcggcagtggctttggacgaggtcagaaccacaacgtgcaaggattccacccgtaccgacgctagctggccggcgccttgcggacgtcggggcggccgagacccaggatttagaacttgtgaactcgtgacaatcacaaacttggcagaaaaatagcgactcgacggtggggggagggggggcgagaggcttttggaggcggctgtgggtgtctggactgaagtttttaaatatatt

SEQ ID NO: 9158 - DNA, 600 bp, Canis familiaris
  misc_feature (1)..(600): n = a or c or g or t
ccccactgcanncanttaccaactccattttgctctgcagcagnnngnnnaacagaaacttcagtcccggcagcttctggaccagagtcgagcccggcaccaggccatctttggcagccagacactatctaactccaatttatggacaataaataatggtgcaggcggtagaatttcaagtgccacggctagtggccagaagccaaccactctgccacaaaaagtggtgccacctccaagctcttcctcctcactggtccccaagcccccagccaatcacaaacaaatcctcagaaagatgacatcccagagagtctccaaagggtcctctgcagaagggcagctgaatggtctccagagcagccttaactccgcagccttcatgcccatcaccagttccacaggttagtgggcacaccagctcttctgcagtcgggaggacagggagggtgctggcctgggcatattctctcttctgcgtccgaagaaacatgcagttcacagaatgaagaagcatccaggcttttgaagcattggcagatgggcacttgaggatgggatggttttccagaactagttcggagtggattacatttctca

SEQ ID NO: 9159 - DNA, 644 bp, Canis familiaris
  misc_feature (1)..(644): n = a or c or g or t
gccttgnntgaccaaagagnannaccacacgttacnctttattgcatggcctttannnnnngggctcccgnggcnnacacgcgagcgggcttgtttccgctctgcctgcacgctcctctccctcngccnnnnctcctcagggccttctgtacctgtgcctggccactggcagcactagcagtggcattagcttatgccaaatactgcttttggaaagaccttttctctttagtcggatgccacctcttcccctactatgagcagtcagggagggcaaacagccggctgggaaggcaggcaggccaatggccactcaggccgagagcctcctggactgctgcatgtaggaaatggataggaaccaggccctgtgtccagtccccacgtctcaagtctgtcctaagattacacctgctgtgatgactagggccagcctctgattgactctggggactagaacacagtagccgcaacttgaagacttacagatagaatttctatcagccttggggcctctggctggtgctgtgcagagggccttggacgatgggccagcagggccaattttttgttcaggtgcctacgctgttaactcacagactagagcgggatctcttggttttgcaccagctctgccaagccac

SEQ ID NO: 9160 - DNA, 603 bp, Canis familiaris
  misc_feature (1)..(603): n = a or c or g or t
cccaagtaggnctgctnnaggctgtactttgacattgtcatnnagacatttcagaaccaggcctgctggctttgcttgtttacagacccccttggggccagtgtgcgagctggctctggggagctgggtgaggaagaggagcacagctcacactcttcctagcctttctaaaccaaagttcttcgccattcctaccagcccagccttgctgctggttttttcctttcctttgggtatttgcactatgtgggaagcaggtttttctatgcgggagccacttttttgtacaggggtaagttggggttttcagggagtcctgtttggtgcctccttccgtattttttttcctcaatctatgcaagcggctctggccgccatcatctcctcggatgccagagggctgtcaccctagctcttgagcccaaggtggtggagcctcctcggaggggactccagttctctggcacggcctgaggtacacgggtgtgtgctccacacggtggagggcagggggtgtgaggggggaggtggggaggactattgttgccctttggagcttggtaggagggtggaccccagggcttggcaagtgccacttctggc

SEQ ID NO: 9161 - DNA, 599 bp, Canis familiaris
  misc_feature (1)..(599): n = a or c or g or t
attggggtttctttgtttngcatnnnnnnnctcagaagagnacannnnacaaactggtcatatccctgttgttgttacactaatttacatattttggtcagcaccatttttcatcagctcaggatccaccagtgtacacgtacagangcgtcctacaaaatacaagcttatttctagccttgttatgaacatcttatgtacctgcttttctacaattggtatgattatatttattattgcatgtttcacatatcatccagatgccgatgaatatatttggacacatttggctggtagtatgcttttacaatatttactcttctgcaccatcacagaagtgatctgtacatggatcattaccaggtggattgtagctgcattgtgtaacccagaatacagtgaaaagagtccttcactctcagaatccactgcccctacattaacgtacagagaaccagtgtgactccagtcaagaacaaaagtacaaagaaccagtgtgactccagtcaagaacaaaagattaactgggaattagtgaagaactcagtaacttttttcaagaggcccatggaaaatacatgctaatgaagtcctttctg

SEQ ID NO: 9162 - DNA, 660 bp, Canis familiaris
  misc_feature (1)..(660): n = a or c or g or t
agaggcgccacaggacagtggtggctaatnnacacccaatnnngnctgacacattcttccgcgtgcactggaattgtggcaagatcatcctgcagtctcntaatggacgcttcnnaggcattgtggacaatggcctgctgatggccaatgccaccattccaggcccaaatgaggaatttgggattcgattagctaaccgtcgcttccttgtattgcgaggtcgttatgggtatgtgggcacctcatcagaacacgacctaatgaagtgcaatatggatcagcccgactgcattcacctgctgccttgccgccagggcatctaccacttccaggcacagggtggatccttctggtcaataacatcctttggtacctttcgcccttggggaaagtttgctctcaacttctgtatagagcttcatgggagcaacttgctcacagtgctggcacccaatggcttctacatgcgatccgaccgaagtggcaccctgttggcagacagcgaagagattaccaaagagtgtatttgggagttttaggccaatgggatgccacctatggaaatccaaatcttccaggagaaactactgcactaaacacaacaggaacctcaaagtcaagatccatgagaatatctgttacacaactttccctacccag

SEQ ID NO: 9163 - DNA, 694 bp, Canis familiaris
  misc_feature (1)..(694): n = a or c or g or t
ggtgcaagtggcatgaagaanncgatattctcttctgtgctctagctgtttgcaagaaaattgcgtactgcatcagtaactctctggccactctctttggaatccagctcacagatactcatgtaccacttcaagattatgaggccagcaatagtgtgacacccaaaatggttgtattggatgcagggcgttaccagaagctaagggttgagagttcaggattttctcatttcagttcttctaatcaggaacaaagatcaaacccacccactggtgactatccatctggggtgaaaatttctggccaaaacagcagtgttcggggaagagggattacccgcttactagagagcatctccagttcctccagcaatagccacaaattctccaactgtgagactgcactctcaccttacatgtcccaaaaagatggatacaaatctttctcttccttatcttaatgatggtacttttttcaatttctggaaaaataacaagcccaacttcccttttgactacagtcatattaaacagatcacatcaatgataaatgttgccactgtaaaaactacttaatttgtaaggaaattctgtttcatagtaaaaataattgtggttggagaagatcttgggatttttgcttttctttttgcttttttgtggggttgttctacttcctgactgtatggtgtga

SEQ ID NO: 9164 - DNA, 667 bp, Canis familiaris
  misc_feature (1)..(667): n = a or c or g or t
tgtgtggnnnaactacttaagaatcatgatgaagagtcccttgaatgnntnngtcgtctgctcactaccannggcaaagatctggactttgaaaaagccaagccccgaatggatcagtatttcaaccagatggaaaaaatcattaaggaaaagaagacttcatcccgaatccgctttatgctgcaagacgtgctggatctgcgacggagcaattgggtgccacgccgtggggaccagggtcccaagaccattgaccagatccacaaggaggctgagatggaggagcactgggagcacgtaaaagtgcagcagctaatggccaagggcagtgacaagcgtcggggtggccctccaggcccacccattannnnnngcctcccacttgtggatgatggtggctggaacacagtccccatcagcaagggcagccgccctatcgacacctcacgactcaccaagatcacgaaggttgaaaaggtgatggctttcctcttggactaactggttagactcctagagacaggactgccagctcaagaagatgtattcacatctgtctgggccagcaaactcgcacagcagatctgtcccattccttctctacattccacagctaagaagcggcttttacagttttaacagttgaaaaaaataaaatggatgattt

SEQ ID NO: 9165 - DNA, 270 bp, Canis familiaris
  misc_feature (1)..(270): n = a or c or g or t
aggnngcgggatcnnncaggcctccttcctgcggcagcgcccccacccccacaacacatagccccgtgctgttgtcctttggcttggtgtgtatgctttccttgggtaaaatggccgttcttttgacaattcaagtgactgttttgtttactataaccttgaaaacaaaaactgtaagaaaagattccaatgatcgtgctgtggattttattaccaagatgtttacacctcccttttacctgtcatnnnnnngaactgtcgaatcttctc

SEQ ID NO: 9166 - DNA, 580 bp, Canis familiaris
  misc_feature (1)..(580): n = a or c or g or t
cnctgaggtnnaggcagaggcgnntgaggcagaggcggaggtgctgccgggtgagcccagccagctgccttccaaggagcagtccgactaggccctggcatgcttgggccagcggggtgggggttgcgggtgttgcagcaatgatgttcttaacgggtttggggatgtgtagggaggaagggtagtagtagacataaaatggcagtttaatttccatttcaagacaggagggaggaaggtgatttctaaggttctctctatccagagacgtgggattgaccaggtgctgacagcaggttctacagcgtccttccctgctgctctatctcttgtgagggctgcctggccactgcctctcgccccttctccaaggggctgcaccaagcattctgactgctggggctgcctcctctcctctccataaagtttaagccactataggcatcttttctggttaaaaaaaatctattaaagtttgactatttgatatttttatagtgattgccaactttaaaaagtaggctgtttgtaagcactgatncagttctcagaagagannnntgcttctaaatcatctatg

SEQ ID NO: 9167 - DNA, 585 bp, Canis familiaris
  misc_feature (1)..(585): n = a or c or g or t
cgnagagccnngcaaaagctcntnnaaatcaccaccaagcccacatacccgcccatgaacccaattccagcaccgttgcctcccgacatatcaagtttcaatctcattggtgacagcntgtctttcgacttcaaggatactgacatgaagcggctttccatggagatagagaaagaaaaagtggaatacatggagaagagcaagcatttgcaggagcagctcaatgaactcaagactgagattgaggccttgaaactcaaagagagggagacagccttggatattctgcacaacgagaactctgaccggggtggcaccagcagcaagcacaatactatcaaaaagctcaccttgcagagcgccaagtcccgagtggccttctttgaagagctctagcaagtacccagccaccccaggatctgtcacatctgctgctcctggcaccagagggatgggtcagacaccgtgggagtcatcataggtgggccggctgggagcttctgtggaagctctggaactttccccagctgagtggagagcccaacccccttcatgtgcaattgccttgaactgtgacctgcagag

SEQ ID NO: 9168 - DNA, 631 bp, Canis familiaris
  misc_feature (1)..(631): n = a or c or g or t
gagagctgcagcggtgccaaggtgatccgagagaagaagattatcgaggtacacgtcgagaaaggtatgaaagatgggcaaaagatactgtttcatnnagaaggagatcaggagnntgagctggagcctggcgatgtcataattgtacttgatcagaaggatcatagtgtctttcagaggcgaggccacgacctgatcatgaaaatgaaaattcagctttctgaagccctctgtggcttcaagaagacgataaaaacgctggacgaccgaatcctcgttattacatccaagtcaggcgaggtgataaagcacggggacctgaggtgtgtgcgtaatgaagggatgcccatctacaaagcgcccctggagaaggggactctgatcatccagtttctagtcatcttccctgagaaacactggcttcctcaagacaagcttcctcagctggaggccctgctgcccccacggcagaaggtcagggtcacagatgacatggaccaggtggagctgaaggagttcaaccccagcgagcagaactggcgtcagcacagggaggcctacgaggaggatgaggacgggccacgtgctggggtgcagtgccagacagcgtgagggaccagacagctggact

SEQ ID NO: 9169 - DNA, 512 bp, Canis familiaris
  misc_feature (1)..(512): n = a or c or g or t
gttgacgtnnngnnnnngctcttggccctcagggagtacctgctccctgtttgtagagtgctggtccttggctacacagtgtaagaaagtgcaggacgagccgcaccctgtcnaggtnnagggctctgtaagcttcctgcttgtgcctttggcaagaaatgtcactgtaacgttgagttgacctcctactactctcttggcaaagtgcttgattgagcagattcttggtagcaatttaaaaggtctacaactccttaggctgagaaaggaggcgtgacagccacagttggggtcaggaaggttccccctctgctggtgcagcccgggaagtaagaaagaaaggttcccagcctgcagactttgctgccacacctgggccacattccttcccccttcttgttgagcatgatccctcttctcaccacaccgtgtccatgggctggctccacactctccttgcctgagcaggggagcatctgcagccagtgtcttggcagcctcttccctgcaaa

SEQ ID NO: 9170 - DNA, 653 bp, Canis familiaris
  misc_feature (1)..(653): n = a or c or g or t
gggatctatgtgtatatnnnagtctgtgctgagtctgtgtaattcagtagatttcagttcctataacgnnaagaataatcattgtgagtgnnaaggataaatttgtcctgtatagcaccattatttttannctttcctgttgatagagctttaaaattccgtttcgggctcatattacgtacataaccgttaatttaaatacttaaccactaattttgaaaaattgcctgtgtgatgcgttggaatcgttgtaattcagaatagtcgtctggtctctaggaagtattaacaagaacgcttgcacataatgtcgctcattcagcaaaatctcggttgctacctttctcccaaactaaggctcttttgaggctcgacactttttaaaatgagcttactttttttgtcttctccaaacaagaggcaatagtccgcgagtctgaatataattctacagagaacagtgttccttttctccagcaaaatgccatgagaatcattaaaataagtgacaatttaactagagattttctttgttttatttcactgattaagatactgtggtgaatgacacagattattaaattttttacaagagtaaaatatatttatttgaaatggggagcgtgcattttactgtattttgtgtgttacgt

SEQ ID NO: 9171 - DNA, 631 bp, Canis familiaris
  misc_feature (1)..(631): n = a or c or g or t
tatccccacatccnataatcagatctganntcccattctttccnnntngatttngaaaatatgaactatgaagtaaactctcagatatgatttgaaggcattagaatagaaaccagcatttcagttaaaatttttaaaaaggctttgagtgggcagatggatgttaagacctggttaaaaaaaaatgatggccttgaggatcttaaggtctattcagaaaaggtaaattattccctgatagagcttacatatgtctggccaaattcttttttatttagggaagggggtgggtgcagcaatcctgatggtcagaaaagcagcagacagcccttctggttttgggaggacttttaaatttctggagtccccgattgattccccaagtgtcagtttagcatctttatcactgccaaggaatagaagaccccatgagatgtgacccatggaaggtggtacttcagagccgtgaggctctgagcacccctctggcctccacctacctttgttatttccctgtttctctagtgcttgcatttccccaacttcctacctttctcctgaccctttcatttgatctcttcagacacctccttctctttttttctctctaattggctatatatggaataaa

SEQ ID NO: 9172 - DNA, 673 bp, Canis familiaris
  misc_feature (1)..(673): n = a or c or g or t
ccatgtggtggtnnatatcatcttcatgttgggatcatgtgcnnnnttttctaagacatggatagaggtgtctggttcctctgctaaagatgtagctangcagcttaaagancagcaaatggtaatgaggggccacagagatacctccatggttcatgagcttaataggtacatccccacggcggcagcgttcggcggcctgtgcatcggcgccctgtccgtgttggccgacttcctgggggccattggctccggcactggcatcctgctcgccgtcacgattatttatcagtattttgaaatttttgtcaaggaacaggctgaagttggtgggatgggtgctttgtttttctaaatgttccaatatttcttcttgtgtgtgtgaaagggagaagaattttggcacattgtttttgtccaataacgcgattccccttttcttccctcagtttcttgtttcccagtgctcaccgtcccatttgtacaatgggccccgagctaaagcctgtgtgcagcattagtaccagctgccttaaaactaaagtttacagtattcattcacaaacgtacttgtagtgtcgcccatgatgctggaaaccagtgttcccgccttgccctgttcagccgtgccggtnagatggtgacgtggatnnnnnntgcacacaacattcag

SEQ ID NO: 9173 - DNA, 509 bp, Canis familiaris
  misc_feature (1)..(509): n = a or c or g or t
tatcaggtgngagacctctggttgtgatntnntnntgcttcctttatgactcttgaggnnannagccctgtgagccctgggaagacccaggcagcccgcagaccctcctgtgctgtgacgtggctatgccaagccgttctgcacttaccaatctcaggctcctcactgtagggggcatcagggccgcagtattaggggtgcccctcggaggacccagcagcaatccccagggtaccaacactgatgtgacaagtcttccttccttattcctccaacacgcagtaccaaaaaaggggaaaaggagaacttaaagccttactttgttttactcgccatttattgtaaggaacctttaaagcatttttaaggaaatactcaaaagcaaggttggaaaatgtctgatctttctatagaaagttgggtacagtatgtaactgcaggaaacccactgcccctttgtaagctgtggaacccaaaatgtatggaaatacttggtgttttcagcaaga

SEQ ID NO: 9174 - DNA, 436 bp, Canis familiaris
  misc_feature (1)..(436): n = a or c or g or t
gaaannnnngcnnngcaatgatttccagatganctttataaccnntttgcttgtttttatatgcaaaaatgttcatattttgtatagtatatcttttttttnnnnntgagcactttatgctttttagtnnnnnncatttgaggatatannntngnnntccttnnttatttaaagccatggaaaaacnnttaaagnntaatnnncagaaaaaaaaatgagtgnnnattattttgcatntnnnngagttttgtggtatgtataannnnnatattagaaatatattgcctttttgtaatactctttgaccttatttaagatgatttgccannnnntgtcattgatgtcctgttttnntaataaggaattcagccnactttgtttctatcatcagataacctcagaaaataatgtgctttatctgtatnnnnncctattt

SEQ ID NO: 9175 - DNA, 567 bp, Canis familiaris
  misc_feature (1)..(567): n = a or c or g or t
gctaattgctagcaaatccccctggttnnaggcctctttcccctctgtttctttgttagaagtttctgtggagctaaaacccaacctccatttgactgggtttctgtttagtttagttgggctctcagagactcctgtttgttgttttgtgttttaaatgaaaagcaagtttaccctcagagttatgcttttccaaagaggctagtatgcttttttttttttttaatgtttcaggttctaagtgaagtgagttggagagggattgggagtggtagtaactaaggtgtagaacatggtgagagttccctctggtctccaatccccagcacagagctggtggttggatagggggtagggagagaggatttctattcacctttaatatatttttacaaaaagcaaacaatttaaaaacaagcccaccgcttctgtacatgtctaaatatatttttagaagtgggtaggattgtgaatttctgatgcagggcctttttataaacaggttagaatagcatcatacagacttctctgttgttttttccccctgtttttttcttnnnnngtgtt

SEQ ID NO: 9176 - DNA, 584 bp, Canis familiaris
  misc_feature (1)..(584): n = a or c or g or t
gctagncctggcttgccatngnntcagccctgccngngcagcccgnnnnncgtgagnnagaagtcaccttcttagatgcctgtagtgcctgacaagcagagttagtngaaggtggcttcnagtctcctggggcctctggcctgggccctgctggacctacctcgccggcctggggccttcaggctgaccgggtggtgcccagcctgctccctgagcccagtgaccctgtgggctgttttgtatgcgaggtctgtgtgtggggagtcagggactaagggcttccggagagtggctggaagggcctccagcccctggagagactgtactgttcctgaacactggcctttatcccactgggattcggaaggagaggaggagaaccccacttcctgtcccatcctcctccatcatccctgacctcaatttagttgcctccggccttgctgctgccacgtccctaggtccgagagatgaatgcccttgctaggccactgcagactgactcctctgcagggctggctgcctcggggccaccgtgcctcagaggcagccagtggtgaggggcacctgctgcaggggcctgg

SEQ ID NO: 9177 - DNA, 626 bp, Canis familiaris
  misc_feature (1)..(626): n = a or c or g or t
ctggacaggagcagagatacacgtgccacgtgcagcatgnnnnnntggtnnagnctgtcacgcnnagatgggagccttcccctctgtccaccattgtcatcgtcagcattgctgctctggttctcctcgtggtcgtcgctggggtgattggagctgtgatctggaggaagcagcgctcgggaggaaaaggaccaggctactctcatgctgcacgcgatgacagtgcccagggctctgatgtgtctctgacggctcctagagtgtgagaccagctgccctgtggggactgagcgatgcaagatgtgttcacatctcacgtgatgacatcaacaaccctggcttgtctctgcaaacagtgtcaggatgtgcctgtgtccctaggagcataatgtgaggaggtggggagattggcccaccctgcccaccatgacctgtccctaatctgatgtgcgctctcttctctgatgtgctttcctgtccaggagaggcagggctggaccatctccatccctgtctttgtttcatgttgagtactaatctcttactacccgattgaaaataagaatccagatatgagtttgtgtttcctgagtcttgggatgtggggctgatgaggtaataaaagg

SEQ ID NO: 9178 - DNA, 589 bp, Canis familiaris
  misc_feature (1)..(589): n = a or c or g or t
ggcatcaacataactgatcttgcaagaaggaagaaactagagccctcaaatgtgggaaatttgagtttctcatgtgtnnagccctacaccgtgcctgtctttttcaatgctaccagttacctggaggtgccaggacggcttaaccaggacctgttttcggtcagtttccagttcaggacttggaacccaaacggcctcctgcttttcagtcagtttgcagagaatttgggcaatgtggagatttacctcactgaaagcaaagtcggtgttcacatcaacatcactcagaccaagatgagccaaatagatatttcctcagaacatatctcctcccaccctcatgaaactaccaagaggcaagaagtaacactgcaggaggaggagaggcacagaaaaggaagtcacaagcaagcctagacttgtccctcacagcattgcaagcatggattagggaaggaaaatacagtaatagtgactcttacttcatgatgacaaggcagtggaatgatttgactttccatttgttttgcaaacctctatcaaacatttcccaactattatctgcaagctaatcaggaggacacgaaga

SEQ ID NO: 9179 - DNA, 613 bp, Canis familiaris
  misc_feature (1)..(613): n = a or c or g or t
caaagcagactacnnnctngaaataaacacaaatgtacnnnnngcccagagctgcaggtggcagggtcccccccagccactgccttgggaccctcacctgccacccctcactacctgctcagggccacagccaggccttagcacctgacactacatgacaggtaacaccaaaaagtccctttggctggggctgtgggggtgagagtctgcccccaccccaggacccaggcaggcccagtcagcagagagctgggctctctcccagcctggagtaggaggagggggctggctgaaggctcttcagggggcacctcagccctcctgaagcctcagcatctccccagcacatctaagcatctgggcggctttgggagttccacgccgtcagcccggcagtctgatggaccgcctcggggccctgggctgccagtgcttatggcagagctgagacgatgtttgtttattcctctgtcccaaacccacccgtcatgctgcccgcaccccagcacaggggaagtttttgtctgagcagcattctcagtgacctcgatgttgcctttagaagggtgggttcgcctcttgcatatgggctttttcagaatcatttatgagc

SEQ ID NO: 9180 - DNA, 362 bp, Canis familiaris
  misc_feature (1)..(362): n = a or c or g or t
aagagtntcgacacaggcgatttnnnnnnnnncagnnnaaatctcgctccaaatcannnncaannnngtctacctcagcaaggcagtcaagaactccaagaaggaattctggttctagaggacggtcaaggtccaagtccntaccaaaaaggtccaagtcaataggaaaannnnnntcaannncacctcagaagcaaactagctcaggaacaannnnnngatcacatggaagacattctgactccatagcaagatccccttgtaaatctcccaagggctataccaattccgaannnaaagcacaaacagcaaaacactctcattttcgatcacattccagatctcggagttatcgtcataaa

SEQ ID NO: 9181 - DNA, 652 bp, Canis familiaris
  misc_feature (1)..(652): n = a or c or g or t
aggactatggtgtcctgtacagagttgagcaacgnnnngntccactgtgnnagagctgaggacctggtgcccgctttggtgagcagactggcctcccagcagctcgttgccatcctggacccgccccgtgctggcctgcattctaaagtgatcctggccgtccgaagagctgagaacctcaagcggctcctgtatgtctcttgcaatccccgagcggccatgggcaactttgtggacctttgcagggccccatctaaccgggtgaagggtgttcccttccggccagtcaaggctgtggctgtggacctgttcccgcagaccccgcattgtgagatgctcatcctgtttgagagggtggaacaccccaatggcacgggtgccctggcacttcaggactctccagcccagcccccaccggggcccccagaggacactgtgcaggaggaaagcagggctgctgcctcttgctaggtccctggctagaaaccctttcagaatggggccctctgtatcactggagtgggagccaaggggttcttcaagtccttgccttgcctcaggacactcgggcagcaccaagagaacataaaacctggctgacccactcagggtccacctggagcctgttccctccaaccacccccaggttcct

SEQ ID NO: 9182 - DNA, 587 bp, Canis familiaris
  misc_feature (1)..(587): n = a or c or g or t
cagctgtgggcnnannnnggnntcctgctcccatgnnnggctcaaggaggtaggcnnncagnntagctcgcctttgaatgatggcacaccccaccttttcttctccacagcccactgccctgtctggactcaccctgtgggacccgattctgagatgggctctggccctcacccaagcttgtgctccccacccccaccgccccaggctatcctgggagccagaatgccaagggggcagccgttgctggctgctgcagctgcagtcactacatgattcactctggttaaacccttccaggcagccagagtggtgatgatctgtgacctgctagaggaacaggccaaggggacagacctgtgatgtgtcagttacgggaagagaaatcctcaaccctgtttcacaatctggattggtacaccttgcctcactcaggcttaggaaagtgggtgttgctccattaccttgattgtgcaaggccagggctggggagctcacaccttcccaggagtgtggctgtgccttcttgcacacacttggaagctcctgctgcctgggagggtgggtgacaccaaagcccctcccatct

SEQ ID NO: 9183 - DNA, 617 bp, Canis familiaris
gctcagaataacttagggcactcgcctgtttcctgtctccttccgctagagttgtcctgcaagggggcacggacacagcaccagcatcactcgtgcaggctgagatcaccagggaagaaccgagaggcagagaagtgatttcacatcagcagcccctcaaactctcaacatcctcagcgtggtcctcaccgtggccggtgttccagcagagaggggcccgccacagccagtgggctggacgttgcaacaatctccaggagaaaggacataccccacaccccacacagttgggtcaagaggggggagtgggcaggcaatttctttaagtcacaagaaatatgtcaagggatgtgtggacgggagctgcaccccaaggactcagggagagccccaaaggtctcggcacgtgggagcactgatattgccaaagctgatgttggctgctcctgacggactggcctggtccagccacgccagctctctgctaagctaccaaaagggagagggaaggtggaccctgccagagccccccagacttgtttctcatcaacgatccatgccttgtgggggtagaagcggagtctgtcttgttccctgctcactaaattgtgtgccat

SEQ ID NO: 9184 - DNA, 460 bp, Canis familiaris
  misc_feature (1)..(460): n = a or c or g or t
tagctcttttcttcaaaagcagtaacctgttcctctttggaatagcacatttcaaaccgtgttagtacccaggatttttactcagtaaatcctgatagtgactttccctaaaagctcttttaagattgaggcttgtgtaggtaataaaatattaccaaagtctacaaaaataaattaattttccatgttctctttcatgacagagaacggcactggttctgttattttttaaatgaataaatgattttttgataggtatttgatatttcttccctcnnnnntgatccttgggcagaaaccattctttatatttgatcgactgttttcagaaaaatcttaagtgtacaatagttgtctaaaactgtacgtttagaatggagtagcttaaatgctaggtcttagaagtttgaaaaatagcaaagaagacgattgggaaggcaaggtctgaagttgcttgtca

SEQ ID NO: 9185 - DNA, 644 bp, Canis familiaris
  misc_feature (1)..(644): n = a or c or g or t
ccgctnntgtnnngagcaagctnnngnnnatgtnnatgatgtgaccattgaggacctgtcaggctacatggaatattacttgtatattcccaagaaaatgtcccacatggcagaaatgatgtacacctgatagtaagaagctaattaatatgctttaaaccaatgaaaggttgtcagagagatttagttaatggcagaccttgcggccacgttgtgtgagaagacatcttctgctcactgtgcttgcaataaaaacttttcttggcatctccgttcatcttcttcctttaaacttactccctgctcttactccctgttcttacatacgcaccaaggcgagcagatcaaaggaaaatccctatcatttagaaaagtttctgggagatgaagaaaccgtaataacttgactggtagcagtgggttatatggtaaaagcctttgtaacgcagtgcatttttcacatctgtttaagaatttgttggccaaggaaaaggaaacattttgtaactggactgaacacttgtcatgctgtagttgccggcccaggatcttagaagttataggactgatttaacacaactttattgtgtctttcagggtttcttatgttattgttaagccagannnnnaaggtttagattcaa

SEQ ID NO: 9186 - DNA, 637 bp, Canis familiaris
  misc_feature (1)..(637): n = a or c or g or t
cangctggggtgtgagccccngcggggctggctacctgtttnncagtgacgtggtggcccagttcaatgcagccaacgacattgacatgatctgccgcgcccatcaactggtgatggaaggttacaagtggcacttcaatgagactgtgctcactgtgtggtctgcacccaactattgctaccgctgtgggaatgtggcagccatcttggagctggatgagcatctccagaaagatttcatcatcttcgaggctgctccccaagagacccggggcatcccctccaagaagcccgtggccgattatttcctgtgatccctccaacccctgcaacctccagcccctctggccctcggaccactgtgactctgccctcttctccagacagaggctgggcatcgggggtgggggggctgtctcggctctgctctccccccaaagagggcacttcgagggtgaggactttctctggagaggcttggagcctcagctccatgctcctctcctttctccccacttgaaccatggagtttccaataattttttggttttcttttttctttttctttttttttgtttgtttttagataaaaattttgagagaaaaaaagaaaaattctaataaaaggagaaannnn

SEQ ID NO: 9187 - DNA, 611 bp, Canis familiaris
  misc_feature (1)..(611): n = a or c or g or t
ctgatatcttgtttttcagnntagaagttagaaatcctaactcctttatcctctttccccagaggcctttcnnnnnntgtatattaaatgaacatcttttaaaaggcagatattttgtcaaggggctttgcattcaaactgcttttccagggttagtctaagaagaaagataaaactgtagtctaagaaacattaaagacttcagaaaagtgatttttttccccctctgaagtttttatggtggagaaggatgcgttctggcaagaaatcatgtatgtatgtgaatattttaacaactatttggatacagactttgggcttttagcaatataaataactggataggacaataatatatcttagtttttaattgcttatcaaaaatcaaaaacaatttatcctgtctatactctatctgttcctgaggtatctgttgataccaaagatcagattgtcatttgaatcccatcaaaagcaaatatttaacttgttcctttttttattcagatttactaagggatagaaaaatatcatacctttgtgtttcccccaaatttgatgcaactgataattcaatttgaaatttgtttccgtattttgctagcctaaat

SEQ ID NO: 9188 - DNA, 602 bp, Canis familiaris
  misc_feature (1)..(602): n = a or c or g or t
tgtacattccttttccnnggnctatcctaccccatctgctattcataaacggtttccttagaatagcagagaaggcagttatgctacctaattcagactatgacaaagaggccaaaaggctaaattaatctaagtcataaaaaggctcaagtgggtgttgtttatagcctgagggacaggctatattattggtcaatatatgaaacaatacatctatccattaatttctttgtatactaatgttcttatattcttataaagccctagattctcttggataaagaaactaaggataaaaaaaggtctgggtctaaaaaaaaaaaaggtctgggtcaagttgcattactagacagacagatgcccataaattttattcttagtttcattaaccttgtgtcttggatacaaactcacaaataacacttatatttttcctaacttactagcattttctttaactgtgttttatccaggcatgactgatttgttttgtggggagcttagagaaccttttaattgaggaaaatggtatgttaaacccctttgtgtggatcagaggaaaagtccaatagggaaagggcaacaactcatcttaagaaagc

SEQ ID NO: 9189 - DNA, 592 bp, Canis familiaris
  misc_feature (1)..(592): n = a or c or g or t
ttaatacgatcgccatgcgacttttggcatatgctttggattannggtncaaggggcagttgaaagcacttttttcggaacacgagggttattttggagccgttggagcactccttgagctgttgaagatcccctgatcgttacccagggaggggttcctggaacattccacaatgggatctgtgaacttttgttttttaagagacttattcaattttgtgattgtgtactacccgaatcaaagcaagaaaggacaagtgtatttttctaagtcatgaagataaatccttaaaaattcagcctaaactattaaccagtaaggaaagatacaaaaaaagtggaccatgtctgtggcagtgaggatctgctgtgttgaagttgctcttcagtatagctttgttacacctgccacgtatttgtgaaattcagtgtccttactggagccacttcaggggtgggctgttctgtgttcagctgactgcggttttgtgtcctgtcgaacttgctagatgtaaggcaggcactacatgttgtaatctaatcacaatgttaatatggccttggagatcatcatctgtgcattaactctggt

SEQ ID NO: 9190 - DNA, 707 bp, Canis familiaris
  misc_feature (1)..(707): n = a or c or g or t
agaaaagttcaaaggttatcaatccagcnnncnnagcnnnaatgtccaggataatagtagcacttcggatgaagaggaggaaaaacagcccactgcgaccagtaagaaggaaaacgtggacaacttggacgcgaagtgcacagcttccccctctggcagacaccttctccctgggctcaaaggagagccccccacgactgcaggccaaggaggggcaaccaaatccactgcgaagtccaatgccctccccagaaccaagaagaaactctaagtcgcctttaccgatgaatagcaccaacccagagctgctcttcctagcactggatgaggggccgggaggggagaggacaggactgtcagctcttttagcctttcagccccgctgagccctgccctgtgttggcaccggttcagacccacagcctggtatctccaaggcagctcagggtgtgggaggaccgccactcacctgcttgatggccggctgcggcctcagtcaactccagaggcttctgagaactgtttagaggagcccaggccctcaaagcaagctggtgggcagacttgctcagttttacttcaaattcttatatttaggcaccattatttgtaggagaaaatgagagccaggcatggcgatggaggttccaaataattatgtgcactttgcactagaagattttgttaggaaatcactaataaacttg

SEQ ID NO: 9191 - DNA, 593 bp, Canis familiaris
  misc_feature (1)..(593): n = a or c or g or t
ctggatgggctnntgagtgagctccctgaagacttcttctgtgggaccagcagttgggactgccccaaggcagggcacttacnctaagcagtcagcctctcagcacccaggcaaggctctggctgtgtctgatcaggtccaagggagagaggaagcccagcatgatgggagaataaacaaagcagaggacttttatggttgcccccaccctggatgctttccctaggaatgccctcgtctctcggattttgcactactgtcactctggatcttcctttggcattctagaactcagtcctgggatggcccttctgcatttctctgctctactgtcctccaagtccttcctacagaagaaatgcaactgttgcttctccccttgccaaccaggaagatgcgcccctctcctgcctcacctggacattagagcaccctgatcccttcactccctattccctggacagctgaggagtcccaccacatcagtggtgacctgtccctctggtcaggggaggaacacactcagacttccctctgctttggttctcgaggcctacagctgcccagctcacctgtgtgccaggctcctgggg

SEQ ID NO: 9192 - DNA, 577 bp, Canis familiaris
  misc_feature (1)..(577): n = a or c or g or t
ccgcaaggggagaatatctgtgggttctgacagcgacctggtgatttgggacccagatgcggtgaagatnnnctcggccaagagccaccagtcggctgcggagtataacatcttcgagggactnnngctgcgcggggcccctctggtggtcatctgccagggcaagatcatgctggaggacggcaacctgcacgtgacccagggggcaggccgcttcatcccctgcagcccgttctctgactacgtctacaagcgcatcaaagcccggaggaagatggcagacctgcatgcggtccccaggggcctgtacgacgggccggtgtttgacctgaccaccacacccaaagggggcacccccgcgggctccacccggggctcccccacgcggcccaacccgcccgtgaggaacctccatcagtcgggattcagcctgtctggcacccaagtggatgagggggtccgctcggccagcaagcgtatcgtggcaccccctggaggccgctctaacatcacgtccctgagttaagcgacccctccccaaagagaggggcggaagcaagaagagattttcttgaag

SEQ ID NO: 9193 - DNA, 598 bp, Canis familiaris
  misc_feature (1)..(598): n = a or c or g or t
cntcacaacacgcccatgnnagnccgaaggcgcagccccttccgttacgacctatnnaatctcaagtacctgcaccgtttcacgtggtcccacctcagcgaacatcttgcctttgagcgccaggtgcgcaggcagcgcctcagggccgaggttgcccaggccaagcgtgagactgacttctatcttcgaagtgtggaacggggacagcgcttccttgctactgatggggactcttcccgcccgaatggctcctggaactttgcccagcgtcctactgagcaagagctgagagcccggaaggcagctcggcccggaggaagtgaacgggctcgcttagctaatgccaaggaccaggctcgttccaaccgagggctgcttgccaagatctttggagctccaccactttcagagagcacagaggaaccctcactagtcagggactcttaaaagggagagagacccttttcatctcctggccctgcttcctgtctacatgataatgactactcaggcagacatttcatttctaagaccaggaatctctagtgggtgcttagacatagacgtcttatggatcnnnggtcccccctccaactcc

SEQ ID NO: 9194 - DNA, 638 bp, Canis familiaris
  misc_feature (1)..(638): n = a or c or g or t
gtagtggtagatgagaatgatgtnntcaagggganngtatcactgnctgacatcntgcaggccctggtgctcacagnnnnnnagaagctctgagctggnnaaggggtcannnagcacaaggggatatgcccccactcattgcctgaccaaagttctannaatcacagatgaacccttgagaaaattgtgactctgttccccgcttgggagctggggagggtgtggggggaggaaggagaatggatttttagcagtccttatcctcacacatacagcctagcccagcctagcccctgccatcttagacgtagccccctttctgggtgaatgatgggccgtgtgcccctcaggcaaattctgatctctaagagatccccagacctcacccagcctttgcctctatctctgcccctgactccaccctaagataacagcacaacaaaactcttcctaaagatatttttattcatcctgtttcatgctgtacggaggaggctgagtccatttagtgacatttcttcccataatgggagtggggaggattgtggggaggagggcctttggattcttgtgctgtgtgcatatgaaggcagatgggggttaggtggaggaggagggcagagtgattagctgaggtt

SEQ ID NO: 9195 - DNA, 631 bp, Canis familiaris
  misc_feature (1)..(631): n = a or c or g or t
cattgtgaccaagaataaagannnnnnagagtctgcactcagagacctcattgtagccaccattgctgtgaagtacacgcagtctaactccgtgtgctatgccaagaatggccaggttattggcattggagcaggacagcaatctcgaattcactgcacacgccttgcaggggataaggcaaactgttggtggcttagacatcatccacaagtgctttcaatgaagtttaaaactggagtgaagagagcagaaatctccaatgccattgatcagtatgttactggaacgattggcgaggatgaagatttgataaagtggaaggcattgtttgaggaagtccctgaattattaactgaaacagagaagaaggaatgggtggacaaacttagtgaagtttctatcagctctgacgccttctttcctttcagggataatgtagacagagctaaaaggagtggtgtggcctacattgctgctccttctggttctgctgctgacaaagttgtgattgaggcttgcgatgaactgggaataatccttgctcatacaaaccttcggctctttcatcactgatttcattgcatagtattttatggtttgcttatgtgtaggtgaaaaatcacatgtgat

SEQ ID NO: 9196 - DNA, 664 bp, Canis familiaris
  misc_feature (1)..(664): n = a or c or g or t
cttngtcctgtaggctttatgacagaagacagctatctccctatgcaaagtnnnnncttacaaagatttcttgacaaaaagaacattngtctttttcgaaatcttttcattgacannntgcaacttgctgtgcagtgaagtcttatctcccggcccacatgatggtgtgggggtacaagtggcccctggaatgatgtagctccccgccctgggtttcattgaaaacatatgccacctgggactgacttccagcttgtcgtgattttattccacatttcctgctttgtctctacggtttttaccacagataatggtttcccttatacgtagtggaaattactatttgtaggaactgttgggtcagaatatttaactgactattttgacttatattttcttcttttccttgtttttgttttttggggttttctgctttaaaatgtataccactatgtatatccagtccactgagagaattttggatctctcttaataaaactgcactaagtttatgattttatagaaattagcttttgtttaggcaactagtggttacactgtgcaaatattgtaatgaatttttacttttctgatttttgtaataaaattggtgaagatagagaaaatgtcaaatgaacaagccaatgttctgagtgctactaac

SEQ ID NO: 9197 - DNA, 668 bp, Canis familiaris
  misc_feature (1)..(668): n = a or c or g or t
gaccaatgctgccattgctttgtgagtcnnagatttngtagncaagcagagttgcatannaggctaaaaataaacgatattggatatatttagagctatccctggcagttatcagtgtttatgaaaggaaaatctaaaccagaaggaggttggtttatatagtggtaatccttttctgaatggaaccgttgctatatcgtttcaggagctagtgacaaagtcaaaggaggaagattaagagatcagtcttttcaggcagtataagtaaagagcttcctgttctttggtagaagctcctctagattgggtagattccaaataaatttagaaatgtggaaagttttaattacaaggccttgaacacagacttccctaaacccttgcaacccctagtgaattctgatttctagactgcttggaaaatcccgtattccctttgctaacttaatatttggggaccctgctccttggctgttcttttcttccagtctttgtcagttgtacttgtggcacgtgtttctttacctacgacccagttttgttnnaacacaaaatcgtagagaaacttaagtcttacttagttactagtaatgtgtttttatttattgaaaattgtttgtgctaaggattgtgttagatttacaaattagtggattgattcctctttg

SEQ ID NO: 9198 - DNA, 601 bp, Canis familiaris
  misc_feature (1)..(601): n = a or c or g or t
cagnngctgatgagcgtgcggctgtgcccgcccgtgccgggccaggtnntgctcagcatcgtggtcagcccgcccgcgcccagcgacccctccttcgtgcagttccaggcggagaggcaggcggtgctggcnnagctggcggcaaaggcgaagctcacggagcaggtgttcaacgagtccccgggcatccgctgcaacccggtgcagggcgccatgtactccttccctcgcgtgcagctgcccccccgcgccgtgcagcgcgctcaggaattgagcctggcccccgacatgttcttctgcatgcgcctcctggaggagaccggcatctgcgtggtgcccggcagcggcttcgggcagagggaaggcacctaccacttccggatgaccattctgccccccatggagaagctgcggcctctgctggagaagctgagccagttccacgccaagttcacccgagagtactcctgaggccccccccctctttagggccaggcttggccggcagggccgactctggatttacgatggccgggatggccggaccgtgggggtctctgcagccccctggacttgctccnnnngcctgtggggctgggcc

SEQ ID NO: 9199 - DNA, 593 bp, Canis familiaris
  misc_feature (1)..(593): n = a or c or g or t
aagatcccgggacctacagtacccccctcaggacatggacagtatgtaggtggcaggaatgggggggcaggatggtnacctcctccccaataaagccatttcgtcctttctaatgtggggcggaatgaggtctgctcctctggtctatcccctccccccacagctttctccctgtgatggggggcagctgaggggaagcaggggcacagtctgcctccaccgagcccctgtatataacctggagtgtgttaccttcagaccttttcacttgtactttatgcaaaatggctcatgtgagggctacaagctggagggtagtgtgggccttgggccacagggaggtgcctgtggagtagggggagttcatgcaccccttttttccccagaggggctggactcaggttagtttggggtgggggctcctgcactttgccacaggcatggggagggttctctccccaccccctctgccctcccaacttgggttgtactttctaagaaggtgattccccctacccttgtccccgtccccagaacaaaacatgttgatcatgtgcaatatttcttactgtgccgagaagccgaannnnccn

SEQ ID NO: 9200 - DNA, 621 bp, Canis familiaris
  misc_feature (1)..(621): n = a or c or g or t
acannncaaaatgcctgttttcagcaaggttaaaattaggaatgtccttttgagtcagaaaaagataggccatagactcattccccaacacaaatggtcattctatgaaatggtactgggcccaggaggatttcttcaaccactctcctactcttggtcttgaacctacctctggattagatcttactgttgtagctgctcacagcatcctcctgcatgcttagagtaatgcttttgggggaacactggtaaaatacagtatttatttttttcacctcctttcagaggacttggaggtaagctgcattcattaattcaagtttccctcttgctgtctgatgataaaagcttgcattttgctttatcagcatttgttagagccaatatttaaggacaagagttagaaaatctatcatttcctggcttacccgcagactatggcttaaccttgcagcatatcaacttatgtttcaagctagatatctttatttgatatctaaagtgcaagaccaacaacatatcaagagatctataggcaagaaggcaaagctcttgtatttttttcatccagacacttcaatttattttataaatttgttcatttttcctgttctgttttat

SEQ ID NO: 9201 - DNA, 680 bp, Canis familiaris
  misc_feature (1)..(680): n = a or c or g or t
ccatcgaacagatggagcatgttcggggaatgcaggagaaannngctcgcttgaattnnnagctctatggggagttagaggaacttcctgaggataaaagaaaaacagccagtgactccaatctagacaggcttctgtctgatttagaagaactgaattcttccatacaaaaactacatttggcagatgcacaagatgtcccaaatacttctaccagctaaaatgacatgtggttgctttcttgtggtttgaagaaaaacagcattttttacttttccagctgaatccagtagcagaatcatcttccacaacaaggaataaagtcattaaagtgccagtgcaatgattgttttcactactgcttttagtaaatttgacttgctgttatttgccataaccggagcctcggccttgttgaaggcttaatcaggaaatatgatacagaggctgtgctgctatgctttctattgttgccttatgggggttatacttgaaatgcagtgcgcaaaatgttattaatagggctgaaggtttatccttcctgagctcaccaaacttagtcccgtgttgattataagttgatgatgcacaggctttttgtggcagccctgcttcagtttacgttagacaatcagtacacacactggtgtgttttccagtggccagtgccaacaaaatgt

SEQ ID NO: 9202 - DNA, 546 bp, Canis familiaris
  misc_feature (1)..(546): n = a or c or g or t
ggctattgccnngcancagctgaggcacatattcagcncttcagagcaggacntgcgactacaggcacgaagatgggctgagacctacagcctggacgtnntagaggcagtaaccccagagcggccccgctgtgcctactgcagtgcagatgcctccaaacggtgctcacggtgccagaatgaatggtattgctgcagggagtgccaagtcaagcattggaagaagcatggaaaggcttgtgtcctggcagcccaaggtaacagagccaagtgaaagctgcagctgctgagggccaagcacccatgccctacaacccacccccagtgtgcccttgaacctctcgaaacctcagccagggctccagcctcccaggtggtgagcagagcgagcgccgcgaggtagtgagcacagcgagcccagcaagctgctgacccatcttccccagtaaaggctgctcgcttcctgccctaccctgcgggtaggctgagggtgctgcctcagcagctggagcgggaggcctgggcgaggcaagacaagggccggat

SEQ ID NO: 9203 - DNA, 618 bp, Canis familiaris
  misc_feature (1)..(618): n = a or c or g or t
agatgtcatgaaagagnngcacttcntgtaaggctgaccagttgcattttaaagaggnnagtcacaagnataacttctcatcctgacaacgaggtcaggtacaatgaaagggaaaggacnnnnnagaagccccagcaaatctgtgcatacannnggctgcagggactccaggnntgcagcagcgaaggagaaactttaagtactttggacttcataaatatcgcacaaataatttcactgggtaatgcggctgcggggtctccacttagcagctctgagcccagcatggtaccatcttcagctcgggcggggatgatcccaggagtggatctctgtctccttccatccatctgcagagagccagtagtaacacctggagatatccggagacagacgtggagagtgaaagatgcaagaaagagattggctgaagccttgagagaagacaggctcgccagggaggtggagagagccagaagccaagagggacattctgacaactagaggaaaaggaggaaaaggttgtgtggaaggattgaatgaggtggccccttgagaggtgcttcacagcccccagtttcacttcctgttgtgatgtcaatcctgtttcttgctcta

SEQ ID NO: 9204 - DNA, 650 bp, Canis familiaris
  misc_feature (1)..(650): n = a or c or g or t
agtgatcgctnnnatccatggggnctgcatcggtgcgggtgtnnacctcatcactgcctgtgacatccgctactgtgcccaggatgctttcttccaggtgaaggaagtggacataggtctggcggcagatgtgggaacgctgcagcgactacccaaaatcatcggaaaccagagtctggtcaacgagctggccttcacttgccgcacaatgatggctgatgaggccctggccagtgggctggtcagccgggtgttcccagacaaggagggcatgcttgatgcagccttcaccctggcggccgagatttccaccaagagccccgtggcagtgcagagcaccaagatcaacctcatctactcgcgcaaccatccggtgaccgagggcctcaactacatggcgacctggaacatgagcatgctgcaaacccaggacatcattaagtcggtccaggctgccatggagaagaaggaactgaagagcatcaccttctctaagctctgagagccgctgcggcccggggcctggcctggggcctggacttctcttacctcccgcccatttcctcatgggcagagaaggaggattagtgaagatggtcaccagtgccttctcccttggtctccctgtttctgacattatgacaccgatc

SEQ ID NO: 9205 - DNA, 521 bp, Canis familiaris
  misc_feature (1)..(521): n = a or c or g or t
ctacaaggttannatggctgaaaacattcccgaaaacnnnctgaagtacctttatcctgacattcccaaagacaaagcctttggtaaacactacagctcccagccgtgcgaagtctcacggccaacagaaagaggggacaaaggttatgttccatctgtttttatccccatttcaacaatccgaagcgattcagctgagccacattctccgtcagatctcctgcccatgtctccaagtgtctatgcagtgctgagagaaaacctgagtcccgcaacaattgaaactgcaatgaagtctccgtattctgctgaatgacaggataaacccttgactctcagaagaaggaagcaaatgaaaaagcttaaagactgatctttgccaacaatcatatcttatttcttcagctttgtatataccggattccaggaaatggttgaagtctgaagctctgctttcactgacgtgacaccaccaactgggaatgtcctggttgaaatgctaaaaaccgaagcttcagata

SEQ ID NO: 9206 - DNA, 633 bp, Canis familiaris
  misc_feature (1)..(633): n = a or c or g or t
acnnggcatgctgttctcatcngcattccctctgtgacatgcctgnnagnnttttcacagaaagccatggcaaggnntagaacccgcacacagattcnnnnagaccaaggaaccgacattaaagcataagtgctgcctgaatgaattcccttttgagaaatcatatctcagaacataacctggtattacaactgaataaataaagtcagttgctcctccatgcccacctggcctgtccctgaatgggagttagcccagttccttctaggaggggatacctggctctctttctatctaggctggagccactgggataaatgcagaagaaagaaaacatggaggtaaccttgagattacaccaccaacagaaacttggcttggccaaatgggagaaggcaacatctggctgtggcgagcttacaaaaatgcttgaatttacattgattccagggcctcctacttcaggtgtaggagccaaggggcagtgccctccaggtgactgaagaaaacaagcacggcttggacatggggtggggtggaggagaccattcaagttaaaaccaaaaagccagctgaactgggaggagccaaatacatgttaatctaggtgagatttcatcagatattttaatt

SEQ ID NO: 9207 - DNA, 636 bp, Canis familiaris
  misc_feature (1)..(636): n = a or c or g or t
ctgtgtgtgtgcaggcttgagtgtaggatctgttttgtacatattagaatgttttaacttatgatccgtngtcccagctcacacggaaacacgggtctctccttggtttctttgctgcatctggaaagcagtccgatctggggccaggacctaggtccaggtgcccagagatagcgccaggtgccagtacacctaggcccctcaagcctccagtccacttccgctcaggctgcctgtgttgaggtgaaggttccccacgcctggagcatcttctccgacgttgccacctgctggggctccactgaagggacgccctgcctgggggctctatctggggctgagaggacagaggcaacacacggtgggcccacagcccactccctacacagacctgcaatgtcccctcctggaggaggaaccagggacagcagaactgtccgagcaatgagtctgtgaccttttttggggaactggaagcgtttaacttgaacccaggggcgtttaaagctttatttatttatagcttcttataaaaaaaaaaagtgttgagaagaaaatcttttggttattcatacaagacaaacgagttggtgatggaaaagcaagtcataatcatctaattgtttttgnctaggt

SEQ ID NO: 9208 - DNA, 582 bp, Canis familiaris
  misc_feature (1)..(582): n = a or c or g or t
tttccccagacttgttggcgtaggctacagagangccttcaagcnctgagggaaagggnnnttcttcctaaattttcctgtcctctttcagctcctgatcagnngcagtcactctagtcaatgacatgaattttagcttgtgtgggggactgtaagttgggcttgctattctgtccctaggtgttttgttcaccattataatgaatttagtgagcataggtgatccatgtaactgcctagaaacaaaccaacaacactgtagtaaataatgctttttgaaattgaacctttgtgccctatcacccaaccttctaaaatcctaattgcattgacttccccaccaaatgctgaaaatgtcctgtaatgtgcacgtaaagtacttgtagttccattatagcctctgtctggcaatgccatagccctgtcagcatgaatttgtaatgtcttgagctctattatgaatgtgaagccttcccttatcctccctataacttgatccatttctaattatgtagctctttgtcagggagtgttccctatccaatcattcttgcatgtaacgcaagttccagnnnagntnnn

SEQ ID NO: 9209 - DNA, 627 bp, Canis familiaris
  misc_feature (1)..(627): n = a or c or g or t
ggacagcgaggagagagnctcctacatcctcatggaaaagannaaacctgagncttttggaaattgcctgttacggcctggcagccctgtccaagttgtccagtgcatctcagagctaggcatctttggggtctatgtcaggcaggggaagacacttgtgatgaataagcatgtgggacatctgcttcgaaccaaagccatcgagcatgcagatggtggtgtggcagcaggagtggcagtcctggacaacccataccctgtgtgagggcacaaccaggccttgcccagactttgctcaagagaccatctctccttcatacttgtcattcctctcctagcccctctgaggggcttccctccctgtaccttgacaaggctggtctcttcagttcacagaagggtgaatgctgagtaccttcccccagccctcccatctaaggaccagaaaagctgtgtttcccttaggtgagatctagaggcccctaaatcctcagagtgtgagtatagctgaaaagaagctgatttgaggtaatggtccataaccctgccaccctcctgtcagcccctcattagcctttccagcagtttccagtgttggacttaggataggactgagaggtaggagga

SEQ ID NO: 9210 - DNA, 561 bp, Canis familiaris
gcacctggccggtcatcctgtctgcagacgctgtcaagcccgtttccctgcagccagaggggtcagaacggggcagagggtgcggtgtgacgcctggcggggcaggacgggaggcctggctcttcactcaagagctcagggtcgttgtgggcacccagctcctccgtgaggggacacgtcagaaggagatggagccccggctgtggcccttgccaagctgctactgtttccagtgaccaccctgagaggagggcgtgaggctgcctcagtttccctgtgtctcttttcagaggctagctgttgggacttgaattcctgtagcagcaggcaggctcatggcagggcctggcagtggggacctcaagggtgccctggaggcctgtgcctgcctcgcagcaaccaggctttacatggattgggaaccacgacttgggtctttattttcagttcagatcgctgctctgaggtggagcagggctgtctacagcggcaggtcactgtgcggccgtggtccgtgctgtggctgcagactgcgggctggcctcctgaaggatgctgctg

SEQ ID NO: 9211 - DNA, 536 bp, Canis familiaris
  misc_feature (1)..(536): n = a or c or g or t
atgtcaanncgacagaacatccagaagattcntngtcntgccccttcacgtgctgccaccaagcaggcaggtnnatttcttggccctccacctccttctgggaaattttcttgaaatcaagaagaaccctgtaatacccgtcattctttttaaacattcaaattagactggcaactattttgtagcaggagccatagacagccttagggcttgggccactttctagttctgagttatttttagactttttggatattattctaatgagaatggcacccaacaaacatgatagtactttcagtcacagattaatttaaaaaaatatgtttgttggttagataagttcaggtgatgtttatgtaatgagaaacaaatagcatctttcttgtttggcttacatgaatattttctgtgggaccgattcaagtgtgtgctatgtgccttgtaccatggaagttggctctccatgagcatttagagttctggaagaaaaattcagtttgtgatatcttaattggaactatttgttgtacatt

SEQ ID NO: 9212 - DNA, 589 bp, Canis familiaris
  misc_feature (1)..(589): n = a or c or g or t
tcgnccacggtccagctctgacggccccngcgncgccggtgggctctgttcttcgctcttgtagacactgaaccaaccaacatgtgatttttaaccgcctgacgctggggttgctctaacgtgatgggtgcgaggagcaggtgtagggtgcttagcccgggacccgcataagtgctggcttcccccctcgtgacccctggctacctaaatgagtctatttatggtttattggagcgcatgggcttttaactttcttctaaaacgtttcaatgagaaaatctgagtttcaacgagaagtcagccaggtgggtgaggccacgcaatcaccggggtgggggtgggagggtaaaagcagacggtgccttttctggagaagaatccagactggggagcagcaggaagggggctagggaggtggggtccgtgtgtctgctggggcctggggcggtcagagcgactggagtgttggggctttgtgattggggtgaaattttcatacctttaaatgaccagtttaaagatgttatggtcttggtgccgtgtagccaggtcctctcccctcccctccccctcctggcagctgcccatc

SEQ ID NO: 9213 - DNA, 596 bp, Canis familiaris
  misc_feature (1)..(596): n = a or c or g or t
atactcagcatcagagactccttgaaatgctagatacagagaaggaactattaaaagaaaaaataaannaagctttgattcagcaatctcaagaacagaaggatatactggaaaaatgtttagaagaagaaaggcaaagaaataaagaggcattagtatctgctgcaaagcttgagaaagaagaaatgaaggatgcagttttaaaagccatagaagaagaaagaaaaagtttggaaaaagtccatgctgaagaaagggagttatggaagactgagcatgcaaaagatcaagaaaaagtatctcaggcaattcaaaaagctatacaagaacaaagaaaaataagtcaggaaactgttaaggcagcaataatagaagagcagaagcgaagtgaaaaggctgtggaagaggcagtgaagagaacaagagacgaattgatagagtatgtaaaagaacagaaaagacttgatcaagtcatccgccaaagaagcctgtccagtttggaactgttcctctcttgtgctcagaaacagttaagtgctttaatagctacagaaccnnnnnncattgaataaagagaacntgacaagctaacccac

SEQ ID NO: 9214 - DNA, 610 bp, Canis familiaris
  misc_feature (1)..(610): n = a or c or g or t
actatatacctgnnnggagtgagtgannnnntcaaagaacatctcttacagcagtccaacctcttccttggnctnnaagctgtgatcttgcctaaagatcttaaangcggaaagcaaaaaagatactgtttcctgaaattcaaaaattttggcagtgcccagagggccctcgacattcttaaaggcaaggactggaagctgaaaggccgacatgccctaacccccaggcatctccatgcttggctcaggggcttacctcctgaatcaagaaggcccccggggattcgtgtcatacctcccccctctgagcagcaggccttacaggctctgaaggtggaccacccaaagatagcagcctggcgctggggccggaagataggaaagctctaccacagcctgggcccaggcaccctctgcctcatcctgctgccaggcaccaagagcactcatggatcattctctggcctaggactgatgggaataaaagacgaagaggaaagcaacaccccaaacatgtgtttgtgagtctgcccatcattttccatgtgccatttcttatcccttgtgggcaatggcagagaatgtggtcaggctaaagttcagtccattt

SEQ ID NO: 9215 - DNA, 652 bp, Canis familiaris
  misc_feature (1)..(652): n = a or c or g or t
taaagnancactcagatgtcagttggagggnnnccgggaatctgattcctgttgagagcgatnngtgtctttctccnntctgacgtgaaaattccgtcaacctgaaagaagtcctctgtgagttccttcaggttgctcctagtcatgataatccagagggaatgtgcgctggtgactttaaagtaagggctatagtctttgacggtcccttagcactgcaactctgtagaaggtaatggaagttttttccttctactgtttcggaaaagttacttaagcatttagacgggtaaaaggtacccttgccttactcccattttattagccccctaccccccttttcaaattttaagcaaatttcagtcaggaacacattctccaagttattttgcgccctcccaggaagtcagtgcactgatcagctttttgggcttcccctccaaaggacctttttctgcactggaagcctccatagctagcccttttgttttgttactgctgtgtttagataattggacagatctttgtgccacacaggaatttttttttttttttaagaaaagcctatagatgaactattactaatgaaactgtgtgcgtgtatgtgcgtgcaacataaaaatacagtagcacctaaggaacttannnnntg

SEQ ID NO: 9216 - DNA, 556 bp, Canis familiaris
  misc_feature (1)..(556): n = a or c or g or t
gccacctgatagatattgcttgacggctccaaactatagacttaagtctttacaaaaaaaggcatcaacttctgcnnnaagaataacagttccacggttaagtgttggttctgttactagccgaccaagtactcccactcttggtacaccaaccccacaaaccatgtcagtgtcaactaaagtagggactcccatgtccctcacagggcagaggtttacagtacagatgcccacatcacagtccccaactgtaaaagcatcaattcctgccacatccgcagttcagaatgttctgattaatccatcattaattgggtccaaaaacattcttatcactacaaacatggtgtcatcacaaaatacttccaatgaatcatcaaatgcattgaaaagaaaacgagaagatgatgatgatgacgatgatgatgacgatgatgactatgataatttgtaatctagccttgatgctgtaacctgtaaacttggtcttaaatccattgtactgagattaaacgtgcatgctgggtattttgaagttgtgttgtagaaaacttaa

SEQ ID NO: 9217 - DNA, 579 bp, Canis familiaris
  misc_feature (1)..(579): n = a or c or g or t
ctgtgtcaatnnnnngtaacacacaacatgnannattcatggctgacactngnnncatatgtgcagtattngcagtgatatgcttctattgtgtatannaaatagtatgctcttgtttctctcaatttgaaacccaaggattacagtaataggaatagaccttgagtacaaaagctggccaaggaatgactctgtgtgaaatgcttagtggttgaaaccacagatctctctgtttccgttggccctctagaaatgcaggtaggatgagggggaaccctaaaagtgtgctgttaacaccttttgtatcagctagtatgtagccctctctttttttccagatactacatctggtaagaagccagaggtaaaaactgcttatctctggctgcttctaaacagattgtgttcagtcacttacctcttcacagtgacctttgcaggtttcctcgtcctcctaatggcagcctgttggcggaactgggcaaagagctttggagaaaggctaagaacattcctgtctcatttaggactggattcccannngtggcaattatttcnnnnngcttctcacttcttaaa

SEQ ID NO: 9218 - DNA, 613 bp, Canis familiaris
  misc_feature (1)..(613): n = a or c or g or t
acccgtgctgcctgtgcgacgtcnagctctactgtctgcgaccatctctcagaagtttggagaggaaagccattagagccatagaagatgaaaagagagagcttgccaaactgagaagaacaacaaatagaattctggcctcctcttgctgtagcagtaacattttaggatcagtaaacgtgtgcggctttgagcctgatcaagtcaaagtccgggtgaaggacggcaaggtgtgcgtgtcggccgagcgggagaacagatacgactgcctcgggtcgaaaaagcacagctacatgaacatctgcaaagagttcagcctgccgccgtgcgtggacgagaaagacgtgacttactcctatgggctggggagttgcgtcaagattgagtctccatgctacccctgcacgtctccctgcaacccctgcaacccctgcagtccttgtagcccctgcagcccctgtaacccctgcaacccctgtgacccttgcagcccatgctatccctgcgggagccgattttcctgtagaaagatgattttgtaaaccgtaggagcccatgacttagtggaaatccgtactccagccaggcagctcttccagtgtttctctccccc

SEQ ID NO: 9219 - DNA, 568 bp, Canis familiaris
  misc_feature (1)..(568): n = a or c or g or t
caaagtccttggaaggagactctgagccttggggacttgatgtaactcgactnnaaatagtaatgcatctaaagaaannaagtgactacctgtgagccggggggtgaggatgtcacggagtcccaggagcagtttagaaagaacagagacagcagagatggcaaagatatccaagtagcttgtagaggagagaggaatgttggccctacatccatatttgcaagtgcgtcctccaggatcctcacttgttttttgctctgtgttatgggatgaactgtgtcctccgccccaaaactgatgtgtttgaagtcctaactcccaggacctcaggatgtgactgtatttggagacagggcctttcaagaggtgattaaggtactgagatcattagaacaggctctcatccaacataaccggtgtccttcgaagaaaaggaacgatggacccagacacagagagagaagaccacgtggagacagagagaggaaaagacaatcatctacaagtcaaagagagagactgcagaagaaaccgaccctatgacaccttgatctttgacttccagcct

SEQ ID NO: 9220 - DNA, 495 bp, Canis familiaris
  misc_feature (1)..(495): n = a or c or g or t
agtgccaggttnctgaggccattcctggtcacccctgccccccactgggaggcagtttgggttttcttgggtatctctcaagggaacccagggtgagatcctagcccatggggtctggggtgggcttggagagcccagggttatatcatccttctttgggaccatgtgtaccaatgggcttccttccgggagtaacccccatcctgccctctctcaactgcccctgtgtccacattttaaggtggactctgacttgctcactccccagcccagggcctggcacaggccctcaataaatctttgatgaacaaatgatggcagaatgtttcagggtatcggggtgactcctcctggtggggagctggtcctttggggcccacagacttttccttaaatggccgaacatattgtacacttnnngaccacgtggtctcagctgcaacttctcagccccacgggtcctcgtaggtggaatgtggtgatggacaacgtgtc

SEQ ID NO: 9221 - DNA, 667 bp, Canis familiaris
  misc_feature (1)..(667): n = a or c or g or t
ctcancatgccttccaaaactttgccgaacaccacgtgcnngccatctagnnaggcagnnntaancgtcgtgataaagaactgnnagccgttggtgtctttgcctgcattggccatgctcacccagccaggcccatagtgtttcagcttgaagttctcatcagggaagcgttcaccatagatgctctttcctgggaagaaagagtaggtcagggagctgggttggcccaaaccaagcagatctttggggtgaggattccagggactgaacctgtcttcgatgccaggctgcagcagcttataaagacaaaagctgtccccttcctaccctctggtctaggagccaaactgtgctgacagacccagcctggccttatgccccgctgatttagtgaacagctcacccgattactttgagaatacagtttagtggattttaaataaggcgtagatcaacagttacccttggctatggcctgagagttctgccacagaaactgagatactttggtatctgcagacgcagagacacagaggaggtaggaactctccagaaaaggaggacagctatagttgaccagtttttcttcgtaacagcacagaagacagatgagtagggagaggctgccatttgggttctggataattaagagccttttaccaatgaa

SEQ ID NO: 9222 - DNA, 615 bp, Canis familiaris
  misc_feature (1)..(615): n = a or c or g or t
tcttatcctctatggcancaaggaattcagctttgtgcagctctcagatgcctacagcaccgnaagcagcttgatgccccagaagaaaaacccagacagcctggagctgatacggagcaaggcagggcgagtgtttggacggtgtgctgggctcctgatgacgctcaagggacttccaagcacttacaataaggacttgcaggaggacaaggaggctgtatttgaagtgtcagacaccatgagcgccgtcctccaagtggccactggtgtcatctctacactgcagattcaccgtgagaacatggcacgggctcttagtcctgacatgctggccaccgacctcgcctactacctggtccgcaaagggatgccgttccgccaggcccatgaggcctcagggagagctgtgttcctggccgagaccaagggggtggccctcaaccagctgtcgctaaaggagctacagaccatcagccccctgttctctggcgacgtgagccgcgtgtgggattatggccacagtgtggagcagtacaccaccctggggggcacagcgcgctccagcgtcgactggcagatcggccaggtgcgagcactgctgcgggcccagcgggc

SEQ ID NO: 9223 - DNA, 555 bp, Canis familiaris
  misc_feature (1)..(555): n = a or c or g or t
tgcnnnnnngcacctacccccagcagagagcctgccaatggtaccagcannnnngcnnagctgcaccgaagtcctagncttctctaaggcccacgaagagggcagaggggccagaaggactctgtggtctggggcccctcctccctacaggcacagcaggggatgccaagacacagagactgagaagcggggacacgcagaaaggaagaaggagaggaaacaaggacgagtcaaacaaaagacagaggaaccagagggggcctctgggatttgagctgcagcggattgggagtggagctattctagccctctgccctatggtgccactgaaaagggacaggaccctttggaggtacctgtgaggagaggggagcaggacctctccctcctccagattcctaccttctactgccagccccctgcaagccttcatcctaaaatggagcttggacggatagggcacaggttgggggtgttgctggagaagagacacgaggaggtgatctgtgagtcccgtgtaaatttgtatattggaatatttatgtttgtgtacat

SEQ ID NO: 9224 - DNA, 589 bp, Canis familiaris
  misc_feature (1)..(589): n = a or c or g or t
cactcnnngaacttcancgcggccaacccggcccctcagnnnnagcnnncacccaatgccaaggagtnngtgtacaacggcgggggctctcccagccnnnnnntngacggcgccgatggcgggggcagcggggcaggcccgtgcaacagcaacagcttcgacgtggcccaggtctttggaggcggcgccaacagcctcttcctggagaagacgcccttcgtggaaggcctcagctacaacctgaacaccatgcagtatcccagccagcccttccagcctgtcgtgctggccaactgaccacccacctgccaccgggccaggagcgcctaataccacagaaaagagaaaggaaaagaaagtccaaaaaaagaggaaaagaaaaatacacaaaaagatttccagtcttctcactctggcttctagaaaaaaagatccagcccaggcatggagtgggagggggctcctgaagcaccaagtcgtgtttaactcaaccccctgctgttttcctgcctgcctctgatttatttggttggtttgggttttatattttttcttttttttttcttttctttctttctttttttttttt

SEQ ID NO: 9225 - DNA, 607 bp, Canis familiaris
  misc_feature (1)..(607): n = a or c or g or t
agtgcaggggatannnnagcnnggcncttagaatgtnnnnnnnagatagtgcgggggnaggtcgtggtgaaaagggacccnngcagnnccccccacctgaagtacagccaatacaaggggccaagtgcaagattggggaccacgctctgggagctgtgctggggcagagggcctgtgtgagccaaagggcccccccccaactcctggtaggttgcctcttcagcatgccccctcccctcaacacagatgcacactcagagtcctgctgctgctccaggctgggccagagcccccatccctgtcctgcctagtctgggtcctgggcctcagcaagccgtgtccttggggtaagggcaggcaccttccgccagctctgttctttgccttagctttgcagtgagtgctgctcatgtgcttcccccctccccttgggggtcgctttcccttgctcctacccccagaggtcttggccaagctgctgctctgaaagcagaatcttagaaacaggccatctaattctggagcttcataggatacggtgatggcactcaggacgccaatgacggaatctattttctctgtaaagacagactgaaaagccatgtgt

SEQ ID NO: 9226 - DNA, 613 bp, Canis familiaris
  misc_feature (1)..(613): n = a or c or g or t
tngacttgttttgatacaatannncctcctttattgagttggnnacttttgggtagtgtgttttgtttaacnnnnnagaaagcttattaactgaacatcagctccatcattgagtgtttgctgagacctgtttctaccatttcttttgtgatctaacgttttgactcacatgtctgacaaaaggtgtaaaagtagtcctgaacgtactgcaaaaagaaatgtaggaagagaacatcctgctgcatccttaaaaatacagattttcttgtgccttccaacaatgcaaagaaaccaaaggaagagtgtcaaactgactgggatttattgatgatgctatgatgatcttatgtaacagcactggttcaggtactgctcccacttctgggaatgtatgtcaacctatccttgccttctaaaggttttgaatgtactgtgtgtcctaagtccattctcttagctagtctcccaaaagtgatctcttactgaattcttgaatcaagtcatatcacgatattgtggttttgtccctaaactcaaggtgatcattaggtcctgcttgctctgtaagtatgtgtctgtttgtgtgttttcttccctttactctccagtttaa

SEQ ID NO: 9227 - DNA, 518 bp, Canis familiaris
ttacttaaacttagcccagaaatgtgtggatcaaatgaagaaagaagcagggcgaataagtacagttgagctacagaaaatggtggctcgagtcttttattacctttgtgtcattgccctgcagtatgtggcacctctggtaatgctgcttcacacaactctgcttttgaaaacactaggtaatcattcctgggggatttatccagaatctagctctaccttgccagtggataatactctaccctccaattctgtttcctctgaattaccatctgctgatgggaagatgaaggtaactgttacacaaataacagtggcactgagcagcttaaaaaatattttcactcctctgctttttcgaggacttctgtcttttctgacctggtggattgctgcttgtctcttttctacaagcctttttgggcttttctatcaccagtatctgactgtggcatgaatcttaattaacaaaaacggatatccaagtcacactcgaaattgaaatatttgtgctgtcg

SEQ ID NO: 9228 - DNA, 623 bp, Canis familiaris
agagaaatctgagtctgtttgttgttcttagtatccatgggttggttttcaaaattgatggatggggggttccaaccctggttctgcccagctttggtgtttttactcccctatttctagtgacgttagttttcctgcattccagtcttcaatgctaaagataaggattgtacttgacacatgagtatatccagacaaatagttgaggcccttaagttgcttgagtacatgttccttattatgtagcatatactctgctgcatgtcttagattgtaggtaagggaaaggcctactgcaactaggaagaccttgtgtaattcggaacactctgtaagagcccctcacacccaggcggtccgggcgtctgtaaagtagatgcgtatttggggtattattccgaccgattgccactcctgtcccgagatgatttctttgtttcttgccaccatggaaacctctgaaaatcataagggctttgaaaacaagtgttgggttgctcagtcagagggattaagaatagcatttccagcaatagtttgtgtgtattttgataaacttagtatattttctgtaaagtataatgactttacaaagggactattttaaataacgaaatcaatcg

SEQ ID NO: 9229 - DNA, 713 bp, Canis familiaris
  misc_feature (1)..(713): n = a or c or g or t
actanctcatgatgctgttganngancatggcatcatgctgnnnngtgctgcagacagaaagntnnncgcagatattaannannnntcttgttatgtggtaatgaactatgaagaagaaatnnnnaagaatcctgaatctgtnnagaaagtttaccagctacctgatgggaagatgatcaagctccatnnccagctctttcattgtccagnnnnnntcttctctccacatcttctgaaccttgagactcctggcatcgataagttgtgtttcagcagcataatgaaatgcgatacagatctcaggaattcgtttttctccaatattatccttactgggggatcaacctctttccctggtttagacaagcggctagttaaagatatagcaaatatggtgcctgccaatacgcccgtgcaggntacagctcccccagaaaagaaactatcagtgtggatgggaggctcgattcttgcatccctgtctgccttccaggacatgtggatcactgaggcagaatttaaagaagttggacctaacatagtacaccaaagatgcttctgaatacagataaaatggttagaaaaaagtgttttgagtatttgtgacagaaagctggatattatatacgtatctgggagaacaaagtatttcagttactggaatgtccacgtcactttcatttctatgatgggggagaaataatgctgaagc

SEQ ID NO: 9230 - DNA, 662 bp, Canis familiaris
  misc_feature (1)..(662): n = a or c or g or t
ttccngcagactnnngccccagaccccaactgtgtcaccgtgacggggctcccagagaacgnnnnannngccatcgaccacatcctcaacctagannaggaatatctggncgacgtggtggacagcgagtcactgcaggtgtacatgaagccaccggcccacgaggagtccaaggcaccatccaagggctttgtggtgcgggacgctccctggaccgctaacagcagcgagaaggctccggatatgagcagctctgaagagtttcctagctttggggctcaggtggcccccaagaccctcccatggggccccaaacgataatgatcaaaaagcagaaagctctccagcctgctgacccaaaccccaccacacatggtttgtttcgatctgacccagcggctggaccctccatacattgacgcttccccctccccgaggtctcgcagtgaagccgggcgcgccagcaccgcgcgtgcgctcaggatctgctccctgacacctttgctctgggacggctcgccactgttgtgaacactaacgaggtaattggacatttcccgataagcgtcctggctcatccagcatgtcagtaaggctcgggcctccgcgatgagagctgcacagctgtggctgagtctacttcnnnngtcatgacctcagga

SEQ ID NO: 9231 - DNA, 699 bp, Canis familiaris
  misc_feature (1)..(699): n = a or c or g or t
gtgacaacanncagagcaaatattgttcttcctattttatagatcaagnntctgcatttcagagactggnctaaagtcacacagctgtatgtagtngagtcaagacttgaattcaggnnnncntagtcaaaaatcccatgatctgtccattcagagctcagaggaccctctggggcaagtcctagttgccccttgggagcccctggcaaacaccagagtacaccactgagcctgtccagcccagccctctgcctggaggtggacacagacccttggggacggctgcagcagggtagagagaaaaggacaaaggacaccaggctggtttctggccttgaaaagctcccagtgtgcaggagaacggaggtcagacacacccaaaaccagacagcagcaaggtagcatggaggcaggtggactggcttccaggtcctcaagctgggaaacagacaaggctttgaactgaagggaaaaggtggctgagcactgggtcccagcagcatcccttcccagatccccactttgtgccggatgactttgtgcctgcgaatgttgctttcctggtgttttgtatctttaagctgtgatcctgtatacgtgcagtgcctcccaggcaagaccgtaagccctttgggggcagggctccctccagctcttggatggccttctcctatctattcgccttcatctgtcttggct

SEQ ID NO: 9232 - DNA, 678 bp, Canis familiaris
  misc_feature (1)..(678): n = a or c or g or t
cgctactttgtggcantcgatggggacntggtgcangaatttgacatggcatcagccacacatgtgctgggtagcggggacaagaaccctgaggctcagcaggtctccccggagtggatttgggcgtgtatccgnaaacgaaggctggtagctccctgctaggactgcagccctccctggccgtcagccacacacttccctaccacactgcagggctgcgctctggctggggcaggctggggcaggcaggcgccaatggcaaggacaaggtgggatggcctttcttcaagcagtgcatcttccagaacccaccaaccgtgcttggtctcttcctgaccaggacttaggtgctgtgggtgccaccagtgaagtccgtttctcctgctggtttacatagatctttcagatctgggtgctggtttggttgtctttttgttttcttttaaaaggaagcttttttttccctcccctataaatatcttgcagttaccctgcccttgctccctctcccccctgtaattctcctagctggaaaggccggagtgaagctgggctgttgaagcttcgtccacagagccacctacctgcccatttccttgcaggctccttttaaagttgtacttaaaagattgccctcagaaacgcttctatttggcagaacttgtattcagcttggcc

SEQ ID NO: 9233 - DNA, 610 bp, Canis familiaris
  misc_feature (1)..(610): n = a or c or g or t
tgtgactctttttggaaatggctgttaactctggacctcgtgattttnnagatnnaatcaagaggccggcgaggtgccctttaggccggcctggnnnnngtacacaccggtgccagcacagggcccacctcagcagccagccctgtggcagctggatgtggaagcggacacgtacatcctagtggtgtggcttggtgctaatgacaggctgtgtctttactcccataccaatactcaattacgttaaaccaagaaaatgacttttagaacctttgcctatattaggttgtacttctgtacatattttgcagtgtttcacgatgagaaaatggccttaatagccccttattctctatccgccctgtaaataaacatgtgtttaatacaagttaaagctatatatgaaaactcagaacttgaattctgtcagcttaaaacttgtgtagagaattctgatttttaaaatgtgaaggtatttagatctgtgttgaaagtcgtatatttttatctgtgcgatgctgtgtgcaggccaccagctcccaaatagaggtttcctatatatgcattttacgtgattaaataaacacaattctctctactcaggacannn

SEQ ID NO: 9234 - DNA, 690 bp, Canis familiaris
  misc_feature (1)..(690): n = a or c or g or t
cnacaatgaagacacggttcacttcacgctgcgnangatnnannagcttggcctgtacnntgccgatcgccaggtgtactttnnncagctactgggcatgtgtgaccagatcagcttcccactaggccaggccgggtttcctgtgtacaagtatgtgccttatggccctgtgatggatgtgctgccctacctatcccggcgtgccctggagaacagcagcgtcatgaagggcgcctggcgggagcggcagctgctgtggcaggagctcaagcggaggatccgcacaggcagcctcttccaccgtccagcctagcgttcgtgggcaactggcgtcacccaccttcagacttgacctccagcccttcccagggcccccagcccaatgccatagccttagcccaaccccagcctcacgtggattcacctttttatgcccaagactgtgagacctgctggaagtggcctccatgctcttgctcgggatgtgggcacgcaggggggttctggtgcctgccagagctactgcgaactgtcaggaaggagtgcctttccacagtgagcatgacccttctctctgcctgctcccatgaacctggaccccaaggaccaccctgtaagccagggttcacccagcccacaccctaagccccacaggtgggcagctgccaggctaggaagctgaccaggtca

SEQ ID NO: 9235 - DNA, 540 bp, Canis familiaris
  misc_feature (1)..(540): n = a or c or g or t
gggatcgnnctttgcgagatcattgggcaggtatatgcagatcctgactgnntgccccgaacactggactttggcctcaacgtgaagcttttctgggagaagtttgtccctacagactgcccccccgccnnctttcccctggccgccatctgctgcaaactggagcctgagagcagacctgcatnctcaaaactggaggactcctttgaggctctctccctgtacctgggggagctgggcatcccgctgcctgcagagctggaggagctggaccacactgtgagcttgcagtacggcctgacccgggactcacccccctagccttggcccagccccctgcaggggggcgttctgcatccaccattgccccctntgcgccctgtccctgctgtgggcaggaccgtccgggcttcctgtggattggcagcttgtttagaacagaacangccatctttactacctccccaggaggcgagcgggtgcagcaccagggaaacacatcacaggtttgggggcctggttnnnnnnngtagatccaac

SEQ ID NO: 9236 - DNA, 669 bp, Canis familiaris
  misc_feature (1)..(669): n = a or c or g or t
ttgcatngcagcccatcagcggnnagacaagcaaannnnctttgccatcatccagggtgggctagacgcnnanntccgggccacctgccttgaagagatgaccaagagggacgtgccgggcttcgccatcgggggcctgagtgggggcgaaagcaagggccagttctggaggatggtggctctgagcacctcaaggctgcctaaggacaagccacgatacctgatgggggtcggctatgccactgatctggtggtctgcgtggctcttggatgtgacatgttcgactgcgtctttcccacaaggactgcgcgctttggctccgctttggtgcccaccgggaacctgcagctgaagaagaagcagtatgagaaggacttccgacccatagactccaactgtacctgtcccacctgccagaagcacagccgggccttcctgcacgcactgctccacagtgacaacactgctgccctgcaccacctcantgtccacaatattgcctaccagctgcagctgatgagtgctgtgcgtgccagcattgtggagaagcgcttccctgacttcgtgcgggacttcatgggcaccatgtatggggaccccaccctctgtcccacctgggccactgaannnnnnncctctgtgggaatcacactgcgttgatctggctt

SEQ ID NO: 9237 - DNA, 533 bp, Canis familiaris
  misc_feature (1)..(533): n = a or c or g or t
acacgtacgtgatggtggnnatgtctgacccgtcgatcccttccgcagctactctgatcaacattcgcaatgccaggaaacannnnnagaagctnnagagagtggatggccccaagcacagcctnntgatgcgttgaatattgccaaatactctttctgaagatgctcaattgccttccccacccccgcgtttgtttgttttttttttttcaataatgtcgtgtgcttaaaagtgagctttgaaatgtgtgctgcttactaccttccatctttcttccctactcccccctcccccgactttaaacctatttactcagttatccagtagagcttcaggatggcctttctgaaaagttggtatggtgtaacactaaagtaggtggtgtgtgtgtgtgtgtatgtgtgtgtgtgtgtgttctgatgacctggttataatagatatacacattaaagcctttacagtctcttcctgtattccttacaagattgcaaagatggaatgttactattttnnnnnnaaggtattaaaatgc

SEQ ID NO: 9238 - DNA, 609 bp, Canis familiaris
  misc_feature (1)..(609): n = a or c or g or t
aagctcagtcccaaggggtccacacgccagaggagccccatctccatcagaggggcagctccccattccagtctgagtctgagtgcaagtcagggtccgtgcctgcccttgcgaaggcgacaacccccctggagaaggcacctggggagcatgaggggacccaggaagaggcagtactccccaaagaggaggtgtcccccaaagaggcagcccctgctcaaaagaatcctcaagctgtcaaggcgactccagacccccaagaggctcccgccctactttccctgtctccgcaaaatctcacggacagcaaaagtgacagaggcgacataacgaggctccaggacgagttggagtctttgaggaggtcgctggagcggatgggggtgcagctggagaggaagctcgccgacctctgggaggagctgaagagcgagaaggagaagcgcctgtcgctggaggtgcggatgcagcgggggactcaggagtcccggacgcggggctccatccacgcgcagacgcagacgcactgagggggggcccgggagggactgcggcggggcctgggggcgagtcgggctgcggccacccacgtcctggcacacgnnnnng

SEQ ID NO: 9239 - DNA, 604 bp, Canis familiaris
  misc_feature (1)..(604): n = a or c or g or t
agctacagtttaagagaactgggaaannggatagagataatttgcttggtgaaatctaataggacctataattttctttttctgcctagaatctaaagatttgtgtagaactgcttatttaaaagtgagactgcttatcataaaatcatgtctgtcacccttgaggcagtggtcaaacagataaggactgttgtgtgtgtcattttaaagtgttgaaatttactctgaataccttctcccttgggagaaaaaccagtcattgaaccactcatgacacatcttagaaggtcatcgacaatgtataaactaattgttggtttgatatttatgtaaatatcagtttatcatgctttaattttgcacattcatattaggggagccagttggttctcttattagtcttgtgggttttctgtttggagggagtcacggcatctgtttacatttaccttatcaaatctagaatgtgtatatttgtaaatgtatgtcttcctaggtactagtttgcaaatgtctttacatatttcaatacagaaactataacattcaatagtgtgctgtcaaagtgtgctttagctcatctggatatatccacactgttaaa

SEQ ID NO: 9240 - DNA, 571 bp, Canis familiaris
  misc_feature (1)..(571): n = a or c or g or t
agttccnngcagccaatcaggctgaaaatgcagattanngcacaaatctctttgtacccacagttgaagctaatgttgagactgagacttacgaaactgtgaaccccactgggaaaaagactttttgtacatttnnaaaagacaagcgagagcacactattctcattgccaatgttaaaccttatttaaaagccaaacgtgccctgagccctctcctccaggaggtcccctcagcatcaagcagccccaccaaggcatgcatcgagccttgcacctcaacaaaaggctctctggatggttgcgaagcaaaaccaggagccctggccgaagcaagcagccagtacttgcccactgacagtcagtatctgtcacccagtaagcaaccaagagaccctccgttcatggcttctgatcagatggcaagggtctttgcagatgtgcattctagagccagccgggattccagcgagatgggcgctgttcttgagcagcttgatcaccccaacagggatctgggcagagaatcggtggatgcagaggaagtcgtgagagaaattgataagcttttgca

SEQ ID NO: 9241 - DNA, 612 bp, Canis familiaris
  misc_feature (1)..(612): n = a or c or g or t
aggtgnctgctnnattgggcaggatnnnnnctgctgtnngctatcagcctaccnnggccactgatatgggtaccatgcaggaaagaatcaccaccaccaagaagggatctattacctctgtacagtggatcctctggattctacctctcgaatcatggatcccaacattgttggaaatgagcattatgatgttgctcgtggggtacaaaagattctgcaggactacaaatctctccaggacatcattgccatcctgggtatggatgaactttctgaggaagacaagttgactgtgtcccgtgcacggaaaatacagcgtttcttgtctcagccattccaagtagctgaggttttcacaggtcatatggggaagctggtacctctgaaggagacnnnncaaaggattccagcagattttggcaggtgaatatgaccatcttccagaacaggccttctatatggtgggacccattgaagaagctgtggcaaaagctgacaagctggctgaagagcattcatgaggaggtccttttggcaaactaagcactgatcatcctcggtgctgtgctgcttgcccctaatctaagaaaaatctgtttgctctgtaggcca

SEQ ID NO: 9242 - DNA, 702 bp, Canis familiaris
  misc_feature (1)..(702): n = a or c or g or t
catgtctctcctcccgtcaactagactgtagagagtcgggggtgctgcggtcacgtcgaggtcccccgctggggggnnagtggctgctggcctgggacccagtgccctgtcnaggnctcggggctgccgagacttgatggcaggtggggaccttgcctcctcagggttcaagacccggggtcctggccgccagcctcagcctggtgccctccttgaggagccctctccggaggggacctacccttcctagctccaggagccagcgagtggggcttccttccctggcttccattacctgcgccgagtgagaaaggagctccagtcctgggcactgacccaaggctgcggggaggctttgcaacccgactgctgtggctcctacatggctcccctgctcactgcccctctctcccttgcaggtggctcctgcacgtgcgctggctcctgcaaatgcaaggagtgcaaatgcacctcctgcaagaagagttgctgctcctgctgccccgtgggctgtgccaagtgtgcccagggctgcatctgcaagggtgcgtcggacaagtgcagctgctgtgcctgatgtgtgagaacacctgttcctgatgtatatagagcaagcaacatgtacaaacctgcagttttaaagcatttttttcatatcactctgacttgttttctacattcccgtttgtataaaatacatga

SEQ ID NO: 9243 - DNA, 585 bp, Canis familiaris
  misc_feature (1)..(585): n = a or c or g or t
aggccttggtttgcaggnnnnnagctcacctacgtggatttcctggtttacgacatccttgacctgcaccgcatatttgagcccacttccctgnacgcgttcccgaacctgaaggagttcatggctcgctttgagggcttgaagaacatatctgcctacatgaagtccagccgcttcgtcccaggccctctgtttctaaagattgccatgtggggcaacaagtagggggggcataggaggagatgccagcaaggagctggagctgtgcttgctccatgtaccagaacaggtgtcctgctttttcccctttgttacattttttttgtccccatgaaatacctattgactcctttttctccttcccaaccctattttcatcaatggcccttgacgtcagctatccacttcagcaattttcctcctcccccagtgttacccctcctacgctaaagccaaccagatcattcttccctcggtgcttgtgccacttgcaggaactggcctggacttctggcctgcagagcctgcccctgagctctggagcactgcnnnnaagcctggtgtgannnnnnntgcccatgttgc

SEQ ID NO: 9244 - DNA, 619 bp, Canis familiaris
  misc_feature (1)..(619): n = a or c or g or t
agtcncacgcccnagcacacgcnnnctgctctactncagncgactctnnnnnnacntcaaacacaacacccctttnntgaactggaaagaaattattgagggggccgatgcgacttcgctccagaagaggtcgggcggtgctggtcagtctggcgcaggatggcaggaggtggcggcggtgacttccaagaacccctataaccagcaggcataccctactcccgctggcgggcagtactcagccaagatcccctctaaggggggagtcacgccttcctcctcggcttcccgggtgcggcctggcctgctgcagtgggtgaagttctggtagaaaattatttccgatcacgacggaggccccaaccaacgtcagtcgtgaaggaggccacccgcgccccgcccccagctctctccctgcgtcaggcttggtctcggtgccgacacctgctttttccaggttggggacctggtctgtctgtccgtcatttcttccaacggcgctgtggtatctctttgtccagcaacctcattggacgaatctgccactttcctcacctactccgtgttgtgacctgaagtcactgtgacaattcttcagaagaagtttcctactgttgag

SEQ ID NO: 9245 - DNA, 618 bp, Canis familiaris
  misc_feature (1)..(618): n = a or c or g or t
tcaaaagcatctcctatcaaatcagtactaactgtagncgactccagaacaangnnnctgngaaatttaagcggggggcacagtttctaacagagcttgcacctctgtgtaagatttactgctcagatggagaagaatacaccatatctagctgtgttagaggacggttgatggaagtgaatgaaaacattctccataagccatctattcttcaagagaagccatcgactgaaggctacattgcggttgtattgcccaaatttgaagaaagtaaaagcataacagaagggttactgacacagaaacagtatgaagaagtcgtggtgaagcgcattaatgccacaacggctccatcatgaggattgtaatggggtaatgaacaacgcggcatgcttatccctccctggcctgtggcctgagcgatccatgcactaaagaaccacctacacatgtgaagtgcttcaccccaagccatccgcagagaagcctgaccttaaaacttaacctagttttccccctttatcttttataacgagtcttggttcttgttttgtcctcagcctcccagatctgccctatgtactcactctgttcttgtgcttttctaacaactggcaa

SEQ ID NO: 9246 - DNA, 554 bp, Canis familiaris
  misc_feature (1)..(554): n = a or c or g or t
cgaagtactcggtgctgctggtgctcacggacggcgtggtgagcgacatnnnngagaccngcgcagccatcgtgcgcgnntcccgcctgcccatgtccatcatcatcgtgggtgtgggcaacgccgacttctcggacatgcggctgctggatggcgacgacggtcccttgcgctgcccccgaggggtgcctgcggcccgagacatcgtgcagttcgtgccctttcgggacttcaaggatgccgcaccctccgctcttgccaagtgcgtcctggctgaggtgcccaggcaggtggtggagtactacgccagccagggcatcagccccggggctcccaggccctgcaccccggccacgacccccagccctagcccgtgactgcctcccatcggaccactgacactccctccgcctctcagtgcctgtcctgacccttgtgactcgagtgcccagtgcctctcccccttggaccagctgtgccccctaggtcctggaagtgcgtggtgagccctgctctttctctccaggccccatacccctcagccttgtaacttt

SEQ ID NO: 9247 - DNA, 538 bp, Canis familiaris
  misc_feature (1)..(538): n = a or c or g or t
gcattngaaaagataagcatcatggcagagagactggnnaatcagtttgcagtntacaaacctgtcactgatcttttnnttcagcttctggattcaggcaaggtggatgatgccagagctctcttacagagatgtggtgcgattgctgaacaaacttcaatcttcttggtgttctgtatcaggaactctcagagaccaggaaaggcatccactctgaagtctttgttagaattgattcctgaattagttgaaaaggaagnnnnnnacacttctgccatgaaaagctgtgtcttagacaaggatgctgtatctgctaaagtgctatatgaaaatctgattgcaaggaatataaaattgaatgatctgttactaannnnnttatgcagttttgctgaagaatgctggagagcctgtccnnntcaccgaaccccctgaaancttcaaattttatagaaagcanctaagggattcaagggaagaccctttgtgaaacaagtaggcantactttatttcctnngtatttgtgactcagtgtct

SEQ ID NO: 9248 - DNA, 502 bp, Canis familiaris
  misc_feature (1)..(502): n = a or c or g or t
atcnagcagatcagacaacacagcnnnttccggaannnncanncgnnggctgaggagctggtgcccatcccgcntagcacagactgcaannaccgctggcgcggcatgacggtggtgccctacctggaggacctgcacggctgtgccgacgacaacggggaggagganntgttcgatatcgaggacgacatcatctacactcaggacttcacggtgcccggtggcgaggaggcgtctgaggcagggcttagagaggagagaggcacgcagaagagccagtgctcagaactttctggagaggaagctgaggccggggacgcagaggagctcaaggccttagtgtagtgctgccctgccccttgaccccccagtgctgcccggtgcctcagaggccaggcctcagcacccccccaccgaccctcactgaccctgccaggtatctgagggaggccagggccactgcccctgctgcccgagcataccccccactcccagtgttcgc

SEQ ID NO: 9249 - DNA, 587 bp, Canis familiaris
  misc_feature (1)..(587): n = a or c or g or t
ggactgcnnntaatatccaaatggttctcccaacacacaaatgtnnnatgttttttgctcttannnanntccttgaaatcaagtgctgtnnnnngcacttcttatgattttacatgagctgtctgcttctgattggggtttcaaccccatcttcttgtataaccgagcatcagccctgaaagtgcaaacctgaagggaaaaaggtacatccgagacaagggtgtcacctcctgaattacacttaagttcaaaaacctcttgttggccttggattacgatcaaggttcctctctgtccctgtaagagagagggagacacctgccatgctcagcacagactggcatgggatacagagatggggaggaggagatgaaaatataagcttcttcttattcctttttaaataacacgccaacctaagtatttacagggtggcccgagtagaacaagaagcattcactctggttttaggacaagctgtataaacagaaatgtactgcaaggggtgggccagaagactctccacatgtctgaaacaacggcctgaagagnngtctctgcactgcgncttgttggcttgttttgtg

SEQ ID NO: 9250 - DNA, 439 bp, Canis familiaris
  misc_feature (1)..(439): n = a or c or g or t
aggnnnctgggagcatgttggattctatttatttatttatttgttcctttgtacctgatccccactgagctccagnnagagggcctgcccccatcctctcccnnaagccagggcttattcttggctgtccggnacttccataccatttcgcctctggataatcctggctgggggaaacggggcaaagnnncccagcccnnnactcccaaagnnnncccncnnccaggatgggaggagcgtagcctctcttttatacatctatttattttgtatgtgtgtatttgtgtggaggaagttgtttgttgctttatttttttaaggctctggagtgttgtgtatggtttctcttcacatcccagccttcttcccacgggcacttccaagaacagagggcatttctcgcagaatgaaagagaaatccnnnagagnggtgaatngt

SEQ ID NO: 9251 - DNA, 634 bp, Canis familiaris
  misc_feature (1)..(634): n = a or c or g or t
gtgttgcttcagcatgagctcnnnncaggggtgtactctgtcttaatctgactgcaagctgaaattctttttcctaccctaaaaacactccagttctacttactaagaatccccgtgtgccctctgctccttctgccaacatgcacactccagtctcctgcctgctccttcaccctgagtgcaatgggttgcacctactaaaccggctctaactattgttggaaggctgctgtagccatggcactcaagtagtttgaagtgtgaggggaaaaccggagcccatttcttccttctgcgccctctagtggtattctttccctttgtgttgtttcctgtcttacctcctgcctgcctagggagcaaagctggggatttgggcagcctgagccccttggtccctgagctggcttctggatgtgtgttcaagtgggtctacccatccagcctggacaggtgcctccggcaaggctggcatttgataatgagtcctgggacctttttgtctaaagcacatccttgtcccttctcccagctgccacgttccaagagtcatgctcagtgtgataaaagatcaaccttggtagggtgtgggtccaggtgagcattctcattggtgtcctttaagagactgaca

SEQ ID NO: 9252 - DNA, 489 bp, Canis familiaris
  misc_feature (1)..(489): n = a or c or g or t
acgggnnagatgagcgggcccgtgttcacggattccggcatccacatcatcctgcgcacggagtgaggggtgtgggtggctcaggnctggcctgcagggtcgggtggggtgggacaggtggctgggcccacagactctgctccctgctgtcagctggccaacaggtgccctaccctgctgacgtcacagtatttattgttctcaaaatggctgaggggagctcttcaccactgggggccccctctctgcccctagttggagctgtccctgtcagactcccctcccctttaggaattgacttcagaagggcgggtgagtggggaggctcccagacggaaggggtgggggtcacctgtcccaaagagaaggcctagtcagctgagctgcccctgtgtccctccttgccacccaggtccaggatgggggcaggacggcnntaacactgtttctggttatgctatgttcctctattcaattgcaaaaagcaaa

SEQ ID NO: 9253 - DNA, 647 bp, Canis familiaris
acacggtgctggggcgtgagcgtctttggacctttaccaaatcagtttgtttccattagatttgtcgaacagttgtgatttggatataaataattactttataaaactttaacgacagttttatgtttaagtgtctgttctgaactataatataaacaaaactgctttacaacagctttatttatttctactttcatgcagttttttacacattgtggtgggtaagcttcaccacacccatcaataaaccattggttgttatttttaaatggcaaatttctcatttaagtttggatctggaaaggacaggacttctcaaatagccactgttaggttttaaagggtgaagtttctgaaaagcacgtgtggagagctgttctgtgagactgaaaccaggcagcgggtgtgaggaaacaaaagtgccgggaagatgtctatttttttcttgtgtattgaaatgtaaaatcataatgtttgtatgattgctgatgcgattgtttttgtaaattttattgtggcatatacagtattgtcatatgattgaaaagaaacacaacgtttcctaatgtaagtgctctgaaaatgtcgacactgtatatatatgagtatagtttgatttttttttttgtttggggtttttttttttg

SEQ ID NO: 9254 - DNA, 639 bp, Canis familiaris
  misc_feature (1)..(639): n = a or c or g or t
attaagcagaaacccatctcaatcgattnngacctgctctgtgcctgtgaccttgctgaagaaaaaagccctagtcacgcaatatnnaaactcacgtanctaagcaatcacgactacaaacacctctactttgaatctgacgctgctactgtcaatgaaattgtgctcaaggttaactacatcctggaatcacgagcaagcactgcccgggctgactattttgctcaaaaacaaagaaaactgaacagacgtacaagcttcagcttccagaaggaaaagaaatcagggcagcaatgacacgggcctccagccccaatctgtcaccatagctcagtgcctgcctgcctgccagggccaggtggccctggagcccacctgatgtcctgcatcctcgggggcaggctggcccctggcgcatgggcacaaggctcgggggctcttggggaatgcagctagggatgcctccacgggactgaagcctgagcggcagtggcattaacagtgtcagggggcccgatgacacacgacacagacgacagcccagccatcttcactgcccgacggccctgcctgaggatgtacatagccatgcccatttccttgcaacttgatcaaatttcttaacaaaaaaaatgtaca

SEQ ID NO: 9255 - DNA, 604 bp, Canis familiaris
  misc_feature (1)..(604): n = a or c or g or t
ggccaggtcantgnnagacggctgnnagacggcgagaaggctggacaggccgccggtattagagaatgatgagaatggtgnnntcctggttccgggnnctgaatgggccgttttccgattggcacaccctggagtaataactcaaattgaaattgatacaacatattttaaaggcaattctcccgacagctgtaagctggacggttgcatcctgacgacccaggaggaagaggacatgatcaagcagaaatgggagcttcccggccagaagtggaaaccgctgcttccagtcacgaagctgtccgccgacgagagtcacctgttccacagcctgaccctggagctccaggacgttatcactcacgcgaggctcaccatcacccccgacgggggtgtcagccgcctgcggctcaagggcttccccagctccatctgcctcttgcggccccgggagaggcccaccatgagattctcggtgaaagtgggcttccgggcgaacctctgactccgcggggcccagcgcttgggggatgactcagccctgcgcccctccggaagcgtttttaacaccaaaaaccgaagagggttccagcaatcaatgttt

SEQ ID NO: 9256 - DNA, 617 bp, Canis familiaris
  misc_feature (1)..(617): n = a or c or g or t
cancnggtgcantganntagaggtngaggagaaatgtgcactcatnnagcnagtggnccaccagaccattgtcatgcagttcatcctggagctggctaagagnntgaaggtngatccccgtgcctgcttcnggcagttcttcactaagatcaagacagctgaccgccagtacatggagggcttcaacgatgaactcgagnnnnncaannagcgcgtacggggccgcgccaagctgcgcatcgagaaggccatgaaggagtacgaggaggaggagcgcaagaagcggctgggtcctggtggcctggaccctgttgaagtctatgagtctctacctgaggaactccagaaatgctttgacgtgaaggatgtgcagatgctccaaggatgccatcagcaagatggaccctaccgatgcgaagtaccacatgcagcgctgcatcgactccggcctctgggtccccaactccaagtccagcgaggccaaggatggggaggaggcgggccctggggaccccttgctggaagctggccccaaggcaggcgacaagaaggatgtcagcgcctgactcgccccagctgctgccctcctgcctgcaggcccctgtgtgccnnnnnnn

SEQ ID NO: 9257 - DNA, 585 bp, Canis familiaris
gatccagctcactatatcccacccctcactttcttgccagtcacggtccctgcctactggcagatccacatggagcgtgtgaaggtgggcactgggctgattctttgtgcccagggctgtgctgccatcctggacacaggtacatccctcatcacaggacccactgaagagatccaggccctgaatgcagccattggaggattctccttgctgttgggggagtacctcatccagtgctcagaaatcccaacgctccctccaatctccttcctccttgggggggtctggtttaacctcacggcccaggactatgtcatccagattgctcggggtggtgtccgcctctgcttgtctggcttccaggccctggacatacctccgcccacagggcccctctggattctcggcgatgtcttcttgggggcccacgttgcagtcttcgaccgcggaaacctaacaggcggtgcccgagtgggtttggcgcgcgccagccctctacgagccggaccacaagggggtgggtccgcgcaggcgcagttctccggctggcgcccaggctaggcgcctgcgcaccgagtagtagcc

SEQ ID NO: 9258 - DNA, 572 bp, Canis familiaris
  misc_feature (1)..(572): n = a or c or g or t
ccttgggagatgaagagagtttcctgtnngccaactttcctnnncgtaccttccacaaacgacannaggccaccagaagcttgctgcaggcctgggagcggcagcaggaggaggagcggcagcaggccgagctgcggagggcccgggagcatcgggtacagcagcaggtggctcgctgcctggcggcctatgcacccaaagggagccggaggtcagggaccacccaccacaggctggaggagctgaggcgccaggagcgacagcgctttgctcagtatcaggcagagctacaggacatccagcacagggtacaggcccggccctacctgttccagcaggccatgcaggtcaatgcccggctcacggtgacccggcgcttctcccaagtgctgtcagcactgggactggatgaggagcagctgctggctgaggcaggaaagggagacacagagggcacctccaggaaatccaggagccacaggtcaatggaggtgagaacggagcactcttctgagagcctcccaaagacagaacccaccagaaggcactccaacaggcactctactccaagc

SEQ ID NO: 9259 - DNA, 597 bp, Canis familiaris
  misc_feature (1)..(597): n = a or c or g or t
ccaannnnggtgccaataaattcaagaagnnnantacaaaannncttaatatactaancntggacacaaattttttagggaggcttgaagagagtgtgaagggcagcagcttcccccacatcataagtgggataaatcttgggcagtgtgtctcatattaaatcctaaacaaataggattgttagtactttgctgaagtacatgctaacaaacatttagcacgggaaactgaatgaaggtttaaccaatgccatggattctgttagtgatttgcattctgtaacagaggtgctttcccatgatgtaggcatgaagtggtgccaataagtatagaccggaaatgttaactatggtgactgggttcagcatttccaatgcagcattatcgcctttaaagtgggcctttaaaatattttgtgagtatatattagctttcacttttgttattaaattatagcagtttcattagagagagcaagtttgccttgattttgtttaaaatgacttctgctcagcacccagaagataaaattgacatatttttataatataagcatactttttttgtacattgtgttcattcagtgttggcttgta

SEQ ID NO: 9260 - DNA, 687 bp, Canis familiaris
  misc_feature (1)..(687): n = a or c or g or t
tctctttgttgactcagaagttaaaaaaacactgcaaagtnnaatatcaaatnaaaacannnnnnnnnnnnacccatggcttcgtgcatcgnnngagagaagattgtncagcagaagacaagccctatatagatgaagcaagaaggaatttgattgagtggttgcacaagtacgtttagnngcggccaagtataaacttcctcaaaatagtttgcatccagaaatttgctttgggatactggggtcatttgatttaattttcactttatataaaatacatcaaggaatcctgaaactcattattccatctgaaacatacattcagtagaaaatggcaatgcatggtataatttaacttttaacgcattaaaaaacccccaaaccaggtcagtacctgaagaatttggatgatagagtaatatcctaactattagtaaaaacctagggctgtttatggaccagctgacagctccggtgtggacttcatgatttttaattaagtacatcctttaaaatgattaacgtgccaaaggcatgaagaacatgaagtattaactcagattcaaagcccagcttaattgggcatttatctgtctcaatgcagatgagtctgtggtgttcataatttcgttatgagagatcctgaggttaaaatagggtttcattgacctatcaagcccataagct

SEQ ID NO: 9261 - DNA, 511 bp, Canis familiaris
  misc_feature (1)..(511): n = a or c or g or t
gtgtactccagactcccaaacgnnnaatatctgaggnnnnntttataagtttaaactgcttcaataatctagtaatatcttggtgagaatgaatccaagtactaggtgtcctataatgtttgtgccacttgaaagagcctaaagaggaactctcaaagggttgaatttcagacagagcagctccttagtgagaacagctcaccagaccaccacccattactctgtgacaagcctagtgctgaaggctaaaggattgcaatccttttgacctatggtgcagaagagtacatagtatggaggcaagctgccggccttcagtcctggctctacacttacaagccttatggccttagacaagatgcttattccctcatttgcaaaaaggctagaatacagacatgacgctgatggctggaacttttatgtgagaatatgaaatgaaagccacatgctgatgacgggcagaacaataaagcagtagaagcctgggtcccaataccctcagcctcca

SEQ ID NO: 9262 - DNA, 369 bp, Canis familiaris
  misc_feature (1)..(369): n = a or c or g or t
aatcctctgcacacccaaggacttaagtaactgnnnagctctcccctggtgctgctccatccattcaacacaggcttctcnnngaatgnnnggttggcattnnnnaatctaccaaccaaccagtgctgaagagattttngaaccttgtaacatacaatttttaagagcttatatgacacctttctttttaccttgttttcctttggggcatgatgttctaacctttgctttagnagnnnaagctgtaaannnaaaaggcacttttttaaagctctaaagaaaaactggatgtaataaataggatcatggaaggctttatgtgaaaaaaaagttgaatgttacagtaaaaaaannnnntatgtatgtaca

SEQ ID NO: 9263 - DNA, 610 bp, Canis familiaris
  misc_feature (1)..(610): n = a or c or g or t
gcacggcanctgtgctgcccagctagatgccctcaactcccagaagaaatactttggtnnnagcctggacctgtaccgggaccttgaccttaatagcatgctccaaaaattgggaataaagccgtctatcaactactaccaggtttcagatattaaagatgcccttgccggcatatacggagtcatacctaaaatccagtgtcttccgccacaacagggtgaggaggtacagacgatcgggcagatagagctgtgcttcaccaaggagctgcggctacgcaactgcacggagcccggggagcccggggggcctggggggccggcgccccgcgggcccagagcgggggtgtcggggggcaccgggctggaggtgtgcgaggacggccccgccttctaccccccgccgccgggggctgtgccctgatgaccagcgccctggggatgaggaatcgctgctggtcagaaagcagctgccaagtggaacgttctgtttacgactgtctttaccggaggctgttctgttgtcttccatttcccttcacgcccgcgagctgacgtcgtggttcctgtgaatctgggttgcatgtgggtacgttggaagaaaggcgat

SEQ ID NO: 9264 - DNA, 455 bp, Canis familiaris
  misc_feature (1)..(455): n = a or c or g or t
gtcgctttcttctttgcttattacttcacagaacggcacaaactacaattaaagtgaannnaaagccatnnnaagtcatagggaaaatccgtgtgagccttaggtgggttggagccaaggctgcaggaaacaggtagcagaaactgtcatttgtgaactggctgcagctaggcagccctcgtgagctggtgggcacacactgggggttccctccctgacaacaacgcagtggcccaagtcctttttaaataacgtagagctctggggacttggtgggctgctgcgggtgacctgccagccccggttggctgtgtctccattgctgctgcgccctcctgcacgtccgtatcccgttctccccgtccccttcctgtcccctccccgaggttggctcacacagggctgaagcctggcgctgttgcagtgatagattttatttctccctctatgaggag

SEQ ID NO: 9265 - DNA, 703 bp, Canis familiaris
  misc_feature (1)..(703): n = a or c or g or t
catcccggatcattggtgtngacatcaataaagataaatnctcaagggccaaggagtttnnagnntctgaatgtannaacccccaggactttagtaaacccatccannaagtgctcattgaaatgactgacgggggagtngactattcctttgagtgtattggtaacgtgaaagtcatgagagctgcgctagagnnnngncacannnnntgnngtgtcagcgtcatagnnnnagtagctgcttcaggtgnngnaatcgccactcgtccannncagctggtaacagggcgcgtannnnaaggcactgcctnnggaggatggatagtgtnganngtgtcccaaagttggtgtctgaatatatgtccagaaagataaaagttgatgaatttgtgactcacagtctttcttttgaccaaattaatgaagcctttgacctgttgcatgcaggaaagagcattcggactgttgtaaagctttaaattcaacagagaacacatttccatccttgtactgaagtcttgtggtccacctggaacagccagacaagtagctcttctaagttcacagtctcttagaccttttctactactacttttagagtaaccttctctagggaataatattttttgtataattcataaatctctaatcaaggacaaggctaatacagtcataaatctgttttctgaactctccttcacatg

SEQ ID NO: 9266 - DNA, 594 bp, Canis familiaris
  misc_feature (1)..(594): n = a or c or g or t
cattcttcccccttcttgtccccagtgcccccttgtcagaaggtgtctttgggagtgctgctaggcttgggttgatcaggcatctgggagtnnntagtgctaaaaaaaaaaaaggccatcacatgaggctacaaagtttcatggtgctctgagcctgtaacactgaatctgttctcctgtgccaaaatcctgtccgattttacatctctgtgtttaaaagataagtccactaactataagtaagaaggattgtatggaggtattaattacacattttagtgggtatattttcctagctgcctctcttcctcagcccattgggctaaacaccaaagactggtgtgtactgaataggaaaggaaagttttatttggatatctctgaggagtaatcaaccaggaccaaagagcctggaaggacacacagcaaagtgcagccatttatccttttccctctcagctgctctaggtgatttttcaggctcaggaggttggggtggggtggaaggggaccattgtggcttacctgggatcaatctctgtaatgagttctaatagaatttactgaccattcaaaggatatcactgtgaatca

SEQ ID NO: 9267 - DNA, 552 bp, Canis familiaris
  misc_feature (1)..(552): n = a or c or g or t
cccagcgctggccccntgcannctgcagcccctgtccactcccatgcnagtggccccgggcccacnnagcacgcnngagnntcccagggctcccctccccatgcccctaggttcttaggaaggctggtgacccctttagccttgccttcccttggggagctgtggtggcctgcctccttggggactttagcccagggacaaaggatgagtccccccagggccgttgccaaggtggcccaccaccctgagtggtcacctctgttcacagctctcctggcctgctgggcagaagcttcccggccagtgtgtcctgggaggccctagtagtggggcaggaggatgtcctgctgttttaaaagctgcagttggtgctctgagtggacagtattagccaactccagactccctgtctagggcaggcctcccatgcaaagccccacctgctgccttgtcccaagggtccctacacaagcggactgtccctgtgggggctgtgacagggagagggatgctgcccttctcacagaagctaggacagggaccttctaattc

SEQ ID NO: 9268 - DNA, 633 bp, Canis familiaris
  misc_feature (1)..(633): n = a or c or g or t
acctgctgctgcagacctacgtgctccgcctnnnngccatcatgaacagcatcttgctcttcttctgtggnncagagctgctgcttgaggtgctcaccctgactgctttctccagtatggacaggatatgaannnnnnaaatttcagccagcagcccttatgggctgagaccacagattcttctggtctttagccacannnntgagaattggtgggtcaagttgtcctgggacaggttgcagcttttcctcaacacagacatttgggcagcaaacagcataaggccactgggcatcatcttctaaaccaggaccatcaacctaagagactgttctacactgcagtgtagggaggggcaaggttgtcctgtcctggcccttctcagaaccagttctctgctgacctcaagttttctttgatcctcgtggccagagcatcttgtgtggaccagggaggctccttgggcttccagcagaaccagagccacatcctccccatgcgtgctgtgccatacctgtnnnatgggcagagagcctccggatgctttgctcccagggtgatgcaaaagcctttcatttcagtcctgagactgagctccagaccttcttttagcggctcatagtgnnnnnntct

SEQ ID NO: 9269 - DNA, 533 bp, Canis familiaris
  misc_feature (1)..(533): n = a or c or g or t
gtgtcatggactactacctgatnnatgctgcttccttgctgcctgtcntagcccttggtctgcagcctggtgacactgtgcttgacttatgtgcagcccctggggggaagacactagcactgcttcagactggctgttgccgcaatctcgctgccaatgatctgtccacttctcgaacaggcagactacagagggtccttcgcagctatgtgcctcaagatatcagggatagaaatcgggttcgagtcacctcatgggatggcaggaagtggggagaactggagggagacacctatgaccgggtgctggtggatgtgccctgtaccacagaccgccattctcttcgtgaggaggagaacaacatctttcagcggtcgaggaagaaggaacggcagatgttgcctatgcttcaggtgcagctgctcgcggctggactcctcgccaccaaaccaggaggccacattgtctattccacttgttcactgtcacacttacagaacgagtatgtggtgcaaggcaccatagagttcctg

SEQ ID NO: 9270 - DNA, 478 bp, Canis familiaris
  misc_feature (1)..(478): n = a or c or g or t
gtgtttncggccatctctggnnctctttttataagacacttctcttacagcctgcacagcacgtgggcccatcactcttttaattttaaaagacaaaatggcagatgttagtaattcaccagaatggcctattttagtaaaggggtggtgggaatagggaagtcacataaaaaaaatgtgatggctttctgttcaagggagggggcgctgtgcgtttttatattatgtatttgtaaaagacacatcaacccattgttttatgtttcctaaaagcaaaatatttgtgacctttgttttctatgggagttctgtgtgccacctgctgtggaccattttctttgcctagtgatgagtgaactgtgttctttgtctaaatactgagtttcagccctttggttttgtttaaatatcatgtcaagtgcaaacttaaattccccccacttagctttgtttattaaactgaagttctcttaaaaac

SEQ ID NO: 9271 - DNA, 481 bp, Canis familiaris
  misc_feature (1)..(481): n = a or c or g or t
tgtgtgnngcncatatgcnngacattttgggcactacattttaagagatgttaatttgaaggaatctctttannaatccctttcagttggagtaagatgatagctgtgagttaagagctatgtcacatatgggaaaggaatattggatagatattcatacttaagattagactggaggaattttgatactttgatatacttttgatatattgtgatataccatttggaaatttgtgcatttggatagtaaatcccatagaaaacagagactttgagcacagcactagatttcaaatctacatgtgtttaatccttaaaaagtgtgtgtgtgtgtgtgtgtgtgtgtgtgcgcgcgcacattcacgtctcccaactacaccttactttgaacttcctaccctctataattataagtgaactgccttatcaggattcttgccaatttctgaatttaaagtgatgtcatctgggatccctgggt

SEQ ID NO: 9272 - DNA, 488 bp, Canis familiaris
  misc_feature (1)..(488): n = a or c or g or t
agggnnngctatctactgcaaacagaaccatctgtgtctgcantagacggggacccacgcagacgaaatcagagagaannagcagtgccattcatcatgaagtgacttgattgaccaacagaattgatggtagaattgatgtcctgggagttctgaagcaaggttatacccttgtngcgctggctcataaaatccccagtctccagaagtcctaaccggtagttcctaaacttcagccacgggcctggcaacgtggacaatacaaaggaaaatgaccactgcctcagcgacggacttccatggcattcctactggggactggggtcctgcgactgccactgtttctacttctcaggcctcaaggaaggggacacggctcactgctctgaggctgggtcccaaacgggtgtcagctgcttccctcagccacgacagcaacattggaatcaggttctatatcttaaggagaactttctataagtctggga

SEQ ID NO: 9273 - DNA, 563 bp, Canis familiaris
  misc_feature (1)..(563): n = a or c or g or t
aaatnngccactcaaaaggtatattccggcatcagaaaagtacnntaaacagcttcaaaagcagagagaagaaaaaaaagtaagaaggcagatggaactgcttaatttggtagaaagaaataatcctggacatctctctcaaaatagagggacttcaccagttcttccttcacctcaagaagcagaggcaaggttcaggtggcatctaatcagaaaggaggaacctctgaaaagtgattctttcagcaaggaaaggctgttttgcagatatttgctgatgttgaccaaaccagcaataatcaaggggaattctaaactgctcaaaatgagatatgaagatgtcagagccaagtaagatgagccacctagtaacccaagaatggaatctagaaaagatgaaggccttcaggagactgctccctcagtaaaaccaagccaaccaaagtcccagtatacttttcttacctgtaattggaatcagtttccaatgtatttcagtctcttcaacactgtttgacttagattgtctacggaatccatgtnnaatgggaacagtgggacac

SEQ ID NO: 9274 - DNA, 261 bp, Canis familiaris
gaccatcttggtgacaataagtgtggagacgccggctcatgctgggatgccccccatcgtgaagagacaaaccggctgctccagggaacagctctctggaggggcaggcaaaactctccagcaaaaaataaagaagcacaaacatttgtttagaggagccaaaaaccacaaggggagacagagactgaactgagaagccaagactgcctgaggggacatccactcattcccaccagtgggaagaataaagtagaaccacta

SEQ ID NO: 9275 - DNA, 389 bp, Canis familiaris
  misc_feature (1)..(389): n = a or c or g or t
attggggtgggnacacagaaggcnnagagactgctaatgcagacagggtttcttnctggggtgatgacaatgttctaaaattagaccatggtgtttgttacacagcactgaatatacaaaaaccacttaattgtgtattttatgagtgaattttaaaatttttatttaaatgtatatgaacaaatttcatggtatgtgagtttgatctaaaaaaaatattattatgaagaatgactatcagggcacctgggtggctcagatggttaagcatccaactcttcattttggcttagggtcatgatttcagtttgtgagactgagccctgtgtcaggctctgtgctgaggagtctgccagagattctctctctttgcctctgcccccaccccc

SEQ ID NO: 9276 - DNA, 494 bp, Canis familiaris
  misc_feature (1)..(494): n = a or c or g or t
agatgaccagcaatgctagnnggtgtgtgctggggaccatgtggggcccaagcagcaactggagttnnagcaacaacaggtgaagtgnancagggctagtagcgagggcctctttatcatcatcaaacctgatgaaagtcagtgcggactcatggtaaacatcatctaggattttcagcataagggatcccaccacgtgggtttgaaattcatgcagacttctgaagactttctcaaagaacactgcattgacccgaaggaccaccctttccttgccatctagtaaaacacatgcacacggggccagtggttgtcatggtataagagagactccacatcgtgaaaacaagtctctgtatgggagactcacctgcagttgccaaagcatccatgggcatgtttgcatccatgctggcaggaagactattaatgatagcaattcttggagaaagcatagaacactggcttgtggcccctgtgcagtgctatgtgtt

SEQ ID NO: 9277 - DNA, 723 bp, Canis familiaris
  misc_feature (1)..(723): n = a or c or g or t
gtctgtcccactcttgacatnnnnnntaccttttaacagaacacacatnnctacgctttctacctcatagtttgttatggaaactaaggatgctggagcagcttaacctatatacactgccttgaatgacatgttaaaaaaaatggctctaccaagctctggggtatatattcagaatacctcatgtcctggaaagtgagcacaagctcccctcaagtgcctgcctagcagagcctatgttgcttccttgtacctgcgcctctgactcatatagcctttccttgctctgaagctcttgactagaaaagaattctgtttctaggttctgagagaagtgtgtgtaaatttggatagtagaagtgctctgttgtggtctggatggacaaaaattttctgcatgcacttgagtaggttgcctaaaatgcactgtcactatacagaaaacatgcagtttcccaaataacatatctgatcaggtaagcataatcaacaggagtgcagcaaatatggtttcataaagtgggcaggaaaaaagcaatgtaaataactttttgaatagtccccagctcactaaggaaaggagacattttcacatgtttttgcctagttttaagcaccaataagttaatgactctgtatctttctggtttttgcactatgaaaggcccttaataccagttgattctgtttgctttttttgtgtattaaatatttttcannnnn

SEQ ID NO: 9278 - DNA, 580 bp, Canis familiaris
  misc_feature (1)..(571): n = a or c or g or t
gccaaaacnnagtatgtcagagggaccnctgttnnnagagannnnagacatcaaagggcgacgtccagttattcctcaatatgnnngagtgctcccttcaagctagttgtcaccttccagcttttgccagtttggccccaggagggaactgtgtgtgtatgaatgcagtttgctgctcttttggggtacgcctgcttcccagcccccacctggagccctgatcaatttgttctgacttataatgtcttaggtgcaacaaggaccccactagagctcttggatgcctcctcagatccatgtggctttatgtgaggggactgaatgcagacacaccatagccccttgaatcttccctcttcccctgccactagttccacatggaaccaacaagttgagtgtatccctcttagttgttttgtgttagactggctgaaatgagaagactgtggttgaccatgttgtgacatgttgacagactcaaggacacaaccacctcgatccagtcacgtggcatgcctgtgtatgtgtataacaggattctgattgttagattttaatgttattcctctatgggagaaaa

SEQ ID NO: 9279 - DNA, 590 bp, Canis familiaris
  misc_feature (1)..(590): n = a or c or g or t
tattctacatccaattcagcaagtatttcagcagctggnnnancctccaataatccagaccagtgttccacaattgaacccatgttctctccacgccacaactgaaaaatcacagagaatagaaactgtgctccagcaacccacaattcttcattctgggacagtggataggaaacatttagaaaatgccaccagtgatatacttgcacctcctgcaaatgagcgtgaaatcatgtctgaagccttgttgagtcagccggaaagctcgcagtatatcagtcttccaggtgttgtgtttcctccacaggtctctcagacagattcccaagtggagcccgtgctcagtgtttcaggcagcatgactcaaaatctgaatggtaggcccttctccaccagccaacagggggcccagcaccggcacatgtctgatactcagcttcatgttcttaaaaataggatgtttggatgtgattctataaagcaacaaagaaatacagaggagcccagcaacctacctgtctcagagaaggtcttttacatccttactcaatctcggtctactttatctgttgttcactggaagaggaatg

SEQ ID NO: 9280 - DNA, 499 bp, Canis familiaris
  misc_feature (1)..(499): n = a or c or g or t
gttnctaatactgatgtgactacctccaaatccccgactggcacagattcttccttttgggagagaaagacacagctaagcagagaagaaatgaaagctagtactgaatcggcatattacttacatagaattatgagttcatcttcatacaatgaagaggatctgccttcattttctagtgatgatgatgatcgtccctcagatccaagtgccaaaataacagaagaaagttttgaattttcagatatggagaatgcaagcagtattaagtttatcaccctctatcaacgtgaaagtgctctggccagcctgtgtccttcaagtgatggcacttcagatgctgataagcccagtacttccaaacaggggtctgaaatgatgaagaagggatcatcagctctgtccaaagtgttttcaagatctaatgccaatgtttnnnatcttcctcaccctcaccccctcaacaggacagaagctgaggctgctacacctaacatcg

SEQ ID NO: 9281 - DNA, 305 bp, Canis familiaris
  misc_feature (1)..(305): n = a or c or g or t
tgtccccacaggccaggccgggcagtggcccactcccatccctcaggnnnctnngtggggtgcagtggccagcgccccacggaggccccactctccnctcaacccaagcaaaagggacagattaaaacaaaaaccaaaatggnacgataaatggcggagagcannncgtgcggctttannnnggtggtggtggtggtggtggtggtggtggtggtggtggtggcttcgtacgtcattactttgtcactgctcccctgttncatgggacgggagtanngtgagcgcataaaaagcnnngnagggat

SEQ ID NO: 9282 - DNA, 544 bp, Canis familiaris
  misc_feature (1)..(544): n = a or c or g or t
ctctctaatactaccactatgcttgtgcactttactgnnagncgtttgctgttatctgtatgtttttatgtttgtgttcctatttcattttaacaatatgaacctgcctacccttcatttggtcctgccatgtcatgtattcagttgggttgactcgccattttaaaattaaactgcctgggctcttggccctggtagaagaaggacccttgggagtttggtgatctgctggattttacttctacctcagtgatattctgggtgagtcctgaaacacgctgggttctggagcaactggggagactttcctaaccagtttagagtggtcagggccaggaaagtttgctcctgtcctggttagaaggacaggaggtgtctactatgtttttgagttgacatccattcacttgctaccaagtggatacagtgacctggggtgggggtggggagtgtgaaaactcttaggcctcacctcagatctattgaattagaatctggcttttaatgagatccgtaggtgatttgtatgcacacgttataacct

SEQ ID NO: 9283 - DNA, 553 bp, Canis familiaris
  misc_feature (1)..(553): n = a or c or g or t
canncaaaaatcatatgcacaagatatgttgacatctcttcattacttggatnnccgctttgttcagcctcgtctagagagtttagctnctagaagtcgctggaaagagcaatacaaggaacgggtggaaaattattctaatgtaagtattcacttgaagaatcctgaaaactgttcctgccaagcttgtggattgcatcgccactgcagatactcagtgcatttatcaggaaagttgtataacaccaggaccatggaaatagatgatttcatgtcacatgataaacaggtgtttactgttggcagaatttgtgctaatcgcaccagaatttatcataaactgaaacattttaagttcaagctgtaccaggaatgttgctccattgcaaagacagaagaagttgaggatgaacaggttaaggaaacagtggaaagaattttcaatcagtcaaaggaaagtggctggattaaggagaaatatggtcaacttcaagaatatctaaatttggcggattactttcaagatgagaagtttgactgaattgtaacacat

SEQ ID NO: 9284 - DNA, 712 bp, Canis familiaris
  misc_feature (1)..(712): n = a or c or g or t
cacacttcccagcactnnngacacatcccaaagagaaaattaataaagaagcagtgtggnnnntctctaacatcaccgcaggaaatcagcagcaggttcaagcagtaattgatgccaatcttgtaccaatgataatacatcttttggataagggggattttggcacccagaaagaagctgcttgggccataagtaacttaacaattagtgggaggaaagatcaagtggcctatctaatccagcaaaatgttattccacctttttgcaacttgctgactgtaaaagatgcacaggttgtgcaagtagtacttgatggactaagtaatatattaaaaatggctgaagatgaggcggaaaccatagccaatcttatagaagaatgtggaggactggaaaaaattgaacaacttcagaatcatgaaaatgaagacatctacaaattggcctatgagatcattgatcagttcttctcttcagatgatattgatgaagatcctagccttgttccagaggcaatacaaggtggaacatttggtttcaattcatctgccaacgtaccaacagaagggttccagttttagaaagatgttgtggaagttaggtacaatgcagcactgagatatatatatatatatacatatatataaaaaggtttgatccatcaagcttggctcatggganctgctgctgcattaaatcgggaaagaannnn

SEQ ID NO: 9285 - DNA, 319 bp, Canis familiaris
  misc_feature (1)..(319): n = a or c or g or t
tccccaccccaaaccccccacctccagatggttttcctcaaagctgtagtggttagcagaggcagatgtgtaaatctttcatccctaaagtcaaaataaagcagcaagannnaagccctcactcctaccgtnnnnnncgagctggctcagctgannnccacaagctacccttgttcagttcctgtcgttcctggaaatgtttgtgacttgtgcannnnnnngtgtctgctaccttaattactaaacagtattattctgtgggaatctactcatcctctcacttgcatacttttaatttaaaactatttaagagaattga

SEQ ID NO: 9286 - DNA, 90 bp, Canis familiaris
gttcaactttgagaagtatatttcaatttcttgtgaaaattctacctatattaaaagtgaaacatgtaatttacttgtgtcatatttatt

SEQ ID NO: 9287 - DNA, 634 bp, Canis familiaris
  misc_feature (1)..(634): n = a or c or g or t
ttttttattttttcancttcttactnngttagaagcgaaaannnnnnnttctgtagcattccagctgttctctctttaaatctcaggtcaaattcgtaggtgttcaggatgtttagaaagttttctaggttagtttgtgggaccaggtgagttgaggacccctaatcttctgccatcttgccgaggagctctccagaaaaccgatctagaacatcttataccttcctgtagttggtaggaatgactatgacatggcttccaggagaaagccattgttgctgtgtctagttcagattcctaagagtgattcccaaggctctggcaggcctgactctgaggcacctgggcaccaggcctgactctgaggcacctgggcaactttgggaagtagtcatgtctctttgtaaatgtcactttatgaatcacgtgattgtccaaagctcttagattaatccgcctggccatgcttgttagatttcagaaactaaagctcattcttccagagccttgttcctttcataagacacttgtcagctttgggaatatcataaattatggtagtgtcccagagaatggaagctctgtcagcttgggttccatgttagggtannnnnngtgtagaaccctcaccaac

SEQ ID NO: 9288 - DNA, 557 bp, Canis familiaris
  misc_feature (1)..(557): n = a or c or g or t
tataaacttttctccatacgtaggaagaattctttagtgggcacagatcctattctagntgctgtnaagcaaaactaccctcctggttgaagaagccaaagagaaatgtttgagagaagcatctagtcagtcactctggtctacactgcagtcgatgctgtccaggaatctcctaggctcagtagttagtctgggtgtggtggtctgctgagtgttgtttcccccgaggtgcctctatttatttatttatgatcagtgatcctgaccacacctagtcgaacaggtacagcattcttccctgtgggaaaggtaggacattgcatttcctaggctccagacagggatggggctttaaatggtttttatagcagactggctggtaaggccaaaatgttggtgaatcaatgctatgttaagctcttgaactattaaacagccataattgtcccgagataagagtacgcagtcctttctcaaagatgaggtcttggttgactctggacagtaataccttaactgtatggactttgaacnnnncgggttttttttcctttttt

SEQ ID NO: 9289 - DNA, 255 bp, Canis familiaris
  misc_feature (1)..(255): n = a or c or g or t
ttaaagccaggagnnntncgacnattnnnagtagacaaccgagttgtcctcccaatagaaataaccatccgaatacttatctcttcagannncgtnnnncattcannnnccgtcccannnnnaggnnnanaaactnannnnattccaggacagactaaaccaannnncccttnnngccatannnccaggactgtactatggccagtgctctgaaannnnnnnatctaacnncagctttatacccattnnnnttga

SEQ ID NO: 9290 - DNA, 162 bp, Canis familiaris
  misc_feature (1)..(162): n = a or c or g or t
gccagcgccgccatncaggtgctggtcaccgccatctcgccgggtcgcttccccgaggccctggacgagctgccgctgccgcccttcctgcagccgctggacctcacgggcaagggctagacctcgggcgctgcccnnnnngtggatttttggaaaatacta

SEQ ID NO: 9291 - DNA, 479 bp, Canis familiaris
  misc_feature (1)..(479): n = a or c or g or t
gcccccacctggtnngnnnncaaggaacactaaccgtggatggtgccccaggcccagctcaggacagatcccaaacaaggatcacgctggctcagaaccagctccaagaggactcagaactctaacggggccagatcgaacctggggcccggggttgatctgggacccagactcagacgttggtaacctaaccaggcagatccaggactacatctgagcctgttccagacctgggcctggaggcccgatccacctctgactcgggagaagtcaggaattgcccaggaccctgaaggggccacgatggtaacagatctggaacctcagcctggccagatgcaggccctccccgtcccccagaaagagggaagcccactgtcctgggcctgcaggatttgggtcctgcccactagctgcactgacgctgcccctttctccctgcccaacttcccctcacctcagctccggacatccgggac

SEQ ID NO: 9292 - DNA, 167 bp, Canis familiaris
ggggcagccacccaagtgagggtgagaaaggagaaagctcagctagcttcctgcctatggctcctccctcatttggccacactggggacaaagggttcctctgtctcctactgcactccaaggatgagagaagaatcgttagctcactccctcctcttccccttagc

SEQ ID NO: 9293 - DNA, 526 bp, Canis familiaris
  misc_feature (1)..(526): n = a or c or g or t
gagncaaatgcagtttanngtaatatatnnnactagattcatctatngnannnngagnnngctnnnnggggattggggggnngctgggctgaggggtgtcagnnnnnnggccaggaaggatgtcnactgcaggagcagagggccctgttgtcgcatcctgggcctcacttcccctgctgggnntccggctttctggcaaaggctcctactttgacgaagcccgtgccgcccgccagtgcccaccccacccccagctcccaaccccagccggaggccctgagctcaggctgagcccagccacctccccaggacttcgcagcaggtgggggtgcggtccctgttcccagctctgtcacttgtgtggcctccgggtggccgtcacgctggcccctggcacgggtgggacctcgccagggaagaagaaagctgcggcagggccccgtcccggcaggaaaaggaggcttctcgactggcccgggccagccagggcctcttggctgctttggccgtagccccagcttggtcc

SEQ ID NO: 9294 - DNA, 483 bp, Canis familiaris
  misc_feature (1)..(483): n = a or c or g or t
tttgnnaagtagtatttttgtacatgtnnncttcggtgagtaaacagnnncttaacnntcgtgcatgactgcgtgcacaggtgacggtngntgcgcnnctccagacaaggaggggnnngggctcttcccttgtttaatcaaaataatgtgacttgaatataaattccattcttttgtgatttcatagggtnctagcgtttcacnntaaagaaaaaaananaccacacnncagggggcctgcaagcgatatttcaaagaggatgttactgaaacatcttcatggtatgacaaccttacttgaacattattgcaaggatcagatcagtaaatagaaagaaatagagcgggtctccttttcattattctcctagaaataacttgttttattttttttttattttttatttttttgaaataacttgttttaaaatgttnnagaaacgcaagcnnnnnnnntatgcatttgtatgtttagagannnnn

SEQ ID NO: 9295 - DNA, 695 bp, Canis familiaris
  misc_feature (1)..(695): n = a or c or g or t
gctcacannactgccccacccggccccacttcaggcancagtcnnnngtcccagttgtcacctgtgcttctgctggccagctccgcctgcagttcccatgaccccgccccgggttcagtgagtttgccagatcagctcacgggacttacagaaacactcgtcccaatagattccaggcttattgtgaaaggacatgataaaggagggatgaccatcgggactggaagaaatacgaaatacgtagggcaaggtgtggggcggggcactaccctcccagcgcccgcacatgttcagcaaccagaagctctccaaagccatgctgttgggggttttgtggagatttgaccaatcaccaaggtttagcccctctatcctctctggagaagggggagggctgggaaattcccagcttctcatcatgccttccagtgcccgctccatccgggagcccccacagcgtcaccgctttagaacaagacactgctgtctcccaggaaattccaagggctctaggaactcagcgtcaggaaccgaaggccaaataccagaacaagaggtgctcctggtggtcttatccctgaggcagttacgggggtttcgggagctcagcgctgggccccgggcagagacctgtgtacttctgtcatnnnnnncccatcccccagcggctttaccgggtggccgggccttgggga

SEQ ID NO: 9296 - DNA, 502 bp, Canis familiaris
  misc_feature (1)..(502): n = a or c or g or t
acacgccaannaagttcggnntgatgtgatttctaannnntctatcatgttgggtttaggtgaaaatgatgagcaagtatatgcaacaatgaangcacttcgtgaagctgatgtggactgtttgactttaggacaatatatgcaaccaacaaagcgccatcttaaggttgaagaatacattactcctgaaaagttcaaatactgggaaaaagtaggaaatgaacttggatttcattatactgcaagtggccctttggtgcgttcttcatataaagcaggtgaatttttcctgaaaaatctagtggctaaaagaaaaaagtcctctaaaacataatgagaccttcaagatcacaggaatttttaatatctgattccagatgtaatagaagtggtaccagaatgcctagacttcagtggatatacctcagtctctttgttttaagaaacatgtcannngctgtgcatatttaaatnannnanttcacttgtcttttagcatatg

SEQ ID NO: 9297 - DNA, 618 bp, Canis familiaris
  misc_feature (1)..(618): n = a or c or g or t
cacatcaaattgtaanncatttttccatnncgntttctcactgagactcngagggctttnaatatctccagaatatatttttccattttccataagacttaaaagtaatataagctctaaaaagtccactaagaagactcagcaaaaggccgaagaggaagaggactctgatgaagagagtgatcgtgagatgagtgagcgggaagaggagctcgaggatgaccccagtgtggtcaaagactagacctggaaaaagtagtgcagtctttccggtatgatgttatcctaaagacaggcctagatgttggaagaaacaaagtggaagatgcattctacaaaggtgaactcaggctgaatggggaaaaattatggaagaaaagcagaacggtgaaagtgggagatacattggatcttctaattggagaggataaagaagctgaaacagagacagtcatgagagttctcctgaaaaaagtgttggaggagaaaacggaaagtgaaaagtacagagtggtcctacgccggtggaaaaagttaaagttgcctaaaaagagtatgtctaaataaatggattgcttnnnncagataaggctgctnnnnagtgatgggagaaagggc

SEQ ID NO: 9298 - DNA, 588 bp, Canis familiaris
  misc_feature (1)..(588): n = a or c or g or t
ggatcatcgcttggtaaacgaggtgtaaatgcagacaaggtnngaattgaagctgctgaaatgctannagcaaatcttagacatggtggtgctgttgatgagtatttgcaagaccagttgatcattttcatggcattagcttgtggagtttccagaataaaaacaggaccagttacactccatacacaaacagctatacattttgctgaacaattagcaaaggctaaattctctgtgaagaaatcagaagatgaagaagatgcagctaaagatgcttatattattgagtgccaaggaattgggatgacaaatccctatctataggatatttgccttttaaataatacttcaatgatgtattgcactaattcatttcataaatactagaaaacaacgaagaagaagtaacttattaaaggacctgacataaatatggagatgaagtatagagtgttgtagatttgcggagaatgcttcatcaaattaatctcactttgactatctcctaagataaggacaatgaaatataagagttgatgagtatgtatgatggctgatttcaatattaangtattgagatggagtgtt

SEQ ID NO: 9299 - DNA, 322 bp, Canis familiaris
  misc_feature (1)..(322): n = a or c or g or t
aataacctgttnnnnnnnnggaatgccaaccatttgatgtgctttgacatagtgcagggtnnnngtnnnnnnnctgagnnnnnaggctgtttccaaatggcttcagagaatcacgcctttaatagcnncngaaaagttccctggaccctgattctnnnngtgataggcagnnnnnnctcaannnagtttttttcttggcttcatagcagtgaatattattgtaagtgtctacatcatgctgggtttaatctgtgaggataagcatctggnnacctttataaataagatttaaaagagaacaaaaatttttttcaagaatttc

SEQ ID NO: 9300 - DNA, 495 bp, Canis familiaris
ccccaccactcctctgtgagccggagaagatggagaacttggctacagcccctcctctcagcacgtttcgggccgggccggcagtgggacacagtggaggactgaagagcactgagttccttcctctgcttcttggacagagacgaggtcaaaggaccagcgccttgccctgctatgtctagctctctccagccgggtgccttcctacaggagccaaagcggccacacttgcttgccttcatacctggaggcagagaaatcctccgtcatccagtccttccccatcctcctgggccaccgcgtactcccaggacgccatggcagccctcccctccagcctgagttctccccttcatccggtgccacccggactctccctgagaagactcctctcctgccaggccagctgcagttcctggcaactctgtcctggagtgtcctaggaaacggagctctgcaaaccattacaggagtggggaggaagggggggaactt

SEQ ID NO: 9301 - DNA, 467 bp, Canis familiaris
  misc_feature (1)..(467): n = a or c or g or t
cangggcttngactgngtccntnnnnctttttacacacnnntgcaccaacgtgcaccaacgtagggtatggcagggaggttcgaggcgccctactgcgacagcccnngtccgctcaggggtnntgcagnntccgagactagatcttttacccccgtgcgcttgtcacccgatcacacacagtcacagtcattcattccttcggctacaacatttactgagcgtgtattatgtcccagggatgataattaaaaataatggctgcaacataaccattcctgtggtctctctgcagaaggagtgggtgagttcctttcctatgtgtgcaatagtgagagtgaaatatggtacttttttttttttccagcccgtgctattttaatgttatggtgaacctagaacaagtaacgcatgggaacattaaggctgtgattaagtgcacatgttaattgttannnntatgtttcat

SEQ ID NO: 9302 - DNA, 331 bp, Canis familiaris
  misc_feature (1)..(331): n = a or c or g or t
cactccagtggcgggcaaggcccaaccaaggagaggaaaggaatggctcnaggcctcccatgcagagaccagctagacccagtggcccacacactggccagggccaggctcctcccacnnnggaggcctctcnnnnnatacttcaccatcagcctgtgagggaagaaaacttttaactggagagtagatcccaggggaggaagggtctaaaaagaatttgaagtgatgaaaatgttttactgttaaatagtagtgatggttgcacaatcttgtgaatatattaaaaaccgctctnnnttgtaccctttaaaaggcaaattttatggtctgt

SEQ ID NO: 9303 - DNA, 545 bp, Canis familiaris
  misc_feature (1)..(545): n = a or c or g or t
tnnnccgatgctcccagacacctccacntgcancagacttctgctaacaaagactcaaaaagctttccacgccaccgtacgtgctctgagagcagtggcttcagagaagagcccaatgccacgtcctattgcccccaagacccagctcctgctccccggccccacaaacccctgaacgcggtaggagaaaggcagcaggtgcatgggaaggaagaccggctggagagacctggaatctctgccctgagcctgtcgtaaactgcatgcccggggaaagacccgaggcacgtcccttcattcttctgtgcattggtttccctaccatgtgggtattagcatacacaagatggaccgtggtgaactagacacgattttctcccaagctctgatactgcgtagggcagttagaggatttaacggtggtcaacttcggagaacaaggaacaatattgttactggaatattctcagacttaagctaaatgaagaaggagaaatcccaccttcaggctctgaaaccttggtgtacctggcactggggctccc

SEQ ID NO: 9304 - DNA, 521 bp, Canis familiaris
  misc_feature (1)..(521): n = a or c or g or t
aggtaactgcaaaaggtagcatgagagcgaagacatgttgtcagatctctctacntaagaacaaaagtagcctgtacttttcagttagtatcttagagtgctagctccaaacctttaagtggtatacaaataatttgggtaatatttttgtatttttgacacactccgactcttacttgggtaaatgacagtttttacttgcacagcaaggtttcttcaaaggaaacttggtcccagcttagtaagtagannnnntggccacagatgtgtcaagtgattcgggaaaaagttgtacccaaatgtcaagtggaacttattttcctaccaactgattttgctttatttgagatatattgtcgtaattctttttagaagttaaattctcccttgggttatagaatatgtaattttgtgaacattgagctagcagagaaggtcagaatcctcaaattcctaaaaataagtaggtgcttaatgttttcttaaaaatctattacagtatttgatctttgctaaattat

SEQ ID NO: 9305 - DNA, 161 bp, Canis familiaris
  misc_feature (1)..(161): n = a or c or g or t
ttgtgcatggtgctttctcaattttcatcgagtcaagtatgttcactgtctattatctgaagactatgaaggctttcatgctaactgaattaaaaattgtnnttgttgatctctgaatagctcacttcttacaatgtacaaattcttcatccttttataat

SEQ ID NO: 9306 - DNA, 382 bp, Canis familiaris
ggagaacatcagcgtgaggcaggccttcgagcgcctggtagatgccatttgtgacaaaatgtctgattcgctggacacagacccctccacgttgggcacctccaagaatacccgtctctcagacaccccaccactgctgcagcagaactgctcatgttagattgtctctcagatgaagagtatatggagcagtggtagtgagagtcctttggtctcaattactttgtgaccacagccttgtaatctccacagaatgatatgaatatctcccagacctgactttcaagttcacatcacctgctcctgctccagggctctttgcttgggtgtcaagattccttgagtgtcttgaggaatgtttatttgagtttgtttgccaata

SEQ ID NO: 9307 - DNA, 572 bp, Canis familiaris
  misc_feature (1)..(572): n = a or c or g or t
aataataattttatttgaattcagttngccaacataaagtataacacccagtgctcacctcatcattgtgataggtttttattgactttttcaaagaagcagtctgagatttatnngccctatctccagttctggtttgttttctattttgttgatttttttcctgttttttcctattttttcaaatttaaatgttcctttttcctaatgttttaaaattaatgtgcaatttcttcattttagatctttctcctttaacaacaaaggcattttttaggctattaattttcctctgagtatagctatagctgtgtactgtagttttgggaataaagtattctactttgatcagttttgaatagtttgtaattttagttttgatttctctttgatctgaaaattatttaagaatgatttcttaattcctagcacttgggactttttatattttttaactttctatactagttttactagattatgagtagaggggatggcctgtaaaacctctattttaaaattatatgaattcttatttgtagccaagtacttggttgattttggagatgcaa

SEQ ID NO: 9308 - DNA, 541 bp, Canis familiaris
  misc_feature (1)..(541): n = a or c or g or t
gtgtacacacgcgtgcacaaagacacacacacgtgtgcacacacatagncaagtcacatgcaaacagnnttctgtggnntctgccacctacatatcttgccccagccagaactggccagaacagcttgccatctgctcatccgtctgtccgtccgtccactggagaagacagaattatcttggtgctctctgtggccgggtgcctgccaccctctggaacccacagaagctgatttttgttcctttttctccctgtgggactgttgccctggcccccagggtcactccctgccaggtcctggccggccacaggcacgtctttgatggaagtcccactgaggccagagggaaagtctcctggggctgctgaggccttgggcacctcaggagtgaggtggaggggcagggccaggcagggaggaagggcctagctgccctaatgacatatcttttgtttccctttgggcctgtggggagttctgggtgcctttgaactttgaattctttttaagaaaaaaatgataaagaactcaaagctgat

SEQ ID NO: 9309 - DNA, 182 bp, Canis familiaris
  misc_feature (1)..(182): n = a or c or g or t
aaaatttaagtgtgcatcagaattaccgnnnnnnntcgttaaaaccttgattgctaaaaacaaaacacacaaaaaaaaaccttgattgctgggcnncatccgcagagtttttgtgtaggagaagggcctggtaacttgcatttccaagacgttctcaggtgatggtctgggaccccacctgg

SEQ ID NO: 9310 - DNA, 75 bp, Canis familiaris
cagaagaaatccgtgtcatgtcaaccgatacttggctttagagactggatatgaaactacactgtagctcaatct

SEQ ID NO: 9311 - DNA, 477 bp, Canis familiaris
  misc_feature (1)..(477): n = a or c or g or t
agagtgtaannnaagttgagagcaatttcagaacatgcgtcanannnnnnnctattcagaagttanntnnngtgncttgagnnnatcatttnnnnnacctatggaaggagcaggnnnnnnngctagnnnngnnnnnnnnannagtttaanatgaatggatggcataaacgtcgcaggtgcatttcatgcttatttttnctctgccctnnnnnntccnnnnncgcctggatnnnnngagaagctgaaatacaaacggagnnnnattttcccactctctccaacnnnnnagtattcttttaaannnncngagccacgcgttttactatttccactcaccgactggtttcagannnnncttagagngtagttcctcttcnnnnccagaaaactttgaaaggccaactancgctgagtgaaaagcctttgcactcgcttcaggaggacgtttgcttgtttgtttcttcctaaattgacaaa

SEQ ID NO: 9312 - DNA, 711 bp, Canis familiaris
  misc_feature (1)..(711): n = a or c or g or t
tnncancaatgcagccagtcatcntgntgtccttgaatcctncagnaaannattatnngtatctctccatgatttcctnnnnnntcntcattctgnnnnnnatcccagcnntcttgttttccatcaaggtgggcancatnnggctatcaccaactccccttgttcccagatattcctcctctgttccttcccatccccatacctccccagggacctcttcatgttcctcctggagaatttactccctccttcaccatctagctgcccttgttcctccccaggacccccttatctgctcctcttcctttttttactgggggactgaaccctgcccttacctccctcacaccatcattcctggtctttcactccccacctccccctggaatgtcgctccctatctccctccgcccttggaaacactcccaccagcttgccttcatccccacagacccgagaagccaactttcatggggatcagaggacagcacaaataaattccagactggccttgggctttagcatctcaagcatcctggtgggctccattatgatcattagctccattatagttggagtcctgaaacatgaagtatgagatcatattgaaagctcacctccctcaaaaaagtcatgaacttcaccttctggagcttttgaacttggacatcaataacctacctgtcctggaggaagtttcccnnncattag

SEQ ID NO: 9313 - DNA, 564 bp, Canis familiaris
  misc_feature (1)..(564): n = a or c or g or t
taatactatataacagaccacttctaagtagaagattttacntgtgaaaaggtcaagattcagaacaaaagaaattattaacaaatgtcttcatctgtgggattttgtaaacatgaaaagagctttattttcaaaaattaacttcaaaatgactataggtgcgcataatgtaattgctgaattcctcaacaaagcttgtaaaagtttctatgccaaattttttctgagggtaaagtaggagtttagttttaaaactgctctgctaaccagttcacttcacatataaagcattagcttcactatttgagctaaatatttatattgtactgtaaatgcctatgtaatgtttattaagatttttcaagtctccgctaagtacgaaaataatcatccaaatgaagtcatcatttgaaatagcctactgattccttacatctgttatctttataattatcattcagaagtctttctagtaatagtaactctcataacctacattttgaaatataaattgtattctttctctgtacaacactaacatctttttttaagtttatgagaatc

SEQ ID NO: 9314 - DNA, 342 bp, Canis familiaris
  misc_feature (1)..(342): n = a or c or g or t
tctgtatcnnnnnnnttcaccttaggnnccccnnnnnnnnnnnntccacnnnnnnnngaagagtnnnngacagaaactgtgtgtcatnnttaggctaaaaacgccatcagcttcactgggcngcccctaaactccagcggttatcaggccaggnnnnnnaannnnnnnnnncantgacctaacttccctcncagtcactctcncgagcaaggagctgcccactggcaagccctccacgtttcctgcgagcacccgcnccggctgacccactcactaagagcgcacggggggacacntgcctcagagtcctgttcaggaatcgcannnacagaccagtggacc

SEQ ID NO: 9315 - DNA, 520 bp, Canis familiaris
  misc_feature (1)..(520): n = a or c or g or t
gaaggtctttcnnatctnnngannnnggnnnnagttgtgggaagcaggtgctgcaggaacgngnnnnnnnnnnnnncgcntnnntgnnngcnngtgttccngtggcccgcgagctcnnnngcccnnnggcgggacacccgtgtgcgtgtgcgctcccttcctcggggcctccacaggnnncgcgtggggctcgnnggggacccgtcacccctgtcactgcccgtgtctgtgctctagnagtaggctatgtccccaggtgtccacagtctggctcgtngccgagtcggtggcaccgtgtcccnaagctaggnnnagatctcaactcgtagggcacacgcgcatcaaccttgtactcctgtgaaagtnnntgttcacgcatcatgtgtcatggtgtccttgctgcccgggtccctccctgtcgtgcgaaggtgngcgccccaannnnntgcagggcctggannnnncgatgcatgtnncgggactctgcatggatagtacagtcgtagagatgtnnnccacg

SEQ ID NO: 9316 - DNA, 511 bp, Canis familiaris
  misc_feature (1)..(511): n = a or c or g or t
ggctttngagcactaggtgaagtgagccaccatatgctttacaagtggttgctgtggctgtcatgtgtaggtcagcctgaaaggaagaagtctggtgggactgggagagaccagtgaggagaccattacagtagtctaggtgagtgatgacaggggcagccagcgggtggcagggatgtccgggccagcagtttgtagtggatcgtgtgtggtgagtcaaaggaagggaaaagttgagcatggcctcgcagattttgtcctgaacaactggatgaagttgccattttactgagatgcagaagatttcagagggaagaatactggggagaaaaatcaggtgtttttgttttaactttatacatgttgatgtattacacacctacagaaaagtaacaaatcatgattgtacgacgcaatgaattcttaccaagcaagcaagtccaagtctcccaccacaggtataaacaatatcctaactttgaacaccatgttcatacatgtgttttgctag

SEQ ID NO: 9317 - DNA, 448 bp, Canis familiaris
  misc_feature (1)..(448): n = a or c or g or t
ttgnngctcttgtnnnnnnngccatgacattgggacagatctactanntgaagagattttttgnngtnnnnagggttgtnnaaaaagccttttcctgatctcaaaatcataattcactgtttaccaaacatcttggtgataataatgtcattagtttctacatttttatttttggaactgtacattcacagcttatgtttctttgtgattaatagatactgggggaaagcacctttttaggaaagttagaatgaaaatttgacacttgattggcataatttcttatttgaattctgccccactatacaggtctgtcagaactccaacactgtaaatgagatacaagcatatagtcccgaatatatcttctttttgtttttatgataaagtacggttcagaaaagtacttcatggatagtactttgtgcnntaaaatgactgcattctt

SEQ ID NO: 9318 - DNA, 507 bp, Canis familiaris
  misc_feature (1)..(507): n = a or c or g or t
aagtaatctccacacccaacacannnctcgaactcacaaccccaagatcaagtcgcatgctccatcaatcaagccagcnaggtgcccctcattctcctaatttttaantcctggtcctgaacacacatacagtaggacctttctctgctgtcctttccaccccggcccctcactccatagtctgtgatgtagtgagatccccttttcctgcttctttgtggatggtgagtgggacagaggacaggcacagggctatgtttcagaattcctgcaaaacatctcttgtcccacaggccctggggcaaggagcggcgggccccactgaggcatgtcacttccctgaggacatggattgagaggctgggctgcaattctggagcatgtgaccagggacaaggccacgagatgaaatgtcagtacgcttgaatccgctacatgtaggaaagctccagaattggaacttaactcttttcagcatcaatacttttttggtttggctaattctca

SEQ ID NO: 9319 - DNA, 443 bp, Canis familiaris
  misc_feature (1)..(443): n = a or c or g or t
ggtgcccaggactcggagagggcgcctcagactcgacaagctggaccccctgctcctgggggggcaagcgcatgacccccccgccctcgcgctgccnctgttccccgagcgcggccacccagtgttgcacaaacccgcgcgccccggccgcccctttgtacacaccgccgccgaaggggactccgagggggcgcagcctcaagccctgcctttccttttactttttttttttttttgccttnnnnnnnnagnnnaacnnnntgttnnnnnntgccnnntttatgttnnnnnntnnnnnnnnnnnntggttgtgtgtgtgtgtttnnnnnngnnnnggttnnnnaaannnannnnnnnnnnnnnnnnnaaaaannnnnncncntccctttccnnnnnnnnnnnnncncccttccntnctnnnganatccctcctcccgcccttt

SEQ ID NO: 9320 - DNA, 511 bp, Canis familiaris
  misc_feature (1)..(511): n = a or c or g or t
tangcanntgagcatgctcattctgctacccaaggatgtnnannatgagtccacaggcctnnagaaggttgaacaacagctcaactctgagacgctcttgcagtggaccaatcccagcaccatggccaatgccaaagtcaaactctccattcccaagtttaaggtggaaaagatcattgatcccaaagctagtctggaaaacctagggctgaaaaatatatttaatgagaatacatctgatttttctggaatgtcagagaccaagggagtggccctctccaatgttattcacagagtgtgcttagagataactgaagatggtggggattccatagaggtgccaggatcacgaatccttcaacacaaggatgaattcaatgccgaccacccatttatttacatcatcaggcacaacaaaacgcgaaacatcattttctttggcaagttctgttctccttaagtggcagagnnnnggttaagtcccacctaacttttctgtaaactctgcatc

SEQ ID NO: 9321 - DNA, 532 bp, Canis familiaris
ctgaagaattgatcgattactcctgcccctgctcttaaactcctaccccgtacatggattttttccatccacatttatttatcttagcctataaaatattcaagaagtacatgtgctcaaatttttagaattaattgctaagaacagaggttgatattttcacaacattttgctagagcagcttgggtgtgttttcttgtatagtgactggttgcatcaggcactggcagctgacttgaaaggaaagaaaatactcaggtactttcaagtacaagattgtttttggtgttcttcgtagcctaatgagaactgtcccagagacctgtctaaaatgaagccacttaaagtttagaatataacccttttatctagcacctgtgacaatttcatgtctctctaaaggagacaggaggttcagagcattattggcccttttagaggaaaaggagtgggtaggcacacccagaggtaagtgaacaccttaacacatgggaatgtgctactagtacaaccaagcccacacctgacatgc

SEQ ID NO: 9322 - DNA, 307 bp, Canis familiaris
  misc_feature (1)..(307): n = a or c or g or t
catggtttctcacactgcaaannagttattanngtgggtagnnncnnnnntctctttaagnnnnntttgcncgaatgcaaactgctgcctctccctgggcaggaatgattcctgactcactgagggttggccctgtctggctgctgtgcctatgtaaacttggggacagctgaggggcacagactcactcttccacattcccaagnnngcccagcctgctgcccagtagcaaccatgccaggctcaccacctgnnctgagccccagggctgttgtaggacaggctgggcctcctggacttgccttac

SEQ ID NO: 9323 - DNA, 351 bp, Canis familiaris
  misc_feature (1)..(351): n = a or c or g or t
gcagcacccagacacagcagcctcaccccttcctgaactggcccccagggcccctgcgnnagcctggcactgaccaaaccctgagggcccccacccggccctgccccctgtcctgtggcctggggatcacggcccacgggaggaagacaagtcgcgtgcgagggagccgcccctcggccactggcaacccccagagccgctcttctcccaaggcccaggcaggagaggtggcgctgagggggtcggtgccaagcaggtccctctgccccccgcaggcagacccccaggctctgccggctattccgggcctggggctgnnnccaggctgggcttggnnngccctggcctgcg

SEQ ID NO: 9324 - DNA, 531 bp, Canis familiaris
atcattgttacgtggcaggctctgcatgcctttcataaagaattcctaggatttagtagctggggagagtgaggtgaagctcaagaaggttaaataaactgcccaaaaagatgcgaacagacatttcgccaaagaagatacatggcaaatgagcatgtgaagagatggttaataccgtcaccttctggggaaatgcagatcaaagcccagtgagctaccactgcacagccactcactttaacttttaaccatcaccactcacatggtggtggtggcagcagtggtgttaacccaaaagctaataacgggtattgaggacgtggagggtggtgcagccacttgggcaaacagtctggcagctcctcagaaagtcacaccgagttaccatgtgagccagtggtgctactcaggcactcaccgaagagaagcaggaacgcttgtccgcacaaacacctgggcagctgagtagttgtggcagcattatccatccgagccaagaagcggaaaccacccaaatgtttgccaactggt

SEQ ID NO: 9325 - DNA, 565 bp, Canis familiaris
  misc_feature (1)..(565): n = a or c or g or t
tgtaatctttagaactccccaatagtttataaaaatgtnacaaaagatcgtcttaaaacaaactgatcttaagtaaaatcctagcagaatagncgtctatatgttgtcatctccaaaaacagtaaaaacaacaacaacaacaaaaaacacacacaaaacaaaacaacataaaaacaaaaaaatcccacaaaacacaaaacaaaaaaaacagtatctgttgggcaatataaagctttaaaaggagcagaatgccaaatggctaaaactgaagacagcctgaattaagaattttgcttttctaaggtgtgaccttggtttatatgatttctcacaaatgttacttttatactgtttaaaaatagacaatttatatatcgatttattttagccctttaaagaactcttctatgtgtctttctgatcatgaaggaatataaagaaggattaaatgagctgttgctgttctttgattttattaaccttgatgcatgcattatgactaaatcctgaggcaaatgactttacaagtattgaaataattgctgattaaccaccggtgtgaaat

SEQ ID NO: 9326 - DNA, 464 bp, Canis familiaris
  misc_feature (1)..(464): n = a or c or g or t
cnnnctcccatctaaaagaagtacaagtatattcttagaagaccaagaattgatgagtgtagagcttaatgtgcaattcaaatattgacatttctttgccagagagaaaactgcaacatacgaaatgcatcttgataactttctttcttacctcaggcatattacagagttcgttgttctaagacattgtaaataccaggcagaaatacatgaaaagctgtcttatgttcctagacttgaggaaataccttcaaaatgttgctcctctgtccttcattattgaccaggacactcaacaacctcttgtcttgatgcagccctcnnnnaagnnnnnnnnaggcccactacgagggttacaatcaaatgtggatggcacagtactcaagggagtactagagaatcacaagggataggacagtcgcctgagggtaagagcagcaaagttgtcaccactcctagaccca

SEQ ID NO: 9327 - DNA, 539 bp, Canis familiaris
  misc_feature (1)..(539): n = a or c or g or t
catcccaaaatagnagccgtccannagttcaccaggactctgcccgccctggtgtggcatcgacaggactggaccatacttcattcctatgtgcacctgaatgccgatgagctnnaagccctgcagatgtgcccaggttatatcgccggatttgtagacttggaggtgagcaacagatcagacctctatgatgtgtttgtgaacctggcagatagtgagattaccattgctccgcttgcaaaagaggccatgacgatgggcaaactgcacaaagagatcggtcagctcattgtccagtctgcagaagatccagagaagtcagacagccaggttatacaggatatttccctaaaaacgagagaaatcttcaccaacctggaaccattttcagaagtttctggtgatggaaaaaagctagttctcaatattgaggctctgaagcaaagacgatttccaccagcaacagaaaacttcctttaccatctagcagcagccgagcaaatgctgaaaatctgacnnnnncaacgtcactgatgaat

SEQ ID NO: 9328 - DNA, 597 bp, Canis familiaris
  misc_feature (1)..(597): n = a or c or g or t
acttcagaaactgttattggtgtngaaatatacagataggacggagaaacctatacacnagtngaaggtaaagaaaaattacagaatgcaaaatgatattttgggtgggcaaacaagttaatggagagtataagtagattttttaaaaagatagctctgaattcagatctgtcgtatttaatattgcaatcaaccattaattttccacagtaaaggaactagggattatcgggtaatatatccagtaataagtcatagttagccaaaaatctaatgtgtatttattatgagtttgagggttttttttcccatcaaatttttttgttcttctagcgatgttggctgattttaaaacaatgatttcaactgtttatttataggtcctcttatgtacttatgactgtattaatgagtagtgaaaagatttaggaagacacgacttcagaaagagggaacacaaaagcctaaatataatccatgagctagaaaagaaatccctgaataatcaagagttggcagtattgtagttatactcaagcctttaatgaaaatgagatgtgaaatcacctaatacaaacctcacaacatcgctttcat

SEQ ID NO: 9329 - DNA, 501 bp, Canis familiaris
  misc_feature (1)..(501): n = a or c or g or t
acccgaaagtgaagaagtacnnnctgatgagcgtgaaaggctgtttcactgacttccacatcgactttnnaggcacttccgtttggtaccatgttttccggggtgnnaagcctgtggctcaggagaaagaatgttccacacagtccaggaactctacccaccctggcgtttcagcgggaatggagattccttaaaggcagatcttttggctgattcctccaaccctgcacaatttggcactgtacgaggagtgggtgctgtcaggcaaacagagtgacatcttcctgggagaccgcgtggagcgatgccaaagaattgagctgaaacagggctacacgtttttcatcccttccggttggattcatgcagtctacacccccgtagactctctggtatttggcggaaacatcctgcacagctttaacgtgcccatgcagctgcggatctatgagatcgaggacagaacacgggcatgtggctgaaaccttttggaggcgaagg

SEQ ID NO: 9330 - DNA, 517 bp, Canis familiaris
  misc_feature (1)..(517): n = a or c or g or t
catcagcacccacacccacgaggcctgcccccagaggctggggcagccgggagtgcagcnagtctctgtgtccagcaccttggaggtcccttagacaccccatcttccagagtcctcctgtgcccacctggacccacctctgaccccctgtgaccctgttgcttgggctagcctccgggaccctcaaggctgaaggttggacagatccaggcctggagatccccgaaacaggagctgacggtgtggagtgtcacgatggcccccatgcctggctctgctccagccaggcggtgtagaatggtggagtggggaggcctggcagctcagcccccaaaacgaggggaagctttcggcgtggggtattcctgctttgcacctgatcttcactgaggagggtcctgcgttccagttatggaggaaaccctgagatgcccctagatgccctcgcccctggtcaagatccctctgtgccccctgccttcctccccaggtctctgctccctccaaactcagcacc

SEQ ID NO: 9331 - DNA, 523 bp, Canis familiaris
  misc_feature (1)..(523): n = a or c or g or t
gttttcacgttttgctnnnganantaattcagtcctacagaacnnttcagnnnnnnngaatgtctgcagaattatttaaggtgtcnnnacatggcatatataaccttcaggttgaaagatatataaatttgggggcataataaaaatttgaatcattcagatatttaatttttaagaaatggagcccttttgtctttaacataaggnncacatcttttcaagatcttatcctatgtgagtattggtgctttgcacaaagtgatttctgaaaagtggttccctttaagataatgacttcataaaatcattgtttcatggcacctgtcacaaataacctnnnttaagattaaaactggaatcttttttctcgtatttctttattggaggcaccannnctatagttaaatacaacatganctatttagtactgttcatttgaaattcatgttgtctgtgtattatgatttattgacttgttgatgcatgtaaattgggtgcatnnngttgccactgtatgttaaat

SEQ ID NO: 9332 - DNA, 171 bp, Canis familiaris
  misc_feature (1)..(171): n = a or c or g or t
ggacctctnnngctgaggcagcnnnnnntcctgggactgagctctagaaagagcttctgttaggacannnagcctgttgcttgttnnngctctncngaatgcctccttttttgcactnnntgacatgctttaatatattgttatgtatccaaagnnnnnnattgcttcanc

SEQ ID NO: 9333 - DNA, 591 bp, Canis familiaris
  misc_feature (1)..(591): n = a or c or g or t
atatgtctacccagaagatctgatttaatttttctggggttaggattcaggcattgatgtttttatgaaattttccccagctgattcctatnnnnagttgggacnnngaagcattgtaaatgagaaagcctcacagaagcaaagtcaattctggcatgaaagtctggcaaaatcttatgccagttgatgatgatgataactgcatggtaactgtggtggtggtgacagcaggtgacaagtggtagtaatagaggagtaagaatannnggggagtaggagtggcagcaattgtaggnnnggcaggaggaagaggagtggcagaaggtgggagttagagaggaataggagaggcagggggaatagtagtaaccatagtagagtagtagtagcaatagtggaagcacagttgcagtagtagatgctgatacttactgaactcctactaatatgcgaggcattctattaaactctttaaaatctattagtatcagggnnnctgggtggctcagtcaattaagcatctgacttttgacttcagctcaggccatgacannngggttgtgagatcgngnnctggtcannntgtgtgtg

SEQ ID NO: 9334 - DNA, 441 bp, Canis familiaris
  misc_feature (1)..(441): n = a or c or g or t
gaggcannnatgtctgttatttataagccacgcgnnntgttgtatttttgttttnnnnncnnnaatnnnantaagactggtcaccctcatttatgctaagtgtcttcattcntgtcttcattcagaattataatattgagatgatgaccaaaaaaataaaacatgctttttcggacagattgcacatcagcaaatagatatcatcccatgagcatgttttgcagcgtgttaagcaaaataaaaatgtaacatnnnggcgtctttgtgaaattatgacattctattgcccatgtgaggaccacatgagatgttgccaagccgccgaggaaaggacacacaatgacctgcatcgcccggtaaaattttcagagattaaacaaagggacgtctnnnatgctctccannnnnnggtcagtcttgttntccttgcaaagtnnnacc

SEQ ID NO: 9335 - DNA, 469 bp, Canis familiaris
  misc_feature (1)..(469): n = a or c or g or t
tctggaactcgggacccagccaagagcagtncagcagcctatgcgnncngagagccattcannaaggggctgcggccttcctgggggtggacttcctgcagtgcccgtgaggagggcgcccggtgacactcccacgtctgcacacagcatggggagccagcaggacggtgggcagcagggttcaccaggttgcccggaatggagagaaagtcgcccgtggccacccacgcaggaggtgccggctatggctgggctctgcagtcctggcttccggggctggggnnnngggggcctgggagtcgctgctccatggagcgtggacacgatgccgggtagagctgaccctgcacccggcaccatcccaccagcgtcttctagggtcagctggctcggggagcaaaggcagtccctcgtttctgagacctggcttctggagaagccaccagcgggaggccagttggggaccact

SEQ ID NO: 9336 - DNA, 252 bp, Canis familiaris
ggggggcggcagaaagcgcacagtaatcttgggccaggtccctctttctagtccctctgctttcttcctccctgaagctcaacccccctggtggccaccgcccttcccccacccctttggtgtgattatttcatctgttagatgtggctgttttgcgtagcatcgtgtgctgcccccgccccgcccctcctcagtccctgtgcgcgcgccccttctgcgatgtatggcccttgcccctcccccacattaata

SEQ ID NO: 9337 - DNA, 570 bp, Canis familiaris
  misc_feature (1)..(570): n = a or c or g or t
gaagaagaaataacgctgataatactttattattaatatttatagtaattattataatactaataacacaatccaagcgcatgacaaatcacataatttctcattgtcaatgaaggatgcgtcttccctctccaccctgcaccccccccacacacacacacaataaggaggagaaaccgcacaagctaccaaatataaaagaggcattgattcctggagcaaagggagtggagggggcccggtgtgttgtacatagctgtcaagttaaggttcagttaccttcccttccttccatctccccccacccccacccaagctttcacttttccttcagcttccctccttccccattcccaccttccgccgggctcaggcaatagtacattttaaagaaaatgtctacattaagcaccagaactacaagaggccacagagacagtcccagacaaacgtgtatgacatgtactggtctctggtcagccctctttctcaccccttagttaaccattcctttttccaggaccaggcatttaaaaatttacttttagaaatnnccctcgctggccgaaa

SEQ ID NO: 9338 - DNA, 496 bp, Canis familiaris
  misc_feature (1)..(496): n = a or c or g or t
agtatctgtgaccctgtcttactactgcttgaaagaggtatctcaagaaacataaattacattttagtcatgagtgttacattatattctaagaattgatgtcactttgaaatataggcagctctgaaggcaaattagtgggtgactgattcataatgagtaataaaagaaatcgcacatttgagctgatgtcaacagtgctcctcagactttctaaaaaaatgttccttttacccttgtcatagactgattttgagttttcttgactctgaagaattaaccagaggagaagtataaattccagaacattttgctcagctgatagcagaaagtgaaatctcctgcagagggaggccagggaatcagcaaaaccattagtatcattgtgtcccaggcatttacagtttagaaactttctccaggtgatgaactagtgaactgaccgatgctctgttnnnnntcacagaccactaannnctatcaatttctggaccag

SEQ ID NO: 9339 - DNA, 558 bp, Canis familiaris
  misc_feature (1)..(558): n = a or c or g or t
ttggcttattnnngccaaatgtattggggggtgactgaaacaaattactgtaaaacatttaaatgaccggtttgaagtgaaataggggttttattagaaaaatgagagagccagacgtgggcttcaaatggtgaacagttctcacctggcacccccaaacctgtattccgtcatcacatcaagttgctgcccatgccagggtggtgcaaccaggagacagaccagcacaaaaaccttcccagtctcttccaagtgctttttaaaaagaagataaagtcaagtttctatttctagagaccatccattttttttccactatgttcacgtgatttacctcacagtagaagcaggcncttctcagaaagtgctggggccgcgtccatccctcacctgcactcctcgtgctgagacagaggtggagtttgggtttggatggtaagactataaagatcctactaagtcagtggcagttttctgtgagatgagtgttgtagattcccctgttgtcactaatcttacaaatggcaattttgagaagtaggccagaaactaataatg

SEQ ID NO: 9340 - DNA, 579 bp, Canis familiaris
  misc_feature (1)..(579): n = a or c or g or t
cagnngaaacagctactgntagctcataaagactgcccagttacngnactacagaaaaagaccnnnnnnnatttagaaagccccaannaaagctcagagncgacgggttctccagcccctgtgattcagcacagctcagcaacagcccctagcaatggcctcagtgttcgctctgcagctgaagctgtggccacctcggtcctcactcagatggccagccaaaggacagaactgagcatgccgatacagtcgcatgtgatcatgaccccacagtcccagtctgcgggcagatgatgcctcccctggtggaaaggtccccagccagagctcgcccgcccgagagccaagaaagacgccatcttatcgcctcccatctgccttggacatggcaatatgggggggggaaattgtgtgttgtgaggaatggacagatgtggggcttttcagccacatggtcaagtacattgacacccgtactaagagcctcccagccccagagccacatagatcatcccctaaagggggcagtttctgatgtacncncngccaaaggcctttnnngatggtccgaacaatcac

SEQ ID NO: 9341 - DNA, 568 bp, Canis familiaris
  misc_feature (1)..(568): n = a or c or g or t
gagattttccaaaatgtagaaatcacttcattatataggnctggacatcatgatnnnagttaataaaatgaaattctaantgagttttcattttattgctgttttcttaaggagaagaatttgcagaaggtaagcaagaaaaacaccttctaggagattagaacataattagcaaaatgaacacatcgatataaatgtatacaagttagtcttttctggctttcctgtgacccattattagaaatctgattggcaggtatttctgcaattagttgattctggaaattttggcaagctttgctcctttctacctcaagaattgggaactgcccagtttataaatgccaatttaacaatatcctttagtgtttaaagtgctttgggaaggggcacccggggggctcagccagtgaagtatctgccttgggctcaggtcgtgatcccggggtcctggggttgagccccttgggctccctgctccgcggggagcttactcccacctctccctctgcccaccctccaccgcttgtgcactctctctccccnnnnnnctctcataaaatctttt

SEQ ID NO: 9342 - DNA, 564 bp, Canis familiaris
  misc_feature (1)..(564): n = a or c or g or t
tggtgagtgcnaaggggaattctctgtgtcactgtgcattgnnggcacagaccagggtgcagccctgggacagcccgctcccagcnctctaattcaccgtaactgctgccagtggagatgtggggacgttgtgtctccctgtgacccctttcatctttttaaaaccagctcnntngccgcttcagccagatctgttcttcacctcttttttctcaaagaagacattgcactcacggttgtatcttattattttgggacatcagtcctgaagaggacccactctttctagataatctggatttccctcatggtgtttctgtttttgtttttgttttcttttcttttggcgagacaagttttatttagagctgctttggtctctctgatctgtctcctgatgtggaatcgtcgcactgccgatgtacagttggaaatgtttaaactgcttcctttgaggacaagtttgagttgtagtaagctgtaaagctattttatttggttcactgtgatggagacaagcacaaaaataagtgaaaagacagcacatttcagtgtaatcccctt

SEQ ID NO: 9343 - DNA, 544 bp, Canis familiaris
  misc_feature (1)..(544): n = a or c or g or t
aganntgggggtgcagnngcagcacagccagaccagcccatgtcctactatagtcctgtaaggacagaaggaacaagacctgtacccnnttggctgaggtgccatggccagaccctgcctgagtctgctgctcctggtagccactgtgacccttgtgtccagaggtatccatgcctggggcaggtcaaaggtggtgaggacgttccaagacattcctgaaacttatgtctatgtgcagcaggcgctatggtatgccatgaaagagtataacaaggccagcaaagacaagtacatcttcaaggtcataaaggtcttgaaatcccaggagcaggtcacagagagtttagactactttcttgaggtcaaaattgcccgaacaatgtgcaagaaaatttcaggagaaaatgaatattgcctattacaaaaggatccccaaatccaaaagatgtttttttgcacctttattgttgcaaccaaaccttggaaatttgagttcactatgctgaagaaacactgtgaagnnnnctaattatcttctagcata

SEQ ID NO: 9344 - DNA, 543 bp, Canis familiaris
  misc_feature (1)..(543): n = a or c or g or t
cgnnagcccctctcccgagcnngccgcccgggcctgggagccccgcgtgggcccccccggaaaggcgggctctgggctgnacgtggcgcgctgaccggcggnnaccctgctcgcggcctcagcgcgtcctctccaggcgccactagccgcgccctggggccacgcacttgggaggacttgccggtctctttctctgggcgcagagcttgctcggatgcgggcggggcgcgggtccctttggctgagcgggcaatggaccgaaatgcgattccctcccggaccctcaaggtcttggacgccgtcatcctccccagcggctcctgctgcctccagcggggcagacggagagcccaggggccgcgggctgggctgtcggaggggtgcggacagctggcctttaccccagcagcggggcctgagcctaggcggactaagacttggcctggacgtccctgcctcccccagcagctccctaggagaggcttatgggcaccaggtcctgagtgtggagctggggccctgtcctccgctgcagcttgtggg

SEQ ID NO: 9345 - DNA, 507 bp, Canis familiaris
  misc_feature (1)..(507): n = a or c or g or t
agttgtagtgttgttctccctacgtgcccttcacggctggggctgccaccccacccggcccgaatctgtctcaacctgcaggaacacacaggcggcgccaggcattacctcacagcaggactgcagttgctggcttcgctcctgggcaaggaggagcaggccagagcctctttcgcttccttttcctgcctgtgccgcttctagaagccggccgcaggttgccaggaggtgacatgaaagaggaggaactcagtgacctctccctctcctgcattcctccaagctgcggaggacttaactgccgctctgaaggacaccatgcctgtgcgtgcatgcgtgtgcgcgcacgtgggagttggcgtgggacaggacagccgagctcacggggcaaacggagtctgcactctgcaagtcagaaaacgtttgagcgtccgggagtcacagatcctctcctcctccatccccttcagcatttgcactgcgtccccccagacgacacagcnnnnn

SEQ ID NO: 9346 - DNA, 646 bp, Canis familiaris
atttcgtgctaaaatcatgaccatttttttgctgttttcattatccataggaaaaaatataaatcacagatgaataaagcaagattaaatattattcactagaaatgcaaaaccaaaaagcattattttagtttttagataatagcaactatataaaagcttaccaaaaaaataaataaataaataaaagcttacattcatgagaagtagcagaatacagaaggtataaaataaacttgtctattgtatttattagaaatgttatttgaacaaaggtaaatataacttgaataagctcatgtattatttgtcttagaaatacaaaaagaatttttaaagtaaactctgattttggcctctatgggtcaaggattttgttttatctaataacaaagactgcatttataaacgatgatctcattgtgatcaaatattgagattaagagtttggttggttatgaagtcaagtcactcaaaagcactaaaactgcaattgggatatgtcaccactaggtggatacaagtcccatgggggtgtgagtgtgttcattctctttaacttgacatcatgttcagtgacaataggtttattcaaatatccttttggtttttcaccaaacctcacttcttttacaatagctaaatg

SEQ ID NO: 9347 - DNA, 452 bp, Canis familiaris
  misc_feature (1)..(452): n = a or c or g or t
gctcannaatcctcgtcgggtnnacnaatgacaggagagtgggacatactgaatggatgaacgaaagcatatgctgaacccgtcttgccgtgggaggaatgcgagcctggcaggcaggcgaacctaccctttctccccagctccccctcgccccgcaggtggacgtggttgatggtggggacgttcccttccacggcttcctctgggcatttctctgtgtgtacgagcgcgtgggcgcgtggctggggctgcacccaatcacggtacgtggcccagtcatctcgcgggattgcaagaagagttggggcacctgagtggctcgactggacaagcatccgactcgatttcagctcaggtggtggtgtccgggctgtgagcnnnagccctccggtgggctctgtggggagtctgctgctcttcctgtgcccctcccccgtaaataaacagacaaa

SEQ ID NO: 9348 - DNA, 591 bp, Canis familiaris
  misc_feature (1)..(591): n = a or c or g or t
atagcatattttgtttatgccatgtaaaaaatgttgtnnnnnnnnnnnntagaaaatggtagcannaantctgatcatgaaaacatgacatcttagagtttctattacaaaagaagtagttcaggactagaacattatcctgttagtattaattatctcttgtagagaccagtgttttttaatttcacactgagggacttgnaagcatatcatggcctgatcaattagacttactgattatgttagagatttctttttagtggtcaatgaatagtaaaataatttaatgcagacatcatcttaccgttgatacagcatgcgcttcttcatgaaggtcagattcaggcttgagagttttgaaaagtcttaaataacttctaggttaggagtaacccctagccttaggattatttatttttacaatggattataaggtccataagcatagataatggtcctggatgattgacttaaaaaggagagtactttgatagtaaatactacatttagcaaagacatttggaattgattacatgcatgatatattccttaaccagtttgaaatttttacctaaaataactctttttttc

SEQ ID NO: 9349 - DNA, 414 bp, Canis familiaris
  misc_feature (1)..(414): n = a or c or g or t
gaccgtgctggggctggtnnnnntctttcagctccaccgccgctccaggatcaccaatctctactccttgcacagctggctgggcattgtcannntcntcctttttgcctgccagtggttcttgggctttgttgtcttcctgctgccctggatgtnngtgtggctgcgcagcctccttaaacccatccacgtcttctttggagtcgtcatcctgtctctgtccatcgcatctgtcatttctggcattaacgagaagcttttcttcagtttgtgagtggggtggggggcagctctaacatggacgggaaagcatagggtcttcaaaagatgcaccctgtgatcgtaggaccttgccaagggaggggagactttggggttgagcttgttcctgatcnnnnnnntcatgaagtcttt

SEQ ID NO: 9350 - DNA, 357 bp, Canis familiaris
  misc_feature (1)..(357): n = a or c or g or t
ttttgccagtgtgatcctnnnnnnnacttagnnnatgttttannnnnttgtcccnnctcagnnncgtatgctaaagacgcanncaaattttctaggcctgcnnnnnnagacntcatcaccagaggtttgggcaaagcaggtaatgnncacannnggatgtcgtctnnnnnnnnnnnnnnaannncagctggactccatnnnnnanngcgnnnnnnngttgcattattttgtnnncnncnnanaagattctttattgacaagnnnngnnttacccattttgaaaagtcnnnacagaaagtttnnaattcacnnttggactcctcaaacaatacttttctggggatgnnnntagttaaa

SEQ ID NO: 9351 - DNA, 226 bp, Canis familiaris
  misc_feature (1)..(226): n = a or c or g or t
aagatcgtgtagattggggttggggagggatgaggggtgagtgagtctaaggataatgaaataatcagtgactgaaaccattttcccatcatcctttgttctgagcattctctgtacccttcagatatccatctttttcattttaaacccagtctttcacttgaaagattttattgtgtaaaaagttccacaagtcaataatttagannnnnnntgagtatttggt

SEQ ID NO: 9352 - DNA, 639 bp, Canis familiaris
  misc_feature (1)..(639): n = a or c or g or t
aagccatgancanngtactttcatttatgttctttgctannccattcacatttcagtacgtatnnnnnggtttgntngntgtcctcggtatatttctcaatgtttacagcaaaaacatggataaaataagactaccatcactgtatgatctgataaacaaaacactggaaatgagaaagtcaaggacgttggcacaaactgtgtagggagtgattcgtcctctttaaaatagaattctaagggaacaatcatcaaataattaattttccaaagggattattacaaaaaccaaaggatctgaaggcatgctgtccttttgtggataggtcacctgtgaagtcagcctcttcctcggagcacttgtttaactgtttgacttctgaagcaatcaagagagccacatttgccacaccttagaataaaatgtcagtgtgaaggactcatcttagcagtctgttgagaatttcactggaagtggaccatgctgcaaaactaattggatatcattatgatatatcaaagaaattgatataataatatcaattaattgttttgtcttcattccattttgttggtgttatttaaatgattctctgttataagagtgaacagatgatttaaagtctagaaagaatttca

SEQ ID NO: 9353 - DNA, 658 bp, Canis familiaris
  misc_feature (1)..(658): n = a or c or g or t
gcctggtgtcattggtgatgnnacagaataacatgtatacctgcctgtagnatnnnaccnngtnnctacctggttccnnnctgagatacttccagnntgcaagaggatctgattgcactttagatttacttaggtagccttcacaaatattgattcacgttgaaacctcctaaaagaaatacacctagctccaccccagatcaatatcacagaatcatgtggggatggatcctgggcatgatcaacattaaaaaaaaaacaaaaactcaggtgggtgcctctaagggacagccagggctggacctcctgaattagaaaagggaaagctgtctcttggccatgtcctcggggatctcccagtctctgtctctgtgggtggtgctgccccatgttaggcgtcggttaagggccacccgagtatgtttgtgctcctggaggaggtttgtgtcactgttgtgagccccgttgatagggaaacgggcattgcatggactgagtgtacctggcaggtggacacatgcacacacactctcaaaccctcttcccggttgagaggccctcacggtggtcacctgtctgggcatgcagggtatcctgtaaccatgggagctgcagtcctgtggcctcaacttctaatctgcggcactgtactcacccg

SEQ ID NO: 9354 - DNA, 605 bp, Canis familiaris
  misc_feature (1)..(605): n = a or c or g or t
caactgattggaacagggaaantatcagaagatgaagaaaccgaagtgcaggaacaaatgaatctcctcaattcaagatgggaatgnntcagggtagctagcatnnaaanncaangcaatttacataaagttctaatggatctccagaatcagcaactgaaagagttaaatgactggctaaccaaaacagaagagagaacaaggaaaatggagaaggagccccttggacctgatattgaagacctaaaacgccaagtacaacaacataaggtgcttcaagaagacttagaacaggaacaagtcagggtcaattccctcactcatatggtggtggtagtcgatgaatctagtggagaccatgcaactgctgctttggaagaacaacttaaggtactgggagatcgatgggcaaacatctgtaggtggacagaagatcgctgggnncttttacaagacatcctcctaaaatggcagcgttttactgaagaacagtgccttttcagtgcatggctttcggagaaggaagatgcagtgaacaagattcacacaactggctttaaggatcaaagtgaagtgttatcaaatcttcagaaactggctgtatg

SEQ ID NO: 9355 - DNA, 416 bp, Canis familiaris
  misc_feature (1)..(416): n = a or c or g or t
tgccaggcaaggagatcgtgnnagggctcttnnnaggggggcattttgaagtnnaacagaagagggatccaaggggagacgaatgaaaagagggtagagggatggggatggaatggagaggaaaggagaggaggaagcctcggtgctggtgcaaatcctcccttttgaggtagagacctagagatccggggtgcacaggtagtgacaggcgggacctgctctcaggcattcggttccaaattcttttataatggacttctttctaggcctgggcttgtattccagttctttcccttttattggctgagacagtgggcaagtcatgtaagctgtctggaccttagtgatttgatctgtaaaacaggagtaaagagtataataatgctatatatctcaccattgtgagaattaaataa

SEQ ID NO: 9356 - DNA, 539 bp, Canis familiaris
  misc_feature (1)..(539): n = a or c or g or t
ttnntacataatcactaaataaatggtagttattannnctacttctttttaacttcttatnnnnntnaatatgttggtattaacatatgctgatacataaaggtcttgtgatttttccttaattttcaaagcaagttgctgttgtcaatcagggactgtanntgggtctttaaaagatgaaaaccaaagactctttccagagcaaatcaccagtccttagtggacaaattttactgtggcagcaatctctttttttatttactaataagtacagttgacctgtgaatagtgtgggggtttaggggcatggttgaaaatccaaatataacttttggctgccccaaaactatgaatggcctagtgttgactggaagacttactgataacataagcagttgagtaatacatattttatgttatatatatatggtatattctttcaataaagtaagctaaagaaatggaaatgttaaaatcataagataaaatacatttacagtactgtactatttgtcaaaaaaaatccacattaacaaagg

SEQ ID NO: 9357 - DNA, 402 bp, Canis familiaris
  misc_feature (1)..(402): n = a or c or g or t
agtgggctttctcatcagggnntcctgccacnnnctggaccgaggaaggcccccgggctgggacagctcagcncgaggcctaggcagacactgcttctcttcgtggcccgtgggtgncggatcngagcccctttggtgcttccctcacgtgcccccgcacgccatggccccatgccttccccacctgcnncgnnntggggcccattgagacacaaggtggggcttggggctgcattctcaggggccagctgagagtcctggatcacaggggctgggggnnncngctgctcacagaacngcgactcgtgccattgcctgccgggcaggtgcacagatttctgcctcacctcgggcaccccannngtgctggnnctgttctctcccacgacatgctccaaaggg

SEQ ID NO: 9358 - DNA, 510 bp, Canis familiaris
  misc_feature (1)..(510): n = a or c or g or t
tgggctgcgaggcttctaccgaggctacgtggcttcactgctnanntacatcccaaatagtgctgtttggtggcncttctatcatttctatgcagagcaactctcgtacctctgtcctaaagagtgcccgcacattgtctttcaagccgtctcggggcccctggctgcggccaccgcttccatcctcaccaatcccatggatgtcatccgaacccgagtgcaggtggaaggcaagagctccatcaccctgaccttccgacagctgatagccgaagaggggccttggggcctcatgaagggcctctcggccagaattatctctgccacaccctctaccattgtcatcgtggttggctacgagagcctcaagaaactcagcctccgacctgagctggtggactccagacactggctccctcgctcagtcccggtcctcggtcctgtcctaaggaaacccaccatccacaccagttctgccgcacctgnnnnntgtgaactcttctggcttct

SEQ ID NO: 9359 - DNA, 459 bp, Canis familiaris
  misc_feature (1)..(459): n = a or c or g or t
ggcccaagcccaagactggnnagtcaagaggcaattggacagccnngcaaactnnacacctcagatcaccaggtgtccccaccacggggagcagggggtgtgtgagcttccttcttcattgtgctgatggactaccagctggcagggccagggggtgggtgggcaggaaggccctcctctccactggactgcactgctccccagctgaggaaccagctctacttccacctggagttgcatggtctcaggctgggggacctcgggagaagtcttccccattcccacccctcagtctctttcaattcacctgcctgccaacaggccgcctgaccccttccccatcacctcactccatttgctagagcgtggaagnngggaacaggaccctgccctcggtgggcccttaaagcaatagcaccttaggccccctgccctcttggcacaagaggcccaggccca

SEQ ID NO: 9360 - DNA, 394 bp, Canis familiaris
  misc_feature (1)..(394): n = a or c or g or t
catgtcaaggtatggatcagctttgcacagtttgagctatcatcaaggaaagaaggaagtttggctnnnnnnnnnnngatttatgaagaggcnnnnnnnnncatgaggaactgtgaagaaaannnnnaganacttatnnnnctggaatcatnnngaagctttnnagatgaatttnnnnnagtatcagataannaaagngtannnnaactcnngccagagaaagtnanaangagnagaaaggtccaggctgatgatgggtctgatgcagnntggnnnnnntnntatgattacatctttccagaagatgcngnnnnnnngcccnncctcaagctnctggccatggccaaactttnnnagaaacaacaacaggaaaannnggctgccgngnnagacc

SEQ ID NO: 9361 - DNA, 556 bp, Canis familiaris
  misc_feature (1)..(547): n = a or c or g or t
actctgatggannaatctgctgagcaggctcagcgccgggatgagatgcttcgaatgtacnaagcncttaaagaagcncttgtgatcatcggcgacatcaacactgccaccactttcacccctgcaccgcctccggtggatgactcctggatacagcattcccgcaggtcaccccctccaagccccacgacccagaggcggcccaccctgagcgctcccctcccgcggcccgcctctggccgagggcccgcgcccgccatcccctcacccggaccccactcgggggcacccccggtgcccttcaggcccggcccgctaccccctttccccagcagcagcagcagtggcagtggcagcagcgactggttcggagcgcccccacaagtcccctccaggcccacgagggccccacccagtgtccccaggcgaccccctcctgcagttccaggacgaccatcctaacatccatgattcatctccttttgtttccaacaacatgtctatccatggtatttaaaagcctatcgtttgcactacatgtcatatgtacataaaa

SEQ ID NO: 9362 - DNA, 59 bp, Canis familiaris
cctggatgcaagaaaacccttccacaagcatcggatattgtttctctgttatttatgat

SEQ ID NO: 9363 - DNA, 577 bp, Canis familiaris
  misc_feature (1)..(577): n = a or c or g or t
tgtcaccactgtcgccatcctctntncagccaaggcacacagatgccatgcagagacggcngtgactccaggccatccccgtgttcancttctttgtttgcnncttcttattttccggtgcgtccagggccgaggtgagaggagcagccactcgagggctctcgtgaattaagtctggttcatggaggttgagcttcgtaagtggaggtgatcaatgcaattattgatgtgaaaatgacgttcaggatgacttcttctgtgacatcaccttacattcctctgagctgatgacacggaggcctgaggacttgctnngcgtcccccccacgccgcgacctcacagccactccccatccacggtgacgaccacccgagtgctcatgtgtgtcggcggtcgccccccggctcgaggggctcctccactcgatacccaactgtgctcttctgcaatatacgtttaaccttctttcttacaatcaatagactgaaagtaaatagagcataaaatatataaaaatatgcagaacatgtctgcatgatagaaaaaaaaatagctgtgccggtaatacctgtggtg

SEQ ID NO: 9364 - DNA, 558 bp, Canis familiaris
  misc_feature (1)..(558): n = a or c or g or t
ggggcttcttttctgacccctttgtggtcaggctggttggtgactcnnngagaaagaaaatagttaactcaggtttcagtgctttggatattgagggtaggtaactggctacatgggcagaggaattgaaaagatgctacaccaaccacccactcccaccagggtcagggaaccaggagtcctccccgccactcccctggttcttgcttacccctgctgtcaagggctggcttggtctttacatagaggcagctcctggggtccagcgatattctctgccactggtgtggagttacaggagggcccagatttgtgacatgtgtacattttcaaaggaagagaggacagtcagttgggttttggttggcctcgggaggaagggctgacgccagcagacaacatccacctccaagatttggtttccatgagccatttccccatcgtgaaggcagggagcctagaggaggaggaggaagctgctggatcccatcaaaggccagagaagactgaccttctgcgtggagatgcctgcttgaagtaaacattttgaggaagcca

SEQ ID NO: 9365 - DNA, 521 bp, Canis familiaris
  misc_feature (1)..(521): n = a or c or g or t
aaaattgtaagagaagaatataccccaaatgtaagattcttacagagaaaccaatgccagttaatcaatgtccaaaaatctcaacccaaaatgtatatgctgattagaaatgcccaaatgactctaaatctgatccttgtatttccttcnnngaaatacatgtaatgatagaatacatgtatgatagaatgtatgattaacatacattctagctgtttattaaaaatggaaaaacgccatgatttttatggatcaaaaaacttatcatgacacaaatacagaactggagatactaaattataacccttctagctctgcctcattctctgtgtgtcttagcaattattttagtcagaaaataggtttcaaaggacatattaaatcacctttttcccttttttatgtctgcttgatcagtgttaaactgctatggctaaggttttatagaactataacctaaacgttgttttctttgtacacctcttttctatgagtgcatatcttcattcactttcatatat

SEQ ID NO: 9366 - DNA, 590 bp, Canis familiaris
  misc_feature (1)..(590): n = a or c or g or t
gtgggtgtcaagntncgagagcgaatgtggatgctactcctgcgcctgggctgccccgaccatagagggcaccagcggcatccaacattgtcccgccgggagtcatcctggtccgagaccacagaggcctcctactctggcttgtgaggctgagcgggggggagggggcggcctctcctttcactgagcagcctggctgcctacccccaccctccaggttcctccctccctctccctgttgccttactcctcgcgcggcccctgggattctccagcagccccagcacccctggttctcctggggggccaccccctcaaccccccgctagctctaggagctacgccattgctgctccttagctccaagccccactgccgttcccgaaagcaccccactgctgccttggggccccaccgcccttcttatccagttactagaccttggcctttcccggttcaggaagtatgaagccaacagcatagtagaggctgcccctatgggaacttggcccagccctcccccgaactcagcagcaactgtagctgtggtccccaagatctctgtagttgctccatgtttaattgtcatg

SEQ ID NO: 9367 - DNA, 659 bp, Canis familiaris
  misc_feature (1)..(659): n = a or c or g or t
acatgaatacagnnnnnnntaagaagtttctccacttcagaattacccagannnncnnngctgacccccactgcacacagagtaataatcaactggacttaggagtttgcaaggtgtcaggggagncgtggcccataggctgatcagcagacgtgatgggaaaaataccacactattctatcatttgctgttgcttgctcaactgtgaagaactgcatgagctatatttaagctgctttctataccattgccaatcaccattttggacttggaaatgctattttcctattgacatttgcattatttcgttttgcatgcatccaatgattatacataagcaacatatgtaatctgcttattttttaaaaattcatccattaaaaatggtaaagtataaattctgctctttttttacaaaattataatcatagcccatgtctttaaaagtttaaattggtttcatataaagatcagtgtaataggtctgcatatactttatagaaaactagcttctataaagattttttcactgtttactagtgaattgagaaaagcaaagctatttataaaaggccttatgtcgtgtacatacattgtctttgaaatatttgtgatttagtttattgcttgtaaaagagaaattatataatttatttagt

SEQ ID NO: 9368 - DNA, 680 bp, Canis familiaris
  misc_feature (1)..(680): n = a or c or g or t
atctgcttacctaaaaaccnttaantttancttgccaggtaggtgaattttgaaattcttcaaaaatgtatatttttcactttcatttggatgaaacaaaaatagttagaggtcatagactttgtaaatcagtgtgtggtttcctgtggaatgtattttataattcaatgttttattagtaaaaattgccaacattttatcttccctctttctcttctcattacacttgaagttagtttcatatctttttccattcccagtggtcacagttttacagagcaagacatttttagaaatttaagatgtatgagttctatgtaagatgaatgtgttagtagcatccatctgctgatcaaataggcattggatctggtaccagaaagtgaaatagattatatctataaaagcattttatcaatgtaagtcagaaagaaagaagaaaactgtgaacttctgatatttttaatataaaaactgtgttccccatgagtatttgcttgctgattttgtgttaatgttatcacctatgatttgtaagctattgctgatatgacannnacattttcaacatgaagacaacagttcctgtagcatatttttaacatttaagacatttttgaaannnnnntgccatcttagaagttgtatttttaagtgcaaataaaacatcccatcnnnnn

SEQ ID NO: 9369 - DNA, 642 bp, Canis familiaris
  misc_feature (1)..(642): n = a or c or g or t
ggncgcatccccgaaagcttaagaaactgcgtnnnnnnggaatncnnnnncacnncagctccctggtcggtcatcgatcagcaggccatccatccggagctcaacggcgccacatacagatacccgccaggcatcgtgggtgtggctccgggaggacttcctgcagccatggaagggatcatccccggaggcatccccgtgactcacaacctccccacagtggcacacccttcccaagctccctctcccaaccagcctacaaaacacggggacaatagagagcaccccaatgagcaatagcagagaatgacgaacggtcatcattcagataaacctgggaccaagagacagtgaaaaaatagatgaactgagaaaaggacttggaccgtcttttgaaccgattccggacatatgcatcattgacgttgcagtgttgagagagctcgaagccgaggcgtgggaaggctgaagctgtcatctggtcacggaagtgcggaaagactaggacgtgatttattaacgaccaacttctgttcttgtgtgttacgttcttcatctgtgcatcaaatcacaaagaataaatagatccttttcctttatcagccccttgggcacagcanntcctgaacaccttgctctaga

SEQ ID NO: 9370 - DNA, 586 bp, Canis familiaris
  misc_feature (1)..(586): n = a or c or g or t
gctcaggaagcacacagcgggtnnacaccgggaaggcctcgctnnacgccacggacatcgnngcctcccgtgtgacgcaggcccaccgcccccaggcccttgtgcacatccccagcccgaggggcaaggacgttctggacaggcctccctgcgtgggacagttcccatgactttggatttgctgtgtaggggccacccctgaagaggaaagcaggagcatgctcctgcccgagagcagacgagggccctgcaagaatcccagggagaccggaccccagaggcccgttccagggctctgaagtgctttctgggggacaggagtgggggtgagccctccaccctgccttccagggccactctgaggacaccaggaccctaggcttccgaggaaggcggaggggagagaagggggagggggtctcagcccacgtcccgcccccaggaagacacctgacccgtctccaagttgccggcccgtggcgagaggggcctttgtgcgcgtgaaggcggctgcctgggacccggagccctgagccaccccggctgcgccgcctccctgcgcccttcacgcccagccgaggagctc

SEQ ID NO: 9371 - DNA, 214 bp, Canis familiaris
cccctcccacacacactttctctctctctctccctccctccctcaaaaaaaaaaagaattatacttcctgaacttttaattgcttagttaatagttattgaatatacaataattttgaaaacagcagatatggttggggatgagttaccatagaattcatgctcctcccataggattattatgcgtcattatgggtcttactgataactatgta

SEQ ID NO: 9372 - DNA, 532 bp, Canis familiaris
  misc_feature (1)..(532): n = a or c or g or t
gcagagtncctgttgacangagnagcatccagcttccaaggagtgttccccggtgtnnctattgtttaccaggcctaacggncnctcaggcctcaaaagcagcctagcttcactgcatacttgacaagtgcttnctgagcgagccccagacccagggccctttatccccaagtttggcaatggccatgactttcctcataaagcctctcaacactccctggggcctgctacagaggtgcctctaccttagcctcccttcttccaggaccctgttcctggctgcttcaactgcctctttttttttttttcctttgcctgcattcaaaattacttttcactaatgtgttggaaatggccttttttattttgcacaaatagttgtacatttatggaggaaatttaagagagtccgttttgaactctaaagggaacttttttctttaagactcactagtaaagctactgatgcagatgggcctcgtggttagtgggaacctcccgtgtggaaagagcatgtttattcctcctgtac

SEQ ID NO: 9373 - DNA, 533 bp, Canis familiaris
  misc_feature (1)..(533): n = a or c or g or t
gatagtcagggcaagatcgnnnnnacacgagagaannagctggtnnancncttcagcgtgctcttccccaaggtggagtacatcgccagggccgggtngacccgggacggcaagtatgcctgggctatgttcctggaccggccccagcagcggctccagctcgtcctactgcctccagccctgttcatccccaccaccgagaacgaggaggagcgggtggccttcgccagagcagtgcccaggaacatccagccgcacgtagtgtacgaggaggtcaccgatgtgtggatcaacgtgcacgacatcttctatcccttcccccagtcagagggagaggatgagctctgcttcatccgtgccaacgagtgcaagactggcttctgccacttgtacaaggtcaccgccatcttaaagcccagtggctacgactggagtgagcctctcagccctggggaaggtgagcaaagcctgactaacaccactgctcacccagtcggccgtctgtggcccagtgcactgcttgctcactgacc

SEQ ID NO: 9374 - DNA, 280 bp, Canis familiaris
ttaatttaaatatgtggggtatgcactgcattttgtagagatggtaacgacagacaatgacttagtttgacatttaaaaaaaaaaaaaacacctcctttccccaggaccaaagtttatcataacaatatttatacagatttatctatgactgaaataatccaaatacaaaatagcggggatttagttaaattatcatacatcttgttgataggctaccatatgaacagggaaatcacattcaagaatatttaattacatgggaaaacaagcaaagtaaaa

SEQ ID NO: 9375 - DNA, 523 bp, Canis familiaris
  misc_feature (1)..(523): n = a or c or g or t
aaaatgaacaaaatnnacccangtacaacccaaggccaggacttctcctcgggatgtttatacctnatagctnnggcttcaccnntctgcctgaggctgagatcttacttttccacgagccccgtcaaggggggtgggtggcctcccttattggtgtcagtgactccattgtggggtggtgtcatgcactgggaaactaatttaatgtgcattaatggggtcctaggtgatatctttcatctttctcgcgaaacaccctagtttcagggaatgaggcaggcaaatcactgaattcagtggtggttgtggacccttgaaagagcctgactctttggtgaccataaagaaactcagtgtgtgggagcaccttggtggcttggttagttgagcatttgactcttggtttcagctcaggtcaagatgttggggttgtaggatcaagccccacatcaggctctgacttggtagggagtctttctgagagtctctctctctctctccccctccctctctcttttggccc

SEQ ID NO: 9376 - DNA, 566 bp, Canis familiaris
  misc_feature (1)..(566): n = a or c or g or t
ttgtaagtataaaataaaaagtnctagatgaccacactnnngtaaattnnatctatatgttcacatatnngtttcactcttcttacataattcaagaatgaaaatatttaccaaaataatagttttgtataggaaactgttgtcaaactttttggcatttagaggctagatgcaaataaaattcttaagtcactttctattctgcctgtttcacacatgcccctgagaagattgtagttcccaatatatagcctcttgactagtgagaaagaagacatggaatatacttcccattcttttcctattatacatttatctattgtgattcataattatttttctttctgtttcctttatagatataaccaagaattaaaaactaaagcaaacaaataagagttcctgaccacctgaacaatctagatgtgaacataaaccactgggactaatttgatttataatttggctgttgataaggtgatattaactgtgctactgtttggaaggcataaaaaaatcaaactgtaaactgggggctaatacttgatttaacagaaaaataaagc

SEQ ID NO: 9377 - DNA, 552 bp, Canis familiaris
  misc_feature (1)..(552): n = a or c or g or t
gannaaggggcaccaaacccctcgccccacgtggtcccagccctttctgcacacctgctcgggcctcgatggggctctggggcaaaagctgcttcacagccctgggggaacaggaccgtggcccactcccaccaccccgccctcctgaagggcctgtttgctcccaggtgcccttttggcctttgtgagggagcgtgggacaggcccgaaggctccggggtatctgccttctgctggggcgcctgcggtgacctcctgtgcccagctttcacactcacctccccaccagcgggcttgtggccctggaagggtagaggggcctcccacaaactccccacctcaccctcgccctagcctcttccccatactaggggtttctcagaagctggttctcaaaactccctaccaccctcagttagaggtaggatatccctgaaccctgggctcccagccctaaaactcactgcctcccccatgggccccctctaaggagggtgtgggggagccctgagggctgccttgccaccagtcagccacagagaccctcctcct

SEQ ID NO: 9378 - DNA, 226 bp, Canis familiaris
  misc_feature (1)..(226): n = a or c or g or t
aatgttcatctaaaagaagaagatgctgtaaatatttnnnacaacattttttttaaccaggccaaaaaagaaaaaaaaaaaaaaggtttttgggaacaagttaacatataaagtggttttatataaaacatcaattgtcttgtatattttgataagcagcagtaccagctttcatttgtaacacagtttgtggcgttgnnagaaaaggattctgtgattgtttaag

SEQ ID NO: 9379 - DNA, 458 bp, Canis familiaris
  misc_feature (1)..(458): n = a or c or g or t
tgtcctcctatctcagaccatggtcatcctctctcctcacgtctgtcattcctnnactcaaagtccacagaactggggtgaaaccacttccttgggacccagactgcccagggtaggaatgtgggccgtgctcaggcagggtcaatgctaggacggaagccctcaacccccttccccaagaggagccacagttgaggtggtgggggaggcagggggtgggggtggccacagccacgaggggagatgggcatggaggcaggctctggaggagcagggttatatgagggcagggctgcagctgcccttgtggtgaagagggaaataccgaaaagctagaactagtaacttctccccggggggtctgttttctttattgaggtgaaattcacgcaacctacattgtggacacacaatcgtaccactcagtggtaccattctgaaattcacaattcagcggc

SEQ ID NO: 9380 - DNA, 497 bp, Canis familiaris
  misc_feature (1)..(497): n = a or c or g or t
gaatccagaggtcctgtctatgttcactgggcaaaaataccatgatcaataactgatctgtgtattttttctgatttatcagaaaactgtccactaactatgcaaaatactatctcagggttgtgagattgagccccacctcaggcttctcactcgcctggagcctgcttgagattctctctcttttcttccttccctcccttcccctgtatatcaccccgcacccatgctcaatcgcttgcttgtcctctctctcaaaaaacaaaaccaaaccatggcagtaaaataagtgaagcagtattttttcagactcttgttttaatttgttagaatgaaatcagtattttaaaaaaggttagagnnnnnncactattagtaagataaatattacgtgaactacatgaatatgtttgtattaggttgcaacatgaaatttttcttactgttggttgtggtcaaaaacatttgaaacattggcttaacattaccttacctag

SEQ ID NO: 9381 - DNA, 283 bp, Canis familiaris
  misc_feature (1)..(283): n = a or c or g or t
agctctgtgctaccattgataaggncntacaggattccnngtctatgcantcttctgattctccttcaagttccgcacagacgttgttgggttctgacatgattaaaatgcctacaactcttccaagagnnnnnggtcgagaaaccaaatatgcaaacctgtcctcaccatcctctacagtatctgagagtcaactgactaagcctggagtgattcgcccagtacctgtaaaatccaaaatattactgaaaaaagaggaggaagtctatgagcccaacccttt

SEQ ID NO: 9382 - DNA, 562 bp, Canis familiaris
  misc_feature (1)..(562): n = a or c or g or t
gntgttcatccccaccccatgcccacccactgaggccctgtccatcccctgctgctctctgcagctacttggtgacannacagcccntnnaggccatcaggtgcccttctccatctcaaccccacagaccctgctgctttggcaaagaaaatgaggaaatgacagcggggaggggaggtgccccacctcctggctttttcaaagtattcccatagatactggtaatctggaagtgaagaggtaatgctgtgtgtgcacctgctcttgcagaatgtccaagaaagtattctgtattagtattaatgccaaaaattttttaagggttttgtactcagcacatcgtatgaacacccgttccttctgtcatttcagggcaacccgaccagtcaggagcccttgttacgtgctattttcatcagtgtatcattggccaagttgtttccatgtatgctatcacgtgtttatattgtccagaaagtattgttaaggctttaagtagatgcaactggcaaactatggagagagaatgccgactgtcttgacccaagcaacagccnnnctc

SEQ ID NO: 9383 - DNA, 477 bp, Canis familiaris
  misc_feature (1)..(477): n = a or c or g or t
ggagctggcccgcgtgacggcggtcnncgagcagctggtgggcgagcggagcggcctggccgaggtgctgcgccgggagtttgccgaccggctggccgccnnngaggaggacacccgggttgccagagccgagctggccgagctgcgggcccgccagcggctggagctggagcagctctcgcgggagaagcaggcggagctggaggaggtgcaccagagggtgaagctggccctgacgaagaaggaggaggccgtgcgcagcctccgaaaacagcatgaggccgcggtgaagcgggccgaccacctggaagagctgttggagcagcgcaagtggccgttatcgagcgccaagtgaccaccgcagcccggaggggtcgacagcagcagggcggggggtgcctggtgtgaggcggaccccagcccggccccaaccccaccgacccctctattcctccgccctgggctccggtcatcctg

SEQ ID NO: 9384 - DNA, 116 bp, Canis familiaris
  misc_feature (1)..(116): n = a or c or g or t
tcnnnagattnntaggnngtatcttgttgaatttcataaattnnnncctaattgattatcttaatacnngattaacttttaaaaacctcataataggatccctgnanngctcagca

SEQ ID NO: 9385 - DNA, 383 bp, Canis familiaris
  misc_feature (1)..(383): n = a or c or g or t
aactacagggtgnncaaangcnnatcgacaaaatcgaatacgaannnnngcnnntgtgtcagaaaatcgccaatgcccatcgtggccctgccaaggtggattgctggaacgaatatttttccaagagtttaaacagagaaacaaggaaccgagaactagtgagaatcaccgtggaaaaccagggcattctgaagaggcttagtgatcgcaaaccccactatgaccgcaggtcatccgagatggactggcagaattcaagacgctatatcagaaatacgacaaggtatcttctctcccgagatgattaggttactcaccatggaaaagatacgagagaaagccctaggatttcttagctacttagaatttcaagacactcctaa

SEQ ID NO: 9386 - DNA, 528 bp, Canis familiaris
  misc_feature (1)..(528): n = a or c or g or t
gtttttccataccaaaaataatacccacaactatgtatctattancnnatagagacacaacgtataattttttaaagtgctctcacatgttccaaataaaataatatctctaccatttgttgcacaaatggtgaacatcaccacctgaatgcttatgcaaatgttcagtaagccaaacatgacatttccagagaaagaattaatcagaatctgtttccaggtagaaatttacctgctagactgatccgatgatggtcgtggtggcagtggttccactgaaaacaattcttcactgccctgcatggcatctatgctagtactggccagagtaaaaggtgcagttgggcgagcaatccccattctgacaggaacaatcagtgactccgctacattgcacaattcttctacggcataaggtagtagtgcttggaatacacgcttgcattttccaattggctgggggataaagttgctagagcaaaaaggaaaatacaagaatcttttatgaatcttttcatatatacaaag

SEQ ID NO: 9387 - DNA, 268 bp, Canis familiaris
  misc_feature (1)..(268): n = a or c or g or t
catgctgccactgccgcagngnntgctctgtggtcagggagnnacagggactgtgaacacnnatggagacccaaccagccaatcccagagactggccatgcctgacacccacctgtgtctcttggctggtcctactgcagtccaaacaggcaccactcaatgggtccctctatgccccgccctctagaggccactaagaggattttaaaccctccctcctcattttttcctttgcactccccccttcacttagtagtgaccacccagg

SEQ ID NO: 9388 - DNA, 542 bp, Canis familiaris
  misc_feature (1)..(542): n = a or c or g or t
ancttccccnagtggctctcaatccccagactgagacagctnnnnctgctgtgcattctcagcgtgtcctgtatgcctcactcntagctctttatctcacctgcaattaaatgattcattgtgcacttgcaagtttctaaatagctttattggcctgtgcatgtttaaagtgtaaaatgcgataacttttgatggaaattttcactcatccaaccatcactgcaatcaagagaatgagcacacctgtctcccctaaacagttaccccatgagcccctgtatttcctcgcccctcccaactctccccagcccccccacccccccggcccgatctggccagcaaactgatctactttctggtttgtgttttctagaatcactggaccggcctacagtagattcgcttttttaggggcaggcttctttcattcaacatgatgttgcgattcgtccacactctcgtgtgtgtctgtggcaacttcttatcatggaatagcatttccgtgtctgcatgtctagcaattcgtttattcattcatcagc

SEQ ID NO: 9389 - DNA, 466 bp, Canis familiaris
  misc_feature (1)..(466): n = a or c or g or t
agatctgtntnnttatttaactcagagtgctggattatggatgcggttgagaantngnacttgccactctgattttgaaagaacaagttattttgtaaagtgcgtgatggttaagtaaaactacatcttccaaaggaaatttcaggactttctacttggatgatggggtaattaattggtataatatatgattattttactgaatgagttatgtggcttctacaatgatggcattactgtaaatgaaattgtgaacagtatgaaatagagctacatactgagaactgtagttctaaaacattttagaaggctatgattctgtgaatcttgttaagaatgggaataagatgtatgatacctagttgcattgcagcaacataatacaaaagactattttcaatattggataatgggaaagtaaacaacaaaaaatctagtaaacccttattttcagcacagcacactt

SEQ ID NO: 9390 - DNA, 527 bp, Canis familiaris
  misc_feature (1)..(527): n = a or c or g or t
aaaagatganntatgccaaatattcccatgtagtttttaaactacgtgccctacttgaacacttattgcacttttatttatcgttaactgtgaaaactatgtcctttatcagtttcctttttgtttttcatttgttaacaagagtggtttgtttttatagcaaaactgttaagctgctcaagtctcctgttgaagaatttgaagaatgggaacactctgaaaagtaggggcatttatttttagagcaaaaagatccgtggttatcctctaaaaaacatgcacccatttcatgggtgagttccttaagacgtcagcattatagcctctatgagtctattttccatatacattttataatatttaaaataaggcttagtgggagatgttctttcgtcttaaattcaggtattgccaactaaagcaataaccaccaacaaaacccacaaaaacccagtcaatgctaacagcagtttttgagtgtgtgtgactccaggagtgaccgacttcttcattgattgagtgactgc

SEQ ID NO: 9391 - DNA, 521 bp, Canis familiaris
  misc_feature (1)..(521): n = a or c or g or t
aagaaagagcattttaggcaacangancagcaggtacaaaggccntnnngtctcngaacataagaaggcangtgatagggacacagtaagtgagggaagcgaggtgtggcacagactgaagcaggaaaggtaggcaggagccagcctatgtggagctggccagcaagcttctggtctttagcctgagaacattgggccagccatcagagcaattggctttgcacactgaaaagaacactctggtgttggtgttatttttaagatgaaaattacttaaaaaaaaaaataaaagaaagaaagaaaattactagaaagtgtttgggttgggctgggcggggctggctaaatctaagtcctgaggaatagagataagagtgagatagagacccccagtgttgggaagaggatcttgggaggactgaacaggctaattcagggagaatgagaagtaacgatgtatttcagaagtgtcgcacctgagcaagcagcgtgcctacagtggccagaggggaaagtgttgt

SEQ ID NO: 9392 - DNA, 586 bp, Canis familiaris
  misc_feature (1)..(586): n = a or c or g or t
atcaaataaatattgatggcactgtcgcagcatatcgcctgccatatctcntagtcggtgacagtgttgtgctaaagcaggactccatctactatgaacacttttacaatgagctgcagccttggacacactacattccagttaaaagcaacctgagtgatctcctagaaaaactcaaatgggcaaaagatcacgataaagaggcaaagaaaatagcaaaagcaggacaggaatttgcaagaaataatctcatgggcgatgacatattctgttactattttaagctttttcaggaatatgccagtctgcaagtgagtgagccccaaatccgagagggcatgaagagggtagaaccacagacggaggacgacctttttccttgcacgtgccataggaaaaagaccaaagatgaactctgatatacaaaataccttcctttcaaataatggtgctctgaagactcttcttaactgaaaagaagaatatttttaaaatattaattccatggacaatataaaatctgctacatgattgtctggattataaacatgtttcttcttattacacagtattcccatgacgatcc

SEQ ID NO: 9393 - DNA, 417 bp, Canis familiaris
  misc_feature (1)..(417): n = a or c or g or t
catggtggtgggtgcctccgggggcacacaaatcaccacggcnnnngcgctggccatcatccataacctatggtttgnctacgatgtgaaacgggcagtagaggaacccagacttcataaccagcttctgcccaacaccacgacgctggagaaagacattgacgaggcagtgactgaggccctgaagatgcggcaccacaacactgagctcacgtccaacttcatcgctgtggtgcaggccattgtccacacggctggtggctgggcagctgcctcatactccaggaaaggcggggagcctgctggctactgagtgctcagggcaggcaaacctagggatgagatgcctgctgggggcagagtggaactttgagggatttgcttcctctgtgagtgacatagcagtgcaataaatgg

SEQ ID NO: 9394 - DNA, 610 bp, Canis familiaris
  misc_feature (1)..(610): n = a or c or g or t
cccccaagtnnatgtggtaaagttaaactctgctcaggataangacgggaccatttttacatcccatgaaaatgaaccattcacagtgcaagaaggatgccaaataccatgtacataattcttgctatggaaagtttccccattattttggtttatcttcttttgaaccaagacatcaaatttgtgaggtgtttgcatgtggccattaccgtcattggcctgtgaaacattgaacatttatagataattgatataaaagaattgccatgcccatggactaagaatgatgctggctttcaagcaaaaaagaaaaaaaataatcattgtttattgtatactgcctttttgtaatcctgtataattgcatcacgggtgaggaggaaaagaggaatattctggtttatttcctagactgttatttaaaaaaaaattgtgttaggactggcatataaatgtaataagtatcacactgtatataaagatatcaatgtttgtcctgtataagaattactaaattacaaatgcagtttcatttaaacttctaggttaagttgagcctgaaattttaatgaagtgcaatactgagtgtgcctcattatcttgcagctgt

SEQ ID NO: 9395 - DNA, 59 bp, Canis familiaris
  misc_feature (1)..(59): n = a or c or g or t
tgatatttnnnaattctataggcttcttgtgcactaaagatgattcnnnnnnntgtata

SEQ ID NO: 9396 - DNA, 176 bp, Canis familiaris
  misc_feature (1)..(176): n = a or c or g or t
caggnnnnnnaggggtccctatggagttgcaacaagagcagctggggctctcataactgtaaccacagtgaggatgctggcgtggagtgtagctgacacccctgcagcccgtccaccacactgcacctgaagcatctgcacacatggatgctcagctcatctggcaggnggccaac

SEQ ID NO: 9397 - DNA, 700 bp, Canis familiaris
  misc_feature (1)..(700): n = a or c or g or t
agcatcatgagtgctcctttcanttngatacggaaataaatttctgtgcacctgagaattttctgattgcattattattaatttccccgggtggagtttgagtatatgtttgaggaagatgccagagttttacaaaggaaccgtgtgaagaaagcagtgtctcctttcaaatgttttccaggatgaattgtaattcctttagcgtcaggaagtctttcactagataccaaacttgtgagacagcaaggtgggttaattgtaagacaacagcaccaagctcaggattcagtagactgttttttgtagaaacacgtttctaagttaaaaactggaacacactagagtccacctcatgactgaggggcgtgaggttattaacatcgtagtagagagtttatctacttttccagtgatatcacttgaccttgccgcttgctagtgatgctgtagcttatacaggtgcacggtgacgggtcccggcgacagagcaggcgtcagcaggacgtgtgcccgggcctggctttctctgggctcacccagggtgggagccccagacgcagcccggctgtcttctcccagtgggcctggggcaccggtgcgttctggagtacagtagagacttctggaaatgacagttcctcctccggaaaataacagattgtctaatacacagacatatgcacgcaaaactnnnnnaann

SEQ ID NO: 9398 - DNA, 533 bp, Canis familiaris
  misc_feature (1)..(533): n = a or c or g or t
caataaagttgctgtacttacagagaatgcatcagagattaaaatagcagaagaaaatnnngctgcgtttgcaggnnnnactaatctgattcagaagattttnnatgatgaaattcaatcagacttttatgtagctgttccagaaataatgcctgagcttaatccattaaagaagaagctgaaaaaaagatttccaaaactaactcgaaattctattggccgtgacatccccaaaatgcttgaattatttaaaactggacatgaaattaaggtagatgaagaaagggagaactttctcgagaccaaaatagcaacactggatatgcaaagtgaccagatagctgccaatctgcaagcagttatcagtgaagtttgtaagcacagaccactcagtttgggacctttcgtggtacgagctttccttcgtacttcaacaagtgaaggtttattactaaagatcaagccattgttgcctaaagaagtagaaaccgaagaannnnnnaaagaagatgcgtnaaaaatgttatattatt

SEQ ID NO: 9399 - DNA, 344 bp, Canis familiaris
  misc_feature (1)..(344): n = a or c or g or t
ttnnnnntatgtnnngcagtccattggnnnnnnngtgtgtattttccttcttatnnntaagattatannnantnnnntttttttctttgattatcaaagactctntgcaggcagtgctatttcttgtgcctaagaatgtttctgaacattgtnnnnntaatgctacttgcaaagttgagtnnncannnnatttcttgttaatatnnngnncatnnnnnnnnnnnngggtgagacngtantacagaatnnnnntttttgtccccaggaaatttgcagnnnnncaggtgctnnntgggtcccctccccccccctccatgagctctgttaattctnncttcagtagg

SEQ ID NO: 9400 - DNA, 619 bp, Canis familiaris
  misc_feature (1)..(619): n = a or c or g or t
gtatatacatttcgtatgnnnacccatcaccccccctcacccctcccatattgcctgcatgttatgctctacagccaaagcatagnnnttggtnntgcagcctctacccctgcctcctcctgctggggtgggtgtggggagcgggcaactggactctggcttcctgaactggtaactgtgccaggtgaatttgtggaggcaggaataggggcattgagactaaagcagtagacaatccccaaataccatcgtacatttgggactgcatttatttttattttatatgcatatattttagggctgtagatttccttatctgttttccatggcttaccttgagcacaaaatgattatcgacgacaacgtgtacacaacgcctctgtgacttttcaaagcccccttccagtgattggtattttactcctcccagcctttgaggcagggggagcccccctcagcattatctctaaaggcagagacctggggcacggcgggcggggaggcccccggggcgcaccaggcctcacccctgaagtgacagccccctgggcagcacgccctgcccccgcacttaatgtctcagccctgggtttttcacttcctccgatgcgtccatggc

SEQ ID NO: 9401 - DNA, 489 bp, Canis familiaris
  misc_feature (1)..(489): n = a or c or g or t
tttttttttaacaaagattttgtttattaaagagagagcacacangagcagggggcgaggcagagnnagaannagaagcagactccccagtgattggggaaccagttgcggggctcaatcccagcaccttggactggatcccaggacnctgggatcatgggtgagccgagagcagacacttaaccaatggaaccatccatagctcatcattttctacaaaaaaacgaaagaagaccatgtgctgaaaatttcccaggaattgcatcgaatctacagatcaatttagggagaactgccatctcacgttgctggtgttctatgcatgacgtggccatgacatttcactccatttatttaggtcttcagtaatttttcttggcaatgtttttgttcattgggaattggagcacacccaggtttgataataggctaggagagttcataggatttagcatgtagtcattctatgtcattacattnnnnnntgat

SEQ ID NO: 9402 - DNA, 526 bp, Canis familiaris
  misc_feature (1)..(526): n = a or c or g or t
ccctacccgcccatccacacgggcccaccatggtgatcntatgcaaacaccacttgattctgtcttttttggnctatgacttttcaaaggtccccactgtnnttagnacaaagnntttgccatgactgaccaggccagccccctacctccctgccctgctgccctcatcttccacttactcactaggctccaggcacactggcctttgggagcctcagaccccacaggcacaccccagccccggggccntagggcctttgcacttccccacactacctggagtactgcccccctacaccccctagccgtcttcacatggctggctcttcgtcattcaaacccacacctaagtatcacctcctcagagagatttccctggcaccgaatccatagcagtcctccacccctatgctctctaccgtgtcattccttttcttttcctcagagcactctgatctaacccatttacttgttttcctgttttttgcctttctnnnccactagaagctggtcagtcatggtcacg

SEQ ID NO: 9403 - DNA, 214 bp, Canis familiaris
  misc_feature (1)..(214): n = a or c or g or t
gaagctattgtgccaacatattaatttatannagatgttctgtagaaactacactaccagctaaaaattttaaatcctatttatttgtaaagttaatatgttccttgatccaattcttaaaaattctcaannnncggcttaannnnctannnnnnnattctgatttgagtgttatccataaattagaaatgacttccgnnngcgactctgatcc

SEQ ID NO: 9404 - DNA, 55 bp, Canis familiaris
aaatgtcacagcctgattcacaggcctcagagcaacaacagtgggtttgtctcac

SEQ ID NO: 9405 - DNA, 606 bp, Canis familiaris
  misc_feature (1)..(606): n = a or c or g or t
tgaactcaattgaaataacatcaagatccatttctgtgnttnnnnnnncnncgtcaaaggcacttncntngannnnnntgaatgactgaactgctcagcacacaatcccaactcagacaaacanncagtggtaaagatggggggagggaagtagcctcacaaaagtacaggcgngacttttctgagactcctgctgatnnactcccttgaaaaggactgctagtttcctggttgtctgaaaggccaccaggttgtcttgaagaaggagagtgttggctacacacttgagccctcagcctcagactttggctatcccaagctcctttctgttttagatggatgaagaacaaaatggattccaagggcggacatcatactatggatggttcttctgttgggaagactaattggattaaaaatagaacgggactgggatgagaactttggagaatgccccccggccccttctcttccacttggtgtgttctctgcaggctctccaccacccccgaggcaggtggagtccagggggtggaaagttagatggtctccagcctgaacgaaagnnnnnntgagttcccccgtgaaatcccagctcaccgagct

SEQ ID NO: 9406 - DNA, 495 bp, Canis familiaris
  misc_feature (1)..(495): n = a or c or g or t
tacctcccccaccccccgaccccntcgagggctcctctagctgctggaacctgctctgcccacgtgagccagccagtgagcacccctgggagcggccccggacccacgaccggtgggaccccgtggaccaacactccatctctcgcgctcctcaggcgatcagatgaaatggctttggggatctgcttctgaggggagccgaaactaggaggccgcctgagaacagagccggtgcataagaaaacagaacaaagagaccgagagacgcccaggagatttctgtccccacacaattaacctcccagggaagaggtgaggcttccagaacctcacccgagaagggacacccggcacaactaaggcatttctgagcagagggatctgtctgtctgtctgcctgggacaacgtgcgaggcgcccgacgacgcaccatggtgaccaagacaaaacccctgaccttacggagcttctgttccagctgagaagagggaagac

SEQ ID NO: 9407 - DNA, 439 bp, Canis familiaris
  misc_feature (1)..(439): n = a or c or g or t
tgcccatccctttccctaccctgccacccagaagtnnnntctcagtcatgttcactnncccatccctccccccattcacagctggatcccttcctcaatgctccccactttctgttatcaatgtatcttaaggcaccatgtctctcaaagtgttcactagcacaagatgcttaaaacccagactttaatcctgcccattccttctggtcccccatcatgaccagatcttcaaaattcttcatttcaatacccagtcatttaatagttccttctatttttcccatttgagcaactagagaccaggaaataggcaaactatcactaacagtccttttgccttgggttccagtagctcattcccaaccctggattcttctgtggttgctgctggctcaatgaaggtccctaatcacattccctaccagttggggttcttctt

SEQ ID NO: 9408 - DNA, 447 bp, Canis familiaris
  misc_feature (1)..(447): n = a or c or g or t
acaatgctctgaatcttgttacagaaagaaaatactctcccaaggacagactgcggctttacacccctgatnnctacgagaaatttatacagaataaaagtgcccgggaaatccangcatacatccaaatgctgatctgtatggacagtatgcccatgccacctctgattacgcactgcagaacccgggcgtgcccaggnnnctgggactctacggtgaggatgatgattcctggtgttcctctacctcctcttcctccgactcagaagaagaaggatattttcttggacaaccaattcctcaaccccggccccagagatacgcctactacacagacgacctttcgagtccaacttctgcactccccactcctcagtttggtcagaggacaactaaatccaagaagaaaaagggacacaagggcaaaaactgtattatttcttaacc

SEQ ID NO: 9409 - DNA, 565 bp, Canis familiaris
  misc_feature (1)..(565): n = a or c or g or t
ccgggcttaaannngagtcaacaggaatactacccctatgtgtactacaagattgattgcaacttgnnnnaattcaagtaaaaatgagctccttcccagacaatcctgtccttgtgttggtgtattctaacagatataggttgtagtatgacagtacttttaactctctattgtcctttgcttgcttctgcccccctttcctaggtgagttcttccatagtggtccatctctcaatattttcttcttaaaggaaaataggtatcttacttctttttattgatcaggtctgtaaatgtgtactaaaaaaaaaaatcagagtttatttataaacagaatagtttatttaaagagaaggtctttctttattgatattctggtatgcattaattccatttgttactgttgtgcacaaaagccttgtttacaagggaatggtaaatgtttataccattttgttcactgtatttagcagacataactgtctaatagttactgaatcatggtaaagaaatgtgataatattcaggtatgtgctttctgaatgtttcaaattacaatctgtga

SEQ ID NO: 9410 - DNA, 403 bp, Canis familiaris
  misc_feature (1)..(403): n = a or c or g or t
tcagtgtttgtcaaccatttcaaagtgtctccccaaaaagcttgttcaagagcatctgctaccttgaacaacagattcatttgtatcctnnnnnaaggtaacagaagacctaggtaattctcttttcatcataagacacctgaaataaagtatatccaggcagtgttcccaaagaatttggtagatttgatgttggtgtgaacacagcctttactgccctttcttggacagtctgagactgtggtgtgttagattgtacccaaactggaccagagtttgctttttgagcttatgagaagaagaaaaacactaggtaatttaagtttgaacttgtaaagtattggaatttgttgagtgtcgtataaatcgtcatcacttttcctgatctgtataactgaccgca

SEQ ID NO: 9411 - DNA, 462 bp, Canis familiaris
atggtcttttccttgtctgtaataagattgtaaacccattttctgtgtgtgttctgtagtaggcatgattgtgggtgtgtggggctgcgcacatgcgtgccagtcttttcgtactgtaactacctcatggcgtgagtgatggttgtactgccggttgtgttaacagagcaagttttgttgggcgcattgtgtgtgtgtgtgacctttttttcctgtttgttttatctgggggttgttcatgaaactgacagatgtttttctaaaaaggactattatcagtttccaaatacaatacttctctcttctggtttttcctgagtgagcctgattttgttgctgtttttcatctatcagggtaaaaagagtacccttgaaaatccctgtggccagtttgaacacccctgttgtattcttttctctgttcaatgtgttggcgatttatgaacatgcttagatgtatag

SEQ ID NO: 9412 - DNA, 559 bp, Canis familiaris
  misc_feature (1)..(559): n = a or c or g or t
tgggtgttatactatatgnnnnnnnatcgaactccaataaaaaaaaatatattaaaaaaataaataaaataaaaaccatacaagtcacacttggcagctgtggccacagctcattctccggctcctgnnnagcaaaggggcctggatgctgccctgagtgtgttgcacactcccctccaggagatggttgattctttccaggctgacacagctataggaggaagaaagggaattttatcagtcaaaactattctgtagtgtcattttccttcgacactgcaaaagatgttttagataaataaagcttatgatcattttcttgggagaatggatttgttttttcaatgaggtaaaataacaagtttctggcttaaccagttcctagatattaaggaaaagttacatttttataaaataatcggcatagctatttttaattccatccccaagtggattttataaatgcctggaatgagtagaaccgagtcatcaacatccaaggccctttgaaaccgcatttgctactcctttgaggctatgtcttatatcataaagcctg

SEQ ID NO: 9413 - DNA, 554 bp, Canis familiaris
cccgggcaatgctacaggtggccccttgccagcttctgcagctggccaggcccaccaggcctcccaccagcccttctacctcaatcacccctgacctttgcaacttacactgacttagagctggttgtgtgttgggcggggggggggggggcgcaacccagtgtggctttcctaagttctcagatccccgggcttggggcaattggtaaagggaagacagggtgtggggttaagcacttatttggagatgaggcagttcacctctcttcttacccctttttagaatatagactcctctaatttctctgaacccctaattcctgcttctttcttcgagggtattgagtgagactaagttttgggatgggtggactcctacacactcttcattcttttgtttctctatttgaggggtgggggtggaggtgggaatttagtccccaggagggacaagggacatttttacattttggagctagttactgggagtaaaggatgggtggtagtgggagatcaggtttatgtatatgtacaatcttcttttttattattaa

SEQ ID NO: 9414 - DNA, 391 bp, Canis familiaris
  misc_feature (1)..(391): n = a or c or g or t
aatatttagagtataagtgtataaacagtttatactgttcagccacattcccnnnntttagcttccataaatgtgaaaggggaacactatgaagggattaaatgctgtaaagacaggtaggataagaccctaaaccaagatttggggaagcagaaaagccccctgaaaaataaacagaagttagccatatctttgcaaaaatttggtagcaatgcagatggtatccaggcaaatagaagagcttctccaaaggcacagagnnnngaaaatacaattctgcagttcacctctgccttggtggactggtctttggtctgaataatagcacatagtaagttttaaatttccaaaaaattaatctactatcgaacaggtactttttaaaaatctt

SEQ ID NO: 9415 - DNA, 545 bp, Canis familiaris
  misc_feature (1)..(545): n = a or c or g or t
tcagcagagacggctgtgtcccctnnctccagggccccatacggtctcattccaattactcagtcaatctgtgaagctgtataaaagcagctttctgctactagggcagggtgcgagcttgttaatcccctgccagcatactccacttgccccagaagccaaagagcacaccattgtggatgcacagctgaaaccctgccttccaacccttgggaactggctctcttgactgctccttgctcctttcccaaagcagccgaatcctgctcctcctccccacccccagaggcccactcttgctagtagctcatctcctccagtcaagacctcttagaacttaatgaggttcggtcgtcggatgttgttccccttgcttcctaaaaggctctaatagccgtgagctcttggctacagcacctttaacccacatctgtggaagggcctctggctttgcccctgccctttgtccctggccctcccagcatccctcagcatgtacctttgttgcagagctcacagacatggnnagggccctggctgtgcac

SEQ ID NO: 9416 - DNA, 620 bp, Canis familiaris
  misc_feature (1)..(620): n = a or c or g or t
ttgctgttnntgagagaataggtgtattttgtgattttgatgggggtcaactttctttctatgatgcaagctcaaaacagttgttgtattcctttaagacaaaatttactcagccggtactacctggtttcatggtttggtgtggtggactttctttgaatactgggatgcaggtgccaagtgctgtgagaacacttcagaaaagtgaaaatggcatgacgggttcagctagcagcctcaacaatgttactcagtaatgcttactcagaatatgtttaccccctttttgattgggtggccttttctgtgcagttactaatcccagaaatttctgagtggtggaaatcaggtttgctacactctgctttaaggcctggaatgtattagcattaagcatctagtacaaaatactcacaggaacctactgtgcaggatcatcaagcaagcagataccacacaagaaactgatgttttaaagagtaaatgggaagaaaggcagtgttaaaatagttatataaaactcatttttttgtgtgtttcttgggttactttggctcttctgatatgtttagttacatatggtagccctaggacctgagaggaaagcgttaaattttgtt

SEQ ID NO: 9417 - DNA, 499 bp, Canis familiaris
  misc_feature (1)..(499): n = a or c or g or t
taaaaatagtagcattttcatctaatgagtactgtacctttttaaattccccttagatgttcatnnatgaagaatgtgtctcctgccatttgcatgaaaggaagaacagcaatagcacattgaaaagaactagcccgaacctgtgcctcctctagactctgcctttaggtcaatggcaaaaaagtattccagactgaagccaaaagggcaagtcagtctcctcgattccttcctatgattcctaactatctctcgatacctgtagccaacccatcgccaactcctgtgaattgcacctccaaaatccatcagaagtcacccccttctccatctcctctgccaccaccctcatctcagccactgtgttgtctagcgtggggtagcctcggtgttcttcccctgcttctgcttgtgctttccttccactcatccccccatacagcagctggactttgaaaacgtaactcagattttatcacgctcccataaaatgcagttt

SEQ ID NO: 9418 - DNA, 503 bp, Canis familiaris
  misc_feature (1)..(503): n = a or c or g or t
gcacngagaagctgattnntcatccttgangcgccaagcagggaagcagcgcccaaggnnnntggtccccaccactgagcttctggtcnnncagtcaggcctggggcagtgcccggcacaccgtgcgtacccaatacatgttcctaacgtcaggtaaacacacacataccctgttacttttaactttggaaacaggaaagaaaagcatttattgcaaatcctccgtgtggcctaaagcatccatcccacgagcagccaaatgcagactgtgtggccctgtcaaggaatgggccaaagtgcagcaggcagtggtgagggtcagcnnnnnnggtggncnnnggggcacctctccaaaggcctccaaccccagccactgtcgtgtcatgccagcattgaccaagcagggcaactgctgaacgcctgacttcggaattcaaaggaaagcttcaagtatgaagacctgttttcattccctnnnnnntgttctgctgtcaannnacatt

SEQ ID NO: 9419 - DNA, 545 bp, Canis familiaris
  misc_feature (1)..(545): n = a or c or g or t
cttttccccatnggtgagnngctgcctcntgnnttctccaccctccgatcacccaccagggagaagccagagacaggctgccgcgtttggcgttaanngacaaggagagggagagccaacaagaagaaggggaaagaacctcattacctgccacagaatgagcgattttagtgcctacacgatgtcttcagacgtagctggctcggcctctaattgttctttaccacttttcttccagaggcgggatagtaaacccattcagccccacagggatggaagggacagggaagccacttgggctcgcagggggcggggctgcccagaggggaagcccccttggtctcaggggcgctctgggttcccaccagacagcatctcgaggccctacatcatgatggcctcaataacaggtgtgatcccggcctggcagggacctgtcaagaatgcgcatccttaaagggacgctctccggcttaatgaggtgctgtggcctgtttcctgcacacagagagaggctctttggaaggcaaaggagaagggnnaga

SEQ ID NO: 9420 - DNA, 427 bp, Canis familiaris
  misc_feature (1)..(427): n = a or c or g or t
atggancaaaatgtgccatactaatgatgagcatttagnnnnatttgannnngaannnnnntacncnatgnnntagatcggtcagtnttaacagtttgcctgnnntatttgtagtanncattttcctnnggactgttcaagcaaaaaaggtanctaactnnntcannttcttttgcacttannnggaaattttagttatagtgtttaactggcatggattgatagagttggagttttatttttaagaaaaattcacnnnnnancttccatttaatccattaccctttattttattgaaatgtatagttaaattaactgaagaaaagattcttgggagtatgttgtcataacattttaaaaggtttcccttcatttaaactaaattactgttttatgttgatctgcatatttctgtatatttgtcatg

SEQ ID NO: 9421 - DNA, 569 bp, Canis familiaris
ccctcctgttcctgcatccccacaaagccatagggggatcaggctgcccagtgagaggatacagtgggcaccaagggcccactctgagtgggtagcaggggagaagcacacaggtgtgcaagccagcctcctccccgccaccccacagaggctgtgccctcgcagccagtggccactactctgtgagccacagaccgtggtcctgacttcctacccgggatagtgctctagagacgtcttcaaagccctctttgttcccgtggtcagtgtggggcattgaaaggccaggctccaccacccagctcccctcccaaactcccctggtttgctgctgctgagcccagaaacatgtcctgaccactggtcaaacgtgggcctgccacaggtcagacccctggggaccctggccggtgcaccatttctgacaaccatcactttccattctcacagatttctccctgaggacctcctccttcccctggctcaactatgcaccctttagcccactgcctcagggtcttactaggaatgattgcttctcttttaattgaatgtggaaatgtgttcca

SEQ ID NO: 9422 - DNA, 609 bp, Canis familiaris
  misc_feature (1)..(609): n = a or c or g or t
ccagggaannncnncatcccngtcaccccagnnaggctctctgccanctgagcaacccattgtccggttacctacctcctcccntggctcctccccgcagatggctttcctctgcttagaatgttattttgcatttatctcgtggggacacaagacaggaattccttctgttctataattttggcaagaggtagcttttccagctgttccaggagaatccccaaatcgggtggttcagggcttgcccacaacagctgtgaccctgtggtgggagccccatcccactctgctgtggcctctccagccccggagctggtctccctctgccccacccacatcccccagcagctgtaggtgtagctgtggggccagcactcagcctggacttgcttcgggaggattcattctgattaggctttcctcctgcatgttgaatttccttcagctttaagaggaagaatggagtaaatattccaagtgatttaatgcacttttacttgtataaaacgttgtaagagacagtatgtatagcccctttatatgagcattggatttggatctctccgtgttgtaactaggagttgtattatctaagactgctnnnaaaat

SEQ ID NO: 9423 - DNA, 473 bp, Canis familiaris
  misc_feature (1)..(473): n = a or c or g or t
ctctccatggtacatgtataccaatcccatgtgtgatatactcctatcagaatgagttttcatgatannnagtggttctttatgggtgcnnaagagtagccccttacctgggcctcttagaattcctgataacctatggctcaattttcctcagctgtacaatggaggtacttctagtatctacctcagagggttgttctgtggactaagttgagataatgtgtataaagtatttaaaacagtgcctggcacacaagtagtacatgttttagctactactaacattactaatatgaacacactaaggactttaggaagagagaaatgtctatggatgattactaaaacataagggtgcagaatttgcagtatagagtgtataatagcaaaatggttatttatagtgtatctgtgtcatggaatattatgcagacattaaaattatgcaaacaaagtttgttaacaaggaaaat

SEQ ID NO: 9424 - DNA, 491 bp, Canis familiaris
  misc_feature (1)..(491): n = a or c or g or t
ggttgtgcatgcgtggggcatgtctgtgcatgtgcatgagtgtgnnncactnctgannnaggggctgctgggggcacccacccactgcaccccacctgccctgcctgcttgctacccctccccagcccaccaagaaaataaactaggatgggggcctgtgcacagggggccataggatgagctcagtttcagacatcgccatcccccttgtcctacttgtggctctgaccccgggtttggaaaacgtgtgtgctcaggcgctaactgcccgcttgtgccttcgtctcctcggaggcatactcccccatgctggcccctccacggcttctccggggtgccccccaagctcatgaacactggtgtcttggcctgtcctgaccacccccatccctgtcccacacagctgggactggcttggacgctgctctgggacccctgcccaccctgacagatggaggcagagacctggggtctgggcctccctctctgac

SEQ ID NO: 9425 - DNA, 561 bp, Canis familiaris
  misc_feature (1)..(561): n = a or c or g or t
catgatgtgggggctaaaataataagtagagnnngtctccagcatccttgaggcagcagcacacgtgtttgaggtgctacttaagttgttttatatgaagtcttgcttgagtcagatgagatgagaaatgatctccgagaaagaggtagagatacaaatgaatgtggcgccccttcttgcaggcggaactgataagcatttaccctgtctcgggaggttacagcaccccctgtgtttgaaccaagcacaagatgtagacaaatctcagtttgcccttagagtcttcccagcggattgcagacctcttcccaggctgatggcttctggtgtgttcctgctagtatttcttcaaggttttcccacttgtgttacatttgtgaagtgtcttttctcaaccataacttgccttcatccatggtacttgacctggttcagtgtttggttctgaacttacaaactgttgcatctgggtatcataacgtaatttgacaaggccccataacgtaatttgacaaggagccataaatgtctgtaacattttgatatgttttaatgcaccta

SEQ ID NO: 9426 - DNA, 461 bp, Canis familiaris
  misc_feature (1)..(461): n = a or c or g or t
ccccccaccggtggcagtctnnaataaagcccccatgtcacctttggtcccgtcacccactgcagagtcnnnaggcctgaccctcgcagtcagctcttcccccttccgccccgagaccagaccagccgtaggcagcatgagaatgtgagggggcgccctgtgcccagggctgctgcaggaggcctggttctcgtgtgctagtgaggcagcagggagcccggccacccactcaggctggctctnnngggcccagaaggcccagggtctttgccagtcaaggacgttctgtttttgatagaacttttccagtgatctgtatacgatggaggtctgagggagaggacgtcttcccgcacccggagagagcactgggtctgnnnggccactccctgtcccagggggatccagcccccgaggctgagcggtgaagcccatctctgcacnnnnngcgggaccctttg

SEQ ID NO: 9427 - DNA, 127 bp, Canis familiaris
  misc_feature (1)..(127): n = a or c or g or t
tattcagggcttccnnncccgagggcnacacagaacaggtgtccatccagggcagannnnncaggcttttgggaaatcacctcaacagagaaaagcagaacagaacctggcctgtggtggtttgact

SEQ ID NO: 9428 - DNA, 593 bp, Canis familiaris
  misc_feature (1)..(593): n = a or c or g or t
aangaaggcttgggtcnctgctctccctctccctctctcattcccagggcctcttagncgtggctgcaggcatggatcccactctctcatcgctgcctgccttctctgtggaactggggttgtggtgagtttgagaggctctagcaggcttggcctccaagggcctccaccgttgggaacagagctgcctgcctggggcccctgtgccttccagatggacctcagcgttgtcatcctttggcccatgaggggttgtgagcttgcatggctcacccctcgcattacagattcttgccaccatggcaggaagcccaagggccccaagtggcagggcctcatgtagggtgtgtcagaacaggggccatgtgtcttgccacccagggccccaaccgggactgactgctctccaggcaggacatctgcccctgaggctggaactgaggcacccagaggggagcctggggctcccttgtttacctggcaagacacccgtcagtcctccagcggggggtgggcatctttcccgctggctggagtggagcagccatgcgggcctggggttggtttgttnnnnnnncttcttttctctttaa

SEQ ID NO: 9429 - DNA, 513 bp, Canis familiaris
  misc_feature (1)..(513): n = a or c or g or t
gaggcgtctgcttggcccctgctgcccccgccccccaactaatgactgtacgatgcttcaggacccgccctggccaccctggtcaccccaggtgctgggaggggcaggaggagaggtcatgctgtttgtcccttaggtcctcttactactgcaaggtaggtcagattgtttttctgagagcttgttgttcatctggcttttcaaaacttactgtgcttccttttttttttctttctttctttttcttcttcttctatttgctgaaggataagatggaaataaacttgccacagtgttaactgtcacagattgtccctccgctgaaccactaagtggcagccaggcagctctaataggcatggtttctttataaacatacctggaaatattttaaaaattaaaaaaataaaaatgggggcacctgggtggttcagtggttcagcatctgccttgggcccagggcgtgatcctggggtcctgggattgagtcctgcnnnaggttcccctgcaggg

SEQ ID NO: 9430 - DNA, 611 bp, Canis familiaris
  misc_feature (1)..(611): n = a or c or g or t
aacctggtgtcgagcacaggcttctgnnnagtctctctccccccaggggcaactgtgtgtctnnaggcctcgtccccccagcatcctccccgcctgagctgggggtgcgatgcccacacgtctcaccttctccctcccccgtgtctcctccctgtggacatgaagttgggagaaattgaggacaagagtgaacacagcaccacgaacccactggctttcaaatttcgggcaccaccactgacatatttagaatggaagggcttttgaggaggaagctagctctagccctgaagcccccttggcttggcttctccatcttgttggggtaacttctttccaaagcattctcagcttccccaaggaggtaaaggcttgcctcttgtgtccacacgtgcacacatgtacaacctgtcaacacccatttcggttggagaagtcgtagaaaactagaagcaggctggggcttgtgtgcatgggtgatgtgggtgattgtgcaactgaaaccgttgggaggtggaaattccttcctgaagtttctctgtgaaaggggtcaggggtggctcttgcttgctgtgtaattttgcctttatgtactgtggcgtgctgctatc

SEQ ID NO: 9431 - DNA, 589 bp, Canis familiaris
  misc_feature (1)..(589): n = a or c or g or t
ggggcnngcgtgacccnnncgggaatgttcaaaaatgagtaccaggnaggtgcatttgttgaaatctnnngcgctcagggcaaaaatcctggagcaaaatggaagatcgttnnnngtccgtctgtgatttggaaggagtttgataaagaagttaaaagttttgtgtttgtcctggaaggcagcagccaaacaaacaaaattcagttaccaagggagaataagcaaatccttggattgatccagaggtttcttgtacttcagatttacatacccctgggacaagacttctccactgaattgctcagtttcagattccttgcattgttaaactcctttaagctggtcgcagtttgtggtgtggtatacttcttttgggagaagaaggagatacaggtgctttaaaattggacgttagagtcctctgccggatcttctgtatctggacagtaggtacaagaagagagaatctagagaaccacatgggaggatatttctctggccagaagacaccacccataacagcattggagatgctgggaaatagaatctggctgtgtgcccagaagaaaaggaaacaacaggctttggc

SEQ ID NO: 9432 - DNA, 644 bp, Canis familiaris
  misc_feature (1)..(644): n = a or c or g or t
gtgancaaagtctgccatctgtgaccacatgctagccnnnagcatatccaactgtcctcggtcactggttgagttttttaatgttatacatattgtgcgtgtgtcattcagagactgtaaattagaaaaggtaatgacaagattgtctgaagaccattttttaattgtatagatactttccagtttgctttgaaagaaaaggcacacatattctttttctgtgaatcaaggaaggacgggaggaaatcaagatcattcagttagtgagactttgtttttggtgcaatatagtatcctggctgacacttggcattttcccctaaaacagaattgttttttacttgtgtttcagagtgggtagttgaagctcctaacacagaaacgggcatctttttaactttgtgtggtctgtgcagattctgctgtccctttacagaaaagtcctgtaactaagaagactttgctctggtcaggtggctctgctgatctctgttctctgatctcacatctggagctccctggtatgtgcgtgaaggggctgcatacaggagtttgggttggtaaactgctgtggctgccactacacagagagaagaatgctgaaattcacgccatagtgtccgcacatttttggtagcatgttt

SEQ ID NO: 9433 - DNA, 621 bp, Canis familiaris
  misc_feature (1)..(621): n = a or c or g or t
atatggtagagatcagcactcnggtgctcatcagctccagcaannnnnctgtgatcacccagcacatnnagaaaacagatattcctcccagctctgtgggacaggtcatgtcannnngctgtnnccatcctccatcnnnangccttgctgagaatgacattcatgagccacacacatcagaggatgatctgttggagcctgcctcacagtgcagaggcttccaagagctcctttgctcccctgataaacagtgaccatttcagaaggaagggagcaacttttggcttatatctagaagacccctggggcaactgtacttgctcagttcagatcttcagctataatctccaggggaaccctcgggaaggaaaccaggaatggctccaggaagaaaggctttggacaagagagaccaaggtggagattgaggcagagctgtctgtccaccatcttcagctttttttgtgagcccatcttcaccttgagtagttgcccaatctgctcacagcccatcagtaaagcagccaacaaagaatttctgggtgcctcccacgggccaggcacaggtaatgatccctattcttgggtcatggtccctattcttacaaacctgcaggctag

SEQ ID NO: 9434 - DNA, 365 bp, Canis familiaris
  misc_feature (1)..(365): n = a or c or g or t
tgggaaaaaaattnaaaacatccgctgccttatccctcatattgagaaaaaaaaaacaaaaaactgaggaacttcaaaagtaatcttaaagtgaagaagactttttatttttttacttttaaaatcttttataaagatttaatttttaaataatctctacacccaacatagggttcagatttacaatcccaagaacaagagccgtacactctacgactaagctagcgaggaaccctgaagacgactttttaaacgaagacttaaaactcaaagcaaaagactacagtgtttcttagcataaaaacctcaaaatggggatgcctgcatggttcagcagttgaccatctgccttcagttcacaatgt

SEQ ID NO: 9435 - DNA, 520 bp, Canis familiaris
  misc_feature (1)..(520): n = a or c or g or t
gtggtggnntcttcccgnctgggnngcgncagcagcagccacggcagcatccaggagagccagaaggccagccaggagccatctcccacccaggatggcagtgaaaatgttaaagctatttcngaaggagagaaagttcaaggaggtggggcccacgtggcagtcgagggggcagaggctgagctgatgaaggtacaggccgcaggggacgttgaagatgctgatggaaatgctgccaaggccaccaacatggtgcccaaagcactagaggatgagatgaaggtggctgacgcagaaatagaggagggcttagtggaggagaagctgaagagcgtggagggagcagcggcccccaaagaagggcaagaaaacccagctctgggatttggagctccgcagaatgatgtgatcctgccagagtactgatgtggcttctttccgatctggaagccaaattctggcactttatgcattttgtccttcagcaaggaaggtgtggaagcatgagaagcactatagt

SEQ ID NO: 9436 - DNA, 631 bp, Canis familiaris
  misc_feature (1)..(631): n = a or c or g or t
cactcatctnnntntatagattgactaatacctcattctatatgtaaaaacagccagtaatttctgtgcaaccttattatgtgcaatatttttaaatcctaagaaatgtgtgcttttgttttcatatagacttatttctttagtcctgcactttttgcatcatactccatatgagtattaatcctatggatacatattaaaactagtaaatgtctcatacaacattgtgagtgagagaaatatagtatttacaatatgatgttctcggttctcattttattgttaaaagtttattctgtagttctagagctatggaaggtatatgaacaatggggccatagaccatattccagaagttattttggactaacctgaaaccctgatgtgaccttgtttggttgccatttggtaatttctcttactttcttatcatcctccttccctcacaaattttggtaccttaaagattttgttaattttaattttggtgtatttgtttgctaggaacaagtatactttccattttaggcctcattggggaaaaaggagagactttgcataaagttatttgttatcatttttaatttgaaagctgtgaggaaaatgaaattattccattaaattnnnnnnn

SEQ ID NO: 9437 - DNA, 564 bp, Canis familiaris
  misc_feature (1)..(564): n = a or c or g or t
actcccaacacatcaatgactccagagatgcctctccattctgcntnnnnncncntngctgtgnnnnnnncnctgnnnnnnnnnntcggtggggtnnaccctcagaangatgtatgagagccctggtaacggnaccctgcctccagcntcctcagnnagccaacctcaatgctgccaccacagtggtctttctaaagtgcacctctagnnnnnncactgctccaggcctttcagggctgcctctgccttctggattaaagccaggctgcttggccagcctggccccctgctctcctctccgtaactccttgctctcctcccttgccccatgtccatgtcctggatccctcctgcccctttgctggcctcccaaaccttgtgttttgcaaaccgatgctgttctgtggggaaaccttagagtctgtgccaagatggaagataaggatttcaacttggctttcctttgaagccaatttcatccagtttcaaggagagtcctttatttagacactatgtccattctggaaaagtgtgggcaaggatgaaagtagctctcccttttga

SEQ ID NO: 9438 - DNA, 542 bp, Canis familiaris
gagttggcttgtgactggtacagaattttagtgctttacttgagtgaccctgtgcggctgcagtgttctcccccagggagctgtggatatagaaaaactgtaaaactctgctttttctcttgatctgcttctggcctcaccaaacctaagtcaaggtgaaaacttgatgttagaatggagaaggcgtaacaggttatgttccaggcttccaggcaacattttgaaaagattctccttgttcttggagctgcaaacatccaggaggaaatccctgctcagattgaatggactaagccccaagaacgaattcacaaccgatggagacgaagtcagcagaaatgctcaaatcattaaccagttgtcaggtgaaggtcaagtccacacatccttctcaggctcttctgtctcagctctgcaccttttgcaaacaactactgacaagagaagacagctccacaaaaatgagcagaagagtgcagcacagagccatcaaactccattcttagaacaagaagtataaatcctaaaagccacaatttctg

SEQ ID NO: 9439 - DNA, 554 bp, Canis familiaris
  misc_feature (1)..(554): n = a or c or g or t
tgtgtgagaaaggatgtgtccctgatggncggcatgacgggcttccggcggggactcaccagtctccagaggnnctgggagggcatggagatgttgtaatcaacgtagcaggacacctcctgcgagtgggggctcaggggcgccgccacgtcatgcctgcaaaaccaaacagtcttgtggacggagctcctcactcagtaggccttggggggaaaatccacttttcagaactggagccagctcagcctgaccgagcactcggacccaagggtgccacctgatgccatgctgatacacgagacactgagacggcagcggctccctgggaaccgcaccccagggaagaggacacgtgatgtgctgtccaagagacaggaatccgcactaggtgggtgtcgctgttccaccacagaacaacaaaccaggcttcagagcagggtgcccactgtcctgggagcatgaggacgcgcacccagcagccccctgacacctgggccttggaaccatccgcagtactgggaatgccgtcgggggtaaggtgccctcggggtcgg

SEQ ID NO: 9440 - DNA, 507 bp, Canis familiaris
  misc_feature (1)..(507): n = a or c or g or t
agcttcggcntnnatgacgactcgctnnnnnagctggctgagcaggtgggcangcaggcaggtgacctgcgctccgtcatccgatccccgctggccaacgangtctcgccggaaaccgtcctgcggctctactcacagtcatctgacggtgccatgcggtggcccgtgcctttgagaaggggatccctgtgtttggcacgctggtggccgggggcatcagctttggcaccgtctataccatgctccagggctgcctcaatgaaatggccgaagacgcccagcgggtccgcatcaaggccctggaggaggacgagccccagtctgaggtcagcctggaggcagccggtgacaatggtgtggaaaagcggggatctggggagggaggctgtgaggaagcaccgctctcggctcgccggaagcttggcctcctcctcaagtatattctcgacagctggaagaagcgtgacttgtcagaagagaagtgannnnnncagccccaccccctgc

SEQ ID NO: 9441 - DNA, 570 bp, Canis familiaris
  misc_feature (1)..(570): n = a or c or g or t
caagttgatccacgaatnnnnnnncgtgtacactgaggccattgctgacatcaagcnnacggtgctgagggtcattgaacagccgatccgaggaatgggcatgaactcaccagagctgctgctgctggtagaaaactgtcccaagggggcagagacactggtcacacgatgtctacacagcctcacggacaaagtcccaccctccccagagctggtgaagcgggtccgggatctctaccacaagcgattgccagatgtccgcttccttatccctgtgctcaatggactggagaagaaagaagtgatccaggctctgccaaagctcatcaaactcaaccccattgtggtgaaagaggtcttcaatcgcctgctgggcacccagcatggcgaagggaactcggccttgtcccccttgaaccctggagagctgctgatcgcattgcacaacatcgactcggtgaagtgtgacatgaagtccatcatcaaagccaccctcagcaagttctctctcagaatctttgcggtcaagagaggagcttgcggaagtctaaaactcacactacaactgag

SEQ ID NO: 9442 - DNA, 396 bp, Canis familiaris
  misc_feature (1)..(396): n = a or c or g or t
gagggggtggtcccctcatcnnnnnggatctcaatggctnnntnnaaaagggcanngagcccagccctgggggtaccccccagcccnnccgccctgtgtcacctgctggaccaccagaaggggtcccagaggatgctcagcccccacggctgggccaagagagagatcctgggggcatcactgcaggcagcacggatgaacccccaatgctgaccaaggaggagcctgttccagaattgctggaggctgaggcccccgaagcttaccccgtctttgagccagtgccacctgtccccgaggcagcccagggtgacacagaggactcggagggcgcccccccactcaagcgcatctgcccaaatgcccccgancnntgagaagccggcctgcctgtcc

SEQ ID NO: 9443 - DNA, 609 bp, Canis familiaris
  misc_feature (1)..(609): n = a or c or g or t
actccngcaccgaagagccaactgtggcttctgaaagtgtagaaaatggacatcgcnngcgatcctctcggnntgcttcagcctccagttctactaaagacataaccagtgcagtgcaatccaagagaagaaaatccaagtaaacaagctggatggcgacttgatccttgtaaatgtgtgtgaattttacaaaaagcaattttgagctgtgactttttaaaatccacttctgtacagttagtcattttaataatgtggcccttttcctagtccttgcaacctgtttcgtaaagtgcaatggggaaagcaaagttgttgaacccttttggtgttgcaagatgaagttcaaggtttctaaaatgttgccatgtattgagaggagctaatgcaattatgttattagttttcatatttcctaagcagccttagtacagggtgagcatttttagatcttctaatgatgtattgtgctgtggaagttatgtgtgtgaatagcagtagtgggagcaaaagaaatcttttcctttggaaatgttgtaaataattttattatatagtgttttggatgtatttgttgtagaaatggaccagtgaataaagagaatctaa

SEQ ID NO: 9444 - DNA, 568 bp, Canis familiaris
  misc_feature (1)..(568): n = a or c or g or t
cttgacacagaaaaaggaaataagccaagtctgcgtgcngncgtcgcagtgcttaaccccttagctcggtccaggggggatccttgatgcgcgatgagggaaccctgatccgggagaacagtgcagaaagacaggagcggactgggaattgcgcctggataagtcngtgtgtggtagtccactgtagaaggtgaccttccttcacacgagagacaggaggaggggagaattgcacggaaggagttgccagcagtggaagctgctccacaggtttcaagtctaaaaactaggaactgttcggatgagatcacattaaagtagattacagtaacaactagaaatggtaaaggatccaaatttgcaaggtaacatgctctactgcagagagcactaaaccacatgttattaaaacaaacttacattttgctattttgaaatgttaacgcatcaatttttgcaaatcagagatgcaggtgcgaatgtgaattgaagaggagcttgcaagcactacttcaaaacttaaaacgcctttttatagttcctttttctcaagcttcccctgctctcc

SEQ ID NO: 9445 - DNA, 532 bp, Canis familiaris
ttattaggaaattttacttttcttaatcttacctttttaaagtatgcctaatgaaagacattccactattacaatacataatgctcagctttttgtgaagaatatttaattgtattttgtgtttatgcaggtatttcacacagtactttgttcttcataatgcagccactataacttgataagtcattgcactactttaaaacttttagtaatatcatgaatttaatttgctttaagatttagtacatttcataactcttgaactcttaacaaactgcattgggaaaagaagcctttgttaatagtttcccccaccccatacccaccctcagcaaagcactatcattttcatttgaaatggtattctgttttataatgtgttttcaaatagagttcagaatctgcaactcagttcaacacaaatctgttgagctttaaaaatgtatttgaatatttaaataggcattaaaattatgaattagatgtttttaaatttatgcatagtagttttgcactgtaaaataattccctt

SEQ ID NO: 9446 - DNA, 540 bp, Canis familiaris
  misc_feature (1)..(540): n = a or c or g or t
gnntcagagctgccatcgtngaagctgtgangcggcttctggggacccagtgccacagtcttggctccctgacctgtcttccagtttggtcaaagagtgactgctggaaacatggcaccttactggactaagattcagataagagaagttcatctgacaggtgaaggacacatgggcagtgaaggcacaggctctgtgcctccatgggcagctggcccagcgcagactggagtgcaccagggccactgggagcaccaggcccactgggagcatcgggaccactaggagcaccaggcccacctggagcaccaccaccaccgggagcatcggtcccactgggagcatcggacccactgggagcactggcagcggcgccagcagcgccaacaccgagcccactgggagcaccaggcccaccgggagcagcaccagcaccgggagcaccgagcccaccgggagcacctccagcaccgggagcatcgagcccaccgggagcactggagcgccgatccgcctcaggagcctctccctcggcctgtg

SEQ ID NO: 9447 - DNA, 469 bp, Canis familiaris
  misc_feature (1)..(469): n = a or c or g or t
agtgaaatcctggcgggggtgnnagggggtgtgggggttggcatgggtgtggtgttttgagagggtggggtggtaaatttgtgggggtacgaaatagggctcggagttgataaaggcattcctgactatccttcctaaccatttggcctgtgtaggatgggtgtgcgggggaggagtgcagtagactccagatgaggagttctaattcagctctgtagaaaaacaccttgtttgcttgtggctggggatctggtatcagataaaagaaactgtccatctaaatatgacagatgcaaacagctcttctggttctgcagagccaagttgagaacacaattaatgttaattgttcattgaagaaagtgctgtctttgaaatagatttgctgtggggagaagggcagtaagtgtgggggaaagggggccatgagcgtggggagccccacagagcccaagggactttttcagta

SEQ ID NO: 9448 - DNA, 343 bp, Canis familiaris
  misc_feature (1)..(343): n = a or c or g or t
gaagacccacctcaatgaacctnctcctgtggagagatttaaggaattccagatcaaatcatatcctgtacaggactttagctctctgaaactgaagcatctccagaactcctgggagcaacaggggaccagcttcagtaggaggattaaaacctcaggaaatactcttccaaagatgttgggcccaaagatcannnnnnggcgtccttgttcgcttgagtgttccatgatcagaaccaagtatggtgatctccctgaagaggctgcagtgggcacctacatcaagatccacactgtggaggaaggagaacctgtgaagatgaagacatggggatccctgagt

SEQ ID NO: 9449 - DNA, 594 bp, Canis familiaris
  misc_feature (1)..(594): n = a or c or g or t
atggttcatgacctggggacagggtgaggcaagtaatgtgagncaggctctgnaggtcagggaggtttaggaaagaggggagtttgcatccctctgtgatggagggtacctcttcctttgcttctgtgctggcatggagtttccactgactgtggggtcatagtctgggggatattgcccctacatggcagtatctgtgccctcttgctcctctgacagcctttagacatgccctgttcctgttttaatccttgcccttgggagcatggatattagcattgggtgtcaagttccaggcaagagcaggataagagggcaggacctgtagcagagtgcttgtctgccctgtccacagtgtgtgtgtgtgtgtgtgtgtgttggtatgtgaacacacagatgtgggtggccaggggtagagggtgtgctgttgctcgtggactacgctgcttacatacctgttgagggctttgggtgtcagtggggtctcattggagggttcccctgtacccttttggcccttgtgctgtgcctctgtgggggctaggaggccagggactggattgcacctaacccattagatttgctcatttggta

SEQ ID NO: 9450 - DNA, 614 bp, Canis familiaris
  misc_feature (1)..(614): n = a or c or g or t
tgcannagagttgaaacatctcaccttcagatgccataatgtngagttttatctaaaaaatgtaaaagctgaatgtctacatccatgagcagaccaatgagacctagggtctcatcttacatcaaacagggggatcattatgctcattttgagtttgctgagaaccaaagtaataaccccactcacctctcggtaaataggagatttattattttaacatgatactttttataacaggaattctatggtcaaaagaagaactgggctgtagcatgaagcagcatcaacaaagtgtctatgtcttactgtattagtcaaggtagattaagttatgcttcagtaacagcctctacaatgttgatgacttactgtcaaaagttctctttcgtggggaataaagaggaaaggagaaaaaatgagtgggaaatatcagaaagggagacagaacatgagagactcctaactctgggaaacaaacaggggtggtagaaggggaggtgggctggggaggtgggggtgactgggtgactgggtgacgggcacttgacaggatgagcactgggtgttattctatatgttggcaaattgaacatcaataaaaataaatttattaa

SEQ ID NO: 9451 - DNA, 322 bp, Canis familiaris
  misc_feature (1)..(322): n = a or c or g or t
caacccagcgggggacggaggggccgctcagaggacttcagcggaaccaatnnntcggagccagtggcctggacttcctaagaaatccagnnncaaaaaaaaaaaaaaaaaaagaaatccagtctcgcgccaacgcagttcccagtccatcatacaacaggcgtgcgagggcgcggggctgccaaagccatcggtgtggctccgtctctcagtcctttacgcacagaagtgacgagaatgtcttttttcccaaccaaaggccttatacaaggctaaaaaaaaaaaaaaagnnnnnnnnnnnnnnnnncntgtnnnnnaggtn

SEQ ID NO: 9452 - DNA, 524 bp, Canis familiaris
  misc_feature (1)..(524): n = a or c or g or t
cntctgctcacttctgtccatattttctagacctttcttccagccatttccttgttctttccattccctcatctnngtctcagaatccatcagttccaccccacctcccaatgtgacttcgcctcccagctgctcaggactttgaaggtggggagttgggggggggggggctaccttcctgataagctctcccagtaattccaataccagtaaagtgggagatcttcatttttgagactgacttgcaagcatgtatcccaccccttccatggcttttgcaagtttcgcttataccgcactgtttggcactgtctagataaagagacctaggaggatgatgccagaactcaactgcaaggatttcttgcagcaaaacctgccttggttagagctatgggattccagttttcagcctcatccctggctgtgaacagaccatcctctgctcaggctaagggggaattatcaaaacaagcttgaagctgactctccaaatgtgatttaacagtcctgaatgtacatac

SEQ ID NO: 9453 - DNA, 314 bp, Canis familiaris
  misc_feature (1)..(314): n = a or c or g or t
catgttactctaatggnnncttgctcgnnnntnnncacactgtgttataatttgcttcattaccttgctctttgatacatagtgtgcatttctttgtnnntgtaacgattgtaatnacaaaattttcatctnnnnncanaatcaaaatggcattgataggaatgaactccngaggccgggcnngnnncgnnnggtggtcgctccggcctggcgctcagtnnnntgacctgtacctctcaacttttgccctgttaaatatatgctatgtcattaaatgcttttaaatctagnnnnncgggtaantnnnnnctttt

SEQ ID NO: 9454 - DNA, 342 bp, Canis familiaris
  misc_feature (1)..(342): n = a or c or g or t
aaaagtcagaacgaccatagtgttagtaatgtgctgaccatcttgggnnngaggctaattgaggccatgaagacggctggaaaagagaggggggtgttgacagcctactcggtgtaccctacgcaacctgttttagaggaccaagccaaccacacaggtttctccgaggtccgcctccccctctcacctgttggtggaagcttcagggaagatcagagccctggaaagaggcagtagcaggaggagtcagggatatacatcaattgaacatcaatcgtgtgtcctgatttgggagtgattgagggaggaggtgggttgctaatctcatggcctgattttttt

SEQ ID NO: 9455 - DNA, 475 bp, Canis familiaris
  misc_feature (1)..(475): n = a or c or g or t
ccatcagactccatcattaacattatgggggaggatcctaaagagacagaggttngagataaaggccccaggcgtgagccanngcggtcaagcagctngaatgtcattgctggggagagagcccagaaggtgacccccaaagtcagtgacaactttgacatctnnaaccagccctccagcagggaacaccctgctagtgggaggaggggcccgaggaaggacaccctcctgagcagtcacagcgatggccagccaactggcagagacagtgccctcagcctgctgtcacagcccagagatccaggagcaagccctgcacctctctgttttcaaaacccagagcgtacatctcggagaataaatccgaaagcaggtgcagagcgagagcaaagtcctgcctttcttgccaacccaggccaagtccctgacacatgacgtctgtttgctgtcctcggcnnncttacagaccaaccca

SEQ ID NO: 9456 - DNA, 482 bp, Canis familiaris
  misc_feature (1)..(482): n = a or c or g or t
gttgaagtcttccacagaaaaaagaggaatcctcttcaaggctgctgctgagnnactcttctctgtttcagcagtatgtctagatttctcagcacatctctttaggaggtggggcctgcccattgatgcagactcatctctcaacctgcactttgcaggcaatctatacctgccttaatgtacacctctgaggttgtggacagaggctgaatttttccacatctatgcctcttctcatgctgcttctttcacctccttctctggatgggagtctcctaaagtattaacttcttcctgatatggtgttaaaagtatagctccctgcctctgaccctcagagcaccctgtgtgtacccatgaggctgcatttatcatgtaatcttggcatgatcttgctacttctcacgttatgacttgagaccctgagcttctcgggctgtgtttttaaatcccttgtcatcnnngagcctgcagacaaccct

SEQ ID NO: 9457 - DNA, 594 bp, Canis familiaris
  misc_feature (1)..(594): n = a or c or g or t
cataagactgatattttgcttttgtttcagtatgaatagattggggaaangatctatcattcatttagtgcccatgctatgcattttaaaatatgcattatttggtttaatcctggccccgtgccaagaagtaattgaccagcctcacacaacataactttgaacaaagctggtaattgaacacaggtctatctgcctcccaaactgtgctctttctcttgtacctgcacaataacataaaattggcaaagtgtatttttacttttccagatgccacatgtgccaagaataaatcaagtgatgttaagcataataatagcatattttaaaagaagctttaaaaaaatatattttcaccctgacagtgacccgtgttataatttatggttttggaactaagagtatgtaagtataattcaaagttgtcaaaatgtaagacatttagaaataatttttatttatattgttaataacttaatctttggaaattcattttccttggtgtttgcttttaactaagaagtctaaaaaaaacaaaaaccttgtgtgttatcctgatatagttgaataaatgactatgtgtagttcttatat

SEQ ID NO: 9458 - DNA, 216 bp, Canis familiaris
  misc_feature (1)..(216): n = a or c or g or t
gcctcacccccanaggnntgagcccagccatgtccccagccntgcagcgnntcgtgagcaggacggccagcaagtacacagaccgggccctgcgggccagctacaccccatctccagcacgttcaacccacctcaagaccccagccggtgggcctcagacccccacgagcacaccagctcctggctctgcggcacgcaccccnctcagccaggacc

SEQ ID NO: 9459 - DNA, 516 bp, Canis familiaris
  misc_feature (1)..(516): n = a or c or g or t
gtagctnncnagttggtgctggctantagtntctctcngagtnganntctcgctnnagcagctttggctgtctcactacctggtagctgggttccaagagcgagtgttctagctaacaaaaacagaacctgaatcgtctttttttttacctagcctggaagtcacatagcatcattcccactataatctactggttgactaatcacaaaaacccacccagtttcaaaggtatggggcatggactccacctcttgaaaagggagtggagagattctagaaactagcataggatgcctgtgttggaagatatggctgtggctagccttcgaaaacaaaccatcacaggtatgacatttttcactatgcttacagccaactgccttagtgtcatctgcctgtgactcttaagtgctggttaaaataagcatgcctggagccccttccctcagagattctaattctcttattcagtgctgagacctgggaatgtgcatttaaatattacgngtaattttg

SEQ ID NO: 9460 - DNA, 602 bp, Canis familiaris
  misc_feature (1)..(602): n = a or c or g or t
ggccaacaagtatctnnnctcaaagatctgcccactagccctgtggatnnagtgatcaactgcctggactgccccgaaaatgccttcctgcgggaccagccctggtacaaggcagctgtggcctgggccaaccggaaccgggcgccagtgctcagcatagaccctcctgtgcatgaaggcgaacagggcatcgacgccaagtggtcactggccctgggcctgcctctgccactgggggagcgtgcaggccgcatctacttgtgcgacatcggcctcccccagcaggtattccaggaggtgggcatcagctaccactccccctttggctgcaagtttgtcattccattgcactcggcctagaggggctctgggcaaattagaccctgcggtcccctgctgctccggacacactgaacttgacaacgaacgccttaaggatgtgaagcttcatggaccttgttaaattttttcgcttttggatttgttacttctgtgagagaacagatcatatttaaaaatgacctgtcacctgcctgtagccagggcaggtgtgtgggtgtgctgggtgggcagcaggctgngtggttctaggcatctcgacc

SEQ ID NO: 9461 - DNA, 609 bp, Canis familiaris
  misc_feature (1)..(609): n = a or c or g or t
atatanacttgtaaagannacacagaagcaaacagttttcatttttcagccatgtttgtaaaagaattcactttcagtacataggggaatnaccaagccctttcccattatatccagatgtatcacaagttattttagctttgttatcaaaagttctcattactgtttctttaggnaggctaccagtgcacaattttaatgttctcaaggtaacttgtcttggaaatggtgtcatttttcaggatttgaacatgacttggctgaactaaagatgaagaagccaagcctctactactcttcctagtcatctgggcctagctgttggagtcttgggactgtgcccaaactctaaaaagtaaaatacagcaacaatggaagaccttcaagaatctagaagaactctcgtacttgccaccatggactcagcaataagaagagcagacagttgcactctgtgtagtttatagctgttttgttccttcatctctctctgagcagagagagggtaaagagccctctgacagtttcagctgcccctgttcttttcctcaaactccaggatgagacctnnnatgtgggataatttnnnnngcaggtactcacagcgac

SEQ ID NO: 9462 - DNA, 255 bp, Canis familiaris
  misc_feature (1)..(255): n = a or c or g or t
aaannatttttgtttttattgtatttctttgtaagtctttactcatgagttattggattaatttatttgctaggaagtccctcacggaacctgttggagggtttattccattgtgctttgaatgatgggcgggacaggggttgcagggacgcactctggacaacaaaaaaaagcaagtcctgaggattgtgaagatgatcgaaaattggctgcagaacacaagacaccaaaaataaagtttcgtctccatttttg

SEQ ID NO: 9463 - DNA, 476 bp, Canis familiaris
agagcagttcttcttcatgagatgagatgcttcaaagaggataaaatctctgggagaaatcatttgggaaattccaccaagaggtagctcatttagttccccagaactagagctgagtatctgatagttttgtagaattttctgggatatatgggggaaagggctattatcaagtgagctttgtctaatatccccctgaggatattgctagagcccaagtgaagagtaaatgaagtttcactctgatgcaagcttttcccattgcccaatatatcaaaaaggaagcttctggaattgtgtatgggtattttatccctaggggaaaatcaaggatcttggtacccctaattctttatggaaatgtttcagattattttaattttattacaagtattattagagtagtggttctgctctaagatttcaaaagtgcttttagaatcataaatgtttctctgactccacatatattgtta

SEQ ID NO: 9464 - DNA, 467 bp, Canis familiaris
  misc_feature (1)..(467): n = a or c or g or t
cagtcacactgcagtggcaaggggtgtggatgagaacccatggngtcctnnagtcggggcccagtgtgtttgcctngtctgggggccacccctagggcactcagggattcccaagggagcagtagagacaactgtgctcaccacttggtgacctgcccagtgtcccctctctgatgccctcctggagtttatctcagcctagtgagcagaccccagaataaacagactttctgtggagtgaaggccagtgctcttcacaagtatcagggtcctgagacaaaaactgtgttgaggaggggtccaaggagacagactggctgccacgagggccctgggccaggaaggacggtggccagcagctgattaccaggatccttggttcttgtgctgtgattatgtaaaatgttatttggggaagctgggcatatgaactctgtcttatttttgccaatttttggaagtctaaa

SEQ ID NO: 9465 - DNA, 534 bp, Canis familiaris
  misc_feature (1)..(534): n = a or c or g or t
accccagacttgagcttggtctccagtgcccgccagggtcctgantagtttgaggtgattctagcgaggatattctatttcctttggcctccttttgcaggggaattagatttctatagggtttttctttaggagatttatttttttggacttcaaagcaagccggtattttcatacaagttctaattgccgtgtgttccgggtggggaggccatttccagtgggggccagccctgtgcaccggttcagatgttattagatgttacaagtttatatatatctctatatataatttattgagtttttacaagatgtatttgctgtagatttaacacttcttacgcaatgcttctagacttttatagcccggactgctacctttcaaagcttgggagagaaagccgtgaattcagtcctgttcttttttgtactattactgacccaaatttggatggctattttttgctcatcagctggccagctgggcagtggttcagggtggtctttgttctcagggccccccgccttatgggg

SEQ ID NO: 9466 - DNA, 489 bp, Canis familiaris
  misc_feature (1)..(489): n = a or c or g or t
aactcttctcttttttgatcnnnaatattgagnnnttgctnngcattggacactgggacagaggagtcannccacagatatccatcacgcagctccagccttcaaagacttcattgatgccatgacaaccacttctcataactcttctagcgagcctgtgtttgcttgcttcctgtcacacctacttagccgctgagacagcccgatttaggatggtgtcagnnttcactctccactaacccgctaatcagatgatgtttttgaataggttcagtgcctttgcttttttagtnaccagtttgtatcgcangacagcaaaacactccaatatagnnnancattcaaatgtgnncaggttgactctgcaagnnaacatctgtaatggtgctttgagaaggtgnaagtgtgtgttaacatgggtagtggatgggggtgcaatccagagagggagggaagngncttccctggaagggcgactctcatnnnctg

SEQ ID NO: 9467 - DNA, 545 bp, Canis familiaris
  misc_feature (1)..(545): n = a or c or g or t
tgcagtgtgtgtaacaggtgtgtgcancgttttgaccaccactgtgtttgggtgaacaactgcattnnngnctggaacgccaggtacttcctcctctacctcttgacattgacagcctcagcagccaccatggccatcgtgagcactgtgtttctggtccagttggtggtgttgtctgacttgtatttggagacttacattgatcaccttggacacttccaggctgttgacattttctttcttattcagtacctgtttctgaccttcccgaggattatcttcatgctgggctttgtcatgatgctgagcttcctcctggggggctacctgtgctttattttgtacctggctgccaccaaccagaccactaacgagtggcacaatggtgaccgggcttggtgccatcattgccgccacgtggcccggcccctgtcagcagatacccaggtcaaccggaacattcactcccatgggctttggagcaaccttggagaggtcttcctacctgccactgcaccttatgagagaannnagaactgagaatg

SEQ ID NO: 9468 - DNA, 578 bp, Canis familiaris
  misc_feature (1)..(578): n = a or c or g or t
annctgcgatgagcnnacagggagtngaccgtcacctcttcgcgctctacatcgtgtcccaatttctccacctgcggtcaccctttctggaccaggttcactcagagcagtggcagctggccaccagccagatccctgttcagcaaatccacctgtttgacgtccacaattaccccgactatgtttcctccgggggtggattcgggccggccgatgatcatggttacggcgtttcgtacattttcatgggggatgacaccatcaccttccacatctccagcaaaaagtcaagcacaaaaacggactcccatcgactggggcagcatattgaggatgcactgttggacgtggcctccctgtttcaggaggggcagcgtcttaagcccaggtgcggaggattacaggaggaggacttggggcacaggtgtggttctctcccctgccacactaggggctccagggcacccacaaaatccaccaacttttgaccccttcctgcagggagctggtctccccatgaactagggagagggtcattacaactgggctgatgcagaacagaggcagcctgtttgggt

SEQ ID NO: 9469 - DNA, 624 bp, Canis familiaris
  misc_feature (1)..(624): n = a or c or g or t
tctcttgtagacttgacagggtatatgttgtttttaatcggttagtgaaacattacattcttacctacattaaacgagtttgtgctcatttataatgtaggaaggaaatcactaatgttttgtgatgatttattttnnagcagggatgttggttagctgattgtttttcttgatatgtttagataacttgaactagttgaacatttagaattctctttgtaggcacatggtgcatgaaattctaagcccttagatttttagtatattgtgtatctgtattataaatgtcttcttctctttagaaatgacaagttagaatttttgtcaagcttattaactacttgtattgttgaaaatgaccagctgttgcttttagaaagccaaacatcgtaaaagtaggagacgtgaacattattgttattgcttactgggatactgagaactgtatactgaaggtgactttttttaaagaatgaaattttcaactgtgtactgaactttttcttctatttgacaaaataattagtaataaattttgactataaagaataaatatattgcaaaatgttgccaatacagtttccaataaattgatgtaaaagcaccagactacgtttttttcta

SEQ ID NO: 9470 - DNA, 574 bp, Canis familiaris
  misc_feature (1)..(574): n = a or c or g or t
ccttccccctccacactccttgcccccntcctcttnntgcctcctctcccctcagcattcctatccnnnctcaggatcctctcctcctccctcctgccaccgttttctctgcaaaaactccagcacttagatcagctgggggagggcagcggtgtcaggnnagggctcccccgccgcgttccgactgttttctgctgggaccacccaggtcctgacgcccccagggcgcctctgggtcgcagagctggctagccagctcttgtctgggaactggtgcggggtgtcgcgcaccgttgcttagctgggttctgagcacgcacctgggaggaggaggaaggggcgcggctgttgaccctttcagatcagcccgagttgactcgccccgactgggcttttaaactcgctctgcgagtttcttaaaggcgtcggggctggggtcattcacgtgcattgtaacgaagaaccccgaaataggaccaaagctcctagatgcagggagcgagtgaagggcggggagctctataattattttccaagaggactagggaggtttgtnnnnnncgacagttcgcta

SEQ ID NO: 9471 - DNA, 474 bp, Canis familiaris
  misc_feature (1)..(474): n = a or c or g or t
cagggctggnnctgtaggggatcagtcannnntgcagaaggctgannnnaacgngccaaannnngaagggaagaaggctggtagctnngtcccatcttggggnaccagnnaatcctgaagaagccaagnnaagcactgatttgtgccagaggtccctttgaggtggtgggggtngtcggggccctaggggaccaccgcagagggcagtcaggggctgaggcagcaaccagccttctgcctgttaagcagaacagcacacagcttcctcttctactgtctcaactacagcgcctcagagaatcactactgaccagagggtaaaggcccaaccaccacccaaagactgaatcttcggggaggggccatgcagagggatttcaagatagtactcagatctgggcctggaaactaaggagacaccagagtttcctgagcccgggtgggggcggggggagctgctggaaaatctcacgc

SEQ ID NO: 9472 - DNA, 532 bp, Canis familiaris
  misc_feature (1)..(532): n = a or c or g or t
cactgggtgaagaannnacaacagcaaaaccgggctgcnntttttgagaacacacccaaggctgtgctcctctccctggctgnnnaagattactaaggggctggcaggtggggtaggtgggggtggggcaggcaaggagggaatgctacagaaatagaagttgaggagggaaatcacgtccaggcctctgtccagagggagcagttggccctggccaggacccctggaactagggccattaaccccnctcagagctctgcacaagaaaagcagcatgctcccatcacaccttgttaagtgtggtcagggcaggccccatggagagggaatgagagggcatctgagagtcctcctgcttctctatttcccagctgcaccaccatcttggctccttctcatggnnngcccagagttccagacacttgagtgtacttcccgtagggtccagggtgaggatcaaagacaggacagnctgagatacacaattacaggggattttactganctcacaacatccagtgnnatcatgaaa

SEQ ID NO: 9473 - DNA, 491 bp, Canis familiaris
  misc_feature (1)..(491): n = a or c or g or t
cccacagtgttggnntgtgtgctgctccaccccttcccnnnnnnntgcacaccagctatngccacaggccagctnnnnnnnaggctctttgcacccttgttctctggggatccaggcctccttgcccatggggcttccatctgtcagagaacttgatctttagatttgagctgtcacctgtccccagtgccccaggaatagagcagagggagcagaacccacttacnnnnnngtggtagnctcctgtgtgcagatagagaaacaccanctgggccttgacacaaccagccgnnnnncaggnnnnnaggagttgctataggaggggtagcctgggcnnnnnnnnntgccaaggctcccccagtcagttgagttgagggactctgtgnnnctgccctgcnnntacnctcaatcctgtctccttcccttgagtggggggtgggggacgggagaaatcagtgttnnnncagattttacaaaannnttttaattct

SEQ ID NO: 9474 - DNA, 638 bp, Canis familiaris
  misc_feature (1)..(638): n = a or c or g or t
gccagataaaaaattactcccacagtttgactctcaagtaccaaagtattctgcaaagtggatagatnnaagtacannnnnnctctcaaaatgttcacaaagaatattggaacagaggggaaatacagactttgggcttgctgtgctgcaagattcaggtgccgctttatgccacaatagtgtattgtggcctcatagtcacaaccaggcacagaaaaaggaagagctgatctctaatccagaggctaatgtccaggcccagcatccacattacagcagagaagaattgaactccatgactcttggtgaggtaaagcaactgaaagcaaagctccgacaggaaatacaggaagtttttgaagagttaacccaccaagtacaagaaaaagattctttggcctcagagctccatgtccgccacattgccatcgaacagcttctcaagaactattccaagttaccatgtctgcaagtagggcgaacaggaatgaagtcacacctgcccataaacaactaaactaaacttacacttacttcctttgtcctcatgcccctaccatttattggtctgtcaggcatgccaactttgaagaaagttatgatccatttttttatggtcattaaatttgcagaactga

SEQ ID NO: 9475 - DNA, 436 bp, Canis familiaris
  misc_feature (1)..(436): n = a or c or g or t
ttttnnnatttnnnnnnatttttnnnnnattttttttttttttaatgtgtaggnncatgtcttggnnatnnnaaaatttcaaggctggtttacttatgcaaagcatgnnnnnnnnnggaatacttagnnnaagaannnnnntccatantntnnnnattcctcaagggacaggaaaaaaattnnnnactgttgaaatgcagatttaaagtaatttttttnaaatattattttggnnnnnnnnncattnntgtgaaaaattaaannnnttgtgcantanntaattcngacatgtaccannngttaatggtagactaannnnggggggcggggnctaggcatcatgcttttgtcagcatactcttnngcttttaagtcnactatgtnnnnactgtggtttcttgtttatccttttttccttagttggactgtaatgtat

SEQ ID NO: 9476 - DNA, 468 bp, Canis familiaris
  misc_feature (1)..(468): n = a or c or g or t
gtgggtgacagctgtgaaggctgtgcgggccctggccctgggacagtttgccgtcttttacaaaggggatgagtgtctgnnnagtgggaagatcctgcgcttggggccgtctgcctacgtactccagaagggcaagagcaagtccagagtggccaccgagggccccagtgacggcccgagcaacggcccgggcagcggcccagggctgggccccgcgctctgacagaggccaagctgctgctgagcacccgggggtcagacgcggagttgtggagcctgggctggaggggttggggggagctgggctggctctgccgccccagttctatccgggctggccaaggttccagaaagcgtctagagccagggagagccctagagaggccaaccctgtcttctccaagttggtgctctggccagaaggacttactggctagggttgggccctaagtgccccatttatagtgt

SEQ ID NO: 9477 - DNA, 450 bp, Canis familiaris
  misc_feature (1)..(450): n = a or c or g or t
tactgcttttttcatactnnnnnnagtgaatatattnnnnnnnacagaagtagnnncatgctacatgtgataaatatgagattcagatattaagtgtgnnnactgaactattcctnnaancatattcaaaaatctgtaatnnnnngtgctttattggctaaatatttagttaattattataattaattgaaaattaattattataattaatgaaaactaaatatttagttaattattataattaantgaaaattgagtcataaaataattaaaaaataatatggtgacttgaagtgtagggattgtactaaagtaactgtgcgcacaatatgtaaatgggtaactaagaaatggacaaacatccaaaacaatatattttctgaggaaacatatatgcatatacagatgtgcatttttaatctagaacttctctattaactaccatgtctt

SEQ ID NO: 9478 - DNA, 402 bp, Canis familiaris
  misc_feature (1)..(402): n = a or c or g or t
agtcagatgatgactcccnnnctcgancngcagcnnnnnnnnnncatcatcgagatgatgacgaggaggaggaggatgagtttgaggangtagcagatgaccccanngnnatgnnnnctgnnnntccattctcctacagtgaagtgagccaacggccagagctggtggcccagnnnanaccagaggagaaagaagcnnacatagcaatggnnnannncntgtttgngnanctttttnnnnnnnncnnannngnnnnnnnntccnttccnnnnnnnnnnnnnnnnnantttnnnnnnnngaattnnnnnnnnnnncttnnnncnnnnnnnagnnnnnnnnnaacacacaaaaaggnnnnnncgaaaagagtcataaagagatgaagccaaagcnntgatngaa

SEQ ID NO: 9479 - DNA, 244 bp, Canis familiaris
  misc_feature (1)..(244): n = a or c or g or t
gtgctccgaggctgagcgggcatggtcggggtagtccaggcggctctcagnngcagttagcatgcgctcaggctccaccaggaacatgtagtaaaggttccacaccagcatggccagcaggggcaggaacgtgaggccatagccaaagcctcggaaggagcggcccacggcaaaggtcagccagtaaatgagcctgcgaggggagggcaagaagaggtcagcctcctctggagggacgtgcatc

SEQ ID NO: 9480 - DNA, 425 bp, Canis familiaris
  misc_feature (1)..(425): n = a or c or g or t
cttgcaaatcnngctctttgcttatnngtgnnnnngagagcagcccnnnccctcacacccctccctcataccaaggacacacctgcccagctgtctccaggaggtgtaagggccctcttcaggccggtggcagggtgtgagggcctcctgcctcctactctgcgaacctggagaggaggccctgtgtggagccatgcccacagcagctgccacccctggctgctcaggtctgaggctttagtggaagagcgctgcatcttcccagggctgaaggtgagaaaggcagggagggtgtgtgtgtcgccccagccagtcctgggagaggggccagagcctggaagctgtggtcacccaccttccagagttgcctatccacatgaccctctgctaggtgctcccgtcccatgtcacacagagccctcact

SEQ ID NO: 9481 - DNA, 532 bp, Canis familiaris
  misc_feature (1)..(532): n = a or c or g or t
cccctcccacctgcccccagatctgatctctgggttggngacttganngnnnagccagccccctggtaaggctcnngccaccccccaagcacagcctggatnnaggcccccccagctctgccaccactgctgctgccaagagccctgccccccatggcccaacgccctcaaacagaggagcccccagcccagaggccgcagccagaaacactacctcatcaatgtggcggaggggaggcctcctggaaccagccctccattggtttctgcttcaaccaccagaacgtcatctccgtcttctcaccccgagagaaccctggcgactcacggtttcaagcagcgtcaggtgttcgttgctcgagcggctgctggtggagtgggcagtgcccacggcccgtgggcaggctccgtgggcttccccacaagctggggtgggcggaggacgaggggacaggtgctgagtgctgccaggctggagggagggagagggctgagtcgcaccaaggctgtagctgggctacttgatcttgct

SEQ ID NO: 9482 - DNA, 608 bp, Canis familiaris
  misc_feature (1)..(608): n = a or c or g or t
agcctantgtccttggggaataaaattcctttagacgagctaaaagctnnaatnnaggccagcnctcccccaacagcaccacagtngagggatgaaaccagaaggcagggctacagagacctggaacgtagcacannagggnntgtgctgccatgggtaaactgaggccannagcctcagcagagctgggcatcagggtctctgggaactctgcaggctggatgaaccctgcgtgttcacgtggcgtcgtacttgaatatctcaccacttagtgaacttccaggtggggctggggttttgctaggatgttggaaactaggccctctctcccctggcctcctctgcagagtctggcctcaattgggccatggtgtctacaagggctactcgggagagaggccctgacctggggatggggacgggggcaggcaggattttcccccaatggagaggagtcgggggtatggggaccagaggctatgaagcatctttgggaaaaagaagaggataaattgaggagggtctctaaacacatggtctggacctgtcctttgctcagggaatctacagctgcctaagccctcacttgaggggagggtccnnnngaa

SEQ ID NO: 9483 - DNA, 314 bp, Canis familiaris
  misc_feature (1)..(314): n = a or c or g or t
ttctaccacagcaactcaggagnnnagctctcccactgcaagtccttggcccnnnnngagaacctgcnnnaatacaagaaggccaagaaccccagccctaccagcaggcccgtgagccgccggtgtgcgatcaacgcccggaacgctttgactgctctgttcacttctggtggccgtgcacccagccagccctgcagccaggatacagctaaaacccccagcaaggtgacagcccaacccccttcgcccccacttccccggcgctcaacccgcctcaaaacttgatagagggcatgcctcctgcccaccctgtt

SEQ ID NO: 9484 - DNA, 611 bp, Canis familiaris
  misc_feature (1)..(611): n = a or c or g or t
gggggttttgtgtatagntgtttattcatcacattttctgtattttatgagtctacaggccttataaaagaacttaggttttttgattgataaaagtgatcacatgtcaggatgcccagacttcaggatcactgtcaatacctagtcaagaattcatgattatttagacaggtgtcaaagcattttattgtatttttccatcttaagcttcataacattttgtgaataaggcaagggttacttaaaattcctactgtcattccagcaagtgaggccttcatagttcagatattataatattcattagggatcctcaacaaatatataaaaatttattgcttcttctataagcctcttatggctaagctctaagatagttctaccaccgtattttgcctcttagccatcagcaagcataggatcttatcaggtgcaagtagagatctaaatgaattgatttaaatgtaaaagcaaatgaaaaatgcatgttttttctctttatttctgtgtatgcccttatgtacagagaccaatggtcacttctggtgattatgaagcagattaatccctaaatagcagaatatgtaaaaatcacatgtatgcatttggtt

SEQ ID NO: 9485 - DNA, 288 bp, Canis familiaris
  misc_feature (1)..(288): n = a or c or g or t
gcgccatgatccccctgggcatcagcatcgnnnnnngcatnnngagnnnnnnnggtgtgccnnnnnnnntggcctccgnnnnnnnncagggcctggcgnnnngnnnnttnnnnnncgtnannnnnntnnnnntccnnnnnnnnnnncngnnnnngaannnnnnnngnnngcncnannnnctcttnnngnnnctgggttnnnnnnnnntnnncnnnatggtcttcctcaagtggtgnggtgcccnnnnnnnnnccactggaccnnnnnnnnccncnnatcccctcnnnn

SEQ ID NO: 9486 - DNA, 490 bp, Canis familiaris
tgcacccaggatcatgtacggccacaggatcactcatcaggactaaggatgctgtcttcacagcagtctggagcaagattctcaaggggtagctctgtcaattaggctccacatcattttaacaactgacatttgcttgctttggaggaactatccaaataatgatcatcagtgagtcaaagtctggtttgaaaatgtcatatgggttgtccatatggacctatcaggttattgaaggaacccaatacaaactagcatcttaattctttcatctttgtcttcatctttgtcttcatctctattgggatgggtaaatcccaatccaaacactctcagaaccactccctctccttcaggatgctctttcatctcttttactataggtaacagcaaaaatgtcttacatataatgaagaagtttttctattatataatctaaacctttttattttctaaaataatagagtagcagcctgatgatttttgattt

SEQ ID NO: 9487 - DNA, 528 bp, Canis familiaris
  misc_feature (1)..(528): n = a or c or g or t
accatngaaaatgaagaaaanctagnnntaacaatgttcaatttagaaaagtttgagggggaaatatgcctagaagatcagtngataagatgaacatttttcttttagtgtccttgagagttcttggagtgccnngaaaaaaatatattggctacgtgaaggagtgtttcagctaaaatggaatgttacacccttaacacttgatgtttgaggagaatctagatatgttttaacattatcatggcagggaaacagagaagagaagtatttttatagtagaccttttccaaaaactgtaaataggaaaataatctacttttttcaagagcaatatttatcattgtgtgttatgttaataatatgaattatcacattggctcagaaagttgaatcttgccactgtcagaattctgagccaatataaaccttgcttctgacccattgtgacagttttatatactatttcaaaatgatgattgttgcaagttaataaagttaacatctttaaatacttgatgaaattccgtt

SEQ ID NO: 9488 - DNA, 585 bp, Canis familiaris
  misc_feature (1)..(585): n = a or c or g or t
tgagctcaacctgcctttcccatctctcatctttcatctctctgcggcatccgctaagacctgctcagcccagcttaaagagactctagagacctggttccccactgctcagagttaaacctgctcccttgagaggctggagcagaggatcagtcagtgtctattgaaaccgtttcattatgtttaatccacacagtaagcattacgacctctgtgccagggcctttattttggacacagagatgaataaggtagtccctatacctgggaacctcccccttaaaatcactgcccacccagcctgaccactttcattgcaagtagtaggaaatgataccaagcaggagatctctgccacctctgtttcttctcagtaagccaatagagattcattatgtagaaatgctaaaaggctaagattttttatttttaatttccttaaaatgtcccccagctataaacttaatatctgatattagatggactgttaagatactgacatctttatatactgaacctagaatttttgagagcagtggctatgttttaattcatttgtggggtnnnnattgtgcatggttctta

SEQ ID NO: 9489 - DNA, 585 bp, Canis familiaris
  misc_feature (1)..(585): n = a or c or g or t
aagagcattttatgttngtacctatgacagtaattttcatcattagcttgcatacttaaccctagtgtaatgacatgaggaatggaaaaaatcttggccaatgagtatttcttttatttgcttttattttttttttttttaagatttatttaagtaatctctacacccaacatgggacttgaactcaccaccctacaatcaagagttgtatgctctacagactgagccaaccaggcacccctcttttatttacttttaaaagaattagaagttaaatatttttctaataattcaaggtatgtctttcccatcaagattataagcttctcagaaactggctttgctccagaattttattgcatactcagctggcaggtattgacttctgacaaatgatgttgacaaactaaaagaggattgcgggggtgaggctgataatgtgtcaggcagtcacaaaaagaaacatacaaacaagaccaccaaaacaaaagaagctttaacaaactcaagaaaaagctgctttttattcattaattttgtcggctgtttctgtatgtttgcaaccaagaagtagcaaatgcgaaa

SEQ ID NO: 9490 - DNA, 428 bp, Canis familiaris
  misc_feature (1)..(428): n = a or c or g or t
gatgacagaaactgtaagtctgttgttnnnctggatggggacaaacttgttcatgtacagaagtgnnatggcaaagaaacaaattttgtaagagaaattaaggatggcaaaatggttatgactcttacttttggtgatgtggttgctgttcgccagtatgagaaggcatagaaaggctcctgatctggggttggaaaagctctacggtttttctgtttactcaagtctcagtgttatcctattacagcatgggtgatcactaactagaaggttatctttgatgtggaggtggaaaatggtgctttaaaaacttgtcttaaaaactttttactgccannngcccaattttgatctgcaaatcgataatgttttataattcatattaaaannnntaggccacgttttaaaaataaagaaatgaatacatt

SEQ ID NO: 9491 - DNA, 381 bp, Canis familiaris
  misc_feature (1)..(381): n = a or c or g or t
aaaaaaagaagaagaatcatcatcctcnngcccccacagatgtcnnnntgacctggggaaccctgccatctnnactgcagtgtgtaatggctcacaagatttggatgnnnaaaggaggcatcaaactttagagacaaaacccagctgtgtgagaaacaggattannnccggtgattggggaggatcaaagaagccctgcttcccccccaccccctgccaaccccgaccccctcgtgtgctcattcctcannnnnntccaatccgggttctgcgttcctggggaannngtgctggaacnnnnnntgtgtgtaaaggantgtgatnctgnggtgggacttgtccttatctgctaacacttaggtgagagtttcttgccatgga

SEQ ID NO: 9492 - DNA, 575 bp, Canis familiaris
  misc_feature (1)..(575): n = a or c or g or t
atcccttggactccagcttccagaatgtgttttcatgcccggcctttgttcctccagaaatgtgtcctttagtttccaacagatctttatagtttgtgcttcataagccaattcttcttattattttgggggactcttcttcaaagagcttgccagtgaagatttaaagacggagcaggagcttcttccaagagtnnnaagccttggctgtggacaaaacaatctcaagttgggcagctttcctcaacacaagaaagttattaatggtcatagcaccacaactaggactttatcaggaactcaaagcttggaggagaaaaaggagcaagagaatactgtaacaaacttcgtacagagttcagtctattaattgtttcatgttagatattctatgtgtttacctcaattgaaaaaaaaaaaagaatgtttttgctagtatcagatctgctgtggaattggtattgtatgtccatgaattcttttctcagcacgtgttcctcactagaagaaaatgctgttacctttaagctttgtcaaatttacattaaaatacttgtatgaggactgtgacgtta

SEQ ID NO: 9493 - DNA, 610 bp, Canis familiaris
  misc_feature (1)..(610): n = a or c or g or t
tacagaatttgatgagtgcttcaacagatgtagcagagtgtgatcttgtttgtacttttttccaccctttacttcgtgatgaaaaagctgaaggactagctaggtccgcagatgcaggtccattcagtcctactccaggccaaattggaggagcagtgaaattatctgtctcttaccgaaatggtactctttttatcatggtgatgcacatcaaagatcttgttactgaggatggagctgacccaaatccatatgtcaaaacatacctacttccagatacccataaaacatccaaacggaaaaccaaaatttcacgaaaaactaggaatccaacattcaatgagatgcttgtgtacagtggatatagcaaggaaaccttaagacagagacagcttcaactgagtgttcttagtgcagaatctctgcgggagaattttttcctgggtggagtgaccctgcctttaaaggatttcaacttgagcaaagagacggttaagtggtatcagctgacggcagcaacctatttnnnnntagtgaatttctgagctttggaagcaagaacagttataaacgtgtatacacacatnnntacttggggattttgtatagt

SEQ ID NO: 9494 - DNA, 568 bp, Canis familiaris
  misc_feature (1)..(568): n = a or c or g or t
tcagtgcaacattgcaaaagaaaaatatgctgcaatctaataattacaaggaatttttaactctatttgaaacacccattatattaagttagattttctgtttcagacggagtattcaggttatttaactttgtttttaaatggctgcatcagaaaaaaaagtatttttttttttttaattaaaatacttcatcacttgttaaaaacatacttggatctgagttgggtaaagcattattttacctgctgttgtactaccacagactattggcttttaggttcctaaagagaaaaattgcctttttactagaaagcctttgtgtattgccaatttttctgtttgggaaaatctaaggattcactgtggttagtcttacagaagaaatgtggatttgataaactagtgcctatgattttaacttatgtttgatatatagtagtaagggttttatgaatgttgattatttttctgtgccaacagcccagaattgtcacttatatgtaagcagaaagctttgagctctgcttccaaagttatttaattttctcagtnnnnnaatgttatttt

SEQ ID NO: 9495 - DNA, 523 bp, Canis familiaris
  misc_feature (1)..(523): n = a or c or g or t
gagtttcatgcaccnntcagttattgaagaggagaaagaagaagcaannaatccaggagaaagaaaaatcacacaactctcgaaaaacaaacaaacaaattctgaactattagtgaccagagctgacgtttggatatctttctcaaaagaaaacagagtttgcttccctctctggtagagtaactgttataaagtactgaccatctcaacagagtgtgaccaaaagaggaggatataagtataaatggcaacttccagaggagaaaaaaaatgttattttaccatgactaatgacagagaatgtttcctagaccataaacactatatacaaatttatttgtgacacagtgattgtctccacctgcctgaggccctcagaaacattctattagaggcaactgggcaagatttgtgaataaatttgaattatcattggagaagtctgctcatggtcagctaaaaccaggagcataaatatcttatacattgtttgcaatctcctgnnnnnntaatacgataaaac

SEQ ID NO: 9496 - DNA, 182 bp, Canis familiaris
  misc_feature (1)..(182): n = a or c or g or t
aaaaananaagggggaggagaagggaaatgtttgtcnnnaagtagntgtgatgaactatcttttcccattggtagaaattaggtttattcatagttctttttgatttggtttttaaatttgcatccttctgttagagcattgctctagttgttttnnncctatttctttaagtgtgcctacc

SEQ ID NO: 9497 - DNA, 343 bp, Canis familiaris
  misc_feature (1)..(334): n = a or c or g or t
ggctagaaaattgaagcagatgagagctangcttttaggatttattctgtcccagactgaacacacatgtggcgtttaccattgccatttttcatataaagcttctattaaaaaagagaattttcctttactttttgtnntcttcagttataaacttggcatgttaacctaagtccagttatgggagctggaggattcccagaatgagatgttcctcagcagccttctgactttcacatggatcctagcagccataggcagattctaaattaatgtcattatagcaaataaagccaaaactattactgcttgctcattccttaaaaacagtttgtgttgaaaa

SEQ ID NO: 9498 - DNA, 599 bp, Canis familiaris
  misc_feature (1)..(599): n = a or c or g or t
tgggtgtnnaacacttaccaggnntatctgaaggacacacacgagcggctgaggcgggccgcnnaggcagctgacagggctggccgggcctttggagtcaagttggtccgaggggcgtatctggacaaggagagagaggtggctcggcaccaggggaccgaagaccccattcagcccaactacgaggctaccaatcagagttacagccgctgtctggagctgatgctgactcaagtgtcccaccggggccccatgtgccacctcatggtggcttcccacaatgaggaatctgttcaccatgccaccaagcgcatgtgggacctgggcattcctctggatgggcctgtctgttttggacaacttctagggatgtgtgaccacgtctccttggcattggggcaggctggctatgccgtgtataagtccatcccttatggttccctggaggaggtgatcccctacctgatccggagggcccaggaaaaccggagcgtgctgcagggtgcccgcaaggaacagacgctgctcagccaagaactcaagcggagactgctgagacggggcctgagggcaccccattagcatccccagggggcacg

SEQ ID NO: 9499 - DNA, 507 bp, Canis familiaris
  misc_feature (1)..(507): n = a or c or g or t
gaagagtcctcagttctttctttttgcattgcagcagcaacatgaagcgggcagcctcnnnaaactatctgaatcaacccaatgcagcacccctccaggtgtctcggggcctcagtgccagcactacgaacctctcttcaagcagctgacattcaaccccctctccccccaggtctgctgggttcccccccacagtcctctcagcattccctattgctcctggctcttccaaccccaaggtgggacagggaagggagagcagttaaccagaagattgctgctgcccttagggtctgggctccctcctcaggaatccccctcaggaaggaccctcaggacatcctctcactgtagtcctctagagtagttagctctgaggcccccaagatgcttaaagagcaggcatgcatctcagagatggaacttgctgctggcttttctgtcagagggtttggggctggccagccaagctgccttgctctggcctttcttgttccctctgctgcc

SEQ ID NO: 9500 - DNA, 643 bp, Canis familiaris
  misc_feature (1)..(643): n = a or c or g or t
accntgncntctcactacccctggtgntggccgggtgnagtgaggcctttgaaagnnnnnagggggtgaggaggaaggactgcttttagagctacagagcagcattctgacctagtcatgcatctggaatgtgctcccacaggcctaaaccacaattttgttctaagaaaatttccttcatgaatgtgctgaaatgtgcatgtgctcttatattgtttcactagaagcattgtttcactaaaagcattcattttacttctgattgttttaatctgtttgccttttctgttcctaggaaagaaggttgcacatgtacatagtttattgtcaaaataaaccaaagtctgagcacattgtctcagaatacattgataccttttttgaggtaagacccaaaatagaaacaaagtatttctgaatcttttgttacagtccatgtccaaaaattaaaataacatgtttcccaggaactaagcaatcctttcctataaatcagagaaatgagtatgaattcaatctatgattgtgtatcccttaactttcagaagactggagtcattgttaaaataagggctttttattcaaacagttttgaactcaaggttctttacagattcagaacaactcatgatctaaactctct

SEQ ID NO: 9501 - DNA, 588 bp, Canis familiaris
  misc_feature (1)..(588): n = a or c or g or t
canganctgtccacccagnnggcccagtttaaggtnnagatggctgagcgagannaaannnagcagcaggtggcccaggagtatgagctcagactggcccgggagcaagcacgtgtgcgggacctgcagagtggacagcagcagctagaggaacagcgggcagagctggtggagcggctccaggccatgctgcacgcccactgggaggaggccaaccagctgctcagcgccaccaccttgcctcctaaccccccggtaggcatcccccccgccccccagctcagctggtcctaagttcagttctcacacctgcattggggtgggggggaacaaccccgtgtacttgctccaagagcaccctcatcccaggaagtctctgtcgtggtcacagctcacccaggctggcgctggcactaggcacagctctcctgccacagcctgagaggtggtaagggatagcgtgccccaggttctgctgcatggcgagggccgagaactgttccatcctgccctggcacacttatgttggcagctttcccttcctctttgtaattatgagattgttactttaagctaaaatattctttg

SEQ ID NO: 9502 - DNA, 322 bp, Canis familiaris
  misc_feature (1)..(322): n = a or c or g or t
acaaaggatcccagagtcagcggcatgacaggtgctctgctggtgccagagcaagtgaattcttcaacatgagggtattccctggcagtgaggtacaaactgnnnnnnnntcagccacaaggatctgagggtgtattttatttggtctgcatggtggttgttgaaattactgtgttctaaagattataaaacctgaattgatacctggccatctggcttctctctttgttgaaagagaacagtcgatggggcacctgggtggctcagtggttgagcacctgcttttggctcagggtgtgatcctggagtcccaggatcaagt

SEQ ID NO: 9503 - DNA, 556 bp, Canis familiaris
  misc_feature (1)..(556): n = a or c or g or t
aaagaggnnngatgtgttactcccctcggcagacgcttggcgtgggtgacgttagagnnggggcccagcgggctgccctgtccagnnngctgtccctgcatgtgctgcatccntgcgggcagcgcggccccgcccaggcctggcgggacccggttgcagaggagccggaaaagggcgctggactagcctcctccccagccctgggcagccgcgtcccaggtgtcactttccaattctgtttgcccccccttaggcattggctgtatgcctcttgtcttgtctagcagagggcatgagagacagagtgagcgcaacaagggggtgggggggggagaggcagggggaggagcaaattccccgcacggggctcgaccccaggaccccgaggccctgacctgagccgaaggcacccgcttcactgactgagcccccagcgccccaagtacacgcctcttttgtgttatgtgtacacacctgtcaccctgagctgagtaaggacgtgggggtggttccagtgccccttccccgtgaccccccaccatgaccgatcctgacc

SEQ ID NO: 9504 - DNA, 272 bp, Canis familiaris
  misc_feature (1)..(272): n = a or c or g or t
catccctcacctcnnnnnnnnngnnnnnnnacttnnnaatgnnnnnggctctnnnccagnnnnnntcagcaggagggctcatggnnnnnnnngcttcntggacctctcctttctccnnnnccnnnnnnacctttcccactnngctcnnnacttcttgattgtccgtctctgtcacatccnnnnnnngnnnnnnnnnnnnntccctanntgcccaaggggctcagaaccccaacattcccttcnnnnnnttaccttcatttttgggggtagng

SEQ ID NO: 9505 - DNA, 368 bp, Canis familiaris
  misc_feature (1)..(368): n = a or c or g or t
atccgccgccccgcccgacgtgagcctgtcccccgccgggagggagaggggtgcgggtcccactcctgggggcggccaccacccggatgtgcacgcatggctccctggacgcagccactcgcccccagaggcacacgtgtgcacacgctcccacaccctccggggcctcccgcccggtgccggggcaggtgcaggggccagcgctgccacagcctgggtcccgactccgctctgcccctcggtggcagggggagaggccgtgtctgaggtgaccctgggccgtggccgtgggaccccctcttcctcctcgagtcctcgagctgtgaggctccgctnaagtgcccctctgctnntgacgtgtgacaagg

SEQ ID NO: 9506 - DNA, 301 bp, Canis familiaris
  misc_feature (1)..(301): n = a or c or g or t
tacaatttctagctttatagnnncgtggcttgnngcctntnnnattccactcgattgggaaagaccatggcaggnntggcccnnnnnnnnnacgcttgnnnnnacnnntgnnnnngtgnnngnnnnngtgatttcccnnntctggatatactggaatagaannnnnntnacatacannnnnnnttaattggagcnnagggagaagagatttctttgtgcagattccataaagactgtgcagaaatgtatgtggnnnannnnangcagttccannnacagnnntattttttannnnnnnncn

SEQ ID NO: 9507 - DNA, 507 bp, Canis familiaris
  misc_feature (1)..(507): n = a or c or g or t
ctcgccccgaggcgccannaannagnngcaggagcctgggcccgaaagggagcgctcgcgcgcggggcggcccgggagcgccctgtgctggccgccgccgcgtcggcgcctctgctgctctgctccgggcccgtccaaatcttgcgcaacctggaagacttgtgttgtctcgcctccgcgaagccccccccgaccgtttctgccttcggtaacaccgcgcactgggtatcataacgctctgtatggttagattttgcctgccatgaggctctcgccttttacctatttttgcatccctctgagcagtgacgtgatgtgtatcacagcccctgactatgtcaggaaattagaattcagttggagtttattgtttattaagctaaaaatctgggcagcccccggggcgcagcggtttagcgccgcctgcagcccggggcgtgatcctggggacccggaatctgggtcccacgtcgggctccctgcgtggngnctgcttctccctctgcc

SEQ ID NO: 9508 - DNA, 357 bp, Canis familiaris
  misc_feature (1)..(357): n = a or c or g or t
aactttttcttcagtattgaataaagataaagactcatatatnncaatnnnnnnagannnaacannnnnnttctattnngnnnnacctcccccaaacccacttctacccccagtttaatgnnnnnnagtttctagaactcattactaagacccaggaacccaaatctgcctccaccaaactctccaagtnnngcagagaagtgcaacagagaagtatgccctccttagatggtctgttttagtgctgacaacctaagagtcctgnnnaggtattctttcttaatanncttgattatggtaatgtggggatactgttaataacgtgctgatctcataaggatnntgtgagaatgcaat

SEQ ID NO: 9509 - DNA, 406 bp, Canis familiaris
  misc_feature (1)..(406): n = a or c or g or t
gtcggnnagaccaaatgcgntcctattatctttcaactcagctgtgctcggcagcagacaacntgcaatctgatgtaagagaaaagagggtttaaaaagagagagagagaaaagagggtttctctaagtcagagaaacacaaataccacgtgatttcactcacatgtggaactaaaaaacaaacaagcaaagaaatgatcataggagagaaaaatagagatgcccaccaagaaacaggctttcccctaaggagaacaagctgatggttaccagggggaggtgtgtggggacggcttgcgtgggcgacaggcatcacggagcgcgctgtggtgatgagcactgggtgttgcnnntcagtgttgactcaccaaattctacacctggaagtaatatggccctgtgtgct

SEQ ID NO: 9510 - DNA, 159 bp, Canis familiaris
gtaaacgtagagacatatgtggcttccgtggtgatttacaagcagaagatgacatgacgtgacacctgtatgaaaatgtgatgattgagctcgctgtgtgcagcgactgaattaaaatgtctgcctctcaagacatttccacttaatagattctatatg

SEQ ID NO: 9511 - DNA, 613 bp, Canis familiaris
  misc_feature (1)..(613): n = a or c or g or t
gttctnnggctctattgnatttgtccagacaggtgctggcccagcatnnnanctgatgaaaacactctgattggnctgggtggatgtgagcagaagactatttaccagggaccctggagtatttggaagcaacgtgttaattataaacagcagggtttgagcacaatctgttctactcttaatgatgttatcttaacactgaaattgcctgaaacccatttacttaggactacattttgctctgtgaactatcccctgcgctttgaacgtgccagcagcccttgtatataagcccagtcttttcacttcctctccacaggagcctctgcagttgcttgccaaagcagattttcctaaggccaccgttttaaaagatcatagttgcaaaatataataaatagaagttttttttaaatccacgcttgtatatgcttatccttcaccctgattttctcaaaaagcaaaaaagcacaaggtagtttgatcagatataggccagctttccatctctaagcctgcttagtatctgcagtatgcctgtgtgtggtttttctggtcactcttggaattaaccacccaacctagctttttaatctgcatgatggttttcttt

SEQ ID NO: 9512 - DNA, 609 bp, Canis familiaris
  misc_feature (1)..(609): n = a or c or g or t
ggagggaatactgggnnnancttcgnatagnnnnnggcannccatacaacccttcaatgtcaaagcctgacgcttggggagtgaccaaaggaacaactgagctgatgcagcagaaggaagccacaactgagcagcagctgaaagagctctttgaaaaacagaaatttaaatctgcacagtagcctcagtggaacccatttttagtaacttctatgtttgggccacagttccccaaaataaggaaaagatggtttcaaagtgatgcttatcttcatgccaggcttcacataaaataggtagtagctgaacaaaatggaactacaaatagcacttgagaactttaaaaatatattttagaaatttacttagagtaagtataaataagtaagaagtaaatcttaagcagggcccctctactgcgtaatgtattagggaaatcactgtggccagggaaaagtaattcagatattcatccccactgccaaaagtttgcaggctagtaaggaggatgagatgtgagctgatgagacagcgacagtgctctagggaagtgacttccaagttcttttgaacttgacccttagtaagaaacaaaagttaggtgataac

SEQ ID NO: 9513 - DNA, 552 bp, Canis familiaris
  misc_feature (1)..(552): n = a or c or g or t
cagggtcagncgctgggacccgtggctcggnacgccggcctcagcccacgaggnntcaggacggccttaccttgaggggcggtgggacataaagcagatcctccagggacagggggcagccgcgaggaaggcgggaggcacaaaaatcctgcaccagctggaggttgtacaggctgtccgccacagacatggggtccttgaggcacacctctgtggggacaagagacctgggtccccagctctatgggaaggaggacggggccccggggaagcgagggcctcctacaggccaagcctcacgctaggtgccctccacaacaccggtactaggacaagctgctccttcaggcctttgcatctgttcccaactacctggagaattagtccccccaggaactcaaatctgaaagctcttcccgaccacccagcccccaccggagcatttaacatccagaatgttcttctggattcacttagtgtctttccctcccaactaggatgtgagctgcctgaggtcaggagcagnnnatactgttctcactggacctccag

SEQ ID NO: 9514 - DNA, 589 bp, Canis familiaris
  misc_feature (1)..(589): n = a or c or g or t
ttgtannncatatgtgtactcctgtgtatgaatttgtagaactgcttccaagagaagctgcacctttcattttgtaaggtcccctctacctgtaaccctataaatatttgtatatagaacactaaaatttgtagcgataggatcaacttgggaatatctgctgagagaccaaaaaagctcattttctaagtaccttggttaaagagtaaagattatttctcttattttttaaaagaagaatgcactttaacagctgcatgggctattcaaacaagcccgtgaagtgcagtgccgttcagaaatcacacttcctggaaaccgttcagaagcgagtgtagacgggctgttgcgctcactgcctggaggcggaagctcgggtgccagtcagtgtagagacatggagacgagtagggccgctgcaaaagcgcaacgtgagctcggccagaagcttccgacaggcctgcaacaggcaggtcccgtgttgaccactaactagcaaaactgacagaaacagagaaaaaagttgaagaatccttactgctggtgtgcactccctacaatagattttgcaaatggagttttacagtct

SEQ ID NO: 9515 - DNA, 581 bp, Canis familiaris
ccaacacagtctgtgggatctgcccattgatgccatgagcttctcgaaggagggactgagtcttacatttctctgtatgcctccaaatgctgaactagtgcagagccacggtctacctgacctcccagtgctttttccagagattgagattcttccaatggtacccaatagctcttgggaaaaatcctggggtctcaggtccttcagggtctcatcctcacctaattgcccacttcttctaggcgcttgtgcaccatgaggttctctggattcactcactggcttccctgactccaagcctttgtatagctaatccttggcctgcaagcccctctcccaatcccatcttcggccccacgtcctcatcacccagctgaatttctcacctttcccattccgacttagatgcccttccttcaagcagtcttcctgtccttccatgcctcttatgggtggcccgtcatctctcctaactcatcacagcacggatcacacgtatcctcctcctttttgactaatccatgagccttggggacaaggactggtttgaagtcaccttccatccccagcctagtgccttg

SEQ ID NO: 9516 - DNA, 628 bp, Canis familiaris
  misc_feature (1)..(628): n = a or c or g or t
antagtcttggtaatgtgcagattccaattcacctttctctttttaaattagaaaataatcancgtgaatggggactttgcttaattgctgcagttagggactttgctttacgtggtctagttcccttcatgatggaaacaaacaggtgcagtttctccacataaaaggcagtgggaaaatcatggccgcttttacctttttatcgcctcaatgaggtaacgtctcccctgacactgggttggcaccagaccccatcacacctaatatgtctttccacattttatctctctatgctcacactcatcttcaaagaggaaaggtttggaatttagaagagaggcagctcttctttttcgcattctcatcagaaacagttgcaaaagagaactgaatcttttccactgggaagatggaccttttatatttattgtggagtaaatataaagcaacattccaattgcttgcacatctctggacccagaagattcggcattactggggatgcagttggaacctggagctgcgagtcccaagatgaaggatctacagcaattatgcttgaaatttttatataaattattttgtcatcctaccctttccttccaaaacaaaaattagagggttatt

SEQ ID NO: 9517 - DNA, 646 bp, Canis familiaris
  misc_feature (1)..(646): n = a or c or g or t
acagataaatgtgattttgataagaactcccnnnaatgannnnatttatagtacataaattttattaagaatattgaatatgaaatattnnaantctaaattataagaaaatataaatttgcacataatatagaaattcattctgtgtgtatttaacataactttaaaactattttacatttaccagctacttcattaaaggtttttattaagcatttgaaaaaataatttagaaatatttttaaattatcaggaatataacgttctttgtttcatttaacaagttgagcctttgtaaaaaattaatatagaatgtatttttaaattaaaatatttgaatataaaataacttttatgaaagaaacgaattctcaataaacaagtttcttattatttctggctttgaactatacatagctaaactgccttaagtgacacagaaaattggggggtaatttcagaaaatatactatgaacctgttcatgtaattctgattgactactaacttctgttttatgtatttattaaagagctgacactgtagtttgttgtgagatgtttatttttctaacagagcttataacagttatgacaaggcatttaattaatgcatcattctgtttaaaagtaggtattaattaatat

SEQ ID NO: 9518 - DNA, 532 bp, Canis familiaris
gctacttcgcagtgacggagaagtgctcagacttctgccaggatgacctggcggatgatgacatcatgctgctggacaatggccaagaggtctacatgtgggtggggacccagacaagccaggtggagatcaaactgagtctaaaggcctgccaggtatacatccagcacatgcgatccaaagagcacgaacaaccccgccgcctgcgcctggtccgcaagggcaacgagcagcacgccttcactcgctgcttccatgcgtggagcaccttccgcaaatctctggcctagggcagccactgcctgcctgcagtgttcctggcgcagccctgagctcgggcaagagcgaggaggggcctcggtccctccacagcccccagctctggccacctccccaacctccagtgccacagtccccagcagcacagcccaagcagcaccagtggggagaccctgacccatgccctccagggtctgggcagttggagtccctccagggtgagcttatgtgtgatgccccatccaaccagaga

SEQ ID NO: 9519 - DNA, 445 bp, Canis familiaris
  misc_feature (1)..(445): n = a or c or g or t
ggagannatagggtatnntgtgcaagggcagggctagcagctgctttgtgactatcaatatnnnnnnaacataaatgggtgaaaggattagtgaatattaaaactnnnnnncaggagcagtttggttcagttataatctaaggaannnnnnctgaggggtctaatctatgtattgctccagatccagtgatttaattttcagaaggaaggtccagtgattaaactcgtgcaaggagatggcctggggcctgctaaaagtcaggttgcaatttacntagtattcaagacaaccagaacaatatataggacttttagaagaaacttccaannnnnnnnnnntttcacatgttagccttggggtaggggggtgggggtcttacacttctnnnnnnggttagacctgtgctgtaactctaaaatacatactggatttcaaagatttaat

SEQ ID NO: 9520 - DNA, 564 bp, Canis familiaris
  misc_feature (1)..(564): n = a or c or g or t
ggtctcaacgacctgctcaacgtgctgcagagcctgctgcttccctttgcggtgctgcctatccttacgttcaccagcatgccagccctcatgcaggagtttgccaatggccggctgagcaaggccatcacatccttcatcatggccctggtctgtgccatcaacctctacttcgtggtcatctacctgcccagcctcccacaccctgcctacttcatcctcgtagcccttctggctatagtctacctgggcctcaccacctatctggtctggacctgtttcattgcccatggagtcacccttctggcccacagctcccatcaacacttcctgtatgggcttcctgatgtggaggagaaagggaagatctctgggtgaactcccacgcagtgccccgctagggggtggaatgagtggggcagactggcctgctggggtgagtgtgaagacagcaagaccgagtgggagttttgaaggcaggccaagctgggtaccatcaggacctgcagcttccgagctccagtgagtgattaatctccagtcncggtgtcctcacctgtagaa

SEQ ID NO: 9521 - DNA, 413 bp, Canis familiaris
  misc_feature (1)..(413): n = a or c or g or t
aggtaaatgcgtttgtttaaaaaacagatgaggcaagtgagtgatttatcgttnntgannnaatatatctgatttttctccccctcatactgcagaagctagtcctttcttaagaaaaaaaagaaaagaaatgggtaactctttgttttctcactagcacactttcatggcatttcctcatcctttccgtgtagtgttactaatgcggcgcctattgtagttctctgtacgccgtgtaggattaacagactgagacgatccacctcctgcgtgggtccatccaagagatgttactgnnctgggtgggtgggccagtgttccgtatcagttatactaaccttcatttaagatatttattctaaaatgcctctgacaaatagtaaaaaagaaaaaaaaattaaaaagnngtctaa

SEQ ID NO: 9522 - DNA, 220 bp, Canis familiaris
  misc_feature (1)..(220): n = a or c or g or t
taacccccagcgtggtacatctcagactgttactctaggggtcagtgtnntgctctnnnnnntctcaagggtagtacnnnnaaanngcaatagggagagnngcnnnnnagnnnaggcacagccatctggatgagctgcanngctgattgagcgggttgtcaaaatccnnnnnnctctgcctgnngaaccagtcactcttcgtctatagaaaagctgatct

SEQ ID NO: 9523 - DNA, 429 bp, Canis familiaris
  misc_feature (1)..(429): n = a or c or g or t
gcagcaactggaatggcagcgatcggggcggggagggcaatggggaagtgtgcgcacaggcccacacacatgcacccacagacacagagggaaggggggcggggagggggtgcacagcagggcgggtaggacccccatggcccctccccagaacagcctctcctccctctcctacccgcccccgtccccactgtagaaacataagtgtgtttatattttatggccaaactattttgaattctgttgtccacactcccccgtgccctgccttatccctccaggaccacagctcccgtcctcctggcctccggtcctacccccgtgcgccccccccccctcctgtgccctccctggtttcttacgtagttgactctcctctnnnntctccctgacctgcggcccccgtttcctctctgtggcagtttcata

SEQ ID NO: 9524 - DNA, 498 bp, Canis familiaris
  misc_feature (1)..(498): n = a or c or g or t
gcagtgatatgtnnntgggagtttgagnggtttttatgtagagnngcgagtcattatttttgtgtactacctgtgatagatatgtttaaagctcatatgtananncnngnnaattagcaaacagtcctnnaaaaatgttgaaaatggtttaattcaggtcttcatgtattctaaaattatttttttanagctgccagttgagtatataatcagtgannngaaagtnnaattacattcctcatttttaaaacccatctgttgagttagtaaatgttgggtttaaagaaatagctttgataaggactttttaaaagtagatggctggtatgactttaaaaaatcaggtggnnngagctatgttttttaagtttagtttttttttttacattttaaatcatcttcattatttannnaaccaaatcagactgttttctgtangagctcccacttgcttaatacacatagattatgttggagtatttaaatgtaaatatgcta

SEQ ID NO: 9525 - DNA, 600 bp, Canis familiaris
  misc_feature (1)..(600): n = a or c or g or t
cgtatgtctatgtgctcatngtcacagnngtgctngaagactggnaagattcagnnaacatnnnnnngaagagggaatggtttaaaatagaagatgccataanagtgctgcagtatcacaaaccagtgcaggcgtcgtattttgaaacattgaggcaaggctactcagccaacaatggcaccccggtcgtggccaccacgtactcggtttcttcccagagctccatgccaggcatcagatgactgaagacttcgcgtaagaggaatggaaattggaactagactggagtgcagatcttccctcccttgctcttttcacctctcctcacaggcctcctctccaaataaggcatgatgggcagcagagaaaggggttcttgatggtgttgctgtttggtgttaagtgggctttttcttctctttttatggagggggtggggggtgggtatgtaatttgtaagtacttttgtgcatgattgctcccttccttttcacacccctacaattgtctaaagagacaaacagccttccctctggcttggattctgaagtgttcctgtttgtctcaccccagccctggccagacattttttctttgatt

SEQ ID NO: 9526 - DNA, 568 bp, Canis familiaris
  misc_feature (1)..(568): n = a or c or g or t
gggtgtgggcacttttggctannaaggcacaacatggctgcatacaggcctgggcaccggccctctcccaccccagcaagaaggtcttgtccaagggaggcttaggacacctgggggcctggcaaaacaggcccctcacaaggaaggaggcctgaggttgcacatgcccaccatgccctggactggcccatctgtgcaatccctttttcccttggcttcctggaccagcccctcagcaccctgccctgcactctgttttaaggcgcagcctgaggttggggtccctctgtatagctgactactcatgcattgctcgaagctggcttttcacattctgtcaataccaaatgcggttgccaccttccattctcgcagacaggcgcctccctgtggagttgcagttgggtgacaaccctgtacattgtagcatagaccaattctgtgtgagtatttaagtgaacatgtttacaatttttgtatatatggatctttctctccctcttctgaaagagcaatcagtgattgtgtatcttcagtgtcccatgtttcaactgcaacttctttacaa

SEQ ID NO: 9527 - DNA, 530 bp, Canis familiaris
aaattaggattaagccagccccgtaccccacaggaaacagccacgctccttctggcagtggcagcagcaacagctttagcgccagccccgagcagcctgcctatgatggcccaagcaccagcggtgctcacttggctcccgtgctcagcactgtttcctatgatcctaggaaaccgactgtgaagaaaattgccccaatgatggccaagacgattaaagctttcaagaacaggttctcccgacgataaactgaggattcgccttggagatgaaatttgtggggaggagtaccaggacaatggggttggggaatggaacttccaaaggagaccaggatcctttgcttggaggcaactttttggtcttcaagccctgcccggtccgcaggtgttgcccctgtgagcctgtgcaccacggccactgcctcccggcctggagaacacttcagaattctgaagaagatgtgaagccttcagtcttactgaggattttaaggtcaattatacttttgttgttaattagcttctttg

SEQ ID NO: 9528 - DNA, 689 bp, Canis familiaris
  misc_feature (1)..(689): n = a or c or g or t
ctcacgatcatgtgtccccagctccactcttcccagtnnggnctgttgctnncacagggtcnnnnnggtcactgaannagggaacgttttctgcaccttctgattttactnnngcagttatcattccatagacttgcctcccagagcagcgagatgcccatctggaccccaggtagcaggagccgctgaggccagggcacacacggcgctgggcctcctcctccacgtgcctccacatggggtgcaggggccacctcctcgccagctttctggtccttcagttaagtgacatctttcagagcgttttgttttgccttcggagggcctgtccagttgtgttaggaagggtcaagtggcctgagtcaggggctggcaggcgccggctcctgggaggcagaccggccatacgtggttgtttttgtgtgtccttcgattactctcatgctgcatttactgtttacatttgttttattgtacataggtttgtaaacattattgcctaagatatttgtatataacttgggctttgtagcttttatttattcagaattcatatggcatgttcatgactgatggtgtcctactctgggcagctgtataggatcatcatgtggttaaaagagaaaaaaagaaaatacttcccctcaaaaanntcttttaatgtggaaacaataaatttcacagannnn

SEQ ID NO: 9529 - DNA, 580 bp, Canis familiaris
atcatcaattatgccaagaaaaatgacctggtcgatgcgaacaacaaaaatcttgtgaaattggatcccatcctatgtgactgcatcttagagaaaaacgaacagcatacagtcatgaagcttccatgggacagtctcctgaccagatgttttgaaaaattgcagcctgcctatcaagtgagctttccaggacaagagcccattgtgaagaaaggcaaaatctgcccaattgatatcagcctagcacagagagcgtctaataaaaaggtgactgtggtccggaacttggaaccctatggtctagacccgtgctcagtggcttccatcctccagcagcgatgccaggctagcacgacggtcactcctgcccctggggccaaggacagcctgcaggtccagatccagggaaaccaggtccatcacctcagccggctgttgcttgaagagtatcggcttcctcgaaaatacatccaaggcctagaaaaagcccccaaacctgccaagaagaagtaacagattcttgtttcacgtggtcggtccggtggaaatccaggctggtaatttatatgagcattttcag

SEQ ID NO: 9530 - DNA, 578 bp, Canis familiaris
  misc_feature (1)..(578): n = a or c or g or t
cagtgannagctctggtcaagacccagtgtcnacacccctaacagaatgtagctctcagatttgcttatttcctgctatctcagaagcagtactctccagagcataacccatactgccccaatgtgaagcctatgctaagccttgccttctttctgctgagaaccatgaagaggtactatcagacatgcttattagcatttgttccccttgtcccaaatttggtttcctggaatgaaaagccatggtcatctccatttctgttgcctccagacagcacaggaaggtgaaaagcctggtaaagcatgtctgcttagatcacagaactagaagcaatgtttttttccggatgtttctagatacaaaaaggcagaaattttatttttatacttttataattttggaagaatgtgcaaatacacacatgtagtgtgtagatttatatgtacatgttcttcgtaacatttagagttatgaaaatctccttttgtgcctttgcttatggggaaatatggaggtcagaggatgaatttttaatgtttggcatactaaggaatctgtattggaaatgtctgtatct

SEQ ID NO: 9531 - DNA, 597 bp, Canis familiaris
  misc_feature (1)..(597): n = a or c or g or t
gtaaattattttacaaacaaatttaattgcaacttttgtttagcttgcttctaagaactttcnttaataaagctcacaaaacttctcagcaaataaatctcccgtaagtaggaaaaaagctagatttcgtacatgcttactttgaattaacagcaactttccataggtaaatctgctcttgcaaaaacgtgagcagaatattaaaaaataatatctttatgtttcatggttctagaatagaagccataaatgcagtaaatactgtttgctgtttatttagctacttcaagcttcatttttcacattttcaagtttattaagtttttttttaaaaaaaggcagccttggaaggcagctactatggaaaatcgaagtttgcattaaagataaaatagttttttcagctccatgaaaaaccattcctgctgaaactgctgtcgaaattgtgaagctgcatgagtggagactattgaatctgtgattatagttttctcaggtttgtttatctcgatgttcaatgcactgtgttttataaatagttattaaagttgagtaatactcagttctatgcagtgttatgtgtcattggccttttgt

SEQ ID NO: 9532 - DNA, 526 bp, Canis familiaris
  misc_feature (1)..(526): n = a or c or g or t
tcagctcgcacagtggtttcaagtgccccatttgttccaagtctgtggcttctgangagannnnaatgcactttataatgtgtctgagcaaacctcgcctntnctacaacgatgatgtgctgacaaaagacgcaggggagtgtgtgatctgcnnggaggaactgcttcagggggacacgatagccaggctgccctgcctgtgcatttatcacaaaagttgcatagattcgtggtttgaagtgaacagatcttgtccagaacatcccgctgactgaccctgctgggctcgcttgctgactcctctcaaagggacagccagcccccgttcccaagaggaggcatcggacacgggcagagctgagctggggacgccagtgggaacagggcaccccttcngnactgacttccagaaaatggttctccctttctccctgaggacaccaaattggacgacagcgagtttgagagaagaatcaantgctatccttcccctcacccctcatcccgannnnnnaagggcatttac

SEQ ID NO: 9533 - DNA, 615 bp, Canis familiaris
  misc_feature (1)..(615): n = a or c or g or t
cactgtctatgtggtgctgcgggtgagtcaaatggccctgcctggacccagnntcctgggactgaaccaccagcatctcatcgtcatggacccctgcagccagaaacagtgctgctccatcaccctgaaggacctgcaccggctccacctgctgagccccctggagagtgaggggccccctggcctggaactcaactatggctctgccgacaacccccagaccatctggtttgagctgctgaaggcccaggaactgatgcacaccatcgtcttcctgacagacagaggccttccttccaagtagaggccgagacgagtgggggaagggatgaaacgaggaaggggcccctcccaggtccaagtctgactgggaaggtctctcttgggtgctgtcatgccgttggtttggacttccccacttggctgttctggaacctgccatagcttctggcccatgtggaggccacagggcaggagctgctacaatgacgtctactgagaaagagcagtaggatcccccctgggggggcccaggtgggcactgcagggaactcacttgggcatccagtgctgcccaggnnnnagggatgcccaccnnnnnncatgctcaatgta

SEQ ID NO: 9534 - DNA, 599 bp, Canis familiaris
  misc_feature (1)..(599): n = a or c or g or t
aagtatccatatactcagatgtgctcattnntnaatttttacagaggttggtacagtcaactcatgaatgtacaactatgcttacttgtattgtacgtaacatcagcagttaaaggtaaaacagttgtagatgcttcttttggcttttgttgtcatgaccatggtactttatcattacttattccaggtatgagtcagctccacaatcgctttgttctcttttttagagggatatcaagaacaaagcggtaaactgaggaagggaccctcctcagtttcagtgtctagtggtggtgagattggggcacacagtcatttcattgcaaactgtaaggcttttgctaacttaaacgaagcagatcagaattcacatgttatacaaaagtctgtgtaaatgttgccccttcctttcctgtagtatgtatataatgctgcattctgactactgatttttctggtatttaatgtaccaatgacttgattgtacggtattatattcacttccaaatgtgcacttttgctgcttcctcttgtataagtatagtgatgctataacttccttgtagactgatcattttattccagatcactttaatggc

SEQ ID NO: 9535 - DNA, 601 bp, Canis familiaris
  misc_feature (1)..(601): n = a or c or g or t
accacancactgcggctcagacnncnnngnccntgcagcccaccctgcagcctgaaatgcagcttgagcatggagccatccagatccagtaggcangacgggctgcccatccacaacaggacctaagacagccgctgctgccatgctcagtgctggctccagccaaccaccctgttccacacgcgccctggccccacggctttgcacggaggtgaccgcacatgttctgttcaagtgcgtctgagagcctcaccgcgggggagagtcccaatgaatagaaggtgacaataacaaccaccgtccccaccagaagacccttgagtcccactgttgacgtccagagaaagagcggggaagcatagtgtggattgcattaagtacatgcggaaaatcaagaactgatatttttctctgttcaaacagctttttttaatttgctatggtgtttataacaaaaaaagaaaattgaaaaaaaaaagtggagtagcagaagccttttgctgtgtgctctgttcagtgtaatgaaaataggtatttgcaaaagacaactaacgattttgacggaaatattgcttaccnnnnnnnctagggggaaatgctc

SEQ ID NO: 9536 - DNA, 727 bp, Canis familiaris
  misc_feature (1)..(727): n = a or c or g or t
aaggtgacaaacatgatganntnnagcgggcacgtttcatctgcccngtcgtgggcntngagatgaatgnnnggcacaggttttgcttcctgcggtgctgtggttgtgtgttttctgagcgagccttgaaagagataaaagcagaagtttgtcacacatgtggggctgccttccaggacgacgacgtcattgtgctcaatggcaccaaggaggatgtggaaacgctgaagaagaggatggaggagaggaggctgagggcaaaggtcgggaagaaaggaaagaaacccaaggcggcagagtctgtctcaaagccaggagtcagtgaagaatccccaggaccatcaaaaattaaggcaatgaagcctgaagaaaatctggattctagggagaagaaagccaactcagctcccaaaagtgcagcagcaaatgggagctcttctggaaaaattgggaagcctctgagtggagctgcaaagagatccattgccgatagcgaagaatctgaagcttacaagtcccttttcacgactcacagctctgccaagcgctccaaggaggagtcggcccactgggtcacccacacgtcctactgcttctgaagcccatgctgcactccacgccatgcgggctccgtttcgtttccacgggagcaggtggcataggtgtcactgtcccctgtactctgctcactcnnnnnnnggggcaataaagtcctcctcccaaacct

SEQ ID NO: 9537 - DNA, 218 bp, Canis familiaris
  misc_feature (1)..(218): n = a or c or g or t
ccctccctccccattgcccacccccaggacccctgatgctggctaggaactgcttgccccaacaggcctttgaaggacgacttggaaaaggaggcggagaatgttggccagagagatggagactggggggggaccctctgcctggctgtcccccatagtacacactggacaccatcacctctttggaactgccagaccctggggnnctccagtgagca

SEQ ID NO: 9538 - DNA, 661 bp, Canis familiaris
  misc_feature (1)..(661): n = a or c or g or t
cnggacnactgannatactgtnnntccagggtccctgtgagctgctcagcattttcccatggctgtgtgtgcnnnnnagcagatgagcttttgcaaagttagnngcagattcnnnnnnntnngtttatctcagaaaaaaatgcgaatgcttcagattttgaaagggtataacattttatactttgggagacagctttaagagtccctggaaatattttaatttttttaatcataaaattcaagtgactgaattgcttttctcattgagtggaaaggtgtttgaaaatctaattgtaagaggagtttgtgagacctatcctcaaatatgtactatgcctgtgtttctctacaatcattcaagagacagagcagagagatttcaacagtaaagatgacttaccaaagcattccttgtttcttatcttgagaatatagatctcttgattctctgttttacgcagttgctaaattttgtaatttcaggctcatagagaaattttaagctttatgttttattctagtttgtgggatcttgggtattttgaattttaactcttctgacgtattacagtaacctcctttttgaactctctgtgctttagttttctgtctttgtgtttgtccaacaactgaaatatatgagatgtgactattataaatt

SEQ ID NO: 9539 - DNA, 545 bp, Canis familiaris
  misc_feature (1)..(536): n = a or c or g or t
gcaactccagaanctttatctgnnnctgcaggacccatanntggagccattnnacccataatgcaatntacagcaccaattccaggagctacgngacctatcaagctatctcaaaaaaccattgtgcaaactccaggacctattgtgcaatatactgggaccagtgctacaagatcctctttaggatcaacacctcagacaaacaccggatcagttccacctgccctcactggcccaccactttcaatgcccagaggtgtgcccctgcctcccataatgatttcacagagaacctcaacaagaccagagaaatctaagataaaacaagaagagccagcccatgtagcagtacctatcattactccagtacctattgtaattggtccagtagcagctgtggacagttctggaaaaataacaatatctcctatggaattttctaatattttaaataactatttttggagagactgctgtagaggatttgatgaagttcatacaaaaggatgctgtaatctctgnncatcttctaggctctgaaaaaa

SEQ ID NO: 9540 - DNA, 517 bp, Canis familiaris
  misc_feature (1)..(517): n = a or c or g or t
ctcctgtgagtaccgttcagacaagcacgangcagagaccgttccaaacgctgaaaagaaacagaacagataagagggcttttgctggaatggctgggggtgcgggttgagccgttgcacagggtagctgaacgctcccactttgtgtcttgtgttcaccctcagtgtttttacgaggccaccgggcatgcagggcagctctcccggggctccctgtcctcagcacaagtgtcgggcccctgtatggggctnctggggctccttcggtcccagcaccctgggcagtgggcttggtggcagagaacattcaagggaagccctttcatggccacattgtaagtcaagcagcagtgatgaagctttggaattctacatttggtttatggtattaaaattgacggcacctcaattttatcaacatcataacattattaagttcagtggatgcaattccaggtggcgataagcagatagtcnnnnnttcccatgtccttacaattaaacttactgcaaagtt

SEQ ID NO: 9541 - DNA, 347 bp, Canis familiaris
  misc_feature (1)..(347): n = a or c or g or t
aatttgtgtgctatgtaagtcaagcattnaaataccgtcaatagtgcaggatacacgtgttttctgatttttaagaaagtcttaaggaaggtaagtcttgtaaattgaaccatccccattaatcacactgcnctggtggttggttgctatccagcaccttaggaatgtaagtannnntatgtttggttgagaaaaggaaaaatgnnnncaaagttgaatattatctgaaaaaatggattccatatagtcttaaannnnnccnnagcttttaatctcaaaaaatggggaatttctagtattaaaggagttttttnnnnntgtttnnnnatannagtaagnnnnnnttg

SEQ ID NO: 9542 - DNA, 127 bp, Canis familiaris
  misc_feature (1)..(127): n = a or c or g or t
ggacncgtcccctcccgggggcctctccctgccgccagaattgcagagnnnggggtgggggtccctgcgcagacccgcccaatgagtccgtgggatcatcggtgggatgtccccctnnnnaggggcc

SEQ ID NO: 9543 - DNA, 481 bp, Canis familiaris
  misc_feature (1)..(481): n = a or c or g or t
gaaatgggnnctaaggannagtcctgcgaaagatgtatcctcatcantgccatcctgggggnnngcnnngccccaagccctagaatacagagcgntnnnnaaaagatgtaagcctgaaatggaaaatggaatctgcaggaacttcngnnncttgtttaaaaaaatacaatgtaaaggactctctttccagaaacactgctgtggcaaagtgctttctcctccctttcttcctgtgtaagagtatctgtatgtgtgtggcatcatctatactcacatatatatatatacaaacatatatgtgtatttttaaaaatcagagtatattctatttaaatattttctgaaagataaactgtaatagaacatgggaaaagaggaaagaggaagagaaagtgctccatcctgagcaacgaggcagccacaagccacatgtgttaagtaagcactggaaacttggctcttccaaatagagatatgatgt

SEQ ID NO: 9544 - DNA, 642 bp, Canis familiaris
  misc_feature (1)..(642): n = a or c or g or t
agnngcgtcagccnntnnggctnntcagctcagggatcttcagcagccagcagaccttnnagtgagaaaacagacaacatccgggcttgctgaggctcaggcaaggccgctgcgtccctgtggcccacttctccttggcaggaaacgccagcagaggtttcgcagcaaagctgcagtgccgtctcctctttggagctgggtttcaaacagttggaagacaaaatggaaaatgaaatgcctggaacattctgtggctcttgacacatcccctccctcctcctgccctttctgcagcggttgccccctcgcctggggtgtggggtgtctcgtccctctggcccaggtgtccctgaccccacctagtggggggctgcttcccaaggcaacgtcaggcgcagggaccgcacggcctgcaggtgcatctcttcctacagcggccgtggggggcttggtgtcgggggccgtggtggcttcggagcagcatgggcgcgcacagatgcattccgggccgactcagactttgccagtttaaagtacatacagcaggggcactgagtggctccgtcggttaagctccgtctgacttgatttcagctcaggtcatggtctcaaggtcgtgaggtcaagccctgcactgcgccc

SEQ ID NO: 9545 - DNA, 493 bp, Canis familiaris
  misc_feature (1)..(493): n = a or c or g or t
ggattaaaaggtcancnnnatgtgtatcagtgggaatagnnaagtgtnnaaggagataagctggacaccantatgagtcatcctagcagcctgggaggccagaacattnnntatatagtaaatgctatggtcctgagaattggcagggggcggggggtgccttttaagggtatccttaagtcttcctatcccacccctgtacctggcgaacactcagtaaatgttnnnngaatgattggataccctgtctgnnncaagacatggacaagtaggtnctgcggtcaggaaatgggaagcaagagaacagggctgacctgaagagcagaggctggtgcggagtcaggcaggcccattgaaataggcctcagacagcntgnnctgcccaaggtaagatagcaaccacttggctttgttaattgtactgaagctatacaaaagaatgtcctgtttttagggactanacactgaactgttcnnnnataaaggggcgctg

SEQ ID NO: 9546 - DNA, 480 bp, Canis familiaris
  misc_feature (1)..(480): n = a or c or g or t
gcgagactgtgtgctcgctgaagttcgccgagcgagtgggccaggtggagctggggcccgcccggcgctgcagggttccgcgctcggggacgccgtcttcgctcagcaccgacacgccgctcaccgggaccccgtgcacgcccacgccgccccctggcagccctcccagccccggcccagacagcgactccagctcggccctcgggacccaaaaggccggggactcctagtcccggccgcgcctctgccggcagaggcggcaaagcccctgcccccctcccggagtcggtccccctgccccgcgaggagtatttagcctagggacctgatcgccgctccctcccccaggcccccgggtccctccttatcaccatttgctgttatcatcgcggcgcacagcaggggatgccagggctgtgggaggtaggccccgccaagcggctaccccagtcacccccatcaccaagaatcanannnnnn

SEQ ID NO: 9547 - DNA, 580 bp, Canis familiaris
  misc_feature (1)..(580): n = a or c or g or t
acngcatccgaggtnnnnnntcccctgatagaagaacttggttgcgataagttcatcagcagggaatagccaggcgatngaactgcttccgggggagcccctgcgttcaggacctaacgccaaatcctgtcgccgcactttaaaaagtcatcgtatatgagataaagcctggcctggcggggtggcaggggacgagtttatcacgaaaaagcaccaggaaagagagaagggggaattcaaagccccgtgcctccttctcccgcgttgagtttgcgattgatgacagattctttgccctgcggcgtggagaggcctttccagaattgcttccccgaaaggcgaaggatgggttttaggaaaccgagactggatgaagaagtgttgaggatagcagagcccgggatgatggaagggattatcaaataatgatgggaggagtgaggagtcccaggggagatgcccggggagaccccggaaggctacggacagaacttgaaattggcggaacgcgtgctctcctggttcaggttccacggaaggttgtagtctaaatggattttgtgttttctgaggcatttca

SEQ ID NO: 9548 - DNA, 566 bp, Canis familiaris
  misc_feature (1)..(566): n = a or c or g or t
tggggcttctgaacgatgtttctgaaggggttactggactgataaaatatngaaatgtcgggggnntcatcaggaatgtcacacacggcgtatcaaactctgctgccaagttcgcagggacattatcggatggcttagggaagacgatggacaatcggcatcagtcagagcgggagtatatcagataccacgcagccacaagcggggagcacctcgtagccggcatccacggcctggctcatggtatcattggtggattgaccagtgtgataacctcaacagtggaaggagtgaaaacagaagggggtgtcagtggtttcatttctggcctcgggaaagggctcgtcggcactgtaaccaaaccagtggcaggtgccttggattttgcatcggaaacagcccaggcggtgagagacacagccacgctcagtggccccaggtcagtgtccgtggggggagttacatttgtagtttccagcctagctctgctgcctctcctcatctatgccgatgtgtttaatcatatactttctgccttaatgatgtgattttttaaaaacttgaat

SEQ ID NO: 9549 - DNA, 619 bp, Canis familiaris
  misc_feature (1)..(619): n = a or c or g or t
atgtccaaaccgnnaggccacnnggtctctcctgtagtccggtcagagacttcagagttgaccccgccccacagtcccgctcctccaacccgtcagctcctgggccccaatgcagctgccctctcaagatacctggcagcctcgtacatcagccagagcctggctcggcggcaagggcctggaggggacgctcccgcagcctcccggggtccctggtcctcctctgcccctgcatcgcgggcaccttcaccaccgccccaaccccagcccccaccacccccagccaggaggctcagctatgccaccacggtcaacatccatgtcgggggtggtgggcggctgcggccggccaaggcccaggtcaggttgaaccaccccactctcctggcgcccccccaggaatctgtgggccttcgcggggcccagggaactcctgatgcccctttccacacgtgagccggatgccgggcttcttgaaaagcaaggacctcaaccagatgccaccgaccctcagaacttcaccctgaagtccagacactgaacacaggtgtaaaaattgctgcagcttttcaactcctgggagctgctttggcaaatggtcctttttacttgccttgat

SEQ ID NO: 9550 - DNA, 530 bp, Canis familiaris
  misc_feature (1)..(530): n = a or c or g or t
tcccaagaagctnnacaacccgtacactatgaagagaagaannggtgcgaggagcagtactccgggggctgctataccgcctacttcccccctgggatcatgactcactacggaagggtgatccgccagccatttggcangatttactttgctggcactgagacggcaacacactggagcggttatatggaaggagctgtagaggctggggaacggacagctagagaggtcttaaatgctctcgnnagggtggcagagaaagacctgaagacccaggaacctgaatcaaaggatgttccagctatggaaatcacccacaccttctgggagaggaacctgccatcggtgacaggcctgctgaagctcattggatttaccacatcagtaactgccctgtggattgtggcgtacaaattnnggctgctgagacgatcctgagtcttcagccccacactctctgcttactcttccccagcaccatcaaaagcaaaatgtcgacaaaggctgtgtcattggaccatctttaaatg

SEQ ID NO: 9551 - DNA, 380 bp, Canis familiaris
  misc_feature (1)..(380): n = a or c or g or t
ggctcagtgcaatactcccggtggggtccnnnnncatggnnntnnnnnnnnagcccctnnnnnngctccccgggncagcgcncncnancgcctttnnnnngntgnnncagtnnnattgcctgtccccgcccccaatgnngtnnntatggtnnnnntgatttcnnnncaatgaaacnnnaaacctcgtgtgtcnnnnntctcnntgggggttccgtgtgctcagcccccgtggnctggggtgtgacaannnngnnnnnnncctcatcaggcacagaacnncntctctttcaaacccagagccatgggcacctctnnnnnnnnngtcctgctggccccaaataacatnnnnnnccccccggcccctatcctccctaccgccc

SEQ ID NO: 9552 - DNA, 658 bp, Canis familiaris
  misc_feature (1)..(658): n = a or c or g or t
agctgtaacatgctttccacnagcaactccacnctgctancttagatcanctccaaagcagactactggcgctccaaatgtctcagcatttgcttttggggtctaagacatcccatatacagtaaatatgattattatcctcatactagggaagagaaaaaaaaacatgtaggtgggagttacacagcacacagtagcagaacgaggcttttggaagcctaatgcactgcctctagcttcatcacagctgcatccctccctaccctgatcctttgtgaatttaagccatctctctcttctctcgccaagaaaaataaattaatttgctcaatcaccatggacctagacactcatcataatcacagaatttaaaaacccgtctaagcaaattcaataacaaaagcaggaactttgaatcacttgagtctcagtgtatttgtttttcctaatgatacctgcacacagcagggaggaataattagcaaattaatgggttcttcctctgttgacagtgcaaaggctggatgtgcatgcctctgccacgttgtaagtctgggctacaggttctggactgaaactgctgaccaatgtcacttggaatttattgaagttataaacaaatgactgtgctgcatggacaagaaatgatggagacgga

SEQ ID NO: 9553 - DNA, 612 bp, Canis familiaris
  misc_feature (1)..(612): n = a or c or g or t
cttcaagactaatgatcccacgccgtttcacattcaagcagaggtgaccatgaanncaaacttctttggaacccgagatgtgtgcacagaactgctgcctctaatgaaaccccaaggcagagtggtgaatgtgtctagcgtggtgagtgtccgagcccttaaaagctgcagcccagaactacagcagaagtttagaagtgaggccatcacagaggaggagttggtggggctcatgaacaagttcgtggaagacacaaagaaaggcgtgcacagaaatgagggctggcctgataatgcctatggagtgacaaaaatcggtgtcactgtcctgtccagaatccatgccaggaagctgagtgagcagaggagagatgacaagatcctcctgaatgcctgctgccctgggtgggtgagaacagacatggcaggacctagagcccctaagagcccagaagaaggagcagagacccctgtctacttggccctgttgccctcagatgctgaggggcctcatggagagtttcttatggagaaaaaagttgaacaatggtgagcttaatttaggccttcatccacggaaccctttaggataacccccctcctttgaccaaa

SEQ ID NO: 9554 - DNA, 248 bp, Canis familiaris
  misc_feature (1)..(248): n = a or c or g or t
tctacacttccatgatgaccagcgacaactattactacacgcacagcatctggcacatgctgctnnnnnnnagngcggcgttcctgctgcnnncgcgtgaggagcacacnaagccctgggcctgctcgcagaagctcacttgccactatcagatctgtaggaaccaccgagaggagctgtacaccgtgacgtgacgtggccggctcagagacgcctgcagctgtgatttgactctctggccaggggca

SEQ ID NO: 9555 - DNA, 596 bp, Canis familiaris
  misc_feature (1)..(596): n = a or c or g or t
tataacggggnctnnnnnngtngaggtctctgtaccagacgatnngcacctgcagggcagaaatggnntcctattgctctgtgactctcacagggctcggggtctggcgcctattggatgggtgagtagatgaatgaatggtgacttgagaaaagcttggtcaaaagctatgacatctgcagcctgaagatgggtccctgtggcaataagccctgacagttttcaatcactttacagtgtacaaagcacttgcacttccattattacatttaatcgtctcctggagcgtgcgtggaagcacttgtgaacggacctcctcagaggtgtgtgtctacagtaagtccaggctttcccactgtatctcgagcagcatcgcctaagaccactggaggatgactcctgctatagacatcaacaccgccgtggtttccagttctcaggctgtggtccatcaatcagcagcgtcgggatcacctgggaacttgttggaaatgcgaagtctcaggtcccatctggaacccgttgaagcctaaactctggtacccagatccttcaactgggggaggcggagnnnnngggtggtgttgtttttacga

SEQ ID NO: 9556 - DNA, 541 bp, Canis familiaris
  misc_feature (1)..(541): n = a or c or g or t
tgtgctcaaacctttgaannnggcactggaggattgccgtggccacacaaagaagcaagtatgtgatgacatcagccgacgcctggcnnngctgcaggagcagtgggctggagggaagctgtcagtgtctgtgaagaagaggatggctctcctggtgcaagagctttcaagtcaccagtgggatgctgcagataacatccactgctcactcatggttgaccatgtgactgaggtcagtcagtggatggtgggagttaaaaggttaattgcagaaaagaggaacctgtcttcagaggaagaggccaatgaagagacatctacagctacagctgaggagttccagacagtaccaggcgtccaagaggctccgtaatcctgtgggatcctgactcacttcacaccatttcctctgctttggcagggaggccttctctcatctggctccctcttaccacttgggagactgcctgcctccttgggattgttggcctgctccacccatctctgggggaagaggtgccagccacctgggccacaggga

SEQ ID NO: 9557 - DNA, 488 bp, Canis familiaris
  misc_feature (1)..(488): n = a or c or g or t
gtgcgaataaggagctgaaaaaagccattttggaagatatggtgaggttaggaaaagagagnggactccattcatttgaacaggttaaagccattcacatccacnnngacatgtnctcagttcagaatggcttgctgacaccaacnntaaaggctaagagacctgagctgagagagtacttcaaaaaacaaatagaagagctttactcaatctccatgtgaagttcaaggaaagttcttctcagtataatggactgtgtagcaatattatagttactcttgaaagtaatgaatcagaatgatgcagccgaaaacgaataagcacgtgaccttatgattgagccttttcctgtcccaagaggtctttaacaatattttctctatcatcactgagtacactttatttttattaaaatgatattgtaacaagctgctaaaaatatcacaaatggcaatgtaaaaatcaagacttttctcaaggactgtgta

SEQ ID NO: 9558 - DNA, 142 bp, Canis familiaris
  misc_feature (1)..(142): n = a or c or g or t
cgagaccgtattcaagcngcagcctcttggcgatgtttctcacgttctatgctaaacgtagataacttggctgaattgtggctttcccacccctcctaccccacgcgttaacagtttagcatagacactcacctgttactga

SEQ ID NO: 9559 - DNA, 627 bp, Canis familiaris
  misc_feature (1)..(627): n = a or c or g or t
tttccacagacatnctctgtttgaatctcacaacactcataagatgtagattgggcagatcatttgtaatctccatgtcttttgtggttaaagaaattggctcagtgagattatcacttaatgtcaaaagagcttttaggtggtaaagccaggacttgaatccagattttctgactcacatccagaattttccccactgataccttttagttttgaacggggtattgtatctgtggtcctcagaaatatttgaataaaaggtcctctggacattgatgacgtccaatatgatgaagtttggactggaatgtacagtggaagctgatttttattatattcctgataagaaaacaatgtatctttttttttttttcttacaaggtggaatgaagaaaaatgctgtggttttattgtatttttttatttggagggggatatactggagcccaagcagcctcatcctgctaagttattagacttgttcacagtaaagtatttagaagcttgtaacccagcactatgctgcttgaactagtggccatggaccagtacttttgtaaaatatagnnnngtgaatttctagaaaaaataagacaaaatacaaccatatttttattatagactgaa

SEQ ID NO: 9560 - DNA, 465 bp, Canis familiaris
  misc_feature (1)..(465): n = a or c or g or t
agagaccaccagtngaagataacacagacatacgggatttcattcatcaanggctacannagaatgatgtnnaccccanngcccccccatatgattcannggcaacatatgcgtatgaangaaatggatcagtagcagactccnnnngctctatagactctctcaccacagaggctgaccaggactacgactatctgacagactggggaccccgctttaaagtcttggcagacatgtttggggaagaagagagttataaccctgataaagtcacttagggcagaagccaaggataaaacacaaccaaaaggagaaatttaaaagaaacacaaatagaaatctctctctctcacacacacacacatgcatacatgcacgtgcacacacagacacacagacacacacaccaggctttgtaggacacaatcatttgatgatctggtttctagcaagttgctgtagtta

SEQ ID NO: 9561 - DNA, 587 bp, Canis familiaris
  misc_feature (1)..(587): n = a or c or g or t
cgccaatgccaaggtggnngagctnnannccgccctgcagcgggccaagcaggacatggcccggcagctgcgcgagtaccaggagctcatgaacgtcaagctggccctggacatcgagatcgccacctaccgcaagctgctggagggcgaggagagccggctggagtctgggatgcagaacatgagcatccatacgaagacgaccagcggctactccggtggcctgaacttggcctacgggggcctcacgagccccggcctcaactacggccagagctccttccagtccggctttggccctggcggttccttcagccgcagcagctcctccaaggccgtggttgtgaagaagatcgagactcgcgatgggaagctggtgtctgagtcgtctgacgtcctgcccaagtgaacggccagcgcgggcccccccagcctccttgctcttgtggccccatgaagccttcgggggaaggagctgtgcaggggagcctcgcgtacgagagacccgcctaaggctcagccccggtccccagcctacccttagggggagtctactgccctgggtnnnnnttcttgtccgtgccccc

SEQ ID NO: 9562 - DNA, 515 bp, Canis familiaris
  misc_feature (1)..(515): n = a or c or g or t
gtgctcaatggcctggnnnaacagctgtggnancaggaccaggtggcggctggcctgctccccagcgcctctgagaacacccccagctgatccctactcccaactctcaggcgacctaaggaagagggcggcaaccaggtcctaaggccgaggcaggaatatcgatggcatcctgagggctggccagaggggcctgtcaggagaatggtgccctgagaagcctcctgtcccagcagcaccttccttgcagaattcatggcagtgagatgggggcacaaggctctgtgggccaggcgactgagggcacgtgggtgccccccggccttctctctctgccctgggtgtgtgtgtggggtctagactccagaagctgaggaactataggggcagggcccactggcctcaagcttctcccccaactgcctgttacccactccctttctgctgtacccagagatggtgactgggaagagggttgtcccagccgggccttcgatcaagagcctgtattagtt

SEQ ID NO: 9563 - DNA, 548 bp, Canis familiaris
  misc_feature (1)..(548): n = a or c or g or t
tngacttgaggtgtctgctattaagagaaatgctctcacctggggttggttgtggtaatccagtgtgcaacaaaacttgttgagctaaggttttgacttgcttgagttgagtatgaatcatttgctttggttcctgtgtattttatgaccctgttggtgactttccccccatctcctcccgagtgtgaacttgtagcatgattgtacaaacctctgtgtagaaaatggagatttcttgttctccgagatgttaagctctagccaatcaattctgtcctctttagcctagttcgtctgaacttaatttcttgttatatatttaagcttttcctctacactctaggctttgtgacctcccatggtcaggtggagaggaagctgcccccttgcagaactgtactatcaccatttttctttttaaaaattattatcacaggactgattgtacacagggcttgtaataaaatgttaacactgtgctgtgaaaccacaatggtaaatctccattgaaggctacttcaaaaggcacctgaaagtggagtgttaca

SEQ ID NO: 9564 - DNA, 551 bp, Canis familiaris
acagagacacacacgcacacacccttcacttaacaaatgaaagtgaaccttctgtgttgctccaggataagagggagaacctgcttgtcacaggggatctttccctgccgtccagccaggcccaccccaggtcccagcccctgcacacttccgggagttgtatggggagcctcaggctcagagggccactggcgcatggactccttcccctcttccctcacttctgcttctttggggaaacaggtttagcaatggatgtggacttggaagcaaaagtctcaattctgctgtcaaagggatgagcagattttatggctggaattgggattgcggttcttattgacttcgccctttcgtgtttactccccgccaagaccttggttctcttcttgcatggcctccctcctcctttcctgcacctgcccccccttccctcctgccaagatgctgaagggtggggtgatgatgagaacaagcagcagtacaaaaggaaaagaaaactatataccctctgtgtattttcaacatgtagctgaagaggcctaaattag

SEQ ID NO: 9565 - DNA, 590 bp, Canis familiaris
  misc_feature (1)..(590): n = a or c or g or t
cagctcactaactacaagtgccaactttctaaaggtagaccctgtgcagttttcagacccagaagacaagacctaccaacacatcagaaccttggtnnaacatttctcctccgcagtaatgaagtttcacagaagagtacctgttccagaggaacattttatgcttccagaccacagcttaaactttatctcgaaagaacttagctgtctcatattcacttaaaacttaagcagaagaaaaattcatttactgaggccaactagcttaatgacagcatcttatgtttcacagggcttcctacctttagaaaagaaatcctcacacagctgtgataagagtagtagatgaagattattttattacaaaataattccgaagactgagtgccttcatttaactaagttgaatgtaaaagtcaatttgtacttttttataaatattactcatttagaatttgccttcatgattgtagtttatatttcaggtaccttaaagaggtcactggactctataaagttgcctttaaacatgaatctttgtaatactaaatgatctttttttcttccccctttactgtaatattcctatt

SEQ ID NO: 9566 - DNA, 377 bp, Canis familiaris
  misc_feature (1)..(377): n = a or c or g or t
cagtatatttattgggattgattctgtatnnnnnnactgtgtaccnnncnctcccatatnntgcaaagcatagcaactgtgagcttttaaaaagtgacaacatgtnnttttnctcctccatcctnnagagatcaggnnctaattgcttgtttccagggatnnnnntgaagacttggatcctggaaagaagcagcgagaaactatccttaactcaaaacttcctaggaaaatcataaaattggtccattcaaagggtagagttggttccatgatgctattgcaggaggtagcatatcaaatgattcataatataaaataatagtttcattgtaaatatgatatttttcataatctgttttatcatatattaagactca

SEQ ID NO: 9567 - DNA, 602 bp, Canis familiaris
  misc_feature (1)..(602): n = a or c or g or t
tcctgtgatggtagctcagccagtttatcagcaacctgcatatcactacnaggccnctgcacagtatctaccaggacagtngcagtggggtgttcctcagtctcctgcctctactgctccattcttatacctgcaaccttctgaggttatctatcaaccagtggaaattgcacaagatggtggatgtgtccctcctccactgtctctgatngaagcttcagttccagagccttattctgatcatggagttcaagcaacatatcaccaagtttatgctccaagtgccatcgctatgcctgcacctgtgatgcagcctgaaccaattaaaacagtgtggagcattcattattaagacaattgggcagctctagtccaactcaactgatttcttgtccaatgatccttgtgtggccgagatccagcttccaacgaaccggctagaagctgcccgttgtgacacttagggttagttaatacctcgccatacttatttattccattataagctgtctaaatttgatgaaatttgctttttcagctgttctacaaaactgtttaggtagttgtggcatgttggtttgtttatgtgttaatctaactgt

SEQ ID NO: 9568 - DNA, 445 bp, Canis familiaris
  misc_feature (1)..(445): n = a or c or g or t
aaagtaccctcatgatgtggtgaaccannnaagctgtnacgaggccaggaatcactacnnnnnnnnngtcagcctcatccccannnnnntggacttaatgaaagaatggatcgcccactcggagnannngccccgcaaagcnnnnnagcatgtgagtgagtcccaggcacgccaggaagccatcggggcggnggccactcatccttnnnngaccacaggcacccagcctcggttaagaaaacacaannntannnaacttacaaangacagccccaaacctaggaggaatgacaaaggatgttcaaaacctcccnggagaccacctggcgggannnnnnnnctcagagctgnnaannnnngtcccgtacagtgctttgtcacttaacttggtctccactgnctgatccattctttggcacccacnnnncccgccactgatgaaccc

SEQ ID NO: 9569 - DNA, 528 bp, Canis familiaris
  misc_feature (1)..(528): n = a or c or g or t
ggggacagctgtggtggggtggctcatcccccctccaccctgtctggggggcccgnaggcatcttgggcatcctcccatcctccccccggctccgcggaacgggcgcccacgggtgcctgggcctcctcactgcacggcggcaggggctgcaggacgagggcccggcgtcaaggccgcctccacccgctccacccctgcacaggattggacgcaggcctgaggcggggacccggaccccaggtgctgacaggagtcctgtcccccgcagaccaccccccactcagctgccagggaaggcctcacacacaggcccgactcagtgccagtcctgcgacctgaagggacatgactggggctgcccgaggggtgagggtagcacacgtcagaccgcggtggctgtatgcagacggcgcagtgcgtgtgtcctgtgcaatgtttgggcgctgctttaacaccaaggaaacagggcccctgggggactcagcggtgagcatctgccctggactcagggcgcgtccccgggtcct

SEQ ID NO: 9570 - DNA, 586 bp, Canis familiaris
  misc_feature (1)..(586): n = a or c or g or t
gattnnatttctttaaataaaagtattagacatttctaatttctaattaatttctaatttcacattttctctgtgtagaaatgaggacacttgggttgaacttggctgtgtttctgatttcgggctcttggcaaaaattcagtctgattagatcatattatgctcactgtccctcatgtaaagttcattattgtcaaaattaatccacccttactgtttcataaggaggctctctgccttttgggaatcacgtgtaaaagcacccagctgctgtgcccaggacaataccgtggcctcacgactgtcattcttcacacccagaatgcttcaggaacacttggttattgaatttatttaaattcaatagtattttatgtcttcagtcaccttgtctcactctcatttttgtaaagtaagattattgttgatagtttgaatatttatagatagatttttagtattacaaattcctttctaaaaaatttgggttcatattttaaaaacatattaagaacactgtctaataaacttcactgaactaatactctttccatgaactcttcccataaactgtgtttgtcttttg

SEQ ID NO: 9571 - DNA, 522 bp, Canis familiaris
  misc_feature (1)..(522): n = a or c or g or t
ctgngagacgctctgcacaacctcactgacgggctggccataggcgncgccttctccgacggcttctccagcggcctcagcaccaccgtggnngtcttctgccatgagctaccccacgagctgggtgacttcgccgtgctgctccgggcagggctgcccttccggcggctgctgctgctgagcctggtgtctggagccctggggctcgggggtgcagccctgggggtggggctcagtttgggccccgtccccctcactccctgggtgttcggggtcacggccggggtattcctctatgtggccctcgtggacatgctaccagccctgcttcgtcctccggagcccctccctacgctcgacgtgctgctgcaggggctggggctgctgctggggggcggcctcatgctcaccatagccctgctggaggagcagctatggcccctggtctctgatggctgaaggggggcagtggaaaggcgtcgggtttgcccttccttccccacaaccacaggaatggaggcg

SEQ ID NO: 9572 - DNA, 680 bp, Canis familiaris
  misc_feature (1)..(680): n = a or c or g or t
catctggactccacaatctcctcttnacaacccagagtagaagttagaggctaagaacccaatcagcttaaagaagacaagtcaaatatagataaaatagcaagattatacttgacatatctaaagaccctgatagattgatggacagaggagattttacccaggttttgatagctcacatctaaatagatcacatttcttacgctcatgattttagaatgtctttttggctattatgctttgaaattccttgtatagaaggaagatttaaggaataaaggcattgtgaaagtagttaaaaaaaaaaaaggtaagaaaatttcttgatgtgaaatgaattttggtgttagacctagttggatatcttgtgtgcaaagtgatggacagaatttcccaggcaataaataatctcccaccaagtcttattctaaaattgtactgatataaaaatagcctgattggaataatgaaagtgtgaattaggttcacgctttggtgcctttgctgggacaaaaaagagattttcttgaggattgtcttgttctcagtttctcatcaacttaccatgtgatacctcagaattgtcctcttggatcatttcctacctgcttttggcagtgttaatctgatgattttnnnnnntaaagaaatgaacagctgatgacagaagaaatttggaa

SEQ ID NO: 9573 - DNA, 697 bp, Canis familiaris
  misc_feature (1)..(697): n = a or c or g or t
cttcataaatactctcatctctttccaggggaaaatttgaggatggggaactcaggagganntgngaagcatgtagttatctagatctggacaatttcatgtttgttaaactggaactttggctagttcaaatttgaatgtaatttcacccattttctttaaattttgttaacactaaattcaagtcatttattcaaagtctccaaaaagatgattttaatcatctgtttatatgcatgggggtctgatctcagatacactaaatgtggagtgtaggaactaaaatgaagcctgctgtgtgaaactactttcacttagggttcactggtttttgtaccaatatttttttatacacttcagtgcaagtcttgtcagttaaccttactttctgagtaagctaagtaacccaaattacatttctttaaacctgtttactactatggcactttgataaaatggtcagtaaccaacttctttactgacaaaaggttccatgtaccatgtgctggagcatctattttaaatgtggctatctgtgaatggtaatgttttccttcatgtaagtgcctgttcagagtttcaaaatttaaaaatgccaaatattttcatggtcacttgcatgtagtaatctaggaaatattcgaaattttgaaannnnnnttgtatttaaccagcctcaaattgtgcaaccatgatg

SEQ ID NO: 9574 - DNA, 547 bp, Canis familiaris
  misc_feature (1)..(547): n = a or c or g or t
ccatgaagggnnacatggagtggagtaagccccggctgctgagacggatcacagagctggaaaaaaaaataagttcgatggaaagccccaaattacatgcttcagaagtggtcaaggcaaacgctgtggtgcactctgcgtccagctccactgtgtccaggcagccacgaggtgaccaacacgaggacaacgagcatctgcgggggactgtgcggagcctgaaaggcgagcggaatgccctacagatgcagctgcaggagaaagatttggagatgaagcagctgctccagacaaatgctgacctgcagaaggagctggaggacatgaagggaggtgaggaggagagaagaggaagagaggaggctctgagagaggaaattcaaacgcttgtgaagaagtgtcaagaactggaagagattaggagagcagagagagacaaccccgtggaaatgagtcctgaggtatggctcagctgggcttcagacttcctgtgcaagtgccgtggggctctcggcctgagcgggacattctgctgggttggtcccct

SEQ ID NO: 9575 - DNA, 530 bp, Canis familiaris
ttatcctgtacctagaaagagtgcagaatgcacacttttaaaatttaacacctgcccatatccccgtcttcctatcccctcttgttgattgtggtatctgatcttaaatagctaggctgaaggcacacggttccctccaaaaaccactattgataccactgcaaaaacaagccagcaacaaagacaatgtggagaggttggcttgcttccttctctcctaactgcatgttgaaaaataagcctttattgatcttaaacatctgtcagatgagtcatacattgggttatttttttatatacatgtatacacacaatatttcaaattgaaagcaacatctcaatggattcaaagctattaaatgctgttgtctataacagactaggaaatttataactgtaaaaatgaaacaaatgcacatattgatatttaaaatgcataatgaagaaaacccattggtgttgtgtttttcttgtatgccaataattaagccactactgttggcactgtttggttttctattttaacactg

SEQ ID NO: 9576 - DNA, 521 bp, Canis familiaris
  misc_feature (1)..(521): n = a or c or g or t
agtactgccagctnnagagcgcgcacctggtggtcgtcaactccagggannagcagaagttcatccagcaccacatggggcctgtgaacacctggatgggcctcacggaccagagtgggccctggaagtgggtggacgggacggactacgagaccggcttcaagaactggaggccggagcagccagacgactggtacgggcacgggctcgggggcggcgaggactgcgcgcacttcacggacgacggccgctggaacgacgacgtgtgccagaggccctaccgctgggtgtgcgaggcggcgcgcgatcccgccacctaggggcctcctctcccctaatttatttccacagtgcctccccctgccccgtgatccccccgcccctgtcccggggaggggggcctcctccacctcctctgggatggctgatccaggattttaagggaaggggacaggacgacgtctgtgattcgcagactcacgtttggaagggtggggagannnnntccaatatcacttgcc

SEQ ID NO: 9577 - DNA, 558 bp, Canis familiaris
  misc_feature (1)..(558): n = a or c or g or t
acttaanannngaaactcaaatcaagtttctagttgtgatgggcaaattacatcacttaggattgtaaagtaagacattgatgttttagtctcttacctctttagtctaataccatttaatttatacaaacctgatttcaacggctctgttgacttgctttaatataaatctgcagataaccctgtgaattggtcaaatgcactaaagatctaggtatttttattcctagctctcaattttgcctccagtgttagtccagcagatggtaagacaacccatttgggcaaggacttgctcccaggaggccccagccatctgccttaagtgcagggtcttccctctttggaagatcttttttataagtttaaagtagactaaacggtgaagacagggagtatttaaaggttgctttaccagtatgaatcttgtctttctggcttaaaatctcagagactgtgaagttagttattccacaagaaggtaaactttaatgcagagatagcctcttgtatataaaannnnnncttgttggtgaagtgtctttaaaattgctatat

SEQ ID NO: 9578 - DNA, 613 bp, Canis familiaris
  misc_feature (1)..(613): n = a or c or g or t
cacnnnctccaaannaaaaaccagaggtnggatcctactcggnnaataatagcaatggtactngncttctggctaccatggngctgcagctgaacatcactcacaataaggtagcttcggttattaacatcaaccccaatacaactgacttcactgggagctgccagccacagactgccctgcttagactgaacagcagcaacataaagtaccttgactttgtctttgctgtgaaaaatgaaaatcgattctatctgaaggaagtgaatgtcagcatgtacttggttaatggctctgttttcagcattgcaaacaacaatctgagctactgggatgcccccctgggaagttcttatatgtgcaacaaagagcagactgtttcagtgtctggagcatttcagataaatacctttgatctaagggttcagcctttcaatgtgatggaaggaaaatattctacagcccaggagtgttcgctggatgatgacaccattctaataccaattatagttggtgctggtctttcaggcttgattatcgttatagtgattgcttacctaattggcagaagaaaaagctatgccggatatcagactctgtaatactaatctat

SEQ ID NO: 9579 - DNA, 224 bp, Canis familiaris
  misc_feature (1)..(224): n = a or c or g or t
tgtaggtgctctgncntcacaaatgtccatgtctacttnnnnaagaaccaaatacctcaatttttttgtgtttgagtactgtaatatcctgtaaatacatcctaagcaggtttgtgttcagcactgatggaaagcacnnnnnnttgttttttttttttttagttgtcagcagttgtatgtttatttatgaactgaaataatatatttcttcttttaagaagaca

SEQ ID NO: 9580 - DNA, 634 bp, Canis familiaris
  misc_feature (1)..(634): n = a or c or g or t
tccangtnccgactatgnnaccacagtgcantgtactcatgnngctgtctaccctctgtacactattgtatttatctattatgcattctgcttggtattcatgatgctactccgaccccttctggtaaagaagattgcctgtgggttaggaaagtctgatcgatttaaaagtatttatgctgcactttacttcttcccaattttaactgtgcttcaggcagttggtggaggccttttatattatgccttcccatacattatattagtattatctttggttactctggctgtgtacatgtcggcttctgaaatagaggaatctcttccatatgaaatgttcgtgtacttcaattagcactctataaagaatcggaatagggacctgaatcaggaaatttagttctgaactgctatgatcttctggtgagaaagaaaagacttattgttctcttcagccactggttacttcatgcctatggaataatatccatttccagagtggataaactcgagcaagatttgccgcttttggctttggtacccactccagctcttttttacttgttcactgcgaaatttactgagccttcacggannnnctctgaaggagccnnnnnncactgaatgtaaaatg

SEQ ID NO: 9581 - DNA, 402 bp, Canis familiaris
  misc_feature (1)..(402): n = a or c or g or t
cgtagatgtcaaggctgttcattccagagctcccaggannnnngtgnnagcccagccctccatagtnngccccaactccagctccatgcaggcttcaaatgattgacactcacctgggctgcactgccaccactttctggggagtctgagcttctgctcgtaagcatgttatagaagatcaagtgaaacagcaggaaactggagatggagagagagagggtcacttcttaactgtgtcccatttaatatgggttcaatatatgtgcatttggattgaaagattaggatgaggttattagggtagccctcaccccgtataactgggtccttacaagaagagattaagactcggacaaacacggagggacagccacatgaggacactgggaggagacgtccatc

SEQ ID NO: 9582 - DNA, 520 bp, Canis familiaris
  misc_feature (1)..(520): n = a or c or g or t
tctcccctgtagatctatctggnnactcacagcagtgctgctgtgctgacagtgtctccccgaatcgtgtggcagagcattcaccggcttcctctcgaataactgccattcagccttccgcagaagcccacgggggctgaacgccagtgagctnnagcttcttgttcctttgcctccttcctccgtgaacagattcctcggtctgggccccgcgccgccatcagagcagcctcccactccagtgtgcaaagtcacactttccggacaactgcccactgttgactgagcctcagtggcaggtggggaggggtgaggttgaggggggatggtgggtcaggattaggtgtagagaccacggcggaggcctgttctgcaaggcaggtaggggactccgtggctccgctggcgcagagagagagggacaggtatcgttacctggggatggttttcatttggagacaaaaagcttcaaaagtctggagctnngggtgcagagatttgcnnnagaaccctttcctcc

SEQ ID NO: 9583 - DNA, 660 bp, Canis familiaris
  misc_feature (1)..(660): n = a or c or g or t
gaatttttgcatagatgatactcttannagtaactagaatgagttatgagtatttnnggtaattattagaatttataataacttttagacatggatttcatttgaaaaagctacttggaaattgcagcaaatgtgataactctagtgatacacaaaatttttttctgggaatatacattactatttaattgttataaagattttggaagtctttcaaaatacatttaacattttgagaaacacaccttctaatttatttccataaggctgaatgaaaaactcttatttacaaaatgtgagacttggtaatttataaacaagtgttattcagatttattagcaattaaaatagcaatttagtattctttggtcactggttgtgcttaatttgaaggggattaattaatatctctaggtaattcccttaaaaatgttaaatgtttgtatattttatttgtatgtgtgccagttcaaagtatatgcaagttctaagcaataatctgcatgttacacaaggttggccttcctttgtcatgacaaattttatttgatcttgattttaagaatgtgcataaaatcaatatcctatatatataaatggtccctcnnncccaatgaaaaccgtgaaattttcctgtgttagaacactaatgtggtgca

SEQ ID NO: 9584 - DNA, 486 bp, Canis familiaris
  misc_feature (1)..(486): n = a or c or g or t
tagcatactttgacattttaaaagttatattaattnngtnnncattttgnnntgctgggcaaactnnaaaaaaaaaaaaatnntacatgatgnnnttgcatttgattcacagttaatcaggcattttgaaagctaattggataaaataccataatatggttgaaatttggtaacattttaatgttaatttttactctactgtgaaaagttttttatatgacatcacaccctagtttatttttgtgtcttagtgtggatttacaaatttactacaggtatccngagccaggaacacaatcaggtttcaggccagtttgatactggctattcttaattctcatgagtgtaggactttgaactaaatgttatgtcagtgggactgtgctgtctgtggaacttaaaataatcattttcttcagatttgaaggagagtgataaaatttggagtcataggatattgatgtacaacttaaggattaaattttt

SEQ ID NO: 9585 - DNA, 527 bp, Canis familiaris
  misc_feature (1)..(527): n = a or c or g or t
gcccacgcatgcgctccgagtccagctcgccaagaggcancagcgnnncccacgcatgcgctctgagtccagctccaccaggaggcgccagcgacgcccgcgcgtgcgctctgagtccaggttcacccagaggcaccagcgacgcctgcacgtgccctgtgagtccagctccaccaggaggccccagcgacgcccgcgcgtgcgctctgagtgcggctccaccaggaggcgccagcgacgactgcgcgtgcgctctgagcccaggttcagcagcaggtgccagtgatgcccgcacgtgctctgagtccagctccatcaagagattgcggcggactggcaccaagatttnnnnncctgaaggcctcctcctcgtctgtcccacgctccctccgagggcgagctagcagaattattcttaaacataacaataattacgatgaaaatgcacacttctgtgctagctggtcccaatatggaatttccctgtatgacccatcnnnnnnacatcagctccnaaannntcaatg

SEQ ID NO: 9586 - DNA, 501 bp, Canis familiaris
  misc_feature (1)..(501): n = a or c or g or t
cagggacaggtcactcaacaagacctnnataccattgtgaacactcagcatgagatnntgagacaagtaaatgaagtgaagaattccatgagtgatactgtcagactggtcagcggcatacagcatcctggatctgcagggggagtttatgagtcaacccaacacttcaatgacatcaaagagcatcttcacattgtgaagcgggacatcgataacttagtgcagcgaaatatgccattgaatgaaagaccaaaatgcccagaactaccaccatttccatcatgcttatctacgatgcacttcgttatatttgtaatggtacaaacggtgttattcattggttatattatgtataggactcagcaagaagcagctgccaaaaaattcttttgaccaccattttcatatgtgtacatcatgtatgtatgtacannnnnnttgtctttttgagggaatttaagtatttaaattgcttcatagtctaaattattaaattttgta

SEQ ID NO: 9587 - DNA, 299 bp, Canis familiaris
  misc_feature (1)..(299): n = a or c or g or t
acagggtcggtnnnccaagaagannnnnnnnnnnntnnngcacatgcttaanaatgcnnagagtaatgnngaacntaagggtttagatgtnnatnnnnnggtcattgagnnnanncaggtgaataaagcccccaagnnnnnncgtagaacctacagggnncatggccggattaatccnnacatgagctctccctgccacattgagatgattcttactgaaaaagagcagattgttcctaaaccagaagaggaggttgcacagaagaaaaagatatcccagaagnnnnngaagaaacaaa

SEQ ID NO: 9588 - DNA, 359 bp, Canis familiaris
  misc_feature (1)..(359): n = a or c or g or t
gatatttgcccagttctttttaatggggttaataatggacatnnnnntttaaggtggttgatggatttagccatatatgctgctaaagaaattgtctaccttttcccctcacctcttccatttatgtaagattgagattagagggaaagcattttctatatcaattgtgtttgaactttgaagaaggttatttagctagcttagtgtttaactaaactttttttaaatgaggccaaggtctaatgctgttttgagattctgaaattaaatggaaatacttatttcagaaatgcatttaatgctttttttcttgtgacagttacgcaaattagcttgaactccatatnnnnnngagttat

SEQ ID NO: 9589 - DNA, 545 bp, Canis familiaris
  misc_feature (1)..(545): n = a or c or g or t
ccccagctcagggagagttttcactcggggccctcccctgccagggnnnnaagggggaagcctgttgtcccacnnaggcgttccagaagcacgtcgggaagggtatggcatctgtgccttgggtggctcctgggtgctcctcggcacaggtgtgtatggctcccatccttgcccaaacgcagcccatcctggaggggcagccagtttgtcccatcagtccccactccccactggcttctggtagctctcgcatgcggttttattaacaacagtctagaagcgatgctttagtggcctaacccggagttaaatactactctttccagcaaaatccggcagctcaccccgcctacaggaggcactgattagtctactaacagccaaaggcccacacaggaggggctgagccccccagggcggctggcaggtgtcaggtggaaagaaaccatttgcttgtgagcgtctccacctgccggtgtaggctcagccatgccccatccccaagccctcccgcacccttgttctccctaaagtggaattgttga

SEQ ID NO: 9590 - DNA, 255 bp, Canis familiaris
  misc_feature (1)..(255): n = a or c or g or t
gtcccccccannnnnctcctnnnnncnanagtnnnnnnntnnnctgtgtnacnnngccggcccctggtttggaggggnnnnnnnnnnngnnnnnnnntnnnnnnnnnnnnnnnntcatnnnncctcttcnnnnnnngggggcannngtgcctcccctccctcttagtgtttgctccctgtgtggccaggcagggaggnnnnngaannnnnnnnnnnncccccttgccctccggcnnnnntttcccccaccnagtc

SEQ ID NO: 9591 - DNA, 602 bp, Canis familiaris
  misc_feature (1)..(602): n = a or c or g or t
tatcaaggggatgattngccgatgtgnnngagaaccccnatnncctctaacccccattgctgtcttgccccgatttggggtgcngagatnnnagtcaccgtnctgggctttctcctggagatagctgggggttatgggtggcttacaaggctggggcatggcaaatcaggggccagagagtggggagcttgggactcaggtctgtaactgcccagccccctttctctgctcttgtttcactccaccatcactcactcactctccactcccccacccaggggaggagactgatgaattcctcctctctttcccacaaaagacagacccagtgagtgaatcaggcaaagtgcttataatgtgtgttgtgtgagcgtggccttgggagaacatgtgtgcgtcagggatgaggtggcatttatatgtgcagcaacccttggtatttccctttcttggtggctctggagtgtgtgtgtgcgtgtgtgtgtgtgcgcgcgtgcgtgtgcctgagtgtgtgtgtgtgaatggagtatgtcagtggtttctacttcccctgggatgctgacccaggaatagtggacatggtcacagtcctatgtacagag

SEQ ID NO: 9592 - DNA, 684 bp, Canis familiaris
  misc_feature (1)..(684): n = a or c or g or t
agaagaaaattattgatggagcacatcttnaagctacannagntctgtancagcatggnnaaactctgcattgatggatatgaatatgcctacctgaaggcaatagtactcttcagtccagatcatccaggnctagagaacatggaacaaatagaaaaatttcaagaaaaggcatatgtggaattccaagattatataaccaaaacatatcctgatgacacctacaggttatccagattactactcagattgccagcattgagactgatgaatgctaccatcactgaagaattgtttttcaaaggtctcatcggcaacgtacgaattgacagtgtcatcccacatattttaaaaatggagcctgcagattataactcacagataattggtcacagcatttgaaggctgaaatagcactacaaaccttactgttccccagaacacaagaagataccaaattgaactcattgcttccagggtatcaggaaattttgactttaaagagtaaccaaaaacccaaggtgtttttttttattttaacttcttaagaatttttttaagtgactggcaggtagcaggaattagaatttcccttcctgtcttatttaagtgagtaagaaatactatgaatttattcttggttaagangacaccttaagctannnnnncttggcatctaaacta

SEQ ID NO: 9593 - DNA, 686 bp, Canis familiaris
  misc_feature (1)..(686): n = a or c or g or t
ccatctanctnctcttctactcagccannatcgaattttcnnnnnnncatcnnnnngtgactggtcccacagccaccgctaacatttttgccacctaccttcctgaccgcttgacgttgtggatgggcttcctggatgaggtgatagtgacagggatactccagctatgtctcttcgccatcacggacaaggagaacaacccagcactacaagggacacaggccctggtgattggcgtcctcattattgtcattggagtgtccttgggcatgaacacaggctatgccatgaacccatcccgggacctgcctccccgcttcttcacttacattgctggctggggtatacaggtcttcagggtccgggactggtggtgggtgccggtggtggcaccgctcctaggtgcctacttaggtggcatcatctacttggtcttcattggctccagcatcacacagaggccccagacattggagaactccatggtgtatgaagaccgcagaatacccgtgctgcccaagaccatgcaaatcccatccatgacctcttccctcacccctgtctctgtgtctcccgccaacagacccnnngcccagactgtcccacccttaagtgaccccatccacctagagcacttctaagtgcttacttctaagtaagattatttgtgaccctatccccccnnt

SEQ ID NO: 9594 - DNA, 502 bp, Canis familiaris
  misc_feature (1)..(502): n = a or c or g or t
gcnaaacacatatatctttcattatttataataaaaatgttgaattgtcntagctcagttaattcaatatgtagtattttttaagataattttatatctgtgtaccaccccatatatttcatattactgcttcacatgtacagctttctacttctttgtaagaacaccaaccaaccaagttttaaatgattaataggcttgatcactgggtggcagatgttctttgcagaatggtgcaagtttttttgaccacacttatatgcgttgctaatgtggaatttaagatactatacagagtctttcatggacctatctatattgtagaattatgacttatgtcatatcttacttgccaaatttttttctgaatgtgactgtttgctaatttgttgggttgggattaagtagcattatttgccacctnnnatgttgtatttataaaaaaagtactatcatactactttttggattgttgtgctggtgtaatgtggattnnncnnnn

SEQ ID NO: 9595 - DNA, 523 bp, Canis familiaris
ggtaggcattgggaatgggacacacaacattccatgcagaatcagtctttgtcatggaaacatccctttaagccaagagaagtctccacaccaccaccccctacccctgcatgatgcctttctgatctcagggcttcctaataatggccagcactgcttcattttgcttgcaggagcccttctgtcatgtgtgagattttcatcacttacagcatctttgcagcacttaattggatgctatgactgcttcttctcagtctcaaagtcttttatagacaaaggatagcctctgctgtccttaatacctatactcacacacttccttccaaccctccctactcatggtagctcaagttgtgttgggattgggtgaaggaggctggggaaatggactgtgggatcacacttgctctatgactgtcacattcctgtgcctcattcttaccctacactcttgtgaagtcacatgattctcacaaaatctggaagtatatcttcatggagagtgcaactgcctgatgag

SEQ ID NO: 9596 - DNA, 626 bp, Canis familiaris
  misc_feature (1)..(626): n = a or c or g or t
gtnnngtatcttacnnagctgcacatgatgactgtgtngnnnagaacccagtnntaaaggnnnnnngggtttcttcnactttaccaagaannanntacaatagacatttctcaattggagtgcagnngtcttgattagtgataaggcctgtcctccactgggcgtatttctgaaacattttggtaacatttaagtgacctcttccctatgtcctacaatgtggtctctagaaccagcactggggtctaagcttcacactttagctccccaacagggaagggacaaagccacagtccagtttctcattacccagttaaagaagatccaacatatcctatagtgttccaaggggtcagtggctaaggagatctgttactggaacacgaccgtggtgatccacatttggatgctcgttccctagatttgccgagaagtataaacacgccagttcctctgccagccagttaatcgtcatttcccaataaagaagcagaattaaggaaccagggcatagcacatccacagacaggtgttatcaaggatggtttcctgcggtcttttttcctttccattgaaataagtcccagcagccgacttcctgctcagtgatttacactcagtggttt

SEQ ID NO: 9597 - DNA, 600 bp, Canis familiaris
  misc_feature (1)..(600): n = a or c or g or t
tctacatcgtttctgccagaacttagctctgtccacccannncactannncttcacataccgaatcaggattgaaatgtcaaaggatgcacttcctgagaaggcttgtcagnnnnacagtcgctattngagaataacaaatgctaaaggtgatgtagaagaagttcaaggacctggagtagttggtgaatttccaatcatcagcccaggtcgggtatatgaatacacaagttgtaccacattttctacaacatcaggatatatggaaggatattataccttccattttctttactttaaagacaagatctttaatgttgctattccccgattccatatggcttgtccaacattcagggtgtctatagcccgattggagatgggtcctgatgaatatgaagagatggaagaggaagaggaggaggaggaggaagacgacgacgatgatgactcggcagatatggacgagtctgatgaagatgatgaggaagagagacggaggagagtctttgatgttcccattcgcagacgcagatgctctcgccttttttagggaagctgtgctgatggaagccctggcgcgaatccagtccgnnnnnnn

SEQ ID NO: 9598 - DNA, 429 bp, Canis familiaris
  misc_feature (1)..(429): n = a or c or g or t
ctttgcagtcacctcagactaaccccaaggcagggattggcagtcattgtgggcctgagggnntcagggaggccagggtggccacctgtcttggccagcagcagcttgctccctgagaagagctccttgaaagtgctagctttcattagtttttcttgggtnntactgttcctaactccaggtgggcaaagtaggtatcacaacaaaacaattttaaagtgcattgcttagagctttttgtttatgattgcattgtttacagttgtgatttaataaaaggtgttacttctattaaattctagcatttagagaggtagctgctgtatcattttatataagtatacaatgtgtatcattttatatcagttatgctgttatgtgtatatacttgtaatatcaggccttgcattcaatacacaatgcaataga

SEQ ID NO: 9599 - DNA, 558 bp, Canis familiaris
  misc_feature (1)..(558): n = a or c or g or t
aanncagcagtgtcattcntnnccatcccagtcacggtgtgcacaaagacacgcgtggtgatccgccgtgatgaaaggcacaggnctgnnagccagactgtggtttcatacctcgcttctgccgctcgctggttgtgtgaccctggcaagtatcttatctttccacacctcagcctcctcatctgtaaaatgggtctaacagaggggcacttacctcgtaaggcggtggtgaggatggcatgaattaatacacgtgaaatacctggaccagtcctacccaccactaagcatcatctaagtctcagatgtcactgttaccactagttttacccttggcttcctcaggcaataccacccagattagccagtcaaacgtttatggaaggccaaggactcagagattttgagatgctcagtaagaaaaaacaatagaaacaaatcaaagcaagcattcaggagaaatagacaaagtgagaagtgtacaggttgggcaataatttcatgtgttgcaataattctttgaggacataatttcaaattccaaagcaattcagagta

SEQ ID NO: 9600 - DNA, 580 bp, Canis familiaris
  misc_feature (1)..(580): n = a or c or g or t
gggtacgtgctgtcagcttctgctgtgcagctcatcctaaaagtggccagccgggcaccccctctgccactggaggatgtctttgtgggggtgagcgcccgacgagnnnntctcaccccaacccactgtgttaaactggctggggccacccactaccccttggaccggtgctgctatgggaaattcctgctgacatcccacaaactggacccctggaagatgcaggaagcctggaagctggtgggcggctctgacggggaaaggactgcacccttctgttcctggcttcaggaagttttgggcatcctgcgatgtcgggtaatagcctggcttcatagctgagagtgccatagtagaggagtgaggagctgagggtcgagccagcacacccacaaccttctctggcccaggcccaacacagggggccctgactggctgcagctgatcggtttcctctatcaaatgctccatctatcactgaagatggagggacacaggagaaatccaggggcctggcctgccagacctagtgatggtcaccaggaagagcaaaacaatgccgattgttctctccagctat

SEQ ID NO: 9601 - DNA, 285 bp, Canis familiaris
  misc_feature (1)..(285): n = a or c or g or t
ctaanntatgtcatcttcttaatannnnnttttctnnaacannattttattttggtaaaatttatttcattgacaataatttcatgttttatgaagataccaaggtttatctttttatgggtaaatgataaaccaacaaggcactaggttcaccttcaggtactaaatacttcaacccatggtataatggttgactggatttctctggatggtacttacatggtacgaagatgttttatgatgttgtttatcagacttttgtgtaannnnnncaatgtggtctaa

SEQ ID NO: 9602 - DNA, 601 bp, Canis familiaris
  misc_feature (1)..(601): n = a or c or g or t
ataagtctttagacttnnagaaggtttacgaacaagttgtaacatttctaccagcttatgcctgcccacgatttttaagaattcaggagaagatnnnnnnaacaggnacattcaaactacagaagtttcaattggtnnaagaaggatttagtccattgaaannnnntgacccactttatttcatggataacttgaaaaaatcttatattccattgaccaaagaactttataatcaaataatgttaggggagatcaaactttaagatttttttttacacatgggattttcatatgttttcttatgagaagtgaggaaagtgtgtgattctttaacttgatttggggggaaggaatagacattaacatatgctgtgttttcttagtatacaacttttaagtaggaactttcatttgtttcagttcataacaaactttagttgattatttgttttacctatttaggagttcagtgcataactaaatatttgctttaattgtaaggattccaaataatccataaagtgttgacaatttagaaactcactaannnnnnnntttttgctatttaaagtttctagttttgaataaatgnnnnnatttt

SEQ ID NO: 9603 - DNA, 414 bp, Canis familiaris
  misc_feature (1)..(414): n = a or c or g or t
caaaattggttataatagataggggatataataaagaaactactattttggaaaatgacattnnactattttccaatgtatatnacaattgatgtgattatttttcttttaaagatttcttcatgtttatgaaatggccttttttttttttaaaaaaaaatgtttttgaattgtgtnntaatctctcaatatttaactattcttcatttccaacagtactgacaccagtgattatggnnnnntgntgtatacaaggcagctaatgttggaccaagatacattggtttttaaccgtttcatgagctcagttctcccaaacacgctgtttgtatctcagcagtacnnnnnnnnngtttttaaatctataaaataaagaataagggatagctttgtatttttgtcattgannnnatt

SEQ ID NO: 9604 - DNA, 581 bp, Canis familiaris
  misc_feature (1)..(581): n = a or c or g or t
ccagnaaggtaactgagtttgttgaannactttattcctagtgaaagcagcgggcagctgctggctttccctgccaccgtcagcagggcaagaactccacctgtgtgtgtagcctgagtaagtagccctttaaaagcgaagagaatttgatttcttcgtagggcaagaaggatgcgtgcttatgtcctgtggcctggcaggaagagtggggcgatgagaggtggatgaaaaaatcagctacatcttcagtgggatatttactcttacttggtgctaaatcagatgcaacgagtcctggtacaacctgttatgaactgcctttgaacaccggcctgttatcccaggcactcaaaatataaatgccagcaagtggttcttcgtgtatttttgtgggaaaaaacttttcttttgatttttaaaaattcaatgttgatctttcagaatggaccaaggctttttttaaaaaggattgcaggacacatttaattctttacaaaactttctgtaatgccttatttgaatgtattatgtgctttctaaaactgtggtgaactactacgcttatgaatattactggcttt

SEQ ID NO: 9605 - DNA, 569 bp, Canis familiaris
  misc_feature (1)..(569): n = a or c or g or t
ctcnacaaacatgtttannatgctattnngtgttaaaagtttctgctcctacttactgccccctacacacatgccttgacccaannngctcaaaacataagaacatttagcttctggctctcatttaaaatgcagaacaagtgtactggtatcagacggcctcggtcaaaatctctgctccattctttactggctatgtgatcttagtttgaaaaggacttcatctctctatgccttttctgtgaaatggaggtaagaggaggacttaccccatagaacatcatgacaacaaaatgcattaataccatgcctagctcacaccagccactcagtgttagctattactattatctgtaattgactctgcaagaactacagattactcaataagaaagttagccaggaggtaaaactcacagaagaatgcagaggacaaatcttaaataagatgctgagaatcacagtgtttcttatacggaagggtctgttcaatcaacttcacaaggactcctatcaggatttcagaggaattaaggaagccaccacttccatgacttccctcccctgca

SEQ ID NO: 9606 - DNA, 512 bp, Canis familiaris
  misc_feature (1)..(512): n = a or c or g or t
tcagctaatcagtattactttgtagatcaccatgccnnncacatttcaaactcannntgcctctagatgtcnnaatccannntnnnagttnntnnnnanttccctcagnnnnntggtnnntgtggtgtnnngtnnnnngttttgttttcannnnnnatgtgatataatcttattttctttggatcaaagctggactgaaaattgtattgtgtaattatttttgtgtnnntaatgttatttggtactcaagttgtaaataatgtnnactgctgtttattccaggtnntactacctcaggtgtcctatagatttttcttctaccaaagttcactttcanaatgaaattatatttgctgtgtnnntatgattccnangacttccaggnnttaagggctaacttctattagcaccnnnntgtgtannnaaatgcnananaaaaaatcnnngggttaagaaaatttggcttaaatgtatccnnngttattttaaatatatcaanntattttaattaa

SEQ ID NO: 9607 - DNA, 307 bp, Canis familiaris
  misc_feature (1)..(307): n = a or c or g or t
ggcccgagacagagcccgagacaaaacccgaggaggangagatgttgccagtgcaggggtcgaggcagtcggacaccacaggccttaatggagagccgctgagcaaggagacagannnagaggccctcccaaagccttcggagacacacacctcatgagcctctcttggcccagggggccggcagagaacgaagcagagctcatggctttgagcccgagctccaaagaagccaagggacaagccaaagaaggaagactgtcctggatgagccactattttcgnnnnnnnctcctccctccccttgaa

SEQ ID NO: 9608 - DNA, 552 bp, Canis familiaris
  misc_feature (1)..(552): n = a or c or g or t
tgtcaaggattccttcaatatgccttcaacttctagtaannagatcttgtgtttaaagatttgtatagttgtatgatgcagacctgttgtgaattgtcatggtttttatcaacttaattcactttgcatagcactgcccacttatatattgtttataagacataaaattttaaaatattttttctttaaagtataaaaacattcattaatccatttttgtttctattatagacaaagatctgaataatgaagagttattgtcccagattatcttaggtgtaatggatgtgggaagagcattacattttattttattcaggccattaacaaggaagccatatgctgatatataaaataaaaagaatagatttggttggttttcagtttaatggtgtgacatgctctgctttcttaaatctgtaccgcttagtgttctccccccttactgtgcaagtgacatggtgattatagaagatacatattaaaatgatgaaaagtaccccccaacttctgtccaccaaggatagtttagcattttggtgtattttatgt

SEQ ID NO: 9609 - DNA, 587 bp, Canis familiaris
  misc_feature (1)..(587): n = a or c or g or t
anccttaaatgactagaatgtattattgatggactctnaaaataagcaattaattttggatgtacntcaagaaagaaaacatttaaataggcattcatagaatttcagagtcagactaatgaatgtagacaagcatgaactatttattataaggccaaattattttggtaagtgaaacttttctggtatttcttatatcttaaaaaacaaaacaataaacaacctaccttgatgcttattccttctccatcataaaatcctaacaatcttttaaaatttgagttatgaaagaagattgaccccagaattaatgtaagtaaatgagtcctcctctgtcattgacaggaacaagaacagaaagctgaagaagaaagaatacgtatggaaaacattttgagtggaaaccctctccttaatctcactggtccatcccagccacaggccaacttcaaagttaaaagaaggtgggatgatgatgttgttttcaagaactgtgcaaaaggtgtagatgatcagaagaaagacaaaagatttgtaaatganncactgcgatctgaatttcacaaaaagttcatggagaaatatat

SEQ ID NO: 9610 - DNA, 550 bp, Canis familiaris
  misc_feature (1)..(550): n = a or c or g or t
gcannctgcgcatcatgaagccccaggacttcgagtacgtctggcagaattttgtggagcaagaagagggcgagtccaaggcctttcagccctgggaggacattcaggagaacttcctgtactacgaggagaagctggcagacatcctgaagtaggccactgggcccagcctcacgtctgcctgctgccaccaggagacagcaatgatatgtatggccatgtgggacatgcctgacttcctaataccacttgagctggacaacattggacaccaaccaatcctagtgcacaggtcctccaaggactctaaatatactgctcatgctgtaaatcatttaagccacgactctctctaaggctgctcttgggaaagaggaaagtgagttgcaaggaaagaaatggcaaccatatatggacaccagggatctgtagggcagaagagtctaattattcccccaatgggctgcttaagggaaagagcctcagacccaaggtctgtgcagatctttaaaatatgtccagaaatgcattttatgtgaagttggttttt

SEQ ID NO: 9611 - DNA, 152 bp, Canis familiaris
gccagaatgtaggtctcccgaggaggaaaagctgcaagtagcaaggaactcagcagttcagtgttctgaacagagatcacccagttgctgtcaggaagctatctcatctctgagttccagtaactgtcctttccctgaccccctccaatctg

SEQ ID NO: 9612 - DNA, 553 bp, Canis familiaris
ccaggactccggaacccaaaaagacaaaaaaggctgcctcaccaagccctcagtctgtaaggagggtttcgtcctctcgatctgtctcaggatctcctgagccagcagctaaaaaacccccagcacctcaatcccctgtccagtctcagtccccctctaccaactggtcaccagcggtaccggtcaaaaaggctaaaagcccaacaccaagcccatctccggcaaggaactcagacccagaaggaggtggaaagaaaaagaagaaaaagaaggacaagaaacacaaaaaggataagaagcacaagaagcacaaaaaacacaagaaggaaaaggccatggcagcagccgctgcagcagctgtcactcccacggcccctgcggcccccacgaccacatcagcacaggaggaaccggaggcagagcccgagcctaagaaggaaacggagagtgagcctgaagacaacctcgacgacttagagaagcacctgcgtgaaaaggcgctgaggtcgatgcggaaggctcaagtgtccccacagtcttaggcgggaatgtg

SEQ ID NO: 9613 - DNA, 662 bp, Canis familiaris
  misc_feature (1)..(662): n = a or c or g or t
gcttttctgtgctcacctgcagtgccttctccttctacccaccnnagctacaactacgattcctccggaatggcctggcagctggctctggtgaaggggactttggccccaatggcgacggctccttccatgcctggtcttcactgacagtcaaaagtggcgacgagcaccactaccgctgcctggtgcagcatgcagggctgccacagcccctcactgtggagctggaatcaccagccaaatcctcggtgccagtggttggaatcgtcattggcttcttgctgctcacggcagtggctgtgggaggagctctgctgtggaggaggatgagaaaggggctgccagccccttggatgtctctccgtggggatgatgtaggggccctcctgcccactcctggcgtgcccaaggatgctgactcttaggatataaatgcattctcagcagctgcctgatgatcatcccctatcctggctactatcagctaatgtagtcaggctcctttcatgctgtgagacctcctggaatcctggtatttctgagcctccggaaagagtcctgggcccaatgaccttctggatttctcctgtggtctgcctcagtttcccctcctgatgatcatggctcttttccacctccacatataaaacacgagtnnnnnn

SEQ ID NO: 9614 - DNA, 205 bp, Canis familiaris
  misc_feature (1)..(205): n = a or c or g or t
ttnnnctggagcagttgttcgnnnctgttttatanatacantagtcatctaataataacataataaaaatgcttcttgggggtaaatagcttgaaaatgagtttttaaaaattaacagnnnttaataaagtcaacannnnnnnnnntggtggttaggcagagnacgtatttttccccatcaatangagaatattaatctgtttta

SEQ ID NO: 9615 - DNA, 581 bp, Canis familiaris
  misc_feature (1)..(581): n = a or c or g or t
ggttcatgacatttaaggcaagaagccatgtncataangaagtgctgatatagaaactgtatcangnnatccagaagatccaactaaataatgaatgaaggtggctacactaaacaacagattttcaatgtaaacaaaagagtgtctattggaatgaagatgccatgtagggtctcatagctacaaaggagaagtgaattgcctggctttaaagcttcaaaggtcaagctgactcttttgttagtgcctaatgctgctggagaccttaagttaaagacaatgtttacttactattctaaaaattctaaggcaacaaagcctagatgaagcatatctgtttataacatggtttactaaatgttgagacctactgctcaggaaaaaaatgcttttaaaaatattactgctcactgacaatgtgcctggtcacccaagggctctactggggatatacaacactgttattttcaagccagcgaacacaccaccaattctgcagcccatggatcaatgaataatttcaacttttcaagtcttattatttaagaaaaatatttcaaaaggctacagctgccatggat

SEQ ID NO: 9616 - DNA, 209 bp, Canis familiaris
  misc_feature (1)..(209): n = a or c or g or t
tatttggccnngctgtgttgcttagccatnannnttcnnntaagcaagaaggtaaannnaannnnnaaannnnnnaaaaaaaaaaaaaaaaaaaccacaacaacttgcactggcttgtctcacttatgaaacaccatgaagttgtttgattnnnnnnnncacatannnnnnngggnnnnnnnnntgtttgatcttcctnnnnnngagca

SEQ ID NO: 9617 - DNA, 489 bp, Canis familiaris
  misc_feature (1)..(489): n = a or c or g or t
acttcatnnanncacgtacttcctgtggtgcannaacaaaaatttagcattggttgtattttagaattctttcactccaaaagtatgcttatagtgcataaagaaagtgaattgatgtatatattatcatttataaggtttattcacttttgatggaagaatattgctattatttgcatatgcagtattactactatacacttgcatatttttaggagactatgtattttcagtgttgtacttagtggaatcactatttcttcaaaaggaatattttagaatgcatatggtcactgatgctacctaaatttcatatttttcnnnnnnttttcaatatggacttttatctactaaattttaattttttaaaaaaaactcagaagttgtgatcaggaactctcaagtatctaagcttgggtatttcaggctgcagaataaatccgctctaaaatgttttagtcgcccagatcatatatgttaaataacatg

SEQ ID NO: 9618 - DNA, 583 bp, Canis familiaris
  misc_feature (1)..(583): n = a or c or g or t
gggcgcacctccttcttccgagtagtcgctgcctttttcggatcaggttaccaaaatgcctcccctctgctgagctgctggcgcttcatcacccagacctccagccccagttccctggagcatctcagaacccactttcccggtgctaacacacaagaggggggtaaagtggctgccagtcgtggccagaaaccaacgtctgagaggccaggccggaagacaagctctgtgtgcccagggcggccccgggcgcgggccccacccctgctgcccacccagctctcagccccccggcagtccctcttggcgtgaaccttctctggggagagcgatactgcaccttcacctgtgggactcatatttataacaatgtgtaatgactgtagcaaaaagcccttgtttctagatgtaaatggtcaaagaaacaagcgctctattgtattgattaaaatagttcaaatgagtcctgtatcattgtatctcctattctggattagtgccttttggacagtagactgttctgtaattaaaatgtagtatactgcttttttgtacagtttngntttaataaaactttttttta

SEQ ID NO: 9619 - DNA, 405 bp, Canis familiaris
  misc_feature (1)..(405): n = a or c or g or t
aaagcatagactatngacactaggtgatgaatatagggcccagatnnaccaagagaagggggtgaacaaacaccctaccttgtgccctcnntttggtgagcagcagccctgggatcacagacatggaagggaccaccctggggctgactgctttcctgtgctgttggctcccaaagctaggaggaaaccgggagcagtgccccaagcatggctccccaaatacctatttatttcgttgtttgtgctgacgatgggcaggcccccacttgtcccttttggacaccttggagaggcaaggggctgaggagggccagacccaggttccaggggcacaggcagtacagcttttggctgtgtacatagggtgctttattctccacagagtgatacatgctaagatgggtt

SEQ ID NO: 9620 - DNA, 524 bp, Canis familiaris
  misc_feature (1)..(524): n = a or c or g or t
agtgtccagtgcccgaggccccctagaaccntgtagttcaactcgtgcttgtatcgaaacaacagttccttggagtgttggttggttggttgatttcatttttaaattagtctttggaccaccaccattcnnnaaaccaccaccacccgcttgccctgcaaagaagcggacagttgtgggaagacctagcagcaccctttcctccagacaccttcattttgacgttcgggtttttgtgttaagttaatctgtacattctgtttgccattgttacctgtactatacgtctgtatatattgtacgacagaagagtattaatccactatctctagtgcttgacttgaaatcagtacagtacctgtacctgcacggcgccccgctccgtgtgtcgccctatattgagggctccaactttcccttgttttttgaaaggggtttatgtataaatatattttatgcctttttattacaagtcttgtactcaatgacttttgccatggcattttgttctactnnnnnngtaa

SEQ ID NO: 9621 - DNA, 658 bp, Canis familiaris
  misc_feature (1)..(658): n = a or c or g or t
tttttggtggtgattnnngccaaatcgtcatctggtcattgatnnaagcatgtcattccctgtggtctctgaccttctatgacttccacaccccatgggtatcacactgtaagtcaaagaaatatcatgggacaagtatagctatgtcttcaagaagtgtgtataaaggcaaaatcatgagaaggagccagatgtgtcacttagataatactgttgtcatttgtgcttggatcattttggtccttgagagtgagagtgagaatctaggtgattctctcctagaattagccaaacaaagtactttggagatagaaagttctttccctgctttaaaaagtatgtcagcaaccaaaaacttataacagattgtttccatctggatggttattaattctggataggaagtttttgatgaataaataaggatttttgtaactttcaaaggggagactccatttctaatctgacatttaaactgtattactaacttttagtgttctaatttcaaggttttcctgtatcttttctaattgcatcagaaaaaatgtataccatatttaattccatttgtgattaagtgtttgactataagaacaaactaatacaattatataaattagaaaagccagaggaaatgaaaggatatttatgaaatcag

SEQ ID NO: 9622 - DNA, 478 bp, Canis familiaris
  misc_feature (1)..(478): n = a or c or g or t
acacccccagccaccagctgcaggnnnccgagcaccccttcctcaccccgtcccctgagtccccggaccagtggtccagctcgtcgccacattcccacnnnnnnngactggtcggagggcatcnctagcccgcccaccagcactcagtcccacatcgcccacattccggagacgctcaagtaaacagccagcaccccggtgggaccctggcttcctttcccaagccctgctggggcgtttgcgtgcgcaccgcagacaccgggatggactgaaggggctttttcttaagaaacatgtttttatacaaaataaaaggacaaggattttaatttttttttagtatttatttatgtacttttattttccgaggaaacactgccttttttatttatacttaatgttttctatggctccaggtaacaatttttatctgttcnnnnnanataaactagtgctcannnnagattttactacttat

SEQ ID NO: 9623 - DNA, 469 bp, Canis familiaris
  misc_feature (1)..(469): n = a or c or g or t
agggnaccccctccacacacagctgtctttatgggggtggcagtcaggctgttgctgacagagaggtcctggcctgactggggagatggattgtgaggggctgtgtgtacatgtgggatgtgtgaccatgtgatgtatgtgagagatgtgtgtggggtggtgctgaggtgtgggctctgggtgtctgccctcatcattctggggcccccacacagcagccagtcagacctgctataggcccaagggccggggaggccgcaaggctctgggcctggagctggtctgaggctgtggggccacagcgacccctgctggcaggctcctccagggccctggagctatttacgtgagaggccactcctctgccaggctggcctggcattccagccacccacctgactgcccccagaaatgtgtctgagaattcctgggagtgctcagcagggtgggttgatttttagatttatac

SEQ ID NO: 9624 - DNA, 535 bp, Canis familiaris
  misc_feature (1)..(535): n = a or c or g or t
tcctggtnnctgtccaaaatctcttaagtagacctttttatacaattagcatctacttttaagtaggttaaaggagtatcaaagttgttatggtgtatcttatgcatgtggaagtatgttactcttaatttttataaatacttaatatagtttttgcaaataagaatggggtggtgcagagctaaaagatatgtcttatgttgtgaaatccaagagaaaaccttacttaattaatgctttgattttgaatctatgtaagataattttgatactactggtcagtttataaaacatttttggggagtatatttgagaatttaatattttgatactatattatttcccacattttagttttggggttagctccaactagtaaaagttacgagatcagtgcctaatctctttatgcaattttttaagtaaacttaaaatgaatgtaaaatccaaaagcaactgtattacaaagctgttttgtaagagctgaactttctttaaagcaatctgtaaagtttgtctctagctggaactgagc

SEQ ID NO: 9625 - DNA, 436 bp, Canis familiaris
  misc_feature (1)..(436): n = a or c or g or t
tggatatcttgatatnnaaaattaatnnncttgcatgacagattctttgggcacaagtttatttacctaatttttagcnctgaaagtanaagtcaattatccagagcatgccataaagagggacatttgcatgttgtttatgcaaaagtccagaattgtatatgccactttgcaagtagacaaaatgtagggtgtataagctggatatgtcaacatgttgcttactttacctctcgtttatttttgtcatataaattagcactacgatggcacaccctcactgtgttcattctttgctttggccgcttaacttagagcaggcaaccaagttttcaaatatcattggaaaattttacctcttcagaaagcaatactaaggaaaagctttttaatttgannnnaattaattttatcnnnnnatttttaaatattacca

SEQ ID NO: 9626 - DNA, 526 bp, Canis familiaris
  misc_feature (1)..(526): n = a or c or g or t
aattaantcttagatattttcaacaaaccttgccaacangaacattcttaacatcttccacaaaaacgacttcccgaagagaccactgctcttcgttcaccttttcctcctctttcggggcaggggtggaccgtcgtcgttcttagacaacaacaaaatgaatcctctgtaatgacaacaaaagaatcttaaagttacaaggacaaaaaaaaaaaagttacaaggacaaagagaaggctagtgcattcaagcaggagatgccaacgaaattgtggaagctggaaagcagacaggaaagtggcaaaggagccagcagggacacatccttttgaaactctgagctgtcacctaagaagtccagcaacctcaaagcctccgtgctgcagagaccacacagagagaccacccaaggtggagccgcctaaggaactgcccctgttccaggtcccagctgttttgagtcttcccagctaccatctgatggcaactgcataagaaacatagagtaagaaccatccagccaagt

SEQ ID NO: 9627 - DNA, 510 bp, Canis familiaris
  misc_feature (1)..(510): n = a or c or g or t
attgtgaaccatgctgtacgcatccannnggggcgctaccgtcacccgggctgctactcctgcgcagactgtgggctgaacctgaagatgcgggggcacttttgggtgggagacgagctgtactgtgagaagcatgcccgccagcgctactcctcaccccccaccctcagctcccaggcctgagctcctggctgtgctctcagcctgccctcaactctgtgggcacctgtatagcaaggccatgccaaaaacaagttggcagggaagggtggtggcaggtggtggggttccgccctctgcgctaggtgaggccagggcctgggacctgtcctcatgcacggtctcaccgtcccaggcttctgctaggtactctcaatttcccccgcaggacaggctgtgcaccaaagtctgaggtgggcactgcattgggtatctctgtgcaacaggggttaggtgggggatgtgacacagagataaatatgtagaaagagaggggtgggccagaggcta

SEQ ID NO: 9628 - DNA, 434 bp, Canis familiaris
  misc_feature (1)..(434): n = a or c or g or t
tcccaatcagcacactgtatttttnncgctatatttacgtgtgactnnnactgctcaagtgtgacntagtcattgcaacctctcagccacagtatttatggagatggtgtgtcctgaatggtgtagctcatattagcttgaactttccatttccgctctcattgtaggtgtaactactagtcctgatgtcaaatgacccatgatttctactgttaatcaagtgaatatcgttttaaatatccttaactaatttaaagaattttaaaattgtactgtgattttcataacccgttgcctttttggtaccagagctacgtggtttgaatcctggctacatgttttaagtaagaaaaaaaaaaaaagacgtatttttgcttactcagataaaagacaacctgtaaaaatataatgaaaaaattaaattttacatgtgc

SEQ ID NO: 9629 - DNA, 694 bp, Canis familiaris
  misc_feature (1)..(694): n = a or c or g or t
tgttctgtgttcgacgtttnnnaaatatntnnnnacctcactgcctctgcctatcctccttggtatcaccattcaactatttggaatgttttgagnnngagtggttttgttcatggaatgtgtggnnaaactcaataangtctttttgaaattctgatgttatgtattatgnnnngcnntcattctcttggtcataaatcattcagtcctgcaggactctatctaaagtctgnntagctttcctctggataataagctgtaggtagacgttatatcaggtagtaattaagatatgagcacagtggatatgggaattattcagcaaatgttagctgttggatagagttatgttgtcatcttgaattcttttccatcttgtgtcatctctgggtgctaaaatcatttccacatttaatctcaagatttaatgaagtcaccctcgtcctttcttccttttgagagtttaggccaagaggcaatcttcctgttttgttttcacacacagttgggagaatgtaaatcttttcagtcacgtctgggtcatctaagtgtacaaagactgcaaagggactgaaaagatgattgtccaaaggccactgctgcatctggatttggcgacccaagatttttagtagatacaacatgttaaatgtagttgaatccctggctagctcacaatgcttatttgttccat

SEQ ID NO: 9630 - DNA, 533 bp, Canis familiaris
  misc_feature (1)..(533): n = a or c or g or t
tacataagctcgtgcagcgtnctcttgttacggtgcggtttctgcttcgtttttatttcagaaaaataaatgtgatgtatttaaagaaggtncnncanctannngcgaatgnnnaatagctaaatgtcttggtatctaaagagtaaattatccatggctttgcaagtggaggaaagggggagcgagaaatggggccccggcccccgcacgccctacacctgagacgggctgagagctacgacaattcctgtgaaggctcagcccgcgcagcctgagggaggccctgctgggacctcgcactctggcccttcctgtcccagggcctgtggcacccgccaccaccgaaggaccttggcccagggccgcatgtaaatatgaacccccgccgtcaagagggaaggcaccgccagagcccttgccaaatctcctttgccctcagcctctgttcggtacctgtatgtccaaggtcagtgcgtggaatcacagccaaggnnnntaagagatgtacggnnnnnaagaggagctggtgattg

SEQ ID NO: 9631 - DNA, 609 bp, Canis familiaris
  misc_feature (1)..(609): n = a or c or g or t
acntngagcataccatcaagaannagatgtccgggnatgtcagnnncgtgtttgtnnnnatcgttcaaagtgtcaagaacaagncncncntctttgctgacaaactttacaagtccatgaagggtgctggcacagatgagaagaccctcaccaggatcatggtctcccggagtgagattgacctgctcaacattcggcgggagttcattgagaaatatgacaagtctctccaccaagccattgaaggtgacacctctggagacttcctgaaggccttgctggccatctgtggaggcgaggactagggccaccagctttggccagcacctctgccaagaagcggtcagcagcaccagccgcctggccaagcctgatcgctccggagactaagggagggacggggtggggggaggggatcaggggtgggctcttgtcttcaactggggtttagggaaggctcccctcccacgggccactgaaggcccagcacggtcactcctgctcacgtgtgagcagctgaagaaccnnngccacaaatcccatccatctccactccccatcttcctcctcctcagctcatcccggcttccatcccttgctgcagccact

SEQ ID NO: 9632 - DNA, 665 bp, Canis familiaris
tgattactatcatgaaaacattgattgactttgtgaagatgatggtaaaatatggtacaatatctccagaagaaggcgtttcctaccttgaaaacttggatgaaactattgctcttcagactaagaacaagctagaaaaaaatgttactgacaataaaagcaaacttttcccagcaccgtcagaaaagagtcatgaagaaacagatagtaccaaagaagaagcagctaagatggaaaaggaatatggaaccttgaaagattccacaaaagatgataacccaagaggaaagacagatgagccaaaagggaaaaccgaagcctatttggaagccatcagaaaaaatattgaatggttgaagaaacataacaaaaaaggaaataaagaagattatgacctctcaaagatgagggacttcatcaaccaacaagctgatgcttatgtggagaaaggcatccttgataaagaagaagccaatgccatcaagcgtatttacagcagcctgtaaaaatggcaaaagatccaggagtctttagactgttcagaaaacatagcttataacacttcttctaattttgtgattgaagttattttacccaaggattattagaaagtgatgaaattgcagtagttaaccttttagaattggttaaacatagctttcttg

SEQ ID NO: 9633 - DNA, 319 bp, Canis familiaris
  misc_feature (1)..(319): n = a or c or g or t
cattgtgaatnnnaagtgatctccnnngcttnnnnnnntcnnnccccctccccacttgcacgtgnnncgacgccccttgtnnnnnnnnnctgtaatcnngtnnnnnagtgggnnnnacgcttggtcttgggtcagggtgnntgaatgtctttaggaaaagaattcaaattggggaaatcttgttcatttgagaaattgtatgatatttattgattgtgnnnactgccaatgtttatatccagttctaagatttctgaaaacaaattcttgtnnnnngnngctcagaaaacgtttactganannnccagttcactaaaag

SEQ ID NO: 9634 - DNA, 547 bp, Canis familiaris
  misc_feature (1)..(547): n = a or c or g or t
tcccgttgactttgaaatagatttaattgctcatatttgctaccaaggcaannctgctcctnntccaaggttattaggaaagagagtcaatatggggctaccaaacctgattttatgaaaagagagagagatacagggttttgtggttttttgggggggttttttggaactatcttacagaactttattcaggtgtagttgtcatgcaaaatagtgcacctatttgaggtgtacagttaagttttgccatacatataaacccacaaaacttgatcataatcatgattgtgaacatgtctgtcacccctaatttgcctcatgtaattttataatgtcttttctctctacaggcaacctttgacttaccttcatttataataaatttgtattttctagaattttatatgatctgagtcataaaatgttcatttttttttcctggtttcatgatttgtaattattttgagattcttcagtgatgcttacataattattttgctctattgctgcatagtatctttaacatggatataccatttgtttatcc

SEQ ID NO: 9635 - DNA, 104 bp, Canis familiaris
ccccccgatggctgcaggagccagagtgggattcctgtgggggccccggcgggttctgtcccgatccacgcatgaggtctgacttgggatcgcagggctcccct

SEQ ID NO: 9636 - DNA, 599 bp, Canis familiaris
  misc_feature (1)..(599): n = a or c or g or t
ttcgtcaagtnntacaagaacctggctttctactggatcctcagagctgggcacatggttccttctgaccaaggggacatggctctgaagatgatgaggatggtgactcagcaagagtaggattgtctggaggtgaagtgcttggccttggggcccaggaggccggagtaaggaccctgaagctgtaggaggcaccattctccccaccggcttgtggcttgcacctggcttgcaaggcttgcctggcccatgatggttcccgcccacttctccagaaaacactcgctgcctctgtgcacctggaaatcatttctgcttctaagaaacctcaatctttttttaatggatttgttttcatcaaaatgaagagttgaaatagttaacatttttgtattacaaaagtaaattatgtaatttataggacaaaaatgagatacaggtaaaataaacaccctcttactcctttccctgggataagctctgttatcaatttagcatctacccttgcaagtctttttctgctttatatgcatatatattttttacaaaaatgaaatcattactgtatgttgttttactacctggttcacatatcaatt

SEQ ID NO: 9637 - DNA, 536 bp, Canis familiaris
  misc_feature (1)..(536): n = a or c or g or t
agaaatgannnnntagntccctttactangtgcaatgtacttttttccnnnnnntacaattttttgaaagctcatcatgacccactaatgaatgcataatgacccacagtttaatgaactcttcattttcattgaattagttccattagttgtggttgacataatatggactggttttttaattatttgaaccttgaccttggctctagttatatgcaagactgccccagaaatttgtgtcaaattactctactttaaatataataaacttttctgttgatagtgctgaaaactttatacctgttaagattatgttgaaagtgctagtaacaatagtttcctttatatggaacctttaaaacagagcatgtacttggaaatttaacctggatccattttgtttccttttagtcaaatactggagataatgtcagcagtaagagagcaggatccactggaattagccaatacactatataacaataccattaaaatatttttttcctgacatgtaattgatatgttctttccatttc

SEQ ID NO: 9638 - DNA, 565 bp, Canis familiaris
  misc_feature (1)..(565): n = a or c or g or t
atnnataaagtaagatatgttaaaaatgtccctgntttgtcctgaaattttagtccattnnnnataaataggatttnnnagntcagatatgagaagttgtagctctgatatctagctttagncttggnctgctgattgcgttgttttgatttgcttttctggaaaagcatttttgctagcagccatacagacttcctccttcatacctagcagtactttatatcgtaaaactttgtgccatgcagcatttgaagactcagtttttaaaatagttagcctgttgctgactttattgtgttaattcctatttcaacagctatttcccttaattcaggatacaacttcttgtgtatgacagctttccttcacacaccatttttgtgggtgtgtatatatctgacttggggagaattggaaaaaaacacagctttttaatttgtttaaaacagaccttctgcctgttacattttgtgctcttaaccaattaaagaagccagtggcatttttaattttatattgtgtatgttttccacnnnnnntatctccattgatttgtttgtgccct

SEQ ID NO: 9639 - DNA, 585 bp, Canis familiaris
  misc_feature (1)..(585): n = a or c or g or t
cgtctttcagctcccanngtggcaaaagccaaagggcntcttgaancaacatcagnnnnnnngtcgtgnnggcgtcnnaaagtcatgcnnngctnnntactatnctnnnnnaagtcatagaaattccggtcacngccaagatttcannnnnngtggtcagtnngaannngggagtncgggcgcctacaggtaaacacaagacaaccaaattcagtnnaagactgtnnnngaccttgtgccgaaacgtgggtttgcctctccctaggtcgaggtccttggacannctgtgtcctcctnncggggcccntgtcctgtgctgtcacacgcgtcctgtgcccagannnaccccgccttgggtnnnannncnnntnnnnnnntggtgaaatgcttcatctgttcagaacaagggnnctgtattttcatnnngcactgggccccataagtcacgaggccccatcctgctctctcaactccattttcgcatctgtaaaccgncagtagcagcaccctccgtccgcagggcccnnnnngggttacagacccacccgggggcnnacgatgctcacccagcaccgcccgtnnnng

SEQ ID NO: 9640 - DNA, 453 bp, Canis familiaris
  misc_feature (1)..(453): n = a or c or g or t
ccccgacagcagnnnngtccctgccacaaagaccaggaagaccagaaggannnngtccaaggctgcccagcagagccccattctcacacccgctttnctaaggaacacgtgcttggggccacctgtgccctcccnggnnnnggcttcaccccaaggctgccaccgccacgctcatgtcactcactcctcacctgtctgccccccccacactcttcgtcactgtcttggccccctgcgggcccaaccccactgttctgccctcggtattccagaaacaaccgcgccgcgggggagtggggtccatgcaataagccgccgccgctgccggcggcccctcgcgggccgggtgagcagtgtctgctgacgctcctgtgttccatgtatgtttcttttattaattcaggttaaacgttgcaataatctgataacgggaaatccggcttcttaagggag

SEQ ID NO: 9641 - DNA, 563 bp, Canis familiaris
  misc_feature (1)..(563): n = a or c or g or t
atggcctctgtnnncaccccacctggccagtgcttcagtnntgacacgagaagnnngtcanntgcagcaagctgctggcagcagttgggccagctggccagccaatacgacctacactccatgggcatccacacattttcatctggtttcggttcaaaccccggnntgaaaaaaatgcnnnaaaaatttaagtnnnctaggagtttannnnnncccccccttccanctgacnnncagccaaataattttcctcnnnctccnnnnnnnntttccccttcnngcacataactcaagaatttnnccttnnnnnnntcccctcccaaaaaaatacaaaagtaaccgcgggtgcnnnnngtgtgtatgnngtattgttgggcaagaagagaccngnctgnnngctggaaacactcataaccattcctttagattcgtttgccttatggttatttgtcataaaagcgatttgcaaaaacaaggagccttagtgaatgtacagtacctagacttctgtgttctcaggacacagaagggagcaactttgctatttggtccagtaagtggac

SEQ ID NO: 9642 - DNA, 668 bp, Canis familiaris
  misc_feature (1)..(668): n = a or c or g or t
gctttgctttnctacatcatcccatttataagaagagaagagcatgttagaatttatgnnnanctttattacaattttanngctacacttcattaagaaaaatctaagatggnngatctaatgttgccttgcttactttgatttaagatcctgnnctgtaataaacagatattttgccttgagtaaatttgttgtaaagttaaatattgaattgttttcattttaaaatagaatgtcataatgtagactatctacagcttccttgtagattacacaaatatatgatttctaatcttattatttttcttccacagtgaaaatatatttgcattcttaatgctaattatctgcaagtatttttccattgtgtatgagattaatgcaggtgaaagtattgcattttaatattatagagnnnctattatatgtttagatgttttaagtatgttgcagttattcatattaaacataacttgtatttattaagtattttaatcaagtttgagaataacattgcacataatgaattttnnnnnnnaaagatttagctgattttatatttctgaaaggctaacagacatnnatacacttgtacagtatgcactnnnnnnttatttaaatnnnnnntattttttttttttttaagtcattgtccatttgtattgaca

SEQ ID NO: 9643 - DNA, 434 bp, Canis familiaris
  misc_feature (1)..(434): n = a or c or g or t
atgcacgtacccgccctccntttggtcagggctataccaaacctggacctggttatcgataaagaggctcagctacactgatgaacggtagctgataactcttagcctcccaaaagactccaatactactattttaatttgtattgaaattgagaaatttaaaaagcagtcatttttttatgatatcattgttgctgttaattgaaagtataatttgctggaatacaaaaagaccaaaatgaaagtttttttttcttcccttgcttaaaagtgtagcagctgcctagttattttggaacactactctgatgtgtgtaaagtgattgactttctagcttgccttgtccagaggatnnnnaacgctaggttgaagtttagccatctaacttggctttttattaacatgatgtactaaaataaatagnnnnnnntga

SEQ ID NO: 9644 - DNA, 635 bp, Canis familiaris
  misc_feature (1)..(635): n = a or c or g or t
ctgcccaagggganngtgatcgtgancaacctgactgcactgcacagggacnntgcagaatgngccacccctgacacgttcaacccagagcattttctggagaatggacagtttaagaaaagggaagcctttctgcctttctcaataggaaagcgggtatgcattggagaacagttggccaggtctgagctgtttattttcttcacttcccttgtgcaaagatttaccttcaggcccccagacaatgagaagctgagcctcgagttcagaacgggactcaccatctccccagtcagccaccgactccgtgcaatccctcggtcctgaaggagagggtgagggagggagggagaggagtaaggagagcaagaagaattggtgtgtcctctgagaatacgggaatggaaagtgactctgagggatgaggataggaattagaggatgcatgatccaagttccagccttgctgtctcctctcacggagctttgagcagatcttttatgttgtgaatgatgttcatctatgagatgaaaagcagatgatgattcctccactaaaggaagaactgtcagaatcaaagggaatgatggactttgaatggtttgggaaatcatatcacttataaaaannnnnn

SEQ ID NO: 9645 - DNA, 471 bp, Canis familiaris
  misc_feature (1)..(471): n = a or c or g or t
gcacccgaggtgctgacagacacatcttatacgcnngctgtggactggtgggngctgggcgtgctgctctatgagatgctggttggtgagtccccatttccaggggacgacgaggaagaggtatttgacagcatagtcaatgatgaggttcgctacccacgcttcctatcagctgaagccattggcatcatgcgcaggctgctgcggaggaatcccgagcggaggctgggctccagcgagagagatgctgaggatgtgaaaaagcagcccttctataggacactggtctgggacagtctgctggcccgacgcttgccacctcccttcgtgcccacgntgtcaggccgcacggatgtcagcaacttcgacgaggagttcacgggggaggcccccacgctgagcccgccccgcgacgnnnggcccctcacggccgcagagcaggccgccttccgggacttcgacttcgtggcc

SEQ ID NO: 9646 - DNA, 513 bp, Canis familiaris
  misc_feature (1)..(513): n = a or c or g or t
attttatgtgagatacgagagtaatcattttgtgacttgtcactgcaccggaaagccggtctcacgtgtgtgtcctggcaaggcccagatttgttaccagaagtggcctgggcatccacgttccttggggtgtgtgcactgtgggcatattttaaaggtcacattgccaaccggaaggtcaaaattttctaatgtaattactttaaagactttgcactatttttgatccagattagaaaacaatttaattttactatcactactagaatttgaaatctcctgtagtactactaaaagagtaacactaattgacattatttgtgtgtttttctttctctgtttaaaatatcattcgttgggcaagccttcctatagtattatttacttatttgaagttatctttttgttactgtgttttgtaaatgtgttcatgagatcataatgcattgttttatgctcacattgtgtgttttatatttaaaacatttcagatgaagtgtgnnnnataagcat

SEQ ID NO: 9647 - DNA, 94 bp, Canis familiaris
  misc_feature (1)..(94): n = a or c or g or t
ggggggaggggggaccgcagcagttaacttgtccttacgcagcgatttttaacgaggctggggggaggggggcttgagggtggggaaggnnngg

SEQ ID NO: 9648 - DNA, 547 bp, Canis familiaris
  misc_feature (1)..(547): n = a or c or g or t
ggtaaatnncttgttttgatgttacatcttcaatatagnattttcctaaacacgtcagatnnacaccagcntgtatacccaccccaagtctgtgctgctctgtcactactttcagctcattgcccaaaacccanntctggcttgaggaattttgatttctgtccccaccgccgccaccccctaccaccagctagtcctcccatattgtccaaaacatttccttccagcttccaaacatttcctgctatctattgcagtaactcagaacccatgaaatttagacgcaccaccaatttctgcggatattttgctctaagaaatcaattgttactcagcataatgagcttttaaggtatacggacaatgcactctcgtgccaatttatatagaaggatacaattcttttttacgtgattgacgaaatgttacgtttttcattaggaaacactaaatcgtgtaatatttctgtttgtgctcctttcaattcctgacggcaaatcaagataaactattgctttgtctctttgagcagcctgaaagcgggatg

SEQ ID NO: 9649 - DNA, 543 bp, Canis familiaris
  misc_feature (1)..(543): n = a or c or g or t
cgctttctaccaagagccacctggccagcatcattgtcaagaagtacctacgcgataacgagacgattggtgcacaagaggacccgctggtttactgggagaagaggcaggaggtctggccagttctggcaacactggctactgtctatttgtcctgtcccccgacaggggccttctgtgaaagtgtctatacgtctctggacagccctgccatcctggaacacagcacccctctcccagtggagaccgtggagcgtctcctcttcctgaagaccaacttggagaatttccccaactacaccatcccttccctcctcttcctcagtggggacctggctgagggggagcagaccagcacggcagacctccaacagactccctgaacatctgcctgtggacacaccacctgggctcaggggcgagcagaatgtgcaccctagggtgttggatggggctgcccagagtcctaaacctctttggaaggaatagggacaatttctcaatccttgacagattgccttctnnnaggagataccgttttcc

SEQ ID NO: 9650 - DNA, 597 bp, Canis familiaris
  misc_feature (1)..(597): n = a or c or g or t
gaagaccacttcccctgctgcagcgagaganntcaggnctgagnnngcnngacggcgnnnntcgggggcgctgcccgagagcgccctcgggcgttangtcccggggacgtgctggtggcaggccggcggggggctgcctgttgcatacccgcgtgcctcgccgcntgcgtgattgcatgtggttttccgtgtctcccgagccgaaacgaggcctgcctggtcggggggtcgtcggggaagctgaatgaaccagctcatcggggcgctgcggcacaaccnnnctttttatgggttttacagctcaaccaacagtgttcacctttccagagtttctatattttatacgcttaagaagaactgccgagggcttcagagccttgttatttccatcctaatggcgattccattttctgtagcttagtttcagggtagatggtaagttatttcacgttctatgaagcttttcacatcatgggtcgtaaacggaaggatcatacactttctgagaagatgtattgatttattgcagctanntctgaagttgaatttgacactggggcctcagaatcttaannngtccacggcaaacgtctgtgg

SEQ ID NO: 9651 - DNA, 614 bp, Canis familiaris
  misc_feature (1)..(614): n = a or c or g or t
cgggagcagtgactctgagtccagctcagacagtgaaggcactatcaacgccactggcaagannnncncctccatcttccgaaccaacannntnntcgaggcccnntagctcctgtgtncttcagagctcctgcccaagagtagaccggatggttcgttctgcctccgggtattacctccctcggaactcctttgcccgcttcctgtgcacaccatgacgtttttaaccttatctaaaagtgtgccagaatctacctgtggcccagcttgtgtttggtttctttctactccagtgcagatgtccaaacctgtcctgccacctccttcctcactgctgcggtgggggcccgggctcagcagaaattccactgaaaatgccctgggaacacaggcacccgctggtgtgccaagtgtttggattgtgttgcttcttgttttcttctttttttttttcttgcccgacagcacagagaagcaagggcagttattggacaggtatcatttaaactttcgattctagctgaacacaccatgtggttgtactgcgttgtggagcatgtcagggggtggggggaggaggggcccaggtgatgaactggtgcgctcctttggaa

SEQ ID NO: 9652 - DNA, 462 bp, Canis familiaris
  misc_feature (1)..(462): n = a or c or g or t
gaaggatatcnnaggaggtccccgagaannnctgactagaggacctgactgcttcttcactcgctaaagggaacagtgcagtgggcggctccacgcccctcccctttccttggaaagctcgttctgtagaggaagccatttcaagagcgtagccttgggagagagtaaggcgacgtggagaccatctgaacacagttgaggcctctttataaagaagattggcctgtgcgtgtgcgcagaggtgatctcctgttgctcaagagcgctctcctcgctcaccactgtggcatggcctgcttcgctctcccctggcctccctgttctggggccagtttttgaatcaacagagtgatgtcgtgggatgcctgggtggctcagcggtttagcgccgccttcagcccagggcgtgatcctggggtccccggatcgagtcccacatcaggctccctgcatggagcatgc

SEQ ID NO: 9653 - DNA, 458 bp, Canis familiaris
  misc_feature (1)..(458): n = a or c or g or t
ttttnntagcaagannnagcttgcgttataggaattcaagtcttcctgtgggcataagtgagtnnnagacacttgaaccaaatcnngagcagagtgaggtttcagagtttatagaaccggttcagagaaattctcatcctctttcccaaggtaaatctttttagatagctttagatggtaaatactttctgcacttattagctctgtctatgatgcaagtaactctccttccatttgagggatagttcagggaggtgggagcattatctcccatttttctggtgacttcttaagagtactaattcaccattttatccttacgtcctcaaggggttatggtggagtaggacttaatgcaaaatagtcttctatttttaataggaaccttacctaactttggattatctagagttgtttcctttagaaaccagagctatttatttgtatttaaagcaatg

SEQ ID NO: 9654 - DNA, 527 bp, Canis familiaris
  misc_feature (1)..(527): n = a or c or g or t
ggctcccaggcccggacaggctgggcaagtanncangnnnnagccgggacatctgggccagcatccacccaccccatctcactatgcaattccagcccaagcaccatttcccgcggtacccgggacccctgcccagccctgtggnaggtgggtagcctccctgggcccctaccaaggggccagggnnntctgtttaaccataatggttgtgtgctgtaccattttgttacatataacatataagtcaatataattttgttaagactccaacccttccaattcccctcccagccctggtacccattccccagtgtgatttagggccctgagcgggaagggggtactgaggcctgaaccactcggcatcttcttccagcatcttcctccaacctctgtagggccatggctgtatgtgctgtcgctgtgttttttaattttttgtttttgatttttaactgggtttggggtttgatttttatttctttgggggctttatttnnnntggcagataactaaaaatctcgtca

SEQ ID NO: 9655 - DNA, 640 bp, Canis familiaris
  misc_feature (1)..(640): n = a or c or g or t
aaacactatggagaaaggtatctggcctagtgttatttggtcctcttttctgcgctagaattagntctagaactgtaactgatggtctgagcccctggtggaaattctgttaggccaaacgctgactttaccaagtggcttattgattccagctctgtgaaggtgacctccccctgcccagtgccccttcatgtcttcatacctacagtgtggaaggtaatctgcagtgtgatacaagggtgaatattgagcacggtggcacccaaactcctgcaactgtcagaacaattgtgcaatgattgttaaaaatctttgaaaatgcctacatttgtgaacacctcttctcaattattaaagtaaaactaagtatcacttcctagtcaaggctaccagtcaaggctgaattctgtgttcttgttgaacttggtacaagatttagcagtgacaggctaaagaaaaaaaaaaatcactgatttcttgttccaaaacagaagtcaacaagttgtgaaagaaaatggtaaaatggtcagagtaaaatatttctattttatctgtcctcccctcaattttgaatctaagttacaattgtcaatatcatacgagcatgtgttacatggtatggttgtcatcatagttcaga

SEQ ID NO: 9656 - DNA, 531 bp, Canis familiaris
  misc_feature (1)..(531): n = a or c or g or t
cgccgtaagccagactatgagccagttgaaaatacagatgaggcccagaagaagtttgggaatgtcaaagccatttcatcagatatgtactttggaagacaagcccaagctgattatgaaaccagggctcggctggagaggctttcggcgagttcctccatcagctcagctgatctgtttgacgagcagaggaagcagacggcaggaagctacaacctcacgagcgtgctgcccacggcgcccgacatggcccagtttaagcagggagtgaggtctgttgccggaaagctctcggtctttgccaacggagtcatgacgtccattcagattcatgacttgcaccacttctggaaaattctcagccatgatctcctcatttgccacgtgtcctccaagcctgccttcggacactcagcttaggctctgcggtaccttcttgttctatgaggcgtctctgcaccttgcgtcacacgttcaatctccttgcctccctgtgctgcataatgagtggnnnctcatccccgtgttcca

SEQ ID NO: 9657 - DNA, 551 bp, Canis familiaris
  misc_feature (1)..(551): n = a or c or g or t
acaggagaaaggacggagagagaataanatgtctttatacacaaacacacataaaacaaggttttatatatattgattggttaacaaaaattttgtgaccagaggttcaaggaacctaggagaaataggtcagtatgcagcacttcatttttcatggcagttttatagaacataaataccacaattagcacaaatcagttgcatatggtacaggagtaagatgtaaatgaaactattctttttagaggatatgtttaaggaagatattctaaaggaagtggcaattgagttggattttgaaaaaagaataatcattcattatatatttgagagggaaagggcatcactcagagtgagtaaactgcatggtcgaaatacagacatgtgaaatagtctgagtttgaggaaccagaaagaaatatgatgttttctaaccagggagtttataatgttttggccatatttattaacattaatatatgtctacaacaattgaaaactctaggtagaattattacccctcaaagatgcagaaaatcttctatgtattt

SEQ ID NO: 9658 - DNA, 551 bp, Canis familiaris
  misc_feature (1)..(551): n = a or c or g or t
acannagcgccccggnntgtngggtgccccgtnntgcctccatgcagnnnngagcaggggaccaggnannnnnagcagagacaggnnnngcgacagtnccngcgtcccagnntcagcattcgcatcctcttggcccctacttttcctctccgcccagcagacatctgccctgcccttgcccttgaccccattgctgcgcttccctcaaggacgggcctggccttggtggccacctgcggacagccctgcgcccgacgcccgcttcaccccggggcccgngnctggaggggccgcccccaggacgaacgcggctgccccacggggccggcccctcaccggcttcgcgtccaagccaaagtttctcgagcacttttttgttctttgcaatcatgttgggttcattgttggtgttttaaaattttgcttccctctccctctggcctcgctcctgtgtgtgttttgtagccgagcgctaacctggatgcttttttgaatgacctttgcaagagcctgccttcctcggcctctgctctgttttatttattgttgaa

SEQ ID NO: 9659 - DNA, 542 bp, Canis familiaris
  misc_feature (1)..(542): n = a or c or g or t
tctctagcnatacacactctcgtncgttcttttgtnngtcntcatcccggctgnnnnncttcagtttctggtttggtaggggtttggggctgagggattctagggagccctctgatagctagacgcagccccagccagccctgtacaggggctgggagcaccagcaactctgatttgtaaaagagaaaatagcgatgggaaaattgagtgcattaggaggagtcaggcccccattctgtgctctccctctgggccggggtttctcgggtctcatgggaccatggggtcgcatgggaccatgggggcagagctgagaagcaggtccccggtttccaactgggaggacaagcttaatgcagcaggctgatgcaggggggccccgccgcccaggctccccgggtcaggacccagctgggacaaagttggcttctggcagctgagaggcagaagggccaggagccaccccctccccagcccacatagcacagaaattcctgaggccaacgtcaccaaagttcaattgaaatgttttgttattgttt

SEQ ID NO: 9660 - DNA, 496 bp, Canis familiaris
  misc_feature (1)..(496): n = a or c or g or t
aattcatccctggggcactggactgacttgttggtcatacatgtttnnttgggggagtgaaatttttgaaaaacccatcaacaaacaccaagaaccttgtcccactattacaacattttagagaaagtgtgaaagatgaagtataatttgaaagtggaacagtaggaatcgaggaagaaagaacaatggagaggataccagttctggcactggttctaacaacccactcactgtgtgactttgggtaagtcatttcacttcttggaacctcagttcccttatttctaaagtgaagaatttagttcaggtggtttaccacttttcttccagctttttagaaaaatctatgaattttaaaaattgtaattatatgacaataagtaatataatttccaactgtgaaatactgcagagcatcacaaaagacacttttaaatgtatttttaaaagcatcatgtgaaaagaacactcagtaacatgcatacaatgatacttg

SEQ ID NO: 9661 - DNA, 543 bp, Canis familiaris
  misc_feature (1)..(534): n = a or c or g or t
gaaaagtccagattnnnctgggaccccaccctggcctctcctggagctctgaacctgctgtggaaggaattggctatgaccttcaccactggagagtaaggtctaaggcaagggaaggggtgttctggttctaacaggaggaggattcaccatgataatctagtgcctttgtggaggggtttggaagaagtattccagcccaatttcttcagatgcaagcttacttctgtggctgcctctctccactgaatattcggcaccagaagtcctgaaacaccacttctcatttgcctccctccctcccagtgatcaaggctttggggccactctttcgtaacgccagattatttaaagagagaaaaatacaagacaaaaaccttctagcactttgtaaacacagtgaataacctcttggagtatttttggctttatataaaacaaggtttttaattgtaaaatataagtgccattagaaaatgcacagggcgtatctttgttaaagtagatttttcaatgttttacagaattacattttcaaaaaaa

SEQ ID NO: 9662 - DNA, 555 bp, Canis familiaris
  misc_feature (1)..(555): n = a or c or g or t
gctcccnntgagtcagttccaaaatgcctgtatttttagatgccacnacttttttcctcaaatgctcactttgtgaatttcatttcctgtttcatgtcagaccagtggttgaaattggcaggtggctcactgggcttgtgttttgttttgccaacattgtttccattccatttctctgtgtacctgcaccttggtctggatcttgcaacaaactgtgtgatgcccaaggtctctgccttatttcggtgggcaaggtagcttgatgtcctctgcctgtgcattgggatgtttaggttatgcctgcctcctaaactggctactgagaaaattggcttcagccctgtcaattggtctctggcagcagttcctaataattatttatgcttttgggattttttttcagctcctgaaactctctatccagtttggttttctcaatctgtacagcatatgcacattctcttctcttttgtcattcctttcccccacctcacccctgccatttcgttttttaatgttccatagttttgtacannntgagacttagccttgggt

SEQ ID NO: 9663 - DNA, 466 bp, Canis familiaris
gtttgtggctttgccctttccaggtgaacggaatcccagcaatatgtggtctttcatgtctcctgggttttccatgtcgtggaatatgtcagagccccataccctttaatggtgcagtgatgacacccagtgtgtgggcacagcacactgctgatctgtttctcacggacagttgggttctctccacaccgtttggctattatgaataatgcttttgtgaacatttgtgtacagacatacatgtccatttctttttggtttacacctagaagtggaatttctggttcatttgacaactgttttgactttttgatgaactgccaaactgttccaaaggagctgcaccattttccttacattctcaccgcagtgcgtgagagttccaatttctccatatttttgtcaacacatgttattatctgatttaattgtagccatcttggtgtgaagtggtatcctgatttgc

SEQ ID NO: 9664 - DNA, 624 bp, Canis familiaris
  misc_feature (1)..(624): n = a or c or g or t
gtactcatcctagatgatgctaccagtgcccttgatgcaaacagccagttgcgggtgaagcagctcntgtacaannnnnntgagcggcgctttcggtctgtgcttcttatcacccattgtctcagcttgttggagcaggctgaccaaatcctctttctggaaggaggcaccatctgtgaagcaggaacctaccggcaactcatggagaggaggggatgcttctggaccatgatgcaggctcctggcgggtcaggtgttccggaatgaaagactgcttagacctgcataggctatctccctcccttcttttcacctctctgatggagaatttgggaacaaagggcttaccagagctgcacaggaggcagctgcttctaggaggagtgacatcctagagcacagctccataaactgatacctaaaattctgccatgagtgttgcgccctctccaaacaactcttgatgatgcagatttcttggaagaaaacaggatctagaacaccttagtgtaactgagtgtagagccaggattttggtgttgatagaaccccgaaaataagaactttaataggtacagagaagggaagatcggctactttccannnnngctaaagtcatatgct

SEQ ID NO: 9665 - DNA, 671 bp, Canis familiaris
  misc_feature (1)..(671): n = a or c or g or t
actgaagcccannnagatgatgtgactngccccaaaccngcagccagtagaggactgcaaaggccatatgccttccagtacaccaggatacctcctgattgtcctcaacacctactctgcttccccatcccaatccccacatccttacaggttcccctgggaattcctgcttcagtgaagatgacaacaccaggctcacactttcctgctggccccatctcctgcagacaccaagatgagcccacactgggctggatgcttgggcagacacccccccagtgctgctggacacctgggtgtgggcgccccctgagaagaccaactctttcacttttagtaaggacttgagatgatttacagtgaaagatacaagtagaatatgattgttcaatggaaatagaaaattaataccataaaatagaagatagcaaatttgctagcattgaaggtcaagttagctatatggctaaaggttaaattgatctttggggcgcctaggtggtacagttggttaagtgcccaactcttggtagtgatctcagagttatgagctggagccctacctggggctcagcaaggaatatgcttgagattctctctctctctcttcctccgcccctcccactcgtgtacacactctctaaatctgaaataaataagtcttaaataaa

SEQ ID NO: 9666 - DNA, 584 bp, Canis familiaris
  misc_feature (1)..(584): n = a or c or g or t
ggtgtgagagaggnntttgtgaagacctacanacccaaaaganntgcgtggcagtgctggccttttggtcccctgtgaaggacacggccagttagaggcactgattctagaaacactcgcctgtgagctgaggtgtgcaagaatagncttccagctgtcttaaagttgcctttttttgaataatgtgtcacaggcagtgtccagtttataaagccatggagtggtgtgggatatacagcttgtcacatacacaggtctcatatttgtccgaatggaaaccagaagcttctgggaggaacagctatcggaagtgaccatgatccacaatgcactaggcagttactggcaagtgagcaaagaaaaacctgtctccatttgagtaaaatttctacacagatgtttttttccgtgatcagaatgcaggacagggcagcaatttcaaacacacctgaaatctttttactcattaagtatcttgttccggaatcaccgaggtgcatgatttctatacatactgactgctctccgtttacaaagcccgcagcccacacaggtacgcggctacctgagctcatgtgccgtgc

SEQ ID NO: 9667 - DNA, 187 bp, Canis familiaris
  misc_feature (1)..(187): n = a or c or g or t
aaaagntnannngggtatnaaaaatttnnnnnnnnnnaggacnnngannnacctatatgtcaaagccagtatttgtttaggctatgaaacagtgctctaatattacctttttatcaaagtgttataacacatctaaaaccgggaatgtaaatttattaccaaaagaatatgtactctaaaaaaaagt

SEQ ID NO: 9668 - DNA, 523 bp, Canis familiaris
  misc_feature (1)..(523): n = a or c or g or t
tgttataaggttatatagataagagaatagctgataacacaaccatataaaagttttctgataagacaataagtaactgngctggagataaaaagttttctgataagataataagtaactgggctggagatcaatgtagggtacgtttcttaaatgtgtgttttcctagaagtaaagaaaaggtaaattgaactgtagactgcatcactaaggctttgtggcactgttgcaccctgccacacactgctgtcccagtttgagagtttgtgtgctgccatcctacctgcagcttcttggggacagtgtgattgcagttgctctggaacccctggtgtttgccttcatttccccttaacagtgcagaggctgtgcagcagcagtgaaagctctcaggatgtcctgtgctgcttgcagtgactgttctgtgaagagaggacacaactagttctagtctccacagtgtgctcttttgtgaggtttcagaaatgacttatttgcccagtgatcacaccaaactgttagc

SEQ ID NO: 9669 - DNA, 367 bp, Canis familiaris
  misc_feature (1)..(367): n = a or c or g or t
aggggccaggcgccnntgagggagggggtggtgccagcactcnannccagctgaggcnnnacgaccccaggagtcaggtcctggtgcactaagcctgacattcctgcctggggaagggtgtaggagacaggctctgctccgcttcggnaggttaacatctccgtgtaaaacagagcagtgcctgacggatngnagcaaaccccacgtgggagacacgcacccctgccctgcaacacgccccggcccctggctgagcagccagatcgtaaagtcctccaagaactgctggaaccagcttatgctcaaaaactcccactccttttctgttnnntttctacatgaaaatgttcttnnnnngcccaggtgg

SEQ ID NO: 9670 - DNA, 580 bp, Canis familiaris
  misc_feature (1)..(580): n = a or c or g or t
atcatgtgcttcctgcatccagnntcaagcaagaaagctggtcaacagacaattgattccctgcttgttgacgagatgagcactcacaagcctctgcttgtgtcntggcatgaaaacataaggggagggttttccctccactagtgaccaaacttttgaccaaaactgtattcacttttgagatagtcacgaccccacatggctcacttgcagtcgtgttcccagcatcctggctggcttgcgtaatgcaacgaccgcttcagaaagagcctcccatccacatgctgctccattctcatgctcacagcacggagcccactgaggaaagttcaaaaccgaagatctgcaagctgttgtgggcttttgcgaggtggctgtcctatagttccagcatgagtagtggctttaccgcccagcccagctgaaaatcaggcagaaaccctgcgagaaatcttattgaagaagacctttgccgatcattgctcgctcggccacaggctgacccatccctggtaagaaggcaaatacctgtcgtccatcctcgtnnnnnntgcgaagtggagcnnnnntgcatttactg

SEQ ID NO: 9671 - DNA, 230 bp, Canis familiaris
  misc_feature (1)..(230): n = a or c or g or t
gccgggagccgacagctggcaccttggcagccaccaggacnnngagtccagcccggcctgggccggacnggtgggannnnnnctccnnnaacccacctggactccgtgacctctgggaaccaagccagtcccnnngcccccccacccccagggcctcgccttccggacccctccagggcccatcagcctctggaccctnncttcctgccagagccccgccctcccccagg

SEQ ID NO: 9672 - DNA, 645 bp, Canis familiaris
  misc_feature (1)..(645): n = a or c or g or t
taantgctactgagaatatcagtatgaagtgcagagannaccnnncntcaatgaatgatgtccagcnagtnnnnnnncctcactttaaaggtgtgaaaaaaaagnaaatggatttatgatgaaccgaagaattttcctggctcaggaatgcggagagcagtacagtccccaaatcccaaaaataaaatgagnnaccatcgcaataataaaaacagaaatgctgagaatgcatcatatatccatgttcagagagatgttatcaggactgtctcactgagtgcacctccccgcagcaggcccacaaatgggtcctacaataaagttgatgttaacaaggaacccaaactcaacctctgtccagataaatatatgtcaacatcatataatggttcagcctggcgaaaaagaattcctttttcaaaaacatattcaaaaactgaaaagatatatgcagagccaagaagaaatgggagcaagtaaatctggaggttgagagaagagaaaaatgagaaaagagaaaagtgccagatatcctctgatttacaatcaaaaatgaaaattcaaagaatgagatattcaagtactccatactatatactgggtagccaaagatgataaaatgcaaattctgaaaataagatgcag

SEQ ID NO: 9673 - DNA, 597 bp, Canis familiaris
  misc_feature (1)..(597): n = a or c or g or t
gttagaataagagaatcaggattgacaggggacatgaaggtcagtgtagaggaagtagatgaaagaggatagtacagaagcttttccttgaagagcaagaggtatagaagctctcaggaaaaaacccaagttagacctcataaagaggtctcatcgcccctcatcacccgatggnnaagcaggccttttcttgagaaaagcatttatctgcctatgaggaagagattttatcaatgtgcaaacaatgtgaaatgtggacctactctttatagaaataattagaaacactttagaaaaacaaagcaccttccatatactgtgatccacttgttaagtagcatctgctatagtacatcaacttttaaataagattcctttatgagccatacgtatcttttcttgggaaactggttaaagaaaaatagcagttgagggtaataccgagcagtttgaagatttcggtgtgaaagcaaaactaataagcaatcaagagatgacataaaatactgacttaactatgtgcaaaagaatcttttaataaggtctttcttcttgtcgttaagagtttgctaaatgggcacaaattattctggctat

SEQ ID NO: 9674 - DNA, 669 bp, Canis familiaris
  misc_feature (1)..(669): n = a or c or g or t
ccacagacagcnnatctcctgcacttgaccnntctgacttgatcctgactcggggaactnnnnatgaagaggatgacgaagccgacagtgatactgatgatattgatcacagagttacagannanngccgtgaagagccagcattccagaattttatgcaagaatcaatggcacagtactggaagagaaacaacaagtagtttctagaagtctgaaattttggaaccctgaaggaactatcctaacctctgatgggggctactataaaggacaattttgttcagagtagcagtgtttctcttatagggaaatttgactcagatgcagccagggatacaagaccattggacctaacaggcttcacgttttatcatttcaacttaagtacttttgctgctgatggatggaacagagagaacttactattcacctcaaatctctattaggctggatctgtattctactctcccgtcttgcccttgaccctgtaccatgaattcccctccttttagcagaaagggcgagaggaatcatgagcttcccagggtggcagcagtctgcttggcaaccagtcaatgttggctacaannnnnngcctcacacgaagtacctcattgtagaataacaggttcattgaagaaggtgagcaaaacataggattaatgaata

SEQ ID NO: 9675 - DNA, 486 bp, Canis familiaris
  misc_feature (1)..(486): n = a or c or g or t
agtgtccgcntcnnggtgaccctgtacagtngccannagggtnngctcagtcattgccnagtgaccgatactgtcnnngcactgngagaaacggggagctatgagctttgtgntgctgtgtnnnnaactgtttccgggtgtctctttgcaggaggcagaaagtcaggagaaagcacacaggacattctttcttgtttttcagcactgaaatctcaccttgaccttccnnttgaagacgggtcatgcccgagccctggatagactggtgtgggtttccagaatctcttttggacacatgtcggcttgttcatttttgacaaaggtctgctttccgaggattaattgttgtcaaatgcaacttattttctaatccnnncaggatccattttaaacctnnngatttattttaccttttttgataaagtcgctgaggtccccccaccctttnnntatggatttgccaatgattgtccagtnnnacaaatt

SEQ ID NO: 9676 - DNA, 634 bp, Canis familiaris
ccagaatgatgcaagaaatcaagccaagcatgcagtcagcaatttctgcaggtatttgatcctttattaggaactgaaatggttcaatattatgaggaaattgctctgaaatagaagtaaatgagtcctgcctgttagcttagttcacaggctcagtgaatcaataataataataataataataatgccacatgacatatatacaacagttcacactgcataaagtatatgtgtatataaaaggcactctagatttctgaataagcctatgaaatgagctcggaagatgtagttattctgattttacatgtgagaaatctcatgcccatggaagtcataccacaagtgatatactagtaaggtgccgttcacagtacactgtttttctgaaaagaaactggatacaaacttagtttttaacactaggtggtaagaaagatcaaaataacacaaaatttctttatagtgactgttactgatgactgtcagattcgtaattggcaactacaatgagatcattaaaaatgtggcaggtaattaactctaaatatttttttgaagactggatactataaaaaatgtcaatatctttgatgcatgcagaaacagcaaaggtataatatagccttcagaa

SEQ ID NO: 9677 - DNA, 624 bp, Canis familiaris
  misc_feature (1)..(624): n = a or c or g or t
caacgaggtgcatcgcgcaccgacacgagnnctgaaacgtgttcaaacacacaaggcccaacttctgtatatgtagctgttcctttttaaaagaaaaggcgacaccggtctgtatccctacccatccaagttagaaaaggcgaccgggggcgccttcgtcgctccgtgggttccactcgcttttgcttccacgcgcggtggacgccgaggagtccgctggaggatgctcctctccctctgttcctcctcccactcatgtcctctcccaaataaatgaatagacctttaaaagaatgtttaaaaagaaaccaaaacaagcaaaaaaaaagcaaaaaaggaagcaaccgatcgctagtgactactgcgttaaagcggaaacaaattttaagtgcaaatatcttggcctaaagactgtgggagtaaagaagcaagttcttacgctgctgcattcctctccttccagagaactgaggtcactggaagttggtgcttccatggttagcactgaagcctcgggactctgatgttttaatatccataggagaaaaggagtggattaggtccgccttttctggagttacatattgtcatttcaaagtgttccattgctctaagtttcaatat

SEQ ID NO: 9678 - DNA, 566 bp, Canis familiaris
  misc_feature (1)..(566): n = a or c or g or t
cnggttctacnnngcccacttcacattcttttcagnncaggctgccttcccgaggcttccttctnngtcctgactttnnntcttgcagaagggcttttccttccaggttatgtgcccagtgacacctgtactgtccgacagtggtgtccctgcctcagtgggaccagtttcagggcagacatgaggcctcacacttcagggctnnnnngagggcctcacccacatggacacctagagtgggatggccaggtagttgctgcgcttttcccagattccttgtaactgctctggcatttcgccccatatcattccctagaatcatctataccaccgcatccctcggcgtcttactccgccccattgctctctttggttactgatgtgatttttttttaaattttataaaagattgatttattgctgtgcctggctcactcagtcagttaagcctctgccttccgctcgggtcatgattccggagtcctgggattgagccacatgtcgggctccctgctcagtggggagtctgcttctcactctccctccccctctgcccctccccctgc

SEQ ID NO: 9679 - DNA, 605 bp, Canis familiaris
  misc_feature (1)..(605): n = a or c or g or t
cagctatacttcagttgagcangcagaaatggaaagtgannacgcagctggtccctttcactccatccttgannaacctgtccccttctcagtgtggcnagtggtctgcattctagaatcactccgctgctggttttagcagatgatgggaagaaatcaggctttctaactcccatctccaaagactgtatttatagtacactctaaactacttctgatgtatttaatgaaaaaaaaaaaagattatttgttcaaaaagcttcggagtattgcacattccttttctcctattggagatcagttcacattaggatactaaagattgagaattccagttacaataaagaaaactaacctttatctactgtttgctgacactattagagcatggaaatcttagcctctactcccccacctgagaaaacctatcagcactttctggaagactgttctgcggaatgccagtgtgggcccactgctgtgctggagggaagcatcttgttagtgctgctaagtttaccctttatgattttccctcacctcctcaagctttatttctcaacaaaaagatgaggattaaggctaataagtggggggatgtgaaa

SEQ ID NO: 9680 - DNA, 526 bp, Canis familiaris
  misc_feature (1)..(526): n = a or c or g or t
tcagctcaacattcnatagacggggtagnttttatatcctataataccaagcatactaaatggcaatttggagtcagtcgtgcatttaatatgtcttgaacattttaaatttcttctattcccatgttgtttttggtagaattgtttnnnaaagaannccactnntagatcttggctctccttgtcagaanncttgtgcactctgtaacatcttggnngtggtagtccagtttttctagtaactgttaatgtgctgtgcaagactgaaaatttgaatatgtagtgtatatgatattaaattgtgaattaatnnnncttaacaaagtaacagtgtatcagcatttgaagatattggtanctgatatactnnnnannnnaatttgnntccaaattttnngcnnnnnngtcactggaataatttnnagaaaaggatcacaactacatgattttnnagnnnntcggtacgtacgnnaagaattgtgtacaaattgaaatgtctgtactgatnntcagaagaaccaataaa

SEQ ID NO: 9681 - DNA, 462 bp, Canis familiaris
  misc_feature (1)..(462): n = a or c or g or t
gtctgggactccgagcngagctaannagaatggagaggccttccaagaggaaatgtgactccccgcccagggagggccactcttgggcctgcttgctctctgcctccacctcccccacctccatctccatcctggagaaatcagatgcgcccaactccccagaggacctgacgtggacaaggaggcagaggatgaggatctggtgaaaattaataaagagcagctcactggagtggaagcgggatgctaagtggggagggtggcgccactgggtgtcagtgacaggccaggcgcagatccagcgcagactcacgacaggggagaaccatcagttagggcccaacagggaagtgtgcgcgccgcacctgggaccagaaatcggccacccgtgcatctcagccaacgggaaactgccgtcacccccatgctcgcttnnntccaatagacttttgttcaacatcc

SEQ ID NO: 9682 - DNA, 599 bp, Canis familiaris
  misc_feature (1)..(599): n = a or c or g or t
gaggattagtcgaaagcagaggactccaaactcannnnntgtggagcaagagctccttcagtacacgcttcaggantgtcntctcacacacagtggcaaagagtgtgaggctgcaggcccatgtaacaggacagttgaatgctgtactcacttgccatccaggaagtccatgagaggccggagcacactatctgcatcctgagccacagaggccctggcgttgggggatgcattccctgggcctcgcacctggcccaggatgtcagccatttgtcgaacacactcatcaatccgcacctgaaaactacacatgtgcccgcagtgcagcccttccctgcccaaacacacaaagtccttggaacagcaccagctattcaggcccattccagcacactcctggtacagctccagcagggacagccaacaggaggaaagggaagatccacacacctgcactggatggagggtgtggagcaggggctttgggattggccaggggccatagctggctcttatgactgtgtggggacactgacctgtttccaaataccatgctgagctcatccagaactgtattcagtttcacctgcagctccttc

SEQ ID NO: 9683 - DNA, 513 bp, Canis familiaris
  misc_feature (1)..(513): n = a or c or g or t
ctcataatnnnnnaaagtaaggtgtggccatcccgtggttcagctcaccggctcgagtgacagnngtannacaccacagagaggccagcagtgccccgtcccctctcaccaggccactgnctgcgggctgcaccagggacccgggagctaaggctaacgtgaccgcctgctggccaggccacccctgggtgcgcccaccgacggccgccaagccagggtaggccccggaggccactggctcggtgtcaggcccaggcactgattgtgacagaggagccacgacccaaggtggggctaggcccagacctcgtgctacccagaccgcgcgaagtcccaggaagtcgggcaggtggaaagctggatggggcggggggggggggggcaggaaacaagacgggactcacgcgtgcaaagcaagtccacttttgtgcaattgagcgtgttcggaggtagcacaggcttacgatgatttcatgtccgcagtcatgagtcacactacatgcccacgaagct

SEQ ID NO: 9684 - DNA, 694 bp, Canis familiaris
  misc_feature (1)..(694): n = a or c or g or t
tgtatgtgctccaactgcccccaccttctttgggtgatgtcntggggggggtgcattttattcttttattggcagtgtctctctttttggaggtgcttaagcagaagcattaacttctctggaaaggggggagcagggaggactcaaactcttccactatcctaatgttcagctcccttctctttataaggaattctgggggcccccatccctaccctccagcttctaatactctcctagagagggccgggctggagctatggcctttgaggccacagagccttatcaccaagtgtcttcctcaaatcatggattcattctcaccttgtgccaaaataatgccccctaccagcccctctgtggtgctggcattgtccttaaactaacaccagcatttgagggcctgtccccctggcccagcagaggtctctaccagctcttcccttgctcaactgtggcccagggggactggtgggacaacactggccctttccaggatccagggaggttcagtccgagacttttctgttcccccttttctcaagtgccttaatagtagggctaggtgtttggagagtaggggggagggcaggctggcagctctccaatcaagaggctcggttttttactgaagaatgaaagcagttggactcttgctctttcnnnnnngaactaataaattcanngccaagcg

SEQ ID NO: 9685 - DNA, 644 bp, Canis familiaris
  misc_feature (1)..(644): n = a or c or g or t
ctaacagactctgatgangaaaagttcatcantgtgtnngaactcactaccantgtagaaagagacaaagatnnnnntgaagatattctgctaaccaatgaagagtctatggatgaagtcaatgtttggatggagaaagatatcacaaatgaagcagagaacaatcccattttgctcactgctgtggaatccagatatgactttgtaatccctacatcagtagctatgaacctcacggaggattcatctaccctgacaaatgaagatctgtctgagaataatgcaatagaatttgtaactaaggacagcgagccactttcagaaactacccctgatccagataccctaagtcatgaggaagatgcctttacaactgaaatgggtgtctttaagttatttaaagaagaaccagatgagttcctgatttaaaagcagcaaaacagatgccacacagaattgagcaacaattctagacagctagttttaacatctaagaagcttgcccaccaagcaaaaatcttaataaattaaagaaagtgagcatttaaggtcttaagcactgctaacgcactcttcttatgcttttggttagcaattcaagaannnngtatcttcattcttnnnnnncgcagacttttaaaata

SEQ ID NO: 9686 - DNA, 606 bp, Canis familiaris
  misc_feature (1)..(606): n = a or c or g or t
gtnnccnctgtcatggggcaagcagnngcnaatctctcggcatctgttctttgaggaacctgaggttggctgccagagaaatgtgcttcattcccacccccatctcctggtttatttttgcatactctaggaaacatttccaagattctgggatggcaaagcataaggtccttaaggaaggggttgggtcttcttcttgtgaaaggttcactgcttcagtatttaatgctctggaagcacgtgaagttcccaacactgttagcaaaaccttacaagaaaacctaatacaagaaatacaagaaaaccgatacatgcacaatcccacagctacagacacaccttctattgatgatggagaaccttcaaagcatgtctctttctctccttgcaacagaataggcagtacagaagaagcattctatctgcgattcccccgtgtaattcaatgttaaatagcgcagtcctctttgaaagctgagatgaccacatgccctttcctttgtaaatatactctgaagaaagccccctccacacactgccccttcagtatatgcctcgttgtactgctgtgtcatatgctacgcacatgtcagaaaccattagcgt

SEQ ID NO: 9687 - DNA, 586 bp, Canis familiaris
  misc_feature (1)..(586): n = a or c or g or t
tnnagtacatttaacacacttcctttcccctctacacctttcttccaaagggaaggagaaccagtggtgtttgttttctatctgagtcaggaagaacgaatcaggtcatcatatctgtgatgagacttacggagcacaccactctctcctgactccagcttcaggtgcagggacaagcagtcagcaaccacctgatggtgcttcacgtcattcgtgaggtttgtggccacagtggcacttgggtgtagctctgtcatttgtcctatatggtagacggcagattacctccagatcctgccatctgtatatttttggttgacttccatgtcatctctacttcgttttgggctttcatccctagcttattttgtggctttttaaaaagttgatttttttgtattgtgtaattctttgatccctgatggccagtaccccgggtcccctgacctgccatgcaacttgcctcttttctcctcccagaaagcaacacacactgtattaacttatggctctcattaaatgaggttcatgtctttgtgttttgtccaaaactatattggaaaatataaatatattgtttcatgca

SEQ ID NO: 9688 - DNA, 575 bp, Canis familiaris
  misc_feature (1)..(575): n = a or c or g or t
tacatatcacccctgaagaatccatataaaatttcagaaggtgtgccaacgcnnncaaaaatgactccaagatcaagaatcntagtgtcaattggtgaatcatttgggacttctgagaagttccagaaaataaatcagatggtgtgtaacagcgaccgtgtgctcaaaagaagtgctgaaggcagcaaccctcctaaaccattgaaaaaactacgctttgatatcgaaggatcagatgaagcagatggaagtaaacatctcccaggggagtctaaatttcaacagaaactggcagaaatgacatccacccgaacgcgaatgcagaagcaaaaactgaatgatagcatggatacatcaaacagagaagagaaatgagggtcccggacctgtgtgggcaccgcgtccgcctctggcctcatggtctcgcacagatcacaccgtgcgactctcccagttctgtttacggccacactgagtacctgtcttcggctcttctgacggatgtcaagtgtgcccaggggcttgcgtgtggtgtgcgtgcaggggattcctaagccatttgcnnnngcttgtag

SEQ ID NO: 9689 - DNA, 544 bp, Canis familiaris
  misc_feature (1)..(544): n = a or c or g or t
ctacaggcanaannncanctacannagnnctgagcttcnacnnatactgagggagntcctggggaagtcagaacccnngnnccagcactgagtcctgctgcctgaaggagcatgaagacctctgccctccccgtctgctgtggccgcacggcgtcctggatgctcctggacagnggacccgaatgccagctggggcgggcggaggaggcccagctgacccagggcgcccaccctgggcagctgggagcgtggctgtccgtggaaggcacaggttgttggcgtgtgatcccatccctcttattgcccctgaacctgagctcttgtcgggcagacggtgaccatgcaggccggccccccgctgctggaccccacaccggctgagctgggcccaggggtcctggggcgggggtgtggggtctggggaccatgctgcgtgagatggtggcggtcccagccctccccccagcaccctttgttccccggggcctcacagtgggggatgggtccacgacctgcccttcctctgctttctccccaccngtcc

SEQ ID NO: 9690 - DNA, 564 bp, Canis familiaris
  misc_feature (1)..(564): n = a or c or g or t
tactggtgaaaggnnatctggcatttgtttttaaaaacccttaaattcccatgtatgtgtagtttatcagtaagaggccaaagtcagttcaaatttctctctcttcttttgggctttcggtaaagaaaatctatttcaaaatgacattattaatcttatctgctatagcacctaaaaaatataagtgtccaaaggtcagtcttccttcttctgttcctccactatatgcttgagaaatgatttcccccttatcattagagaatgaacaagaaacaggatttgatgatacagacattgggtgtgctataaagacacctttcatggtctctaagaaagagagctcaaaaaaagaggctttttaaaggcattccaaaatcctggtttcctaacaagtgccttgttggattctgtggtctgcattttttagaattctcattaatgacactgacaagcatttctctggccctagatgtcttcctcacctttaaaacagcactttgaccaggagcatttcttatattcgtggattaaagatcataatcaaatctgtcttgtcatctaaat

SEQ ID NO: 9691 - DNA, 685 bp, Canis familiaris
  misc_feature (1)..(685): n = a or c or g or t
cacgtagaggggttgagtatattttgtaaaattctaatgatttgtatttctgtgctgttctaaagtnnanctttttactcatattaattaaagatatagaaactatatatttaaatcatgtaagtgggacacaatttagggttttggttttttttttccagtcttatttttcatcagcatctcacacatagtatgctgctcaaatttttttgtgtgcaatataaacatttgaacatttcagtcaggtactgagccagaaaaggtaattgaagtttttttaggaagcttctgtgcttagaaaatattttgttttcttgaaatgttaatttatagctgggaaaatgggatcaagacttaatgtgtttcaagccgcttggtcattggttcctaaatttaggaagcatttgattaacaagttagtgaaggcatttagtgatcacaaaagtagtttaaatatttgagattaaaggcttcccataaccctccccaggaaagtttagctaagaagtcttagaaagttttctgaggaggtttagcagtggcacacgttttgatcagaaagatagtttctctttgctccaatagttttatatagttctttgtttctgttgtcatttgttttttaaaaaatgttaaatgataaatcacgtctaatcatagtgaattgtaaaacttctgtatcttt

SEQ ID NO: 9692 - DNA, 470 bp, Canis familiaris
  misc_feature (1)..(470): n = a or c or g or t
gttgtcannagcagagaacagccccccagcaacgtggggctnnnttcgannnggccgttgcctggccctggttcacccctgccaggctctgcccactgtgggggctgctgggcctgcccccaccctgagcctgagcacggaccaggagcccctgagtgctcccgggtgggtcaaggccctacacacaggctggccatgctgtgtgcgagggcgtgtgtgaggcgtgtgtgtgcgtgtgcgtgcgtgtgtgtgggcgtgtgtgccccctgcatcctccatcctccctgtggcccacattgtacactaagatttaagacgttgcctcgtattgtacattttggggaaagccttgggtgtaaatcagtgtaaacttgcaggagagatttttctatcatgtagagtaggtattttttatagattgaaggttgatcaattttttaatacttccaagagagaaaactatctgtgta

SEQ ID NO: 9693 - DNA, 424 bp, Canis familiaris
  misc_feature (1)..(424): n = a or c or g or t
tatgcanntggccaaaacctatnnaaaaaacaggccccaagcctgaaagtgtgtnnnnnnnnncaacaggggcnngnnnaactccaaagtgacnnnnnnnnnaggaggaagaaaagnnnnnnnnnnnnataggnnnnnctgaggcccnnnnaatnngcnnngggcagacannnggtannactgcagaccctgcctcccagtgaaagttnnncagggagcaacnnngggaaagnnccttgnagttcagtnnnactacannnnnggtanannncnnnnnnnncncaactcaaacccaacatggccccagactggcccattaatgacatcagcaannnnnnnnnttacnnngnacngggctgannnnnnannnnnnncagcccnnntngtagggnncnnnnnnnncanatannnnnnnnnccnnnnn

SEQ ID NO: 9694 - DNA, 642 bp, Canis familiaris
  misc_feature (1)..(642): n = a or c or g or t
atacatatgtagactatatacatgtgtgtatgtgtgtatatatatatacatatatatatacacnngtataaatgtatatacacacatatacctaaaatgtgtgtatgtgtacgtattgaagaaacagacaccatattcatctctaaaagaatattcagagaatatcaagatgactctggctgaagaaaaaggccggtggaaattcaggtgaaaatgttcattgattcccgttgcatccctctgtaattttgcagctttctgtataaacattaaatgtcttatatagcagcaaaaatataaaatagttgtccatattttcacagctgtggtataatttatgaaattagagagtaacttatcagcttcttaacagaaatgcaagttttgatatgagtatacagtatataaaaaatatatatagtgctatataaaaatatttggtctctttttcattttttgcactagtattaacacaaagatatgtctggctagtgaggtttttatgatatccctgatcctaatgcaagagatggttatttataatcatttattttaaaaaataaaaataagtgaataatgattaatcaagttaacattgttactctctgtgacaaaattttataagtaaatttaaaaggacat

SEQ ID NO: 9695 - DNA, 540 bp, Canis familiaris
  misc_feature (1)..(540): n = a or c or g or t
ttnacgtctccaacttatganctaatcaagagtnnntgtaatcangatgagacttgtaaggtgtatcccnnatctaaacactatnnaagattccaatttaatgcctttaagttctngaacagtctgggctccgtgtatctacagtgtaagattttgatatgtgatagtggtgaccatcagtctcgatgcagccaaggctgtgtctctagaacgaaacgagacctttcttcatacaaatggaagaccgatgctgtcataggacctattcgtctgaaaagggatcgaagtgcaagtggaaatacaggatttcaggatcagatacacaaagaagaaactcagagtcaacctttcagcagtctgcatctattttcattcacagtccttgctctgaatctcgtgattgtggccgtgatcataacaaggcattttgtgaatcagagaacggactacaaataccagaagcttcagaatatgaactaacagggtcagccttcactgagactcattttccctgaacgctaaaggaaatgctgcctcgtg

SEQ ID NO: 9696 - DNA, 632 bp, Canis familiaris
  misc_feature (1)..(632): n = a or c or g or t
actcactgagatgnnagcatgcccagagtnnngcttccagtctagctcctggtcggcccataatggatgtagaaacaaatcccctgagagtngacattattctacttatataagttcagctctcaggaaattgtattacctttttatatgtctcccccctcttccccacaaataatttagttagttattccttggggacgtttatggttcagcaagacctgccacttcaggaagcaaaataagagagaaattgagaggggaagaacactttgcatttgttaagatgttggagtagctttggcatggggagaatctggctgaaaatgaagtggtagcagtgaggacagcctgaactcagtgctctaagcatttgcgaaatggcagtggaaggcatctcctacttggatctgtgcgtataagagagaaatttggatagatgccctaattgtagggtctgttttcagcctattgttaaatatagcttacattgcattggcagggactttggaccctaatagtaaagctgggtcagctctcagaccgaagaagtagagccaaggatcgtaccctcagtaagcaagcctcaatgcccttcctttccactcatggttccatgannnacctcagannnn

SEQ ID NO: 9697 - DNA, 515 bp, Canis familiaris
  misc_feature (1)..(515): n = a or c or g or t
gaacggtggtgttaggggcnnnnggaattgtcaatgtgcttttgtaannnnnntgactgagaaattttggttttatttttttacatgaaaggggaggggggtttgtatnnntgcgaagaagcttccctgctgcctttcctgccgtcgggccaaagcccnnntgggggccnnnnncncgtnctgccctgtnncagcaccggccagcctgcagaggagccatatgacnaggcttccaggggacagggaggtgcgacaggtccnngaggccaggaatcagccggtnnncagcatttgttgactcggtgaacgagtgagtgtgtgggtgaacaagcaagtggagaaccnnnnnctaaagtgcanaccgtgggtgggggagatgaggtgnnngcccccagnnncgctgcaggcagccctgcttgggcaggaaggccnnngcccccctcccccaccgccccactcccagggatgtgccacagagtggctnnntgctnnctntagtctgttcccccccttcc

SEQ ID NO: 9698 - DNA, 528 bp, Canis familiaris
  misc_feature (1)..(528): n = a or c or g or t
aaaagattaaaaattgattttggttcttaaatatatcttttaatgcataaagtcatttttaatactgagtttcgatctaagaattatagtccagctgacctgttaatagtacattatattttaactaatttttcctgggcaagtttgcaatgtgatactagattttttttaaaagcttgttagtttgctttcttgtgtgggtgtactcacaattttttaaagtatgaaccacagctaactagtggtctcaggggtagtgaaacactcacttttattttttaatggcttagttaagatatgcttcagttactgatcatgctgtgttagtgattttggaggtgactcaaattagccgtgttttgtgttggcataacaaaactgttaaaatgattgttgattacacttttaagtgaatttgtcttttatgaggaaaccagtacaagtcactaaatattgtcttaatagtgacatctgcataacacttgtaatagctaaggttaattgagcttaaaggaattgnnccannnn

SEQ ID NO: 9699 - DNA, 166 bp, Canis familiaris
  misc_feature (1)..(166): n = a or c or g or t
ccgataccttcagagggttttgtggccacaagcttcatgatgtcctgactgccccaggaacagcagatctcacagctgatgtggatttcagttacctgcgcagaatggcagagggacangnngcttctctggggccaataaaacaacagacgtttttaaaaaatat

SEQ ID NO: 9700 - DNA, 269 bp, Canis familiaris
  misc_feature (1)..(269): n = a or c or g or t
gctaccatgggcattttattttacaaacgagnnagcagagaccagaagagatgggaccgtttgtctgtganctctgnnaannntnnannnnnnncgaaagtcttatccagnnnnaaatcctccagcccaccacagagttgactccannatcttctggggcgggggggtgcatgccncaaatactnnncatcaatcaagtcccttcaaagcccctgccattccttctcccacnannnnngcagggttncctttggcctggtttttatcaa

SEQ ID NO: 9701 - DNA, 558 bp, Canis familiaris
  misc_feature (1)..(558): n = a or c or g or t
cccacccttcaccctccccaccagattccannnggntgaaagttccagacctgctgtcaggctttctgtttgtcagaccanntggtgtccntnnngcaaaaaaatgaagatgcagccatgaaccgaagggggagnntgcagacccgaaatgcagggcccccaccccagccgccgtgccgggtgccttgctgggtgtcnngctgggtgctggctaccagcggagtgggcaggcccagcagcccagggatcaaggctaagcataaagtcttcacctcgacggtgacgcaggaggagtaggtagcttcctcctccctcctgaagggggacctattctcactctattaacctgcagtccagggggccgcggctctggagcctggacctggggtctcccagcctcccctggtcccaggtaatgtgaacagaggcaggtgtgagagcctgtcgtcaccttgatgcccccggcctcaccacggtgctacctaagaaagtcttccccccatcccgcacttgcctggtcagtgatcagagaattggaggaggatccnncggagtgtg

SEQ ID NO: 9702 - DNA, 671 bp, Canis familiaris
  misc_feature (1)..(671): n = a or c or g or t
atttgaacgtnggtgcatcggcttgtacaatgtgattttcaccgcactaccacccttcactctgggaatcttcgagaggtcttgcacccaggagagcatgctcaggttcccacagctctacaaaatcacccagaatgcagaaggcttcaatacaaaggttttctggggtcactgcatcaacgccttggtccactccctcatcctcttctggtttcccatgaaagcgctggagcatgatactccgttggccagtggccatgccacagactatttatttgttggaaatattgtttacacgtatgttgttgtcactgtgtgtctgaaagctggtttggagaccacagcttggactaaattcagtcatctggctgtctggggaagcatgctgatctggctggtgttttttggcgtctactcaaccatctggcccaccattcccattgctccagatatgaaaggacaggtcagtgctactaactgtgagtgggctttccctgtctcatgacaccaaatgaacttcagtagtggttggtgtggcctgcttccatcaaaattcatcaggagggaaacagaccaaatcaaaacacctggaagaggttgtcttgtcctcagacatggcatttgaaattttaactattggatattatcaatttaaatcgtctgacctacct

SEQ ID NO: 9703 - DNA, 81 bp, Canis familiaris
  misc_feature (1)..(81): n = a or c or g or t
gggccccctcccccagggcaggcnaggctttccccagggaacaggtgggcggggctggttcccacgccaggtgacaggtga

SEQ ID NO: 9704 - DNA, 499 bp, Canis familiaris
  misc_feature (1)..(499): n = a or c or g or t
tcttcnagtagtcnngttttttatacaatgtggttgtttgtgtgtcnggtttccttttcttngcttgacataattgtcttgtgnnaaggatctcaaagatttcatgagacaagctgggnaagtaacctttgcggatgcacatcgacctaaattaaatgaaggggtggttgagtttgcctcttatggtgatttaaagaatgctattgaaaaactttctggaaaggaaataaatgggagaaaaatcaaattaatcgagggcagcaaaaggcacagtaggtcacgaagcaggtctcgttcccggaccaggagttcctctaggtctcgtagccgatctcgttcccggagtcgcaagtcttacagccggtccaggagcaggagcaggagccggagcaagtcccgttctgttagtaggtctcctgtgcctgagaagagccagaaacgtggttcttcaagtagatctaannnnnnagcatctgtggatnnnnngnggtccaggtcc

SEQ ID NO: 9705 - DNA, 477 bp, Canis familiaris
  misc_feature (1)..(477): n = a or c or g or t
tgtgaaaagacaagacaaatgaagtccactgtnngccaaagtagaacaaatattactgaaataacgattaaaacattaacnagatcccacaaaataaactcattttttttataaccactgcaaattgttataaaacaataggctggtatttacatttctgccattacttgaatgttcatctgtgcagggatataaaatctcctaagtgcaatatgtggctgttaaacctgctgtaaacaggtatcctattttattgtcgttcattaaataaactctgaaaagnnnctcagtaaacttagtttttaatttaaaaagtcgcctattaagaagaacgcggctagcacatcataacgacttttggtgatcatacacaagttattataaaagcagaagacaagattagccgttacacgtaggctatcttaactgctattagagcactggattattaaaggcccttcaatctagcagaatgct

SEQ ID NO: 9706 - DNA, 578 bp, Canis familiaris
  misc_feature (1)..(578): n = a or c or g or t
caanncagtgaannactactctgcctaccgctcttcccttctcttctgggccctcgtcgatctcatttacaacatgttcaagaaggtgcctaccagtaacacggagggaggctggtcctgctctctagcggaatacatccgccacaatgacatgcccatctacgaagctgctgacaaagccctgaagaccttccaggaggagttcatgccagtggagaccttctcggagttccttgatgcggctggcctgttgtcagaagtcaccgatcccgagaacttcctgaaggacctgttgaactcaatcccttgaacatcatgcggaagctgccgttggcagagaccgaagctagcttgccttccatcctccgtgttcttccctcctgtgcattgactccccccacgggacgctgcagcctcactcctccctcccccctcatgtcttcttggagtggcttggggtttttaggcttcctgttttatcttgtgtgtgtggtgcactagctatgaagttgtctgtaacccaagccacggaaggacgtgtacatacctaggagcctcgacctgtcctggccgactca

SEQ ID NO: 9707 - DNA, 35 bp, Canis familiaris
  misc_feature (1)..(35): n = a or c or g or t
tgctcaccaactccnnnnnnnctttaataaaaggt

SEQ ID NO: 9708 - DNA, 163 bp, Canis familiaris
  misc_feature (1)..(163): n = a or c or g or t
tgtcctcatacannntatagnantnnnaaataactcagaggttccctgtacaaccagtnncaggggtcctangngccgtagtttctacctgaattacaactggtttggggtacctgaattttgattggttagccttaattatagnnccccctctccccatgcc

SEQ ID NO: 9709 - DNA, 424 bp, Canis familiaris
  misc_feature (1)..(424): n = a or c or g or t
gctccatcnnnaaagctcttgtnnncgnntgaganctcgcgagacnntcggtccccccctgccccttccccccaggttacgagaaatcccgcagnnngagcagcatcgcgggnnngngcggggtgtcccngcgccncgcgccccttgccactccccctggctctcccagggccgcccgccgcgctcccccaaccctgccctccatcctcnngcgctcccctcccccccgtggggggactgggggtgacagggaagaaggtcaaaggagctgggggtggggggtgggggaaagggttttttttttttaaaatcaaaaagtcattaataatatgcnnncgagacgacgacgccagcagacacccccggacccctcacccccacctgggcccccaggntngaggggaangagccaaagtnnagcccc

SEQ ID NO: 9710 - DNA, 704 bp, Canis familiaris
  misc_feature (1)..(704): n = a or c or g or t
tttcccanctgctncncagctnctccctcacccccgatgcctgtcgtgnctacgcccatgctagaatagtgttgtttnnaagaatgactaagttttaaagcacctgccctgaacatgacctgaaaacaaaacgaaagagaggaacttgtcatttacccggtttttcctttgcaagataaaaaagcatggaaagctgtaatgggattttcctttgggtttttatcgtgctcacctccgggctcaggccagataagctgaggcttacttatctcgctagccacagcacagaggcccctcatgccttctggtgacatctgtaactacaggagaaagtttactgaacatgaaaaagttacattgatgctaagtatttttccagaaatcttagtttcatacttcctcatgcctctgcctcccatgcttgtatcgtcacaacacttctttaaagagtgatccaaaattctattttaatctgatgttgagcacctttaaactttctggtttatttgtgtgtgtggcactaatcctaaactttgaaggcatttcagtgttgtcacggcccattgccattgtgaaggttctggaactgcccatttgtctctggagatggaattaaaccaaataaagtgcttccattggaaggcttatatattgaccttgtaactatatgttnnnnnnctaaatgttaaataaaannnnntcnn

SEQ ID NO: 9711 - DNA, 240 bp, Canis familiaris
caggtgccccttagccatgagtttttaaatcatcttaactatatctacagaaaaaaaaaaatcttgcgatattaggtaggagctgcattaaacctgtgtatcgatttggggagaattgacatcttttactgggtctcatcttcctatccacaaacaaggtgtttctcccatgtaagtcctctttgattttaatcattgtgttgtagtttttaaaagtccttaaatgttagatttacatct

SEQ ID NO: 9712 - DNA, 559 bp, Canis familiaris
  misc_feature (1)..(559): n = a or c or g or t
gatatccagtatttnnccatgagagacatagatcgacttggtattcagaaggtcatnnaacagacatttgatctgctaattggcaaaagacaaaggccaatccatctgagttttgatattgatgcatttgatcctaccctggctccagccacaggaactcctgtggtaggaggactgacctatcgagaaggcatgtatattactgaggaaatacacaatacagggttgctgtcagcactggatcttgttgaagtcaatcctcagttggctgcttcagaggaagaggccaaggctacagctggcttggcagtggatgtgattgcttcaagttttggtcagacaagggagggagggcacattgtttatgaccatcttcctactcccagttcaccagatgaatcagaaagtgaagaacgtgtgagaatttagcaaattttgtgtgctgacatgtttcacgaaggacatttcagaattatgaggcaactgaggagatagatactaatggtcatctgggtcannnntgccttaatgagaacatttgtgcattctcacaattgta

SEQ ID NO: 9713 - DNA, 610 bp, Canis familiaris
  misc_feature (1)..(610): n = a or c or g or t
ganntgtgtcacagcccagagcagatggtggnctgttttccagtgtgttgaccncttcagcaccattggagtcagagttgaaccggagtgccgacggtgctcccagctcagaacccgaagttcagactctgtcgtgtcctcagtacattccaggagtgggtcctgacggttcccacggggggcatccacccataaacctgcctgggcctgataggcccctgagtacgcagaacctgcacgatggtgctccggcattagcaccgccccctttcatccctcagcctcatcagccgacgccaggccagtgggggccagggcagagcagcccacaaccctcaggtcagcactactggcctcgcccagaaggatctgttcagaatgcggtgccccatgcctccagtgttcctcacttccctgctccatccaacccgcaccatggtcctggccacgagcagctcaacccactgatgcctttgccagggcccttagccagtgacggaagcaccgaggcagcctacctgcaaagtggaaaccactcaacaagtaactttgatcctgaaaatgcattcaggcaaaattctcaagctgggaatactcgggtgagccagga

SEQ ID NO: 9714 - DNA, 695 bp, Canis familiaris
  misc_feature (1)..(695): n = a or c or g or t
attccccatccagtgagnngnnntncagccnagnnaagaaaaagtnntnntnnagaacatnctnnngagtcatagaaaaagannaagattcccagcactcacctatgctccgtgtggagggccagacggcagcagaacaggaagatggtcatcggagccagcactggtctaggtcccttactaatgtngaacagcgcagggagcaggaagctgtagactcgaaagttgtttcaattgccaaccgcgttgctgaaattgtttattcctggcccccgcctgaggagccccacgacccgggaggaagctgcaggtccaaagggagttttgtccatcacttcctccagaaccagggcctgttgtccccgcctagaggcgccggtgctaagaaagacggagaagatcagataatagccaaaatcgttgagctgctgaaatattcaggggatcggttggaaagagaggtatggagcttcttgaactaatgtggtttctttctgtgcccacgcactgggacggagaatggaatcgtactccagattgtattcctttgcaagttctggtttccacttagtcctgagttttatttcccttggagtgaaaattcttcacgctggcagcatctcaaaaatgaatcactttggaaaacataagtaaaccttctggagcctccctggaatttttggaaatgaaaaatg

SEQ ID NO: 9715 - DNA, 224 bp, Canis familiaris
  misc_feature (1)..(224): n = a or c or g or t
aaatacttggctcacatctctttaaacttggtaccagccgctacataccttttnnnnnaagctatctagattctctaagaattgctgttttgttggccatgaatgaccctaataaggcactggtggactgcccactgggagttggagagagcacatggcnnnacaacatgtgtcattaaacatactttgtctccagtattctgacnccgagtgtcaactgtggt

SEQ ID NO: 9716 - DNA, 576 bp, Canis familiaris
  misc_feature (1)..(576): n = a or c or g or t
caaggaacttctgcaagaaacatcnagcgtcccaagtcacccctggcctccatcctgaccttatggtgttccatgccaatctataatgggaactgttaatgtagaagtaaatataacaatccttggncttaaggaacttgcacctgttgtaaaggaagacattcaaggcaaaagttattacaagggaaagtctgtctacactggagaagactggtagacaacacctgaatcacatgatccaaatcctggggtgaagtgaaaccatgcatcaccaaactagcaaacctcttgagcaatattcctgccaaaaacatataaattgagccaaatcatgaaaaatcatgaggcaaactcaaattgaacatggactggattctagttaaagctggaagatcctgaacccacccctcctatggacacacaaatctacaactacatatggaatcatttcctctaaaaaaaggacagaaaggaaggaaccaaaaactagttgagtgattcctacacacacactgaagtgggctgagaatctctccataggccctacccctggtgcagtgacccacaatgagaaga

SEQ ID NO: 9717 - DNA, 445 bp, Canis familiaris
  misc_feature (1)..(445): n = a or c or g or t
ggtcactanngnnngctttgttggagatggcttnnntagaaaaccacctaaatacgaaagattcattaggccaatgggcttacgtttcaaaaaggccatgtaacacatcctgaattgaaagccaccttttgcctgccaatactcggtgtaaaaaagaatccctcatccccnntatatacaactttgggtgttattaccaaaggtactgtcattgaagtgaacgtgagtgagttgggccttgtgacacaaggaggcaaagttatttggggaaaatatgcccaggttaccaacaatcctgaaaatgatggatgcataaatgcagtcctgctggtttaacagcagtttcagacgagtaatcccttataattactgaagactacacacctgtcaggaagaccattatnnnnntggttctggatgctnnnnnnacagccttacatatcta

SEQ ID NO: 9718 - DNA, 598 bp, Canis familiaris
  misc_feature (1)..(598): n = a or c or g or t
ggccagagcagagactnnnnnncangctggctcagaannnnnnnnnnngaggtatacacagtnnnactnnnntnntgtcccctgnnnannncagtgccctgggtctctgtnntannagagggtgctgggtggnnnnnnnnactcacctggacaggcctgggcccnnnactctcctcgcagcagtgcctctgctccatgctgcagccctggtgacaatgcggtgattgtctgctgccccttggagtcagctagcgaaaccttagtacacctgcgatgagccaaataacgctcccggccccctcccctcctgaccccactgcttcccaccagcccagccacctgatatcagggttatagccaggacagcccccccactccttggggtgggggtggggggtgcttgtcgctgtgcctagctgccctgatacccagcctgtgcagaccagagagcatggccgtcatggaaatcaagtcccacagattggcaccgagggtggcccaggcccaaggcaggacgactttatagtctgttggggagcagacttaattttcctcaggaggctgttccagtgtctagagttacttctagattctgaga

SEQ ID NO: 9719 - DNA, 629 bp, Canis familiaris
  misc_feature (1)..(629): n = a or c or g or t
aaaggaaannngatccatnntgaggctcaggtcacatcctnnnactttgtcacaaagggactttctaaagctactttttggtcataatattgttcatcatnnntagggactgagcttatttccaaggatttaccttgcttcattctgaacttaacccagatctattggagnnttctgcagataaagctgagcagtgagaagacaagtgctttaagaaagctcgtcacacaccgcagggggaggcgtggagattaaaatccttttctttggctcttgatgttcttcactatttattcctaagctactgtgttaatatggatagaaattttagggatcctcagtggcttcctgcattcaagcaatataagctatactactaagtacctgcaactgcctccacgaaattattgtaatgtctgcctcctttcactttgggtggggctcagtgtttagcgatgtccacaccatactgcgtatccttctgagaacaaaagctacagtgttttactactttgcagcaatccaggttacgtttttcatctgtgatacacatctctgatttataggttcacggtgtcactatcctgcagttttttcctaatggaggaaataacctaagaagaccaaag

SEQ ID NO: 9720 - DNA, 453 bp, Canis familiaris
atatatatatatatatatatatatatatgtatatatagtatgtatgtgtatctatgcatagatacacacacacacacacacacacatatataaataccccaatgtgtgaacccagaaacctctgagaattttatcaaagccaatcatctatattgatcaaatttactgaataattgttaatttatccattgtgcttagctttgtgacagccaaaagttacctatttaatcttttcaataaaaattgttttttgaaattcagaaatgatttaaaaagaggtcaggtttttaactatttattgaagtatgtggatgtacagtatttcaatagatatgaatatgaataaatggtatgccttaagatcctttgaatatgtatttactttaaaagactggaaaaagtccttcctgtcttttagtaaaacatccatatttcataatctgatgtaaaata

SEQ ID NO: 9721 - DNA, 127 bp, Canis familiaris
  misc_feature (1)..(127): n = a or c or g or t
atcccagtnaagggttttgtgtgtttaggcctcatttctttgtctttttnnnnntctgttnnnnnnnntcgctgattnctantgtnnactctgtagtctcagtccgtgtttgattccattccatgga

SEQ ID NO: 9722 - DNA, 493 bp, Canis familiaris
  misc_feature (1)..(493): n = a or c or g or t
ttcttgccccaaggtttggnacgatcannctgtatggaatgtggactactgccaaannntgaannacattacagttgaggacatgaatgagatggaaaggcattttttggagctacttcagtttaatattaatgttccctccagtgtttatgccaaatactantttgaccttcgctccttagcagatgacaacaacgtgaattttctgtttgctcctcttagcaaagaaagagcacaaaacctagaggccatttccagattgtgtgaagacaaatacaaagactggtctcgagctgctatgagaaggtctttcagcgctgataatttcattggtattcagcgctctaatgccatcctttcttaagggaggtgtgggaggggttggaacaccgtgaacccctcattctacaaggactggaggaataccacctctcctcacaaaccagcaaagttaatattttcatctaaaagaaagacctcgaattcaagagac

SEQ ID NO: 9723 - DNA, 567 bp, Canis familiaris
  misc_feature (1)..(567): n = a or c or g or t
ccaattcacggctctagnnagcaaagtttatatactgaaacttgattattgcttcccgtcagaactccctnntcagtgacatttcagcagtttccctcttggtcctagttttgtgcacatttttatgtgcttcagattaattatatttctctcactttcttagctggtcctattttttcacattctggcatctggctatcaagttagattgctgtaggcatcatattgtcatggtaactaccgaacctaatgatgcagatggatggaacatcagtataataaatgatgggaaatgtttcctaaaaattcaccccttccttaagagaggaggaggagtgcctgatagtgttaataccacccttcctacctcaggcttttgcagatggatgtttggagggtcagtgcagccagagggaggagggggacatcttggaaatttccagttctcttttcaaacccaaaatagggatgactcttgctgtttgtcagatttgctgcaaattgctcctcacaaagaacatttttttctatctgtaattgtacatacaggttttgtactctaatgta

SEQ ID NO: 9724 - DNA, 129 bp, Canis familiaris
  misc_feature (1)..(129): n = a or c or g or t
ctctggggagacttacctgccctctcacaatcattaccctcctgctcagaattccactggaaggaagcaagttactaaacctttgttgaatgganngtccatgctcagtaagaacttcggcccaaagga

SEQ ID NO: 9725 - DNA, 625 bp, Canis familiaris
  misc_feature (1)..(625): n = a or c or g or t
tttattaatattgnaatcttctgtcttcatnnggtataagtctcacatgttatattannnnnnnnnaagataaaatcttgacagctctttacgcccatgtgcagcnnnnngcagttcagataaccctgtagcagtgacataagcaaattggcatttgaatacagccctgggaccatttgagtgtatagcctcttgtcttaaatgtattcctcatatcagcgtggaggaggcaagacctgtgagtcaattttgaattggcctcacttgtatttgaattgtaaaaacaagagactcagggaaagtactaaaccaaaatctcttatttgacttctgtgttttccatactttttgtctcccattgttttttgttttatcgagatgcttttataaaggaatgtggtactgtgagtttggtaattctacaaatttcttaatgtttctccatcatgaccttttatttcccaagtttctaaagtctgaatgaaattacaggtttttacatttaatctcaaatgttgttaaactgctttaaattaaaataagcagagtattgaaaatcacaaagatgaaaaatgtgttttcacaggatctatactgttgtgaattaaagtaagcctactttttt

SEQ ID NO: 9726 - DNA, 633 bp, Canis familiaris
  misc_feature (1)..(633): n = a or c or g or t
cagcaaaatgcacttcactgatttgnncgggggcttggaactgagaagggatctcctctnnaactcagcctgaaaagatctcctggttttgggaaagggtagctcaaggtagaaggggacccagtggtctctccccaacttcttacactagtcattcatggagccatgcctggctctccttgttggatgttgtaaatttccactgagattcctaaaaaatcacgtgaagctgcttagtgggaactagtgggtgacccattccaggggccacctggtgccagcctgaccaggcactggcaagcctcctcctcgcacgtggggaggggcccctggtggacctggtgccagacctgggccccacgctcctgcccccaagcaggacctgaggctggctgcatggcgctgaccgctgctttaagctttctggcgacgctcttctctggtgtatcatgttgttgccacggtggtgttcaggttctctgccctcgccctgtcctccagttaaccatggactgtagcccttccttttgtcccacatatgcaatgactttcatttcacttttgtagtttattttaactctttgtatcacaacatgaagtttagtcgcatatatggacacaggcttgggagga

SEQ ID NO: 9727 - DNA, 510 bp, Canis familiaris
  misc_feature (1)..(510): n = a or c or g or t
acccgaagagaccncgtgccctttaaatcagcatnngctgctaaaggattcccagaacccacactgctgtaacattcantggntcagctgtaagggccatttgagagnnnnaaattttaagtgtctgtggaaaatgtcttgtcccttcacctgaatggcatttcaattttatgaaacactccttngtctacaaaatgcttctagtccaggaggcacaaccaagatttgggaactgaagcattttgtttcatttacccaaagagtgatttacttttggagatcgttgccaattttattttctgtatgatggagtaaggttgtgaacttgatccagaggtgaatagtagggggaagccacagcatttccttttaacttggttcaatttttgtagcaagactgagcagttctaaatcctttgcgtgcatgcatacctcatcagtggactgtacataccttgccctctcccagagacagctgtgctcacctcttcctgctttgtgccttgacta

SEQ ID NO: 9728 - DNA, 454 bp, Canis familiaris
  misc_feature (1)..(454): n = a or c or g or t
ctgtcagatccacnnnaggtcactntnnatgtcatgaagaaactgattgactctgnggtggggttnnnnnnncaccatgctgtggagaaggcaatggctgaactacaggagctccttacagtctctgagagatgggaagaaaaggctaaggtctgcctacaggcaagaccacggcacagcgtggcaagtttagaaagcatagtgaatgaagccaagaacattccagcttttttacccaatatattgtccctgaaagaagcattacaaaaggctcgagaatggacagctaaagtggaagctattcagagtggcagcaantatgcttacttggagcagctggagagcttatctgctaaagggcgccctatccctgtgcgtctggatgctttgcctcaggtagaatcacaagtagcagctgcaagggcttggagagaacggactgggcggacctttc

SEQ ID NO: 9729 - DNA, 710 bp, Canis familiaris
  misc_feature (1)..(710): n = a or c or g or t
ccgagcnnctgcatngatgctaaaactgtatgcaatgtttctgactctcatttttttggntgaattggtcgctgccatcgtaggatttgttttcagacatgagattaggaacagctttaagagtaattatgagagaactttaaagcagtataactctacgggagattatagaagcgatgcagtagacaagattcaaaatacgttacattgttgtggtgtcaccgactatagagattggagggatactaattattactcagaaaaaggatttcccaagagttgctgtaaacttgaaaattgttctccacagagagatgcagataaagtaaacaatgaaggttgttttataaaggtgatgaccattatagagtcagaaatgggagtggttgcgggaatttcttttggagttgcttgctttcagctggttggaatctttctttcctactgcctctctcgcgccataacaaataaccagtatgagatagtgtaatcatcaaaccacgggcttactattgttcagctttaaggacatttacattcccccctgtgagctatgagattgcctggatggaagattgcctaatactacttacgatagaccaaaaaattccatcagtaatagtctgattcaatcaagacatttgtgtaggtccaccttttgtcccattggtgttaatcattgaaacccctgtatcactgtgaaacactgg

SEQ ID NO: 9730 - DNA, 500 bp, Canis familiaris
  misc_feature (1)..(500): n = a or c or g or t
ctagacgtgcatgcnnnnctgcannnngtggccccgctgtctgttttgccactgactagtcgggtcctgtcaccacatacgaggtngagactcccatggagtaacggtttaaaccggcacaaaaggatctttctgagctgctgcccgtaccagacgccctatatgatggaaatctagagaaccaccttcagaatggttctgactaacctactctggggcttcgtggcctctaagtttttttcagctaaaagcaaaagccgacctgggaaaggaaagggtctgcaagatggaacgtcctctaaagagaagtgctctgcaaaggcctgcagcctccagtgacgccagcctggaaacactgcccactgggagttgcaggaagaggcaggtctcaggaggaatggccacgggtgggcggggggaacctcttaggctcttcatttcacaattcagggggctgtggtnnaagccttactttcaaatcctactgcaacagagactgc

SEQ ID NO: 9731 - DNA, 531 bp, Canis familiaris
  misc_feature (1)..(531): n = a or c or g or t
gccacatgctgcggcacacaggcgagnngnncntccgctgtgccacctgcgnctacaccacaggccactgggacaactacaaacgccaccagaaggtgcatggccatggtggggcaggagggcctggcctctctgcctctgagggttgggccccgcctcatagcccctcctctgtgttgagctctcggggtcccacacccctgagcactgcaggtagccgggctctccatacagactcaccctgaactaggttgttctccctcagggccctgtggattagccctgactctcctgtacgttttatacagatggaccagaagtcaccttctacttcctcccccgctggccaggggctccacagactaccctaggcactatatggaccagcccaaaccccatgggcaaggggcccatatggaccaggggccttacttgactgatgcacttaatgagctcagtgagaagggccctgtattcacctccactgctcccaggggcagcagaggaannnnnngggggactgcccagcct

SEQ ID NO: 9732 - DNA, 723 bp, Canis familiaris
  misc_feature (1)..(723): n = a or c or g or t
atnnnctatttggtgatttgaaactactcaagataccagtgtnntgncagtttaagggtacattgtagagctgaactttgagnnactgtgcaagatttttttcatgctgtcatttgtaatatgtttgtgaaaatccttgggattaaagttttggttacaaattgttgtttaacctgaaagcctatttttccttgcaaaactaaaatctgtgagcttggtatcaagtccaggtataacattcctattggaagccatacttatattttcttgtaaagtgcttttgaattaataaaatattagcataattgtgtaatagtcaaacccactattaccatagttcttgtcccacggaaatcagttggttacacagatcttagaagaaacaattgaggctgaagggaatttttggttgtcacctaagtgactattcatacttaaccatattttaggagtaggagccagttcaaagaccatgatactctgtgaccaacatttttaaagtagagcaaccctggtacattataactgaaagtgacccattaaaaacttttatcattagcatgagacttttccacaaagctttaaaaattgcttccattttatataatttgaggtgttgcatgggaattctaaattgatccatcatgatgtaaaattcactatatggttcaaatgtaacagtgcagaattgaacatggaggcatgcataaccttcctcttaga

SEQ ID NO: 9733 - DNA, 638 bp, Canis familiaris
  misc_feature (1)..(638): n = a or c or g or t
gccaaagttattgttctttcnnnnagccattcatatcaccgtaatgatctacaacttcgcagcactcccttcagatacctacttacacccattgtgcaaaaaagtgttcaaaatagaatacagagcnttaattgggaagaaatggaaaaaagcccatgcattcctgaaatagatgattctgagttttgtattcgtattcctggaggaggtatcacaaaaacactctatgatgaaggctgttctaaagaaatcccagtggtggttctgctgaaatttgtttcagaaggagacaatatcccagatgcattaggtcttgttgagtatcttaatgaatggcttcagataatcaaaccatgttgtgatgaccccacagcatctgccttgcagtggaaaatgccgagttcgtggagattactctttggcagtggtcttccccctgcacttttctgatctgttttcagttttatatattatgtcccaagacacttactaccaacacaactgttaaacaactatatcaaaagttatattatctgagaatgtattaggaaataaatctttacttttcacagaaaatctcagaaaatggattaaaagttgttttgccatgcttttcactatatacaacaaatgtaaat

SEQ ID NO: 9734 - DNA, 477 bp, Canis familiaris
  misc_feature (1)..(477): n = a or c or g or t
tcctaaccnnnacggctccgtctgaatgggacaagggtcatctttactgtcacagaacaaaggacgtgatccgagtcctctggacagggttctagacgagggaagccctggatgaacttggaactgacgggggagcagtaggtggagtggccctgaggtattggggccccctccacaccaacaaccactctctacttgctccgggtgatctgggactattgaaaccccctgactctccacactagtgagtcatgcaaagagggggggggctttttcaaaccatttttcattccatgattgttttagtcgttcgtgtttgttgtcatcactgccattttgccttaattctgcactgaggtgatttcgcaaagggcacaatttttaagaacccaatcaataaataaatacgctccatggctatctaaactgtaaacccaaaatattataccaagtgattatgttgagataatttatgca

SEQ ID NO: 9735 - DNA, 434 bp, Canis familiaris
  misc_feature (1)..(434): n = a or c or g or t
aacatgtaanntcttgcccatannagtataagcttcataactcgnntctcngtctctcacacatctaccagggttactttcctaaaacaaaatttcattatatttctctttagctctaaatcnnatgtttttttagccatcaattcaaagggagctataatgatatgatatggtagatctcaccttccaaaacacttttctagcttaatttcaccttctaaaccacttccatacttcagcaaataagtctactcactgagtcctaatcacatcttgcaggttcctatcctactagttttatttttaccatgcctccatctgaaatttcctttcctttctttctacctatccaaaatatataacatgcttcaataaccagtgcaagtagttcattatcctgaagatagcatttgctttnctgaagtcctctacac

SEQ ID NO: 9736 - DNA, 596 bp, Canis familiaris
  misc_feature (1)..(596): n = a or c or g or t
atgccaggtgctgccccagccatatgctactcctgtactatatcatgggaccctcacggtgatgctgtaaagcaaagactaaggccttcattccnttggccaaatcctggagttaaggccatgctgagactccggagtgggcccttggggttggggctgggggtgcaatgtgggatgaaaggaagataccattaccgaagtgaaattgtctaaaccagatccagcccctgggtaaggaggggaagctctgggaggctgcggaaggcagagtgggtggcgaggaaggggaagctgagaacccacagggtgattgcaagcagctgttggtgggagacaccccaatggccagtccctcagcatcagccctgcccactggctctttagggacctggggtcagctctcagttggtgccgaggctccagagagctggcaaagagagggccgtgctagggtgagcccaggcccatgggcattggggaacaggatttcagccccacatcaacctcacttgctccctgctggagcttctctgtcccagagctgacatgaccacagcaaaggcaatgtccacactcaaggccttgccctaccccac

SEQ ID NO: 9737 - DNA, 566 bp, Canis familiaris
  misc_feature (1)..(566): n = a or c or g or t
gactcgggcgncctggnnaggcagctcacccacagcgcnnacatnnttcggtgcttcgaccaccatgccacatcctgaggacgcacaaccacatgcacggtgacccgctcctgctccttccgtcgctggggtccccagcctgcggcccctctctgccaagaccccaggccctgagggctccaggctctgtgacccgcatgcgggcagatgggaagcacttggggtctttccatgatccagagtctgcctctcctgtcctttacctgaaattgagggatgttcatgaagtcagtgtcagagccctgagagaagcatgtgacgcgcataaacataacagagaatgtgttttatgaggaacgttatggggaaaggcagtggcaatactgaaccatacaagagatttctgttagtttgagctgcaaacacaactgacctgctgcttccttccttcttgggctgcttcttggccgttgcagtggtttcaccttgggttttgtagccaggaaggagaggcctgcacaagcgtttgcacggaaataatggaaatatttgtgcattctaagtgc

SEQ ID NO: 9738 - DNA, 423 bp, Canis familiaris
  misc_feature (1)..(423): n = a or c or g or t
gtnngagttatgttcctgagtataccatctgcccttgagatctaaatcagtctaatgatgatcaaataaagtaagcaaaaagttgaaactttgaagatgaagagtaagcttgaattcttaaacaaaatgaataatttttggagcagcttaatttaagactacctgaactttatgaaagtggtaactcgtggtctttttgttgtgacgtacccatggttaatttttctatcatgctataataaaaacgagatataaatactgtttaaaaatacattttaaaataccttttaagtatatttgtttaaatatatctttgttgtggtatttttgttgtgatgtacccatggttaatttttctaaaatgctataataaaagcaagatataaatactgtttaaaaatacattttaagggcagccccagt

SEQ ID NO: 9739 - DNA, 353 bp, Canis familiaris
  misc_feature (1)..(353): n = a or c or g or t
taattggactgggtcacaaaatgtgattaaattttaaatatataannntttatcaaataaagttttattttccccattaaaatatttcttttctttcttannnngaggcannnntnnnctctcttnnaaatatngntnnattcctgacataagatgtgnggttcacagttgtattccagtattcaanntnnattcctgattttgcaattaggaaaagtaaaaccnnnnnngttagcaaaacaaagtgcaatatnnaatgtttgctttatagattatnttctatnnntntttgtaatttctctttttttcctgttttatttggtnnnnaatannnnnnnntaggctctgtttta

SEQ ID NO: 9740 - DNA, 423 bp, Canis familiaris
  misc_feature (1)..(423): n = a or c or g or t
ctannaatagtttgtgttcccatcagnnagagtacagagactttgtaatacacatattgtttctancaagcaaaataagagctgnnnnaggctggccagcttgctcgctctcttnnngtcttacaggtctctctgtngaggctagtttggttttcctcacagcatagtaaccatggagtacctgggtttattacatggtggctcggaactcccagtgcttgcatttcatcaagatgaaaaactgctttgcctatgtataagtcatattatacccatgtattgtcacttctnnctcatnctgttgcttatatgcaactcattgaacttggtccagattcaagaagggggaacatagctcctacctctcaatgggaagaatataaaaaaaannnnnagatatattttnnnnctgcatnnaatggc

SEQ ID NO: 9741 - DNA, 599 bp, Canis familiaris
  misc_feature (1)..(599): n = a or c or g or t
ctgctggnntacaggctatacntcctggaaaaaaagtcactgcctcaggcaaccaatgctccggccacnnnngcccaggccagcggttcccgagataccagcgcacctgagacacagcccaaggcctacttcctgggcatagccatggacccccgtctagttgccaaaagacagtggatcctgctaagcctctgcctcatcctgatgctgtgctcaatcagcctgaccattcgggttttcatgcagcactacaagaagcctccgtggatgagagctgaatggtggagctgggactagacacccgtatgactgccagtctgcagcccccaacaaggggcagccaggacaactctgcccccctaggaggccacacttgcagccctcccattccccagccacagtggccaaccaggcccccatcaggcatcgtggctctgcgtggcaaaggcacacccagcccgggactccaagcctctcatctggactccagcaaaaacctcactgagcctccttgtccatcctctctcccccacccgccattgtaaattttctttcactggaatatttccttcgtgtctaactgcttaagaacttcgttg

SEQ ID NO: 9742 - DNA, 642 bp, Canis familiaris
  misc_feature (1)..(642): n = a or c or g or t
gtgaaccccacttgctactgcttcagcatgnnnnnncacatgctgtgcaagaaactgggatccaaccaaggtgctcacactgccccagcttnctggggtggggnaagtcactcaaagtgactcagagatgtttactttgcttgcaaattgttttcttacatgcgtggatgtcggtcagtagactgagtcaacacacaaaggccaaaccaggatttggaatagtgggggaaagctgctgacaacctgggacagtgactgggggggatcccagcagctagcagggagcagaggttaggcggggatctatccttgaggtcactaacaggagcatcaaaggggaccctctctgcagtcttggggagtctctgggattcggacgtggggcctgtgcaacctcctccagcaccacctatcagnnnnngcccattgggcctgactggtgctgtttctttcagaattctggaatccccgctgatccccaaaccatgtcccccaccctacctcctgccccctcaggacagctcccctcctgctgggcaacagactgcttttctctactctctggtgttcagactccaggagcaaggcatgccacaagggaaagagcgcctgcctgcctnnnngntgtctcctgctatctcc

SEQ ID NO: 9743 - DNA, 392 bp, Canis familiaris
  misc_feature (1)..(392): n = a or c or g or t
aataataaagtttaaaaatgcttttatatcaaaggtgcattgtgannnnattgtttaaganannnnnnaaaaacaaaatttagggnngtattacatatatcttattggctcnnngctttgtatttaaaagaggaatcttacatttcggggagatatatgctgatgaaatttgtgtccagtatgtacttacctgatgcggttgcattattatgtactgaaagatatgtgttttggaatttattttcaggatgcttttgcttgttatggacgtggcagcagtgagttgataatcctaaaccatcatctccagcagtattcaaggcatagagctgattctgtgttcatgtatggaattgtgatagtagcaaacatgaacatattgaactgttgtt

SEQ ID NO: 9744 - DNA, 515 bp, Canis familiaris
ggcacatcatccccattctcatgatttacatcatcatccaatacttcatcttcctcaacctggtgattgctgtcctggtggataacttccagatggctctgctcaaaggccttgagaaagtaaagcaggagagggctgcccggatccacgagaagctgctggatgactcactgacagaactcagcaaatcagaacctgaagaggtagtgagtgaacacaccaaacagaagcagctcattgagaaaaaattggggaccatgactgagaagcagcaggagctcctattccacttcctgcagctggtggagggggtggagcatcatcaacagaaattccgctcgcagggatctgttattgatgagattgtggacactgcatttgaggctggagaagaagacttcaggaagtgacccctggatggagacagtcctgggatgcagatttcagcctctggcaagctgcctacggggtggtgggggtgaggtaggggggtgaaggtcaggacaaagtcccct

SEQ ID NO: 9745 - DNA, 620 bp, Canis familiaris
  misc_feature (1)..(620): n = a or c or g or t
gctcctataggtgtgtggaggtggagacaggagaagccaagaaacagcggggggcccgtgcagggggccaaggaggcctccgtacacttttcaagcccatcgacgcagacaccatcgacatttatgcccgtgtggtgttccctgcggcctttgtggcagtcaatgtcctctactgggcagcctacgccatgtgagggcagaggtgggcctctgcctgtcctggagcccatagccaccaggtaatctgcccactctggctgtttcaaaggggacatgacaacaggccacataaaacgagaggaaagccttggcctccctgcataccctaggctctgtccccactgtcacctggaagtcatcctggggctcccccaatgcacctctcctgcagacccccagcccagctcctccttggcagagccagcttgacctgaggctgagctaggcacgctcagggcccttggtggacttcacaatcctgattctaggcatttggtctgtgggtttgggaccaggtcgtgggaggctgggagtaggtggtgctactttcttggtgaaatggtagagaagggcgtccatgggnnntcggtcccagcatgaaataaagcctttggctgctc

SEQ ID NO: 9746 - DNA, 596 bp, Canis familiaris
ccctttctttatgcaatcattttaaagattgtggctacattcaattgagggttgctgataattgaatctaaattcaagagacaacagcaatgttaattccaaaggagtatttttatatttggaggtggaagtttgagggtgtttgaatataatggccctgttatcaaagagtatttatatgccacattgaatagcaacagctctcaaagtttgacaactggaaaagtgttcaaacctatttttcgtcagttaaattgggtgattatcatcaataatctaggattgctaagtttttttggtttgtgtagaatttgagctctcttaagaatttattttgttttaaaggtacatattactttgcgtaactattttctgggcatgtttaactaacctgggtgagaaaaccatggtgctgtttaatgtaaatagattggtataagattggaccaatacttgatgtgtacaattttagtatgtagggtttttgtgttttttaaaaaaaaatgttcaatttttctctttgtcttggcctttattctgggtttttaattgttactctctacataaggataatctgcctcattctaataaacctc

SEQ ID NO: 9747 - DNA, 159 bp, Canis familiaris
accccacccttccctgatcgtggtacccggccagtgttaatggtggccgcagctcgggagggcggggctttgtgtccctccctgtgctgtcaagtgattgctgtgccacctgtcccccatgcccaccccagctatttatttatttatttgtttcttatg

SEQ ID NO: 9748 - DNA, 458 bp, Canis familiaris
cgaggtgtactgccccagcggagagaaatgccccctggttgggtcgaatgtaccttgggccttcatgcagggcgaaatcgcgacgatcttagctggagatgttaaagtgaaaaaggagagagacccttgaaccacaagacggccacctcctctgcccctgaccagctcctctccgatccagagggcccctcccccacccacagcgaccctccctccccttgcccctaagatgtagaattgtgaatataacaaactgcaaaaagttagtcttatgtatagacattattttcgtcgtatgtttctatattttgaaacaaaaggtatgtaacttcttcatttgaaggataagctggtttgtgttaagcagtataatattggttgggtcatttgcatcatttcgttagcatttatttggtggcagagtgtttgcctaggtacagaattaatagcccttagca

SEQ ID NO: 9749 - DNA, 582 bp, Canis familiaris
  misc_feature (1)..(582): n = a or c or g or t
gtgaccttncagcatcaacaccatcgactnntacagaacaaaacaaatggtggtgaactaaaaatacatccaggcgaaaataaaaaagcaaaacagattgaaaatattgttgataaaacttttttccatcaagaaaatgtgagagctctgacaaaaagcgtncaggctgtgatgggctacaagcctgggagtggcctggtgactgcggctactatgagctctgagagcagggctgggaaggcctggaaaaaacatggcaacagaaataaaaaagagaaaagtcgtagactctacaagcacctggacacgtgagcttgggctgcagcagaaatggcatctgcgtggtgcatctggaatagaacaggagctgctctggcctgtgatgccgtggaatggaccctgctcttgtggcacgcagccacaccaaacagtatcaaggtagaggggccccttggagcaccaacgctgtccgtcatctcggagccccagaaacctcgtcctatagaaggctgggctcaagatgagggcgcaaatgattggatatgtgtgtgagcagatacacagatgcatactcatttgtaa

SEQ ID NO: 9750 - DNA, 546 bp, Canis familiaris
  misc_feature (1)..(546): n = a or c or g or t
ccttccaggggnntngagctgaannctgctgagatgactcactcaggtnatctcannnagacatgaatgcaggctnntgagctccgggcccggtgtccttcagtaataacaataagaggtaccacgaacagcatttccaaaacgtcagctttggactcagtccgtcagagtgttcaacttcatgataatcccatcatgttgctgctaccatactgctatttcaaagaaggcaactatctacttcttagggtgattatgaggattggggtaacacagcttacagggcttggtgcacactcagtgcttagtaaatgagagatataggacaatgataaatacaacatatgttagtattacagatatcaatatatatcattgttatcgatgatagacacagacttttccttagtgatggtagcaacttactgtcccaccagcgagaatgagagttccagatgttctttttcctagctgacgcgctcatcaacaatatggtcgacacagaaatgtggtatattcattcagtggaatactgcacagcagtaa

SEQ ID NO: 9751 - DNA, 523 bp, Canis familiaris
  misc_feature (1)..(523): n = a or c or g or t
gtgannatctttatccttcannngggccatgnncaattcattctcggacangacttccttgattgtcagctctccccttaaaagcagtcttctataaaacactgagcaaggtaactaagcacccnnngttacacacccaaagtcagctcagcctgctgtcctcgaagctgagatggcctgactcttaatcaggcaggggataataagaggacctacctgaggctttcttgaacgtagaattcagtagcaaatgcaaattacttaacacagtgcttgatggtaaagcaacctgttaataaacattagctgttgttttcaggctctgggataatcaagtggttaactttttaaataaaaccttgttctgagtgtctgtaactttcattaccctggattgagcactttcaaagtccttaaaagtcagtgcaccaaaaagaaacactgaactttgtctttgccagaccccttttttcactgagagaagagtcagaagatgctggcgaatgtctggaagtgagaacgc

SEQ ID NO: 9752 - DNA, 487 bp, Canis familiaris
  misc_feature (1)..(487): n = a or c or g or t
gtttggtgaacagtcacgagctcctnctgcatttgcagccatttactctaaaggaggtattccttgcagattggtcnnnggttcagtgaaacacagattgcagtgggaatgtcctcccgaaaaccttccatttgatcctcttcttattactctagctgagctttccaagagactaagggataagaaattcaaagagccaatcaccagtgcattacagcagctggagcagcatggtggaaacggcagccttatcatcatcaaatctaaaattccaacgtattgctccatatgctgttgaagaagggagcccacaaaaatgttgtcagccccccgtgacaggtgctaaatgccgaccacgagtacctttggaaccttttcagattcacttcagtttattcttttgttaatcacagccaccattcgttatttactagacgaagaggagtatacanagttccactgaatcatagnaaaagtcattcatcag

SEQ ID NO: 9753 - DNA, 554 bp, Canis familiaris
  misc_feature (1)..(554): n = a or c or g or t
ccgcttgggattgggcgccccgggattccagcccgctctgagcatgctccgtggcgcctcgggnngtaannacacccccgcagcacccggcggcagcctccgcggcctggggggtgtagacagatgggctggtgtcggggttggccttgtgcagagcagacgagcagctcttttgtccacccgcctcctggctcccttgacatgtggcacaaaagttgccaaaggcagagaagatgcctggaccactaccagttttcgagcaaccctgcatagtaaaagaagaaattccaggggcgcctgggtgactctgtcggtttcatcatctgccattgctcaggacaagagaagtgtcttgatgcccttattatgggaggaagcagaggcactgggccactgcccagacccccttcatcggaggacttgttgttccagctcctgggagttaacaacgatttatcccatttgctacgcaccaccaccgttctatgtgctagaaaatcaacagcaaactaaacagccacagactttctctcttgtggagcttattgcatttt

SEQ ID NO: 9754 - DNA, 646 bp, Canis familiaris
  misc_feature (1)..(646): n = a or c or g or t
tgaaaaaagagaaggcccacaccatgccccactgtgtttctaggcangaaaatggaagaaggagtgggttcaagacattggaagtaacctgacccagcatacttgtagtctgagctcttcagagaacccacccggcatggatgttcagagtgacccactcctcatgattccagaagtgagaaaagggaaacagagacttgcccatgaaaggcaatgaaaagagacacagcccagagtgctgggttccagcctcagctctgccccgagctggctttataacctctcacaaatcacactccctttgtgtaggcctgtttccccatctctaaaaagaagacattagatctccttcagggtccttctatctctagcattcagtcttctgattgccagcagcctctctctagccctcacaggctgattgtgttcctcctccccagagcttgctcttctggggactctccatcagagaaaggcagcccctgagagggattccaagagaatgattggaaagtgtccacttttcggttcatgaaagcacactcctttgtctatgaacagtgcatgtagaggatactgtattttgcatactttatatcataagcttcactactctgcaaggcgcgtctatgctctgtttctcttg

SEQ ID NO: 9755 - DNA, 638 bp, Canis familiaris
  misc_feature (1)..(638): n = a or c or g or t
tacttcttcctgnctttngcagctagggcatggtcatgtgactaaattctgtcaatatttctgtcagatgcttcctccaagtctttggagacaatggcacaaagaccttagaggagttcagagattattcccagcagtgatagtcaaagatttagtggaggtattggtgagtgtctggtgatacttccttgggagatgtactttttaaaaagattttatttgtttgagagagagtgagcaggagagagcacaagccagggggcgaggcagagggagagggagaagcagactccctgctgagcagggagcccaacatggggctccatgccaggaccctgagatcatgacctgagctgaaggcagacacttaactgactcagccacccaggttcccctcctaggaagacatattaactggataattgctgtggtatgtgttggctgagttgtgagctacctagatgcccatgcccgaaaacctgccgcttcctaagcctggtttttcagccttcccgttggttctttgaactatttaatacaaatgttaataaattccttttttgcccaattcagtagagttattttctgttgtttgctactaagaacctttaatgtatnnnnnntctcctaagattctt

SEQ ID NO: 9756 - DNA, 537 bp, Canis familiaris
  misc_feature (1)..(537): n = a or c or g or t
aaaatgtcatactttaaacaacatatacaaaagctatttgattgtnnagggtgggcttgggggcacgcaggggttttggctgggtagaagtgtttgntngcagtgcaaaacactgctctatcttaccagtagtgtagaagctggggtgggggagccagggtggtggtgggaggcggtgttggaaaggctttccagaggagtcctggcccaggtaaggcacctgacttccagggtagttttagggggaaatgtatctaaactgcaaagttcctcctgagggcctcctcctgggcccatggattatttctgctgtttgagcattatctccctttttagcagactgatttttaaaaaatacatttctgattataaatgtattttgttggaaacttggtaaatacagaaaaatatttaaaaatcatttgtattcctaccttcaaatattttggttttcttcctctaccccataccaaagtggagatcatttataattttnnnnnnntttttgaaaagcttaaatatttaataataattact

SEQ ID NO: 9757 - DNA, 545 bp, Canis familiaris
  misc_feature (1)..(545): n = a or c or g or t
acagagcaaatttctatccatancnctcaggtcgcagagaattgcagacagaggaagctggggttgcatgttgaagaacagctggagaatttgatgggccagcacaaggaactctgggaattccacatgctgaagcagcgactggcctgggagatccgtgctctgcagagcagcagggagcagttgctcaccgaagagagccgggccctggccaagctggaggacgtggagcggcggctgagctcggcgcccgaggccgggggcgtccaggcggtggacgacggtgcgattgcctcctgtgggtacaggataaggagatggtcgattgcctcccaggctgaactctgaagagtggagactgaccagccctactgtgcctccctgggttccagtaaaaggcctgaaaacaacccagcctgaaaacagatgcccctttcagccatcgcctggatatttttgtacatgcatggaatccactgaacttccttacatctgaaggctactgatgattaatttttcattgtttccatgtgcccgtagttctt

SEQ ID NO: 9758 - DNA, 570 bp, Canis familiaris
  misc_feature (1)..(570): n = a or c or g or t
gtnaccgactttgtgtaggacttacatgttgtgccacatttgtttgtgtctggcatttgggatatgacctttttcttagttcttgtctgaaaacttcatgtgtaaccactggtgcatgctcttaggaaataccaatgtgataatcattcgaggtttgctgaggcattccttatagatctgaggggcaagatctcaagcaaccagtttacgtcagtgtcatctgtaaggtttcttcctctgagagcatcaaatcctcagttagtgattcttactttcatccttcagtatttgctaggggagctcctattgtttgatagtaattttttctgcattgagagagttgctcccctcaaaaaactgttctttccctgccttctccatatcgaattcctggtccttgtcattgtaagtcatcggtgtagccagtcataaggatgtacgtgttaacctgcgggttggaatttttgtctcttgcagtttaaggtaatggatattgtagcccatcggaatttaccccactcttgattctcataacttctggagttccttcagaatgtggtatattatttt

SEQ ID NO: 9759 - DNA, 615 bp, Canis familiaris
  misc_feature (1)..(615): n = a or c or g or t
gtgnnncaagctaacatgtgccaaggcctggtacccttgccctannnngtccctcaccttctgggcccagtaatacacttattctgggttgttgatctccttgccnagtcgggcaatcatcttggaaggtgtccacttcacaccctaggannagacattgacttcagccagcagggccgcctcagttccacaccgacccccagggtgctcctgccccacctctgtgttctgctccagcaccatttggtccagaatgggcatcaaccagtcctcaaacttgcagtaattgtcattgggcaccagtaggtttccaatcctgcggaacatgaggcatgtgggcatcgggccccaggatcctcagcccagctcccttgcccagcatcactcagggccccgaacctgttgatcccgttctcacgtagctccttccccctgagactgaaatcgcccaggtacgtgggtgccaggcacttgataaaatcttcctccacaccgccagctgtggtcactaagacgtccacctgcagccacaaatcaggttggcccaggaagaggggccctgccgtcatgccaggtagggctcctcattcccaacactaatccagtgacccttgg

SEQ ID NO: 9760 - DNA, 596 bp, Canis familiaris
taatttcgcacctccaagtctccctagtctgaggttgtccttcaaaatagaaagggattagacttagtcttcttacaacaaagagtgtgtgtgtgtgtgtgtgggggggggttatgtgctgccttaaacgtagaatgctgcttcttcgctggaatataaatggcagcgagaacagcaacaaggttggttaaaatcctggtttaatcattccacctggctcactctaagagcaacctggacccttgattggatcctgcataggatcctctgaaaatggggggaatgtgggacccaggaaatttaacaaaaatcccctgcccctggacaagcagaggaggactgattccattttgagctacacctgccacctcctgtatgacccccacataacctgcttattgcttaaggcgctgccccaacctatacgagccgctgggcacaccctaatcggaaatcggctcataacaatgtaaccctgctttgtgcccgccaaaactgcgcgccaattctgaccaaagtaataggccagctcaaatggatactatagggtaagatgtaattcaatcggccacctgcgtgtggaccgacatgactgt

SEQ ID NO: 9761 - DNA, 592 bp, Canis familiaris
  misc_feature (1)..(592): n = a or c or g or t
cataagagaatngtagtgttnannnatgacatgaaaagtnnnnngagttcactcagcctggcccccacccatcctgaaaaccagccttcatccacagagcacattctggtggcccctgaatctcgcatagcctcggaactcacccttggagcaggcagcgatggccaagagagaaagcctcaggcacagacttgtggtagactgctgtcctgagtcgagcccggcctgccttctctgtccagggccccaccaggcagaacaggagcttctccgcctgaccaacgactctcctgtggacctcctgtgtgcacctgtcccctcctgcctgccgtcccctcagctgagaccagatcccgtcatcctccaatctgctgatctcattcagtttgaggaacaccctcaagagccttctgaaattatgattttaaaccaagcagagaaaattgaaatcccagtaccagtaaagaacaaccacccagcctcagactccagctcctctggcatctcagcagctgacccagtgcctccctgcccctcctcggaaacctcagagtcactgcccagcaaggnnnnnnnggaaagcccagccaaa

SEQ ID NO: 9762 - DNA, 603 bp, Canis familiaris
  misc_feature (1)..(603): n = a or c or g or t
gtatcctcannatctctcgccatgncnnccagtacattcaggtgaatgagccnnnnnnncnnnnnnnnnncagcgaggctgacanncagcgggcagggacggtgacaggcntnncagtgaatatagctgccttgctgtccgtcatgctccagccgtacatgcccacggnnagcgccaccatccaggcccagctgcaggtnccanntccagcttgcagcatcctactcacaaacttcctgtgtaccttgccagcaggacaccagattggcacagtcagccccttattccaaaaattggaaaatgaccagatcgaaagtttaaggcagcgttttggtgggggccaggcaaagacaccccccacgccagcagaggctatggccgcagctgccccacagcagatacaagtgctgatggatgaagtgacaaaacagggcaacattgtccgagaactgaaagcacaaaaggcggacaagaaccaggttgccgcggaggtggctaagctcttggatctgaagaaacagctggctttagctgaagggaaacccctggaaacccctaaaggcaagaagaaaaagtgaaagtgagaacctggctcatagaaag

SEQ ID NO: 9763 - DNA, 402 bp, Canis familiaris
  misc_feature (1)..(402): n = a or c or g or t
ggctccccagacacactatnnagtgcctcgggctgacagtgtggcctgctccctcgagggcaactgaagacagcctgcaggcctgggggnnnntgcctctgctctaggctgagatgccgtttggaggggtgcctggacccacacctccttgacctgccccagggcaggccttgctcctgctcaagaggcactgatgggggcaggcccaggccctgctgcccacccacctcccaccagagaagcacagatcttgggcagccgcccnnnnngcccannnnnnnaccgccacagccatgtgcagctgcaggcttctccccaccaccctgccactgtccactgtgatgtccgtccagtcccttgtctgttcccacggggccgtgaagtgactcgggggctagctgg

SEQ ID NO: 9764 - DNA, 335 bp, Canis familiaris
  misc_feature (1)..(335): n = a or c or g or t
ccatgtttccgcccctccccttaatttatttggagaatgttccatttcaggacatgtgaattttgactctnttctcatccaatagcctgttttatttttaaattgaggtaccgtgaaaatccagccaactgcgcgggttgtgagcacactgttccatgcannncncacaactgtgtgcagcttgtgagcgncacccaccnnnnnntgtcccccgtccccatctcctcctccctccctgtgctcccccccccctctggccaccactgttcccctaaacctctgcatctgctgaacaaaatgcttgtgatgtttgttccttcgcaattgttgctaag

SEQ ID NO: 9765 - DNA, 591 bp, Canis familiaris
  misc_feature (1)..(591): n = a or c or g or t
cnnctgcccctgcccctgcccctgcccctgcccctgccgggtgcagccctcccagagacacagggnnnnnngcggggatngagannaaggggggggactttgtgagtcccggcgcgagtccgggtggcggcggccccggttccccttctctgttcctttcccggctgccggtctgctcttgagctcagggtctggccgcagacgggggcccccccgccctcctggggggtgcggggcacaaccatacacttaacaacgtggcggggctgccgtggcttcttcccctttgtggccttggctgttgagtttctgttcccactgggaagtccgggcgccagcacttccagctccacaccaggctcgtcccacgccaaggcttctgtccccgccggcggggaccactcctggcccccagggtggcccgactttgtgccctccggctgcccccagggccctgcctacactctgatcacctccagagttacagcttctctctctcacctgggagacaccctgctggggctcaggtccccgggcttacctttaaaatgggggagggggttaggggcagaggtggcttgccccagggtc

SEQ ID NO: 9766 - DNA, 544 bp, Canis familiaris
  misc_feature (1)..(544): n = a or c or g or t
tcacnnttggctgtcgatgcactgtgattgctactangaaaaactcatccacanctttttttttttttaaattcccatgcatgccaaatttttttcagacctgtcaacagattcttctcctgctcctcttgccctctcactgacaccagaatacgatcgtgtccctgctgcagaatatgtatttactaattgctgtggccaaacacctgtgtgccgaatcgcttgcttttaatcccactctgtgtaatgtccgtgcgctcgttgacaaagcacaggccacaggctgcatcactactcagcgttaatgaaatcagatactcacacgcctcattatgcagtcggagcaatacatgccgaccgaccttgaccctctcgctccaatttccagggcagcccgtccggagcagcccctgctcccacctggagaccctgtaacctcccaacaagccttgcccagggcagcaccggtagctgaccagctgtatgtgtatatcacaggaactaaataagatgatgttacttctcatatcaccacaatctgaat

SEQ ID NO: 9767 - DNA, 410 bp, Canis familiaris
cccccccccccgtgtctctccccgcccaacactttctctttcttagtctctttttttttttttttttccaatctccttgactcttaaagtctctctctgagtctcattttaaaactgctcttttagaacgggaagcggctcagatcctgctgtggcatggggcctatgtgtctcagtcgcgtctgctgtgaagcacacgatgctctatttattgtagaaagtgactttatttgctttctagaattgtttataacagatggtataagagaggtaataaacagagaaaaatctatgcttgtaaagaatacaaaagttaattttacctactataatatgactgtctgaaacttattttctctctgagaaataaatgttctaatgggcagcaataaaaaaaaaaaaaaaaaaag

SEQ ID NO: 9768 - DNA, 620 bp, Canis familiaris
  misc_feature (1)..(620): n = a or c or g or t
ggtttttcagtgacgttgagtgagggcttctcagaaggnnntgagttttgcaagcccgaatcactttagaangacacagctagagcctctagttgacctggctaccctcctgtccagcctgccaggctgttggccccctggtgaggaaactttcttccctacctggggggtccctactcccctgctgataccctcccctggatccctgaactactcagttctgaacacaaaggtgctatttaccaaacactgtccccactgattcctgccagctctgcctccttgtcaactctagactcccgagccatcttcccagaccctgcttcaacatttcttgctttagaggtaactttaggccgacagacccaagagctccttttctggcctgtggatggaaacgaagctgtgaatctgcacattgtggtgtggcatctagtctgcaaacaggtccccgcctttctaaaagcagcctcacagtctcatgcttcatctctcttttttgatgttcactttaaaaacaaaacacccagagctggactgttgagcaggcctgtctctcctattaagtaaaaataaatagnnntacgtttgtaagctattgtgacagaaaagacaagggt

SEQ ID NO: 9769 - DNA, 570 bp, Canis familiaris
  misc_feature (1)..(570): n = a or c or g or t
gtggtagaaaataagcaggtntgctggtangcctggggaactgaccaggccccattcactctctaccccattaaaaagacacnnaaacccttcccatttgaggactttccgtcctcacaaattctctttttcacaattgggagtctttagggaactcttttcagtttgcaaaaggggaaaaaatcttccagaaaaattattcctctatttaaaagttttttatccatatgaaaataatctttacttttttttttttaccacaaaagtaaatgagactagtgccaaatagcaaagcactacagatatatatagttttgaaatgaaaattgtaccagtgatattcagtgttcaaattttggtgtatattgttcaaatttatttcaagggatacattaatattttcattaaaatgagactatactgtcaaattctacaacatgcttgtccttcgatatgcattgaacatttttcccatatctacctcattctttttgtcatctgcacagaatgaacaaccttataatctgaaaaaggtaccatatatacaaaagagtacataaaatgttttct

SEQ ID NO: 9770 - DNA, 661 bp, Canis familiaris
  misc_feature (1)..(661): n = a or c or g or t
ctgctcacctacatgatcgcacacatcacaggcntgnngnnaggtgacttcatacatacttnnnnagannnncatatnnanntgaatcacatngagccgctgaaaatacagctgcagcgagaaccaaggnntttcccaaagctcagaatccttcgaagagttgagaaaattgatgacttcaaggctgaagactttcagatcgaggggtacaatcctcacccaactattaaaatggaaatggctgtgtaaagtgcttttaaaagaggtgatattcagtctgtaggggttgactgaatgcccaggctttcactccgtttgccctagagggaggaggaggaactaggtcaaaaatctctcgtgaccagcagctattattcattaacttataagatgttgccactggcaaacataatcttgtggcttctcttagtaaccaaaagctttgagtttggttgactcactaaggtgtgaaagtgccgagtttgggaataaagtcaggaaagtgaacactgaaatacacttaaaatatgtacatgcatttcaatccgtttttatgaaggtctgcgaatttcaagaattacacatcagctgnnnccccaaatttgagcaagctgaggaacaccagcattcttaatgtacaattgtggctatgaacatttaa

SEQ ID NO: 9771 - DNA, 582 bp, Canis familiaris
  misc_feature (1)..(582): n = a or c or g or t
tggtcacgatgaaggtcagcatcagccagtgagcagtctaaatcccagatatgggcangaaggcacctgcatcctgccaggtaatagagatgacctcactgaaaaccacatctcagcttcttcagccttagaactgcccctgaataaaattttattaatgcatcttcacacctttgctctgtgctttagcattttacagcttttatcacacttaactcactcaggaatcctacaaagcattcttgtacccattttctggatgaggaaaacgaggatccagtaagttaagtgacttgtccaagatcacatgccccataaggaacagtttggatataaacctaggtcaggctgactacagagggcatatgtttaaacaccactctgtaaccttcccacttggggctgttccaacccaacaaacaagtccctttagagaaacccaactctctgcctaagacagctcttagaacaacctcaaagaagttccttttggcaagaagatagaaagcctagatgggattggggctgtctctgatttccaagtcccttcagagtatcagaaagaggtgccgaaagccttca

SEQ ID NO: 9772 - DNA, 544 bp, Canis familiaris
  misc_feature (1)..(544): n = a or c or g or t
cgtcgtngacgctcgtgaagacagctgggggatgggctccatcattctgtttttatannatttcnnggcacatatngctgcagggtaacagtaaataannaacaacgactgaacacgtcaaaccaaaaaagaaaaatgcctggtaggctgcagacaatgaattacttttattcttggtttgctaattaggaaatctgtggtgtttccctgcgcctggcacggcgtagcccacgtctccggctgttgtgttgagcagttttatatatcacgtgaaggaatttattggtcctgcaagggtgtaacagtgtctgtaattaaatacttggcattgaaacattaaacattaatcaacagagtagtaagatgccggagcctgagtgagtcaagtacaaagatcccacgtagaggtgcctctacgcagaaatcctgggcggattctcttggtgtcgtcctaaagtccacaggtggggcgagcaggtcccaggggacagaatgcgggtgtgggggcagcgcacagcctcgagggaaggacggggccgactgg

SEQ ID NO: 9773 - DNA, 560 bp, Canis familiaris
  misc_feature (1)..(560): n = a or c or g or t
acatnntagttcttaagatatttccagactcctctctccaccatccacagctagaaatgggtagcttacatcttactaaatccgtaacttgctgctgcttttagccctccccacctcaaattggaatcaatggagtgggcccactggatacgcttnnntttcagtgctagtagatttgtcctgcttgcggaaactcctctccctttcgtagtcccattctttatggagcccatgaagggaaattaatgggtgtatctctccttcgaggaggtaacggtgtgagtgttttcctctggaagaagagcagttgatttcccaggaaggagcttggatacagattttctccccccccctccccccatagtaactggtttgccccatttcaatcctcagtttgtacttacctttggcactagttgaaagagcattttcttacaggtaacaaatcaagagtggaatttgaggttataatccagtaaagtttttgacgctgtggataatggttagctagactgacttcaatgcttgcttgctttttttctttttttgttttaaacatt

SEQ ID NO: 9774 - DNA, 437 bp, Canis familiaris
  misc_feature (1)..(437): n = a or c or g or t
ccccagcttcattcagcttcaccagtgcctnnnnntgcccactccaggggccccannnnntccccagctggtggccagcccctggccctgcctcggctccacaccaccgaggccacgcccacctagccctttggctcccgcctccagatgtctacttaccccacaggctccagctgcccctgctgtggttggacaatagcacagggcctggtgggaagagtcactgccctttcccagtgaactgacacaggcagggacagctggactacagagtttatttttatattttgtgccggatcgggcctgggcctgcacactccagcccaaagggcctgagacccagtcagcaggcccctgtggtcaccaccctgggctcgtccagcccctggcgcccacctgtaccccctcccccacctcgcccgttgggcagcgtgcac

SEQ ID NO: 9775 - DNA, 654 bp, Canis familiaris
  misc_feature (1)..(654): n = a or c or g or t
acaatttactttgattggaantcccccagcccctcnnnnngtcnctcagattgaagttacatttgacattgatgccaatgggattgtacatgtttcagccaaagataagggtacaggacgcgagcagcagattgtgattcagtcttccggtgggttaagcaaagatgatattgaaaatatggttaaaaatgcagaaaagtatgctgaggaagaccggcgaaagaaggaacgggttgaagcagttaatatggctgaaggaatcattcatgacacagaaacaaaaatggaagaattcaaggaccaattgcctgctgaggaatgcaacaagctgaaagaagagatttccaaaatgagggaacttttggctcgaaaagacagtgaaacaggagaaaacataaggcaggcagcatcttcccttcagcaagcatcactgaagctctttgaaatggcatacaaaaagatggcatctgagcgagaaggctctggaaattctggcagtggggaacaaaaggaagatcaaaaggaggaaaaacagtaatgccaaactttggagtcgaaatatgatgcttgggagtgaagggacttctgagcagaaatgggcaaacttcaatcttttactgtgtttttgcagtattctatatataatttccttaa

SEQ ID NO: 9776 - DNA, 697 bp, Canis familiaris
  misc_feature (1)..(697): n = a or c or g or t
ttgatacaaagaaagtaaatgctcatgataaagctcaaattgttcagtatggtagataatgaaaattgagtttcctcaagaaggaaatctgcagaaggaacaatcaacatcttttatgtattcatccagaaaattttatgtacatatatatttgtacacccaaggtatgtgtgtacatttatgtctatttacatatcatacctatctccttgttaagacaaagatgggaatatatcatgatgctcctctgtagttatagaaagctaataatataataggtcttggagaccttttatatcaatacaagcagagctacctcattctttttaatggttgtaaaattccattatatggctatatcataatttaattaaccatagccctagtgataaaaatttaggttgttttaagtttttttgtttgtttgttttggtattataaacaataccatatagaatgttacttgtggatatgtctctttgtatttgtttaagtatatttatagaataacttccctgagtggaacttcaggtcaaaagggtttgtgcatttttttattgatggatatgtcagattgaaccaattttcattctgtcaactgtgtttgaatgtgcctttccatatactattattttaatatctgcaagattcccacttcttgtttttaaccnnnnnngttaacaaatatggtttaagg

SEQ ID NO: 9777 - DNA, 655 bp, Canis familiaris
  misc_feature (1)..(655): n = a or c or g or t
ttctctctgnntacacactcnnnctcattacagctttgancaacggnnnnnngatccaacaccagagctttgctaantcgcacggtcacagggatgnctgagcacaatgagcagtcgagacttccagagccagctctgggttatcccttggatccacagctttcaggcccctggggccaggatgatacccaccacactatggcagtgtatggcctgttccaattgctgctaattcttatgatgaccccatccccactgtttcctcaaagcattagctaggccagaatgatttgttagaaatgaacaaaaggagttcctgcttccctcaaaaataaagggagctgagctgcagtgttgcattgggcttctcagccttccaactcttccctgctcccagaatccagatgtaagctttgcatgttccctttcctgggagagaaccaactgtcaaaagggtatacaagttgcccctctcccccaccccactcttcacctgagtggatcctggcttttcctcctcctcctctctacagtgcctggtagacaagtgctacgttgaagaatacaaacctcttgttaagacttgtcctgtagcttggtattacagatgtgctattagtgcaataaggtgaaggctgtctgcccagagaaatac

SEQ ID NO: 9778 - DNA, 678 bp, Canis familiaris
  misc_feature (1)..(678): n = a or c or g or t
atgagatcccgccgttccaccctttccatcccttcccatccttacctgagaacgnnggcnctnnagcgnnngagcaggacnnngngctgatcggtgccgaggagaaagtgatnnnnngcaagaataaagtggatgagaacatggtcattgacgagactctggatgttaangaaatgatcttcaatgccgagagggtcnnnngcctggaggcagagccggaatccgtggggccgctgcgggaggacttcagtctcagcagcagcgcgctcatcgggctgttggtcatcgccgtggccatcgccacagtcatagtcatcagcctggtgatgctgaggaagagacagtacggcaccatcagccacgggatcgtggaggttgacccaatgctcaccccagaagagcgtcacctgaacaagatgcagaaccatggttatgaaaaccccacgtacaaatacctggagcagatgcagatttaagcaggagaaagcacgcagcaccaccggttggcgtggggtggtgcaggtgggccaggagaggtccggtgtttgggatcaactactgaccagcagttgcttccagaggatttcaccttccgttcagacctcctggatcattaagactataaagtactactgtagaatcacaatttccattcttttaaatgggtgaaaaatgtta

SEQ ID NO: 9779 - DNA, 460 bp, Canis familiaris
tttcctttcctttcctttcctttcctttcctttcctttcctttcctttcctttcctttccttccctcttgttctcctcttattttctctcttttttattttactataaatatctttgaattcctccagaacctaactttagatttttcacaagttgggtgcaagacactgtgctcctagcacaatctgacagagtgtggtgtctggggttgagtcctgcaggaagccgactaagagggtgattaacaagcacaaggttcatcaggatctacatgtgtgaaaagaaagggacacaagcaagattgcagacagggcgaggttaaaagcacggaatataggatgcttctaaaagctggaaagacaaggacatagatccttcctcatgtctccagaaaatacacagccttgccagcactgtgcatcagatgtctgaccttcagaatggagagcctgcttctccc

SEQ ID NO: 9780 - DNA, 602 bp, Canis familiaris
  misc_feature (1)..(602): n = a or c or g or t
ggattatgaggaaaggcacattacatnnngnnntcctttcgataaaaatctttgaagaaatatgatttttagaactcaactacccattatagcacaaaatcagccaaagcagaatttttaaaaattggctttttaggattcttttagtttcttcccctcccatctcagtcctatcttgagggaacagccaactgagaaagaactttgtcatgtctgagctgtgctgtgttttaagaatacacacactggtgacacaagaaccattttcacctattaccagcgttcccttggaactcctcttaacacttccaaatgcgaagaaaagtttgatttcctacatgaggctttttggttttttgggttttttttgtccagaaatattttcagcaaaactttccaactctgtggagttttattaagaatttatttgaaaatgatggaattcattggcccatagatacattggaaaatgtatctatcttctttccagctgtactgtagtgccctgcaggcttgtttatatgttcacagttactttctttttttttaataaaagtcatttactgtagaatacttttaatttcactttctgtattttaatt

SEQ ID NO: 9781 - DNA, 223 bp, Canis familiaris
  misc_feature (1)..(223): n = a or c or g or t
attctnnnaaagctgtttggaaagatagaaagagntggnnnnnnnnnaaattcntnctattaggcaagaatcaccttaattccaaaaccaaagnnctnnncaaaaagagaattatagaccaataaccctgatgaacatggatgcaaaaattctcaacaagannnnagccaataggatccatcagtacattannnnnnttattcaccatgannaagcaggattt

SEQ ID NO: 9782 - DNA, 642 bp, Canis familiaris
  misc_feature (1)..(642): n = a or c or g or t
cagaaggggacattctggagaaggtcagcgnncactgccctgtgtttgactacgtccccccagagctcattaccctctttatctccaacattggtgggaatgcaccttcctacatctaccgcctgatgagtgaactctaccatcctgatgatcatgtcctatgaccaccactcgttctaagcagctgcttagccaaatacagaatggagagggacttcagtgtgactgctgaaaacatcgtccttgcaatggagagtgacctggagtcaacctgagaaaaacataatactgtttcttgcctttttagtcatcccataacaaggatgcacattcaggactgctgcttgcctttctgatcttaataggagcagtggggcttgacctattgattttggagtctcttgggggtgcctggctgcctcagtcagtagactatgtgattcttgatctcgaggtcaagccccaagttcgagccccatgttgggcacagagtttacttaaaaaattcttcagtggggacacctcttaacctcttggtgatgtggggtgtctggaacttaagtttcaggaacttgaactttctggttcagtggggtgttaaacttaacactgaagaccttgctgggatacaggtttttgctc

SEQ ID NO: 9783 - DNA, 586 bp, Canis familiaris
agaaaatgctcccgaggcatccctgcacaggtagactgggtctctacctgccttgggatctgtgtgtattggatgggggaaaatgtattaaactttggggtgggggtggggggtcagataaggcaccctgggcttcaggggactgcccactgcgtgggtaaactcttttgtccactctaaggcttctctctttggtttctacattttcattgaaggtagtgggagagggtgggccttacctgacacgagtaggaggagcaacccttctgcaggccagctccagcctcacccgggcagctcagaccaacctaggccacgtgataagccgggccgaagaggggccgcctggaccggggctccggactggctctgggctgcctagggaatcccgggggtgaacgcttggggcccggaacagagctggtcctgcatttgccaggatcccgagctgcccagggaagtgagaaggatgctctcccccaggagaagctgaggctggcctgtcctttgccccctggggaatgggtgggtgaggctgtgccctgcgagggagtgcggaggggctctgtgcatagttccgtaaaac

SEQ ID NO: 9784 - DNA, 520 bp, Canis familiaris
  misc_feature (1)..(520): n = a or c or g or t
ttcttctcatctctgtcgccccttgcttgtttcgatgtttacaggaacgcctgcaagaactcacccgggtatctgtcaaccaacttttacttcacccatactctcgcctgcccacatccgactacccctacaacgacgccccacngtcagcaggaagtagccagagcagagtcgacgcccccgacaccattatataaaacaaaaggtcggaatgttggggnnaggcgggaagggaaactcctcaagatggcggatacgccaaaatggctgaggttcctgtcaccacctccacttgggatgacagcttgagcagacccttacacctctcctttggacttcctcaaccgaacccaatgcccttcaaaccccagaggaggaagtcacctttgactggtcgaattgcaatccttcctttgcatatgagccaaccaataggaaaccgttctgccttacaacgttatnnnaccccctaccaccttgtcttggcgcgacttcctcgactcactctcttttccccgtg

SEQ ID NO: 9785 - DNA, 556 bp, Canis familiaris
  misc_feature (1)..(556): n = a or c or g or t
ggagnnnagctgggtnngaaggtatgtcagagtgaaccnnnnncttcactggtcttcccatggtcccacaggggaagctggaagatgggacagaatttgacagcagcctgccccagaaccagccctttgtcntctccctgggcacaggccaggtcatcaagggctgggaccaggggctgctggggtgagtcaagggggccacggctgcggtcaaggaggttgattatgggaggcaagccccagggatcggggaggagcagggagcctgggtgcttgccatgtgctgaacatgtgttgtcctgcaggatgtgtgagggagaaaaacggaagctggtgattccatcagagttggggtatggagagcggggagctcccccaaagattccaggtggtgcaaccctcgtgtttgaggtggagctgctcaaaatcgagcgacgttcagaactgtagccaatctggggaggggcagcggagaggcccccacatcagggaccagactgtttaaaaaaaaaaaaaacaaaaacaaaaaaacannnnnnacaaacanaaaaaacaa

SEQ ID NO: 9786 - DNA, 582 bp, Canis familiaris
  misc_feature (1)..(582): n = a or c or g or t
ctcacttccggcgtgactnnnnnntaagaagcggctccctcagagaagtnacngtagactctttgtacacgctcctccagcaaaagaaatcaagatctcctttcccctacctcttgaggattcattttcagctcatcgggggcgctgaatgaggcaaacagtggcagatttgattcgaactatccgggacccagagaagcccaatactttagaagaactggaagtggtgacggaaagtagtgtggaggttcaggaaataaatgaagaagactatttggttattatcaggttcacaccaacagtacctcactgctctttggcaacccttattgggctgtgcttaagagtaaaacttcagcggtgtttaccatttaaacataagttggaaatctacatttctgaaggaacccactcaacagaggaagacatcaacaagcagataaatgacaaagagcgagtggcagctgcaatggaaaaccccaatctacgggaaattgtggaannnnnntgtccttgaacctgactaatagctgttttaagagccacttaactttagttgtttgatatatttgtttaaattct

SEQ ID NO: 9787 - DNA, 524 bp, Canis familiaris
  misc_feature (1)..(524): n = a or c or g or t
attttggagaaatcttaagctttgacaaaaaaaaatgatagtggnnnggacaatggttggatgttgatgtagtttccaaacgtgttaaaaccatcactgtaatcaaaaaaaggtnctggtaacnnnatggtggtccgccaagagagtatttcattgcttttgactcagacaaaactaatagtagcatctttttgtcaagaagttgaaactatttgtcaaaaatgggtctaaaagcgctgcattggtgagcaggtatggagggacctgtacttttccatcatttgaccactgaaaccccagaccaccaaagggagtaactgcattggcccaaggacttttgccaaatccatcacactcacctgaccttttttcaacattaccacctcttttaccatttggaactccaagaaacagaacattctccaatagacaacagtaattgaaggatttgaataaattttaacaatgctgaattttataaatatgtaatatttggagaaatttatcattgggggaaagtagtg

SEQ ID NO: 9788 - DNA, 273 bp, Canis familiaris
  misc_feature (1)..(273): n = a or c or g or t
cccacgaaactactatccgccaattcgaggannncgtgaagccatgctagagatgctcnngcaccatcagatctgtaaagagnnnnaggcagagcaggaacccacagggaagnnncctgaggnnnagnntgtgacacaccacgactaccgaaaggannnggnnnaagccaggcctcctgccccaaccaagnntcatgactaccgatgggancagcctgaaacnnnctggnnacagagggcaccnnannnnncgggtgtcagcaacatcaagac

SEQ ID NO: 9789 - DNA, 533 bp, Canis familiaris
  misc_feature (1)..(533): n = a or c or g or t
cgtcgngcggccctcgcggcgcccgagcccgcaatgtcgggccccaacggggacctgggcttgccggtggaggcgggcgcggaaggcgaggacgacggcttcggggaagcagaatatgctgccatcaactccatgttggaccagatcaactcctgtctagaccacctagaggagaagaatgaccacctccatgcccgcctccaggagctgcttgagtccaaccggcagacacgccttgagttccagcagcagcttggggaggcccctcctgatgccagtccttaggttttgggagctcccagccagctccaaccctgcctccctgggctaggctctggcctaggcactcaccacctggcttcaacacctgctcaggggctggcctacaggtcccccagtgggtctgcctgccttggacacccttctggtactccccttggcatgcctgggccagcccccaacatccgacatcccctcccggggtcaggtgtgggccctcgacccacccaccttnnnnncctgcccagttctgg

SEQ ID NO: 9790 - DNA, 426 bp, Canis familiaris
  misc_feature (1)..(426): n = a or c or g or t
ttggtgaaaatgcnnccggagaggggcagctgccttccggtccagctgnacctgccctgcacagggctcaggggcaggaacctccctcggaccaccacccacccctggcctacaggaacgcactggtgtctcaatttaacgccagcagccgagggannnatcactgcttctgtgactctgggagtttccacggcagctgggggttggggggcggggggatggttgggcagagagcggggaagctctccaggctcaactggaggtgtccttggacctcttctcagccccctcctacagggcgagggggggtggtacagattcccaaacacttggttgccatccagtgtccctttaggactctgggtatcttaaaggctgcacagcattttattagtggaataaaataaaacaatatatcctgtttta

SEQ ID NO: 9791 - DNA, 558 bp, Canis familiaris
  misc_feature (1)..(558): n = a or c or g or t
gtgtcatggcnctgctgcgatcctgtgacttccaaaccaggaatcaaacactttttaagaaacaaacatttcctatgctagtctcccagcaagatgtacatgttttggagacttggaaagtatcatctgagttcacgtttagccgcagcttattactagcccttgagctgccagaatctcgtagtcaaccatttacggttttatactgtgaaaaatacagatcagtgaaaagcataaagacgaggggaaattcactttcaagagggtctgaggcgggagagatcctctgctgtgtgttgaagagtgaggcatgtataaaatagatggctgaatttcactgatcttcccaatgtgaaaaaatatactatgtatattgtgtgcatttctagaattcaatggcagctgctggtggtgttgtaattagagatctatatagaatatagatgttttagagagacggtgccaatcctaaaagatttgtgtgggctacaagtgcttgtacttactttttctgcactnnnactgatttggttttaagattgtgtgcgcgtacctgtt

SEQ ID NO: 9792 - DNA, 594 bp, Canis familiaris
  misc_feature (1)..(594): n = a or c or g or t
tnnaaacttgagtaggatttctgttttttgtttttgttttttttttaatgttgttgttattgttgttgttgcctgaacccaagaagagcctccaactaatttcaaatgaaaataccattgggatgagtggaaataacggcaataagtagagggaattattggatgtacagaggaagaataaatcaagggaagaagaggagatggccgcccatgccctctcattctctgggactcatctttatctccagcaagtaacgagacccactcttctgttaagctcacctggggaacttaccaacagtcgttgaaacagaagtgctggcaaaatggtcgagtgcccaaacctgaatggggttgtactgaaatacatcaccatgagtggtccaagctggcactcttcgattttttgttacagatttataatcgcttagatacaaattgctgtggattccgacctcgaaaggaagatgcctgtgtacagaatggactgaggccaaaatgtgacgaccaagattctgtggctctggcacacattatccagcgaaagcatgacccaaggcatttggtcttcatagacaacaagggtttttttga

SEQ ID NO: 9793 - DNA, 556 bp, Canis familiaris
ctgtctatgaactagatgaagaggatccaggaaataatggcttcctcaatgatgacttcatcgtgtggatgcggacagccgcctttcccactttcaaaaaactgtaccgtcgactcaatcgaatacagtactttattgaaggcttgcctgctgtaaccaggttcaaaggagaaaaatcagttgttctttccaccttgacatggagcggaggcagcagcctttttttaggtctcgcctacacagtgacaggagcagtaacatggttggccgccttttccatgatggccattcacctgatgctgaaaaaaaagaaaatgctcttcatccaggactaaagtcaagttttaagaagaaaagcagaaaacaaagaaattgacaatgaagtaactaagagagtcaaagatttctgacaaggctcaaaatgacgagtattttatcaaggggaactggattgactgaccaagtacaatcccagataaataaacaatgagaaattcagagtttgaggagggagaaagggtagaaggggagaaggagaaagcatagtcatgtatag

SEQ ID NO: 9794 - DNA, 576 bp, Canis familiaris
  misc_feature (1)..(576): n = a or c or g or t
gactacnngncttgcagaatgtcccacatgnngnatttgnncgnnggcttnnnnntggttatagtaaatgaaagatgtttgnnnggaatacccaaaggcattactgtgtacttgttgctgcgtcccactgggagtccacagcacctggctgtcctgcagttggagacatacttagatctcttgattaaaggaggtgactacaagatcgccccattgtaaagacaatagctaccttttgtagctattcagtaatccatagtgatacttggagagcatgtgagcatcctgctctccagccatctttctcccagaagcccaggcatctgttgcgaatccttacctgagctgaatcttatgctgaggattgcaaattgttgcttttgtaattctattgttccttccacattgattcgcttgcattccagaaaacgctgggttgattacttaccctctttgagctttatcctacttatctatatataaagagcataataagagatttcctataaagattaatcttgaaaatgaatgtgaaagaaccttgtatcacccatttgataattgaaaagaattact

SEQ ID NO: 9795 - DNA, 623 bp, Canis familiaris
tccattttgcttggaacagcagtgcgcccagccttccttacagctgcaaatggccgggacatggctctggccaaggaaatgtacatccgatgcacctgaatgaactgagggtatacaagatgctttcaagccagtcactgtacagaagcagattaattgctctcagcactataagctaactgaacttttgatggatacgattccccaagagtttgtttaactttctgggtcaaggactacttagttcacatcatccacattgcttcaatgcataggtttatggcaaaaacaaaaagctacaaacaaacaaacaccaaatcaaaatactacaacatttaaaacacattttatattgggaaaatcatcattggcccaatgctaatagagtctgagcatgaattctatttatctccttacaatcttaatatgcataaaccaactaaattccgatttggatcactgtgcttccctgatctggatcagaaagaggcattccatcaagatctaaataccaaatcatcaacagctcctccaaagtctgtcttggcacagttactctggattttcaaactggggagcgctgaatttggaagactacaggaaatatgccaaatctatattta

SEQ ID NO: 9796 - DNA, 246 bp, Canis familiaris
  misc_feature (1)..(246): n = a or c or g or t
gggnntgcgtgactcctgnnngcggctgctgaatctcccctggcccacccccaccacccaagggatccttgtactctggccactgtttcaccagatgagccaaagcagctctgaccaccacccgccctcccccnggccacagctnnnncctcatcattccccactcctccaccacccccattttccagaggggttgtaattnntaagctgaggaaggtggccagactctggaggactgaccatcat

SEQ ID NO: 9797 - DNA, 655 bp, Canis familiaris
  misc_feature (1)..(655): n = a or c or g or t
gatcaacannnccattcggcagcagaaggaacgtttagaggatcacgaacagagaaattcaaaagaatcaacaccttgnnnnnnntccttcaaagaaaaagagaggcagagacgaatgtttgtagagacggtgaagaaaaagatgcagannnnaagtttccaggttggagccagaaaagccaccccaaagatggaccaagaaagggagacgctgaagagagacacatccagcaaatccagccagagccttctgttttctaagcctggcgacaagaactagaaatgtcatcccgtcgggccttgcgtgatcctccgtgagtcatgtgtgtgactcttctgtgtcaaatactaagacacttgtataggactttaaaggttgttaccctagtaggttgcttcctagactggtgtttgcaccgtgctgtattttggagcatgcaggagtcggggttctttcgaaaaatacttaggaacgtacacatcctcaggcataggaagaatgtgagtttgaagcccagactcccaagtctggtagatacaatgatgtgactccatacctgagttgtgaggcacccacacatccacccccacagctggcaagacgcaagacatggactggggccacaggacagaatggcaaccttggctggccgtg

SEQ ID NO: 9798 - DNA, 541 bp, Canis familiaris
  misc_feature (1)..(541): n = a or c or g or t
tggggacctgatgtaggactcgatcccgggatcccggggtcacggcctgagctgaaggcaggcgctcaaagtgacactggagtacgagtaggactgtgctcgctgacgtgccagtggcatgtgtgttgtttccttctccctgctgcaaacctgccgcatcgtagctcagttgtgccacttggctcacgcagccctggtgtccactcctggttgacaggccggtgccctgagagtgatgttgggtcgtggacatcctcatcttgggcctgatcctggtgtcaagttggccctgggccctccgtccctcccgtcctctccgtgccctccattccctccgtcccctccgtgccctctgtcactgaggaggagctgagggccaggctggcgttcgtatcactgccccggattctcgtagcacaacttatgattttaccaaaagctcaggtcgtgatctcaggctcatgggatcgagccccgtgtcaggctccgtgtgcagcatggaagctgcctgaggttctctnnnnccctctccccataccgc

SEQ ID NO: 9799 - DNA, 243 bp, Canis familiaris
  misc_feature (1)..(243): n = a or c or g or t
gcattggtgcactgctcaaagggctctctnnnnnaacgtctcatatgtggaaggcatctattgagtannnnnnngcannnnngacnnnnnncattagtgnnnnagatccaggnnnnnnnnnnnacagtgctttcaannnacccacgaaagnnctttnnnaatcagaagaaaaaaagnnnnacttttaggtagaagaaaaatgctaatgtagtcatcttcatactnnntatattgtaaaatgta

SEQ ID NO: 9800 - DNA, 369 bp, Canis familiaris
  misc_feature (1)..(369): n = a or c or g or t
ttgaaancagaagagcaacntgcatcaggnntagaagcctccctgtccatgtttgggatgctggggatgaggtgtccacaccactaccctcgtcttggtgtctcccctcctcccccctgcctcatgcatcagttggtgtggggagaatccagaggcctgggtgagcaccgtcccaaactggccccgaggnntgcctcactacttcctctcctttgctatacccagggaccccccatgtttggtgctcctcctcccttgtccccaggggcatcccctggtgcagattcaccccttctcccaggnnnttcctctnnacctccctcctaccntcngatgattgaggctttaagagccttgtttcctccnnnn

SEQ ID NO: 9801 - DNA, 709 bp, Canis familiaris
  misc_feature (1)..(709): n = a or c or g or t
cagtaagaatgagattcagaaagggctgaacattcagcaggtcctcccatcaggctttatactttgggagcagcagattcactcctgatgtctttaacatcattctttattgggaacaagattgacaaaatgagcaaggcagatggacaaggcaaaaaaaaggctgaaatggcagcgatatcccaggcattttcccgattgaagccatgcatctcgagctttttgaaatggtcatctattacatcatcagcttgggaaataagaagtacaaactccagcattgcctttgcccgagcagagaggttagactttctccacttcacgcagacctgcaagaaaacacacggtcaaaagcagaatctctgttcatcacaatacannngagaaaacaaaaggnntnncaaaatgaaaagacccaaggtnnnaataaaggnncnnagtcaggacaaaatannctttccagtgtgatgcaaacnngnnnctctggctcaaccccacctctgcaaagaagtcttctttgctcactcagctacaagctcctctaaatactcatngnaccaaaactctcagnnccaagactcagagactcnnnnnnnatnnagactnngaatccaaactttttcttatgagtaaagtgaagctcagatccctntgtccccaannnatcccacacaagacataatatatgtaaaattaatagctaacactt

SEQ ID NO: 9802 - DNA, 589 bp, Canis familiaris
gcactttagtttcagagagtgtttatatacaactgattttttaaaaatgctttctccctaattttcacatgttataacatgtcatggagttatgcatatataatattaggcagtccactctataaatgctcaggattgttacatccatcatctcagcagtctgttactacatgcagtatcttaaaattttatttccaatcatccatttttaatagcaataaagaatttacaagtgatacctgaattgtagaacactgtaaagaattcatagcacaatttatttatttatctttctgtggccaagtatctcactgcaatcacttcagtcatattctggactgtctttgggtttactctgaccaaatgcacagttaccaaactcatgtgttataagatctgctctgcaagagttctcatataatctggcactacatactttcagcatctcagcctttctcaatatcaaagtgtttttaagaacttctgctctttacattgctaatctaccaatggagaaagatttctattaaatgctaatagtaaaacatccaggaactgaatcccactgggccatgttggaatattcttc

SEQ ID NO: 9803 - DNA, 650 bp, Canis familiaris
  misc_feature (1)..(650): n = a or c or g or t
taaacacactcactagaacttcaacnttggnnttggtttcagagtacttggctcaaacacctgctttggtgcttcctgggacctgaccttacatttcctcatccagaagatgggtttgctgtgaagatttaatgggccaattctaattcctgtggagtagttcacgggcccacagtgacacaagagtgtcagctattatcagattttcctgcatggcgccgctgcccctacaccacctccggtgaccccaatagaaatgaggccatgtggccccggactggagtgggccccaggtcgccacaaagggtagaatgcaagctgggtgagcctgcatctcacctcaaggcagtgacgaagaagatgaacccagccacggaggttctcagagccgctgacccaaatactgttcttccttttttttttaatactgttcttcctgcttggacttcgtgtggcttctgtgctccccactgtcttgctgcaccagagcgtggccctctgagggcaggaatgagctccacacggccttcccagtaggcatagggaagacagtctgcttctggggactgctggaatcagaaggactcttggggatcaccttgtccacacnnnnnnctttaagaatgaggaaactagggcaagagagggga

SEQ ID NO: 9804 - DNA, 550 bp, Canis familiaris
gccctccttcagggaaatgttttttcttcatccagttcctagcatagcagcccaatcagtactctgcaaagcagtcagtaattgctgttgaattgtcacctggagtgacaagtctattttgagggtgttttctttgtttttacttgtcacagcaataatactgtaggtaaggaatctttggattcagccagtaactagaattttatgactatgaacaaagaaaggctgcgtctgaagtgtgacctgttagtttttccctttaaaaagaggtctctggatcttagagtttacccaactgtggagataacataacaccccatatagcaaggcatgcatttattcactcaaccaaccattggagcttctaatatctgccaggtactgggaatgcaggatactgggaattacaagagaactaccaggagagaccttaaacaagcgcacacttttaaatttatcgtcgtgaaaaactctaaaaggaaaaatacagagagacctagtctagtcagagtttctctaaactagacatttaaacttaaatttgaaaaat

SEQ ID NO: 9805 - DNA, 564 bp, Canis familiaris
  misc_feature (1)..(564): n = a or c or g or t
gtcatgctcatggtgctctgaacaggattcagggtagcaattgccaatttaaatatttgttcatttctaaatctattaatgaccttgagattttccctgaaactaggtcgaatcagttccaaaatgaaacaggcttctcagggacgcacctacttcttcccagtctgccttctgattaaagcaccaagcagagaccatagtatttccctttgctatatactgtgatccctactgttaaatcctaagaaaccaaaatgtcacggagaaaaggctggcagaacacaagtgaatttgttcgttatgacaggatatcaagtgacccaccattgtttttcctggttgtcacttcatgggctgcgtagaaagcttgaaaatgcaagacctttagttttggttctaccactaattaggtagttacaacatctggaacaggtaagttaacctccctggccttactttccccatgtagaatacagaaatgcttcatggcagcaggacagcgtaagacaccagcaatagaatataacaacattccatgaggtnnnnatactttatagttctaac

SEQ ID NO: 9806 - DNA, 584 bp, Canis familiaris
  misc_feature (1)..(584): n = a or c or g or t
cctgtnncagtcatctcctggctaaatctcttcctccaagttgatgctcttaaagatgctnntaaagttcttctacctcagtattctcaggaaaagttcattcaaatagctcagcttttagatctgtgtattctggccgttgactcgctggagttccagtacagaatactggctgccgctgccctgtgccattttacctctattgaggtggttaagaaagcctcaggtttggaatgggacaacatttctgaatgtgtagactggatggtgccttttgtcagtgtaataaaaagtactagccctgtgaagctgaagatttttaagaagatttctatggaagatagacacaatatccagacacatacaaattatctgtctatgctggatgaagtaaactatgtaaacaccttcagaaaggggggacagctgtcacccgtgtgcagtggaggcattatgacaccgccgaagagcactgagaaaccaccaggaaaacactaaagaagttaactaagcaaacatgttgggattgactgagtattgggtagaatttcatagaacttgaactactaaagttttcaggaaag

SEQ ID NO: 9807 - DNA, 485 bp, Canis familiaris
  misc_feature (1)..(485): n = a or c or g or t
gctatcagctacactgtgctctacaactgcctggacttcccagcgggggtggtgcctgtcaccacggtgaccaccgaggatgaggcccagatggaacattacaagggctactatggggatatctgggacaacatgctacagaaggctgtgaagaagagcgtggggctgcccgtggctgtgcaatgtgtggctctgccctggcaggaagagttgtgnctgcggttcatgcgggaggtggagcaactgatgacccctgaaaagcggccatcctgactgctgcctgcaccccatcacctggctccggaggacctgagaccattccatcagtgccccgccaagcctgggcacagctgccaccctgagaggaaatgttcggcctggggcagaggcttctgtgtctgccccacccccatcccctacaagaagcacagacctccctgagtctggaccttgctccccatcctggtcccctccccctggcctga

SEQ ID NO: 9808 - DNA, 711 bp, Canis familiaris
  misc_feature (1)..(711): n = a or c or g or t
ctgtttttgagaatctnnacaaacntnnagagacccaagtgatttcatatgaaatgcttcatgtgaccccaccaatgagctcaccagatgtcctcaaggcgagtcctgtggctgacgcngnnngttggnnnnnnnnnnntnnngaancnnntcnncacaagaantacccaaatgtgtttgggattggggactgcactnnncttcccacgtcgaagactgctgctgctgtagctgcccagtcaggaatacttgacagaacaatttctctgattatgaagaataaaaaaccaacaaaaaagtatgatggctacacctcgtgtccactggtgactggctacaaccgtgtgattctngcggaattcgactacaatgctcagccgctggaaaccttcccctttgaccagagcagggagcgacttaccatgtacctcatgaaggctgacctgatgcctttcctgtactggaatatgatgctaaggggttactggggaggaccagcatttctgcgcaagttgttccatctggggatgagttaaggatggtttctgaaccccagtcgcagttgctgattgatcaagagcagcatgaagaacttaaaacctaaccccgctcgaagaatttattgctggatcatggtgaccaaatggctcccttttcagtgctctggatagccaccatgtggtctgcccaggatgagtttgattctttgga

SEQ ID NO: 9809 - DNA, 536 bp, Canis familiaris
ttgtcaggactagagatgacatatggaaatgtgagaggtaacaatgcctggccagggtcgttctaaatggatggtgctatgaagacataatattgtaacctccccaacccacaagtgcttcgagaagggaaataagtcagaaatagaaattttccttaggagaagaagtggctggggttaagaaaaagcaggaagcaatcacttagacctctgtccagtgcaaaagggttgtctcttctctgaaacatttgtgggaccttttgggttacaaagcttgctagctggactacgtggcactaaaatcaaaggtctccattcagaccttcactacattcagatctttcttccagatgtttccactccctaaacttcctgacactactaggtccaggaatgcaagggatttcttggctgcaaatacatttgtcttgatctctttttaaaatagcagtcggtaccctgtgttctgtgtggacttcaagcttcatgaaacacactttacattatggtacctggccctgtaagcacggcaagcc

SEQ ID NO: 9810 - DNA, 483 bp, Canis familiaris
tgatgtacctgtttgtgaggcaaaagtacttcgtcggctacctgggagagagaactcagagcacgccaggctacatatttgggaagcgaatcatactgtttctgttcctcatgtctgttgctggaatattcaactattacctcatcttctttttcggaagtgacttcgaaaactacataaagacagtaagcaccaccatctcccctctgcttctaatcccctgactctccgctgagtacggggtcagcgctctcctctgatcaatacctaaagtcatcataactcaacccttgcaaagatgtggctcctcttcagacagctgtaaatctaatgaccatctgagctccgcagcttgagttaaccttgctttccctggaagaaaataactttgtgtccgctccaccccttgagaatggcagtggccccatatctcttattcagacccattctgtatgtttcttgacttctcccgctttctgaaga

SEQ ID NO: 9811 - DNA, 615 bp, Canis familiaris
  misc_feature (1)..(615): n = a or c or g or t
actgngaatctcgcacatcggctctggacaactggacaaaggggctggacaactcgaccccgatctcnnacaactcaacgctcaccctgcgcaactcgacactcatcccggacaacacaactcttgtcccagacaatgcgacactcatcctgggcaacgactcggagaaactgaacccgccagccaccttgctgggctggactgcgcctgagccaacgctcagctctgggcgggtgggattggaggcagcgggggaggagctgtgagcagcatcgggacgtgccccccgccccccagcccctgggctgaggggcccttgtgtggacagcgacgggcaagggggtgagaggcgagacctggcggaggagccgggatgcagacgcacaaactgtacactcacggacccagagacgcacagagcacgctcagacacggggcggccacagggccacaaagcctgagaaatacacagacccaggcggaggccaggcggacacacgcacacaccccgcgcccccgcagctcgcctgcccgggactcctccctgcgcctgcacacagggaagagaaacccgcggactctgcagggaccctgaccccggaaccacggcccacg

SEQ ID NO: 9812 - DNA, 571 bp, Canis familiaris
  misc_feature (1)..(571): n = a or c or g or t
cccccacaatctccccacccttcaattccacaaaagttttataaaagaaaaaatatatatatattcatgtttatttaagaagtngaaaaaaaatcaaannnnntaaaaaaaaaaaccaatttcccaccctcctaaagtggcccccattcccatcttggnctgagaagacccaggccagacagctgtcccccatcccccgccccagccctgcctgctctaagaaactggcaggactggaggcgacagatgggcccctcttggcctctgtcccagctccctgcagccagatggagaggcggctgcttgcttccccctccccctgaagagccccggagacctcccccccttcttccagggtgaggggaagctggagccccaaactttgatcctccattgaagtggcctgacctttccatttggggtgagcactcagaggcccaaggaccccctctccagtctggccttgggctctggcctgcatccctttgctggggaggaggcggcctggtttagttctgcctggggaggggtaacaacagagctgctctggaggtcgaggccaccccccacc

SEQ ID NO: 9813 - DNA, 507 bp, Canis familiaris
  misc_feature (1)..(507): n = a or c or g or t
cnngcatccagattccatnnnctcgaagctnnntagtctcccacgctgccccgnnngatggctgatggaggccgggcagcacgactttgcactgcaccagttcactagggcatctcccaagcttcaccggccttctggttcatgccttcggtaagcacttccatgccctctgcttactgtgacagttgatgacaaatcttgcgctgccatttttgctgtgggtaagtctgtgtggtgtcttctcttgctttccttcttaccaccccacagtctggtttcgtgttacaaacagaaaagctgttccgaggttcccacctcaccacatttcctacttcttctggtccctcttcatgtagccccttctcatcccacaacaaaagttaccacagaaggtttcctttgtatagaatatttattttgaagctctattttaatagtatttattttagaaagtctactattgtaagagttcttctgtttgtgaagaaaaaaacaagttaaaaactg

SEQ ID NO: 9814 - DNA, 531 bp, Canis familiaris
  misc_feature (1)..(531): n = a or c or g or t
gtcttgtgtaccacatcaagcctgnctgtactgtaaagnnngtcaactaaattcaagtccatttgtgnnaccaccactcagtcatatataaaaatgtgttgagtcacaaatttcacattcgctcctgcactttgctgtgtacatgttacaccttaattaaaaagctgttttatttgtaaacagtttgcccttcagtgtattgggaagtaaatcactgttgtgctttggttagtctgacctgtgctttttctgcccggtgcttgggtgtgagacatggcagccgtttggacaggcagttctgttcctgccaaggttgaggaggggtaccatccttctgtgggtctgtgacagttataaatcagaaaatcaggtgcaatggtctttgaggcaaaaatttcattctgagtgaatctcctgtccattcccacaatattttaattgtgcattaaatatggtacttataaaaaaaaaagcctgccttacaaagtagcttgtacctgtatccactactctggaaagatgggggggggg

SEQ ID NO: 9815 - DNA, 485 bp, Canis familiaris
  misc_feature (1)..(485): n = a or c or g or t
cccagcacagtgtcccccaacagtgtccccagcacagtgtctcccagcacagcatctccagcaccgtgttctccagcaccgtgtcccccagcaccatgtcccctagcacagcatctccagtaccatgttccccagcagtgtccccagcacagtatctcccagcacagcgtccccagcaccgtgtccaccagcagtgtccccagcaccatatcccccagcactgtgtccccagcagtgtccccagcacagtgtctcccagcacagcatctccatcactgtgtccccagcacagtgtcccccagcagtgtccccagcaccacatcccccagaacagtgtcccctcagcactgtgtccctcggcacagtatccccaacactgtgtccccagcacctgtcccccagaacagtgtcccccagcacaatgtgtcacccgcagcacagcgcccctcaccacttggcacaannngaaggtaaatgctcagttg

SEQ ID NO: 9816 - DNA, 652 bp, Canis familiaris
  misc_feature (1)..(652): n = a or c or g or t
ctgcttnnaantataaacatgttgttaaaataggnnttggtttgaataatgcagtattctaataagtatactttaagactatgagttacctacacgtatgatatatattttttaaggatactaaaccagcagatactctggcagagtagtgaactttattaaacaggtttaatttctgaataaagtgaattaaatcgaaactatttacagaagttcctaaaatcacaggatactatagaccagtagcatctgtgccagagatttactgttattagctaattctaacagcaaataacagtctgactcttcatacctcagtgcttagaggcatgtccctcctgagctggaggggaggggatctttgtatagtccaggttaccatacagggattccttttatgacaactgcttaacgtaacttctcattggtcgtctcagagagacttcctcatgtagctcagtaactcctgtacttaacagacaggaaagttccagaaactttaagaacaaattctgaaagacctatatgagcaaatggtgctgaattttttttaagccacagcttcattgtcttagtcgaaacaggatgattaagtgattattttaaattcttttttttttattagcaacttcaagtataacaactgaaactg

SEQ ID NO: 9817 - DNA, 601 bp, Canis familiaris
  misc_feature (1)..(601): n = a or c or g or t
acacacaccacctcagagtgtagatctttcagactccagctgtgaactttgtnnncgagaggcctgggggtggggggctgctgctgtagctgcttctgtagctgaacttggcattgactatgtgaggagccagcgtgcaggcttggctttgtcagggcctccttgtagtgtatatatccatatgtctagatgcataataacttgagtgcctgctggtggaaggaagaatgttcctggaggctggggagggggtagaggattctgctcctgcttccggggagggggccatctgctgtgtattcaggctccactggcagatcgggagagcacaggaggaaagaaggtggctcctctttgcttcctgccctccctcttctcccaccctgggtatgctccgtgtgtaccaggtacatgttctgttaacagcagtgtcatgaaacatttgcatagaattcactggacaaattggagctgcactcatagggcatggatttcaagtattagaagaaaaccaggaaagcatgaatattgttctgaaggactgcaacagggtgacttcctccctctcccgcccccactgaaaaannntgtttccttttta

SEQ ID NO: 9818 - DNA, 442 bp, Canis familiaris
  misc_feature (1)..(442): n = a or c or g or t
attctcatttttgaaaaatcacaaggtgaagatctgtcagttngannaggnnncnnnctgctgtcttcggtcagaggtctgtttcaacatgggacagatcacnttggccaaaaaattggncannnnngcnnttcgactgctgaaaaggaatttcccttggacctggtttggtgtccttttccaaacattcctagaaaaatattggcgttcctgttccctaagccaacctccaaacaaccccagtgagaagtgaggagcctggccaagtcatccggtccctttaggaccacagagaactaaactgggaccaggcgtggagtattgcctctattgacctaagactcctcctcttccaagcatatggcagttccggttcctctaccttactctctgaaccaataaaatatagcagaatgaggannnnnnntggttttgaagcctg

SEQ ID NO: 9819 - DNA, 348 bp, Canis familiaris
gttcctttggcaacacggaagaacatggacactgagacaaatacttggttggacacagagtaaactaagaatgagaagctcaaactgagaacttgaaatgcttacctttcgacaatgactgtaaatgtagccttccacatctacactaaccgcactggtacattcatccaaaatggcaaactggggtttatgataaaataatcttgccatctgaagcataaaaagaaatattctgtgtaagcacatgcagaaattaataaggtaatactgcaatgaagcagaagcagtgagcaaatttatgcataagtgagaaatgtttccatggaccagattcttggaagtgtgtgt

SEQ ID NO: 9820 - DNA, 555 bp, Canis familiaris
  misc_feature (1)..(555): n = a or c or g or t
tgtaaatcaaacagcagaatattcttttnctgaacagcagaataatgaaaattcaaaagtnntaactcagaatgctgctgcatattggaatgaacttccacggtctgcatgtaccccaatatataattcttctgagcattcatttggaacttcatatccttaccatgcttggtgtgtttatcattatagcagcagtggcagcagttcccttacacagacatatcgtggaataacatcatatgaggtacaggcacctccttctgggatgttgactgcaattgcaagtactgtccaaaacacacatcctaatcttttgtactctcaatattttggttactttgctggggagccgcaagcaaataactttgtgccagtggatgggtattttcaatctcaagtgcctgtttcttacaattttcagcagccgattttttcacagtatgctccccatcagccattccaacaagctnnnnnccttaccctcctgattcaggtgtgcttccagaagctccttggacatatgttccatgccaacaagaaccctttcagccagga

SEQ ID NO: 9821 - DNA, 686 bp, Canis familiaris
  misc_feature (1)..(686): n = a or c or g or t
attattctgatattttgtattctcaactttataaagatgaaatannnnnaggggtgaagaagaattgttttcataattttctgaannncaggtgtcttgtgctacaaaagggcccatgtgttaaaccccntgtgaaataagcaagtgtgaagccgcttctactattggctgtgtgatagaatcttgtatttgggacaaggcgtatccatttctctatcacagctcagtggtacctgaattctggagacagggtgggacccctgagccagctggagcaagaagggaggaggcaggctgatggtgattgcacctcacccgggatcctacccctctttaaaggaaaatgaacgtaaaagcttcatctcctttatatgcagttcaaatcctcaccatccacagcaagatgaatttcatcagccatgtttggttgtaaatgctagtatgatttcctacagaaatactgctctgaatattttttcataaaggtctttgcacatgtgattgtatatgcgttaggaggctgaatgctcttggagcctggactcagctggagcccatggaagagctccttggtttctgagcattgtgctcccatctcctgatttctctgaacagaactagcaaaagagagaatgagggaaattgctattttatttgtattcatgaacttggctgtaatcagttat

SEQ ID NO: 9822 - DNA, 643 bp, Canis familiaris
ttgccattcaccatggataaaacttgccatgtcagccaaactccagtcctccccccactgtttggtgacttggagaaccaatttggcgttgtgtcacccagaccttagagcttgagtctaggggaggagatgtgttatgctaaacccggactccttgggagatgtaaaagagtctccgaacctgttgagtgacttcttcattccagttcatgggacacagggcaccctgcccccactgctgccttacgccatctctctgtggagccatcagccctcggcttccagagaggtggagctagatcttcccagctctgcttagggtttgatgcactggaattgtatatgggttggtggtgggaattgatcctgtccctcatccattgggacataaggatttgacattcaggagtcaaccctcttgccagtgccatctgaccagtggtctccctactttctcatccgttctccaccctcgtgttttgttggggacagttgttttgtggctgtctacaaatgccttttgtgactaataccatgcaaaacatcttgtatttcccagggctttcagggaagaccgttgccaatttcacaaaagtatcatctgtcacttcctgtgtaggcatagaattctgcatcttacaaa

SEQ ID NO: 9823 - DNA, 601 bp, Canis familiaris
catccatgaatttttcagatagtaccctaaaaacaattttatatgcctcactggttgttgttgttaggcttttccttcacttgactttatcattgtttactagtaaaagcagcattgccaaataatccctaattttccactaaaaataataatgaaatgatgttaagcttctcgaaaagttataggttaaacctactattgttagattaattttaatgtatgtgttgctttccttcatctggaatgtggcaatagcttttttatttttaaccctctttaatccttattcgattcagtgacttaaggtttgagagctaaacactgggatttttgggtaacagactgacagttttgtttgcataattataatcggcattgtacatagaaaggatatggctaccttttgttaaatctgcactttctaaatatcaaaaaaagggaaatggagtataaatcaatttttgtataacctgtttgaaacatgagttttatttgcttaatattagggctttgcccctttttctgtaagtctcttgggatcctgtgtagaagctgttctcattaaacaccaaacagttaagtccattctctggtactagct

SEQ ID NO: 9824 - DNA, 183 bp, Canis familiaris
  misc_feature (1)..(183): n = a or c or g or t
gggtaatnnctaccagcttnnaggnnncagacacnncctttcctaatcagcattagaaggaaagaaatgactagaaagaaaatgactgctatgcattctaaactaacattaaggatgagtnttgaanataaattagtttctcctggagaannnnnnaatatatnttgtggtagcnnnnnnnng

SEQ ID NO: 9825 - DNA, 486 bp, Canis familiaris
ataaatgtgctgttgatgatgcatggcttaaagcctttatctctagtcgaaagaactgatcttaaagatctcatcgtttttgataaacagtcatcacaaaggatgaggcagaatttgaaaacattggtggaggaaacaacacgtcaacagaacatgatccaggagctcatagaaactaatcagcagcttaaaaatgaacttcagctagaacaaagccgagcagccgatcaggaacaacgagctaatgacttggaacatattatggagagtgtgaaatccaaaattggtgaattggaggatgaatccctaaatagggtttgccagcaacagaataaaataaaagatcttcaaaaggaatataaagctttacaggcaaaatgtcatcattataagaaaaaacgaatggagcaacaagagattattacttctttgcaaaaggatatctatagattaacaaaggaggacgaagagcgcgttgtcactcaa

SEQ ID NO: 9826 - DNA, 605 bp, Canis familiaris
  misc_feature (1)..(596): n = a or c or g or t
gagtgnnagcgcccagnngtcnctcgactactggtgtgaccacgcagggccccgcacagctgctgggacccaatgggcctggatggagacgctgaggggcgaccgcatctccacatcccccaggccccgccgtggcacgggtgcaggctggaaacgagcctcctgcccacccggcggcccgtggctccagcgacagtcggggcccagtcaacgggctactgaggagccccgtgtcctctccaaggccctaacgagagctgtggcctgcctgagggtctgagggtgaccagcactcggagggacggcaggcactccagcacacgtactgcacgctcatccgggtgtccacgtaccctctccgtcacagcgtccagaaaccaccaaatacagcggcctcagcgtttctgcacacgcagccccccgcatggtgctcctcgtacctgaccaccgttctctgcgtgctttcctcctgatgagcatcgcccaccgcctcatccctccgcttggtgtctccctgcctcgggtcctcggagtctttaccgggggctctaagatgcaggttgggtggtccccgtcggaaatgcctctgaggcttctagataaaa

SEQ ID NO: 9827 - DNA, 651 bp, Canis familiaris
  misc_feature (1)..(651): n = a or c or g or t
cacttgnncaccaaangaaagaatntgtaaagtattccaaaagtttcagtgatactctgaaaacctattttaaagatggcaaggcaataaatgtgttcataagtgccaatcgactaattcatcaaaccaacttgatacttcagaccttcaaaactgtggcctgaaagttgtatatgttaagagatgtacttctcagtggcagtattgaactgcctttatctgtaaattttaaagtttgactgtataaattatcagtccctcctgaagggatctaatccaggatgttgaatgggattattgccatcttacaccatatttttgtaaaatgtagcttaatcataatctcacactgaagattttgcatcacttttgctattatcattcttttaagaattataagccaaaagaatttacgccttaatgtgtcattatataacattccttaaaagaattgtaaatattggtgtttgtttgacattttaacttgaaagcgatatgctgcaagataatgtatttaacaatatttggtggcaaatattcaataaatagtttacatctgttaaacatttctttacttgaaaatacatatatatatatatggatatatatatatgatcagaagaccaagatgacttggtgtaatgtctaaag

SEQ ID NO: 9828 - DNA, 509 bp, Canis familiaris
  misc_feature (1)..(509): n = a or c or g or t
gccgtgcagatctnngggctngaccccaaaggggagcaggtggtgtggcaggcgagcggatgggcagcccgtatcatccagcacgagatggaccacttgcagggctgcctgttcattgacaaaatggacagcaagacatttacaaacatccactggatggaggtgaatgattaaaattttcctgctgcatctgaagattctggaaaccaaaacataaacacttgggctttgagctgggcatggcttgcctgatatcaacttatattggcttggctctgacagaaaacaatacattgccacaccaagctggaggaatagatcaaaaatgtttgccttgaaatcagccacggacaaaataatgctttcaacttgagaagaaaatgaacccccccaaagagcagacatttcccaatgattttgtatggtaataagtggggcagataaataaccactcttagtagacatgatnnnntagcctgtataatctnnnccaaagccaagatttgtaa

SEQ ID NO: 9829 - DNA, 595 bp, Canis familiaris
  misc_feature (1)..(595): n = a or c or g or t
tagctgccagggggctagatattgaaaatgttcaacacgttatcaattttgatcttccttctactattgatgaatatgttcatcgaattggacgtactggtcgttgtggaaatactggcagagctatttccttttttgatcctgaatcagataaccatttggcannncctttagtgaaagtactgtcagatgctcaacaggatgttcctgcatggttggaagaaattgcctttagtacatatgttcctggcttcagtggtagttcaagaggaaatgtatttgcatcagttgatactagaaagaattaccagggcaagagcactttgaacacagcagggttttcttcttcacaagctcccaatccagtagacgatgagtcatgggattaaagctaaaacatccttcaagtctgtggtatagttttgatgcagagaagaaaatagttttgatttttgagtttttaacagaagtgtgaaacttnnnctctcgtatcttctgttcttctgttctcccacccttaaaaaaaattcttactagttatgtgaaatgctaaaaattacaacattgcagttactgatacacatggtgttaactg

SEQ ID NO: 9830 - DNA, 523 bp, Canis familiaris
tttgtgttcaagctctaggccaaggataaaggaagtagtagctcccaaatgtttttgaccagagaattaagctatagatgttaaaaataatttaatatggtaattggtttattaaaagtctctgggaagcaagagaaaaggatgtgtatgctcttagtatctcctctaaaggatgattattcattttttaaatacagaagatgaccaattccttttaatagcacaaatcctaacctgagaaatacaaccacacttagccacaatggggcagcaaagtaaatacaaatagatcagccatcaggctttacagcttgaaaaaaagtttctgtgtttagtatttgatgcctaggaacccgtattttcaactatctggaatcttcttctgtagcaaatttctgtaggagcactcatctttcacattttgcatcaacaggatgaaccctacataaaatacataaaattcaggcatctctctttgtcatttcaaaaatgctgtgaaatgccttctttacttgaatgtgga

SEQ ID NO: 9831 - DNA, 641 bp, Canis familiaris
  misc_feature (1)..(641): n = a or c or g or t
taagaggcttaagatgaagcaaaaagaactagaagctaaggnnctggcccannaggctctggacccaaaggataaagagaattcctctcntgcaatactccgaccacttgcccgccgcacagtcacagtagctaagcccctgaaaaaggctgtggtgatgcccttacaactgattcaggaacaggcagcgtctcccaatgctgagatccatattctgaagaagaaagggcggaagagaaagctggagtccctggatgcctcagagccagaggagaaggctgaggactgctgggagctacagatcagcccggagctactggcccatgggcgccaaaaaatactagatctgctgaacgaaggctctgcccgggatctgcgcagcctgcagcgcattggccaaaagaaggcccagctcatcgtcggctggagggagctccacggccccttcagccaggtggaggacctggaacacgtggagggcatatccgggaaacagatggaatcattcctgaaggcgaacatcctgggtctcgccgcgtgccagcgcagcggcccctcctgactgccagctcctttcctctgtcatttttttttttaatccttatataattgcgtgtcgtgtaaatacaatttnnntccnn

SEQ ID NO: 9832 - DNA, 481 bp, Canis familiaris
  misc_feature (1)..(481): n = a or c or g or t
tgccagcnnaaccacctgggtgggagggggcagggggcttggctcacacccccaatccggcctacttcctcctgccccattgcccacccacgccatgcatgatgggtaaagcaatattgccgctgcccccgcccctgcttctgctgcctgttcaggaggggggcggtgaggtgggggcagcggctccgcacccctccttcttgctgatttgcacacatcggccgcttcagatgcacactactggggcccagcctccccctgcccccctcccctgcccggcaggggtcgtgatgggctggcacagtttggggcagggggttctgggacctactccgacccccagcaacatttgccctccttcctctggctggacctggggtccccctccctgtgatgcactcttgccccagcccaaccctgccctctctcaccagccttggactgtggccacttagaagggcccattcagcctcttctctct

SEQ ID NO: 9833 - DNA, 572 bp, Canis familiaris
  misc_feature (1)..(572): n = a or c or g or t
tgtcaggatggaacattcagtgancaaggtcaatgtgtcgatcactctctgtatcctcggnntcataaacacagacacagccatgaaggccgtttctgggatactcagcacagtaggagcatcttcaaaggaagaatgtgccctggagatcatcaaagggggagctctgcgccaagaggaagtgtactatgacaactcagtctggacagctttcctactgggaaatccagggaggaagatcctggaattcttgtcattaagaagttataaactggacaaatttataaacaactaagcacttccttaggatgcggcatgggaagggactgttcatcctgatattacctgagctccatccatgaaggtatctccccggagagacaaatgagtgtccccagagagttggaagtcacacatcacatctcacaatttgaaggagttcctctaacacttgcacagtggaaatgtaattataatgaatgtcatgaaccactgcaacctgtggtcatgaaaatgatagtaaccagaggtacgnnnnaaaaatagttctatcaaatttacctcatatataa

SEQ ID NO: 9834 - DNA, 625 bp, Canis familiaris
  misc_feature (1)..(625): n = a or c or g or t
agncagctgctgagccagaagcatgtgggnntcatccacatgcttacccacctggctgaggccctgcaccaagcccggctgttggccatcctggtcatccctccggctgtcactccggggactgaccagctgggcatgttcacacacaaggagtttgagcagctggcccctgtgctggatggcttcagcctcatgacctatgactaccccacagcacagcagcctggccccaatgcaccattgtcctgggttcgagcctgtgtccaggtcctggaccccaagtccaagtggcggagcaagatcctcctggggctcaacctctatggcatggactatgcagcctccagggatgcacgcgagcccgtcattggggccaggtacatccagatgctgaaggaccacaggccccggatcatttgggacagccaggcagcagagcacttcttcgagtacaagaaaagccgtggtgggaggcacatcgtcttctacccaactctgaagtctgtgcaggtacggctggagctggcccgggagctgggcgtcggagtgtccatgtgggagctgggccagggcctcgactacttctatgacctgctctaggcctcgctccaagcagataggtgct

SEQ ID NO: 9835 - DNA, 170 bp, Canis familiaris
aatagtgtttataataaaaaaattttaaaaatgaccctcatagcacgcaaaacaggatggggggcttcccctcttctttctgtgacaatacacatcattcctgcgttcgtttttaacaccaaactacctacattaatcatttcccccatttttcttttattttcttgcat

SEQ ID NO: 9836 - DNA, 715 bp, Canis familiaris
  misc_feature (1)..(715): n = a or c or g or t
tcggnncgagaaagagcangctgtaaatcgagctnnnnntattcaggaagatgtgcagccaccagggttaaaagtgtggnctgatccatnnggcangaaatgagaaggctatcaccacctcgattatgaaagacatcttcatgctttccattctgccgcaagtacaataaattgcctcatggtagaaggatggctggagaagaaaactccataaagctgaaaataagagtactgtgcacaaggactaatatttcccttcttaagtatcaaaagagccctggagcaaatcacaccattagggaggttttcatgatttgctttactttctaaaaatgaagctctctcacccagctgtgtttggaggagatctacttattattcagtctctaccgctttcccaaccaagctgtgatgtgaatgcaagcagccagtggacttgggaagatcctagtctgtcttgccatcctccaaataggaaatttcagtaaaaagccaccgtgctgagcagcctcacagggctctttggaaacattaaggttgataaaattctttggggacaaggtacattgtactctttaagaataagcagctcagcgtagccgtctcatcgaaggttgctgcatgttggaaaacaaatgcgaagtgagttaaactaaatggccgtgcatgcataacagaaatcagtgtcgaattaacaggagtgaaaatacgttta

SEQ ID NO: 9837 - DNA, 581 bp, Canis familiaris
  misc_feature (1)..(581): n = a or c or g or t
tactcttcagatctcagccagtaatcaatcaggagtccccactggtaganntagatcctgcctatgttctcaagaaccatggccactggcaactgaaatacagcttaagtgcttgctaatnnaggagcccaccccccttggccataccctcccccaccccggtggggctacagcgctgagaatctatgaagaaaggccagcttgcccgctcacctcagtttggggggggaaagaggtaaagaacattatcaggtcaattgaagagaggattgtattaatactaaatttactgaagttgattaatatactgtggttatgtaagggaatatttttgttcttagtacatacacactgatgtatttaggggtaaagagccatgatgtaccattttctttccaaagattcagaaaaatgttttatataacatatggatatttgtaaacacttatttacatatatgtctacatatataaagagagagagcaaatgatgaaacaaatgggcaaaatgttaataggtggatctaagcaagatgtaggtattctgtgtccaatttatatttctgcaacttttctgtgtat

SEQ ID NO: 9838 - DNA, 557 bp, Canis familiaris
  misc_feature (1)..(557): n = a or c or g or t
gtncntggntcccgatgcatgctgtgtgctgtctgtgatccgactttgagnnccanntcntggctgctccagaaggactaaaaataccaaagctctcttgaaagtggcccatgtctacctcacgttgaattatcccgtcttgtttgcaaagataagaagatggagacgtggcttttatggggacagaggaaaaaggctcatcactgtaccttaaagtgcatgtggaggggacgctgtgtggtggtagagctactggagacgaccgaggtggcaggcccagctttgccttacgttagctgcgcaaacctggcaggcagccaaactctccaagcaagtctggtgtacaaacagggtgaattaagttctcctgacatggtaaagttcagaatgggaaaaccatcaagatcacttctaaactataaagcactattcaaccaagccaatgaacacctggctcccgctgttccctcagaactttactgtatctgttctttcaaattacggggaggaaggatttgacatactttatttgaatttgtagcaatattccaagttgt

SEQ ID NO: 9839 - DNA, 148 bp, Canis familiaris
  misc_feature (1)..(148): n = a or c or g or t
ctggtccctctgatggtctccccactggctttcagggaaanncaaactcctcagtttggcnnnnnannnnnnnnaggagaggactccagcnggtcnctacacacaccnngcaccnnnnnnnagcnnnnnnngagnnnnncgnntctca

SEQ ID NO: 9840 - DNA, 531 bp, Canis familiaris
gtattaaaatatgtttttacatctcccttattcaggctctggcatcctgctatttattttccatgccaactttttgggtaaagaagttattgctcggctctgtggaccatgtagtgtacaagctgtagttttaaatgataaatttcaacttccagtttttctggatagtcattttgtttactcgttcagccctgctgcaggcctcaataaactcttcataaggttgacggaagcgccttctgctaaggttaagctgctaataggtgcatatagagtacagctgcagtgactaacagaattgggatggagttctttctggacccgttttgggactctggcacagcgaacacctccagatttgatgtttcaactgtaaacctcttgcattttcaggactgttatctgttacaggctctaagatgggacatggtgattctaatatattataaaatagagatgtaagtatttgtgccagttttctgaaatttcaatgttgtctgcagactgcatacttaagtatttccacaatgt

SEQ ID NO: 9841 - DNA, 472 bp, Canis familiaris
  misc_feature (1)..(472): n = a or c or g or t
aggccccagcgctgtccccagggnngctctgggcccagtgctggccnngcgatcannnnntnnacgcaccaggcaaccagggccctgannncagcattcccagctgctcccccgccctgccccccagctgcccggcagctgggcctccgagggctctggggacacttccataggaaggggccggcactttgtgattgccgcgtgtttagtgttaagccccctgcccccagtgcaaatccctgtgttttgctatctcnngnacaaaatgtaaaccgacacctgaaagcaaaaggtatcgaataccttttttacccataagggtttttacaaagaatgtgtctcactaggaactaggacactcatcggcccgagaccaactcctagataaaaggaataaaggagaatcgtgtttgtaataagttacaggattgtttctgtcctggattttaancnttttgttaaattgtgaaat

SEQ ID NO: 9842 - DNA, 683 bp, Canis familiaris
  misc_feature (1)..(683): n = a or c or g or t
tgaaaatgacactatataaattttcatctgagagtttctcaattgtatctagntacatagcacagtttagaaacttgtctgagactgactcagtaatctaatcagcaaagatcatatccatgtgtatgtggttatacattttgactttattggactaacccaggaccatttcagtgctgcaaatagcgtgccctctggtttgcctgaaacagtcctggacttctcagagtccttgatgaagtctcccacagttgtataaattggacgatttaggaattttaaactttaatgatcatttggttccttttctattttatttttgttaatgcaacaggacttaaacaaatgaactttgatctttgttttaaagattattaaaaaaattgtgtgtatatacatatggctcttgaggacacgtagctttcactacactacaggatatggtctccatgtagtacatataaacccgcagatggattttccttgagtgctttgtactgttgattacatctccatgtagggctgaaaagaatgacctgtgtttatctctgaaactgtgttgcttttgatgttgtgttactgtgcacagaagttgnnngtaaggtcctgcatatggtccagatgaaaagcaccgtagccttgcaagttaagttctgcttcaattcatnnnnnacgctggaatt

SEQ ID NO: 9843 - DNA, 652 bp, Canis familiaris
  misc_feature (1)..(652): n = a or c or g or t
gtcagggagggnncccccaggtnnnagccccgctgagtccatcangnnnntgagtgtgatggtgaacagtggcgactccacgctctccctcggcccattcatccaccagtccagtgagctgtccgtcaactcccacaccaattactcacactctcacactcctctagacagactcataggaaagaaaaggaagtgctcgcctggctcaagcagcatcaacaacagcagcaacaaacccacaaaggttgccaaattgccagccatgaacaacgtgcacatgaaacacacaggcgccagcccaggggcgcagggactgacgcacagtccccttctccatcagccaaaggcacgtccctgacagctgaaaatagcgcggggaggaataatctggacacttttgacgacaagttacacctccactcagcactatggactccacgatgcctttgagtctgttttcccaacctcctgtgggcctcgagggtagaaatctgccgggctgttgttgtaacgaggatttccctgaagctatgtctgtagcagtgagtacttgtaaaggacactggatcaagttcagccaccgaattgcttttatcagtgttaaagtggtctggactgcttgctaccaatctgtgagaagttgttgctttga

SEQ ID NO: 9844 - DNA, 536 bp, Canis familiaris
  misc_feature (1)..(536): n = a or c or g or t
agtactcagggagctnntccgctggacatctgcactgctgcaaggnnnnggccacatgctgctgggaatttcctccagccttcgccacctagtagaaggggccgagcagtggcattggcagcggcagggtcgcctccatccctactgagaaggggctctgagctgctctctgcccctagacttgttccaagacacactgtaaggactctgacagcatcagctttggagatctgaggatagtgcagatgagagaactcacccaatttccccatggtcttctgaccccactgcaacaggtcccatcggcataaggccttatacctctagcctataccctttcctgaagaatactgtctcttcctagccatctttccagcttcccccttaccctaaaaggccacaaacccatccccaagcatcttgattccactctgaccattgctacatctagatttcttgcaattcctcctgtccctaagcttcccggtgcactggattcagcctttgacttcaccttgagnnnnnnatttctttat

SEQ ID NO: 9845 - DNA, 690 bp, Canis familiaris
  misc_feature (1)..(690): n = a or c or g or t
tgatgagctctgtgtggcacatgggtgatccaaagaatacgtggtttaaaagctaaactggctctggcccacattttacttttttaaagaagtagatccactttcccctcattttgtttgcatcagtgttaaatggaacaggcatgtgggatttgttagcctagttttgcttcctggaggtgacaagaggtgaaagtgagtgtggtttggagggtggtatgggatgagtaccttgctggcccctcagagctggacagggacagagacaagccaggaggtgatgaggcaggataagcttggagcttattgcctgtgaagtctgttctgtgactttggcagccacctggggatggggagcaggagctggctaacaggattcttaaaacaccatgagccattgcagggaggagagaggagcccacagcactgaagcagcaccaagtcctaaatgaattgagtggagatccaacactcgttttgccctcgccaccggggcaagtgttctcatatcaaccacagcgtgtggggcaaggagtgcgttcgggatgccatttctgaatcactggagtctcctagcagctcagcaggagacaagggatggaatcggaaggtgctgtgggcacgtctccatcatcccaggctggcttgagatcaagcctggagtcaggaaaccnnnccttnctgagtcac

SEQ ID NO: 9846 - DNA, 586 bp, Canis familiaris
  misc_feature (1)..(586): n = a or c or g or t
actctganngtaaaagaggaaacgcagtgttgaaagatctgaaactggtcaatgataaaattggatcgctcgggttaggcgctggagaggaagatgactacattgatgacttcaacagtaccagccatcgatcagagaaaagtgagctgagtattggtgaagagatcgaagaagatctttctgtggaaattgatgacctcaataccagtgataaacttgatgacctgacacaggacctgactgtgtcccagctcagtgatgttgcggattatctggaagatgttgcatagccgtgaaggaaggaagtattctaatcaacaaaggacaaaggactctgatcagttccatttttttttcccagacaatcactctttgttggaatgtctgctccctattggtgccttgtgtttcaaaaagactgcagatatttttaaaaattaagttttcattatactaaacaaaatgcttcctacttgagcccatgtatggaagatatgatatacttgatttgatttggctacacatttctctgtggaaatttgattatctacaactcaaattcattacaaggactgaacccatgaaa

SEQ ID NO: 9847 - DNA, 550 bp, Canis familiaris
  misc_feature (1)..(550): n = a or c or g or t
gaccacctcactcntgnagccttctcaaacatctcngggnnaaggccaccatatgcaatnnntttcttatatttacctaactctccaaaagcttgtgagctccttgntngcaagaacttttcatgttttgtaagggcagcctcacaatgttttgctcatttcagcactagatatttaatgacttaagacaccaaaatcagtctcattattttatagacacattacatttattcaaaaagatatatatataactaactcaaagataaaaataaagctaacatttgaagattaggtgagtttcatttacagaatataaagctgataagcaatggatagtcatttttagaaatatatgtaaagcacacacattgttaacttgtggcttcctaagtttgcctctacctttatgaacaataattgtgtagtaactgtattaggtatcataatttaattggtaaatggaatagacaaaataagtgggccaaaccaaattgnnnatatgagctcttctgatttcagagtgaaannnnnnnagttcaccctagcttcc

SEQ ID NO: 9848 - DNA, 337 bp, Canis familiaris
  misc_feature (1)..(337): n = a or c or g or t
ggccgtgcccgagggcctgagcgccttcacccaagcgctgtcgtatccacaataggaccactctagggacactgagtcatggaagagaaggacaagtgggtgaaagtgcctatttaagnnnaggatggaaagcccgcaagcctctgaaccagcgtgggagctctgctagccccaaatgcaaatgtggaggactcacagcatagagacagcagcccttgaggactccaatgttagctataaaccggattgctgatgggtgtgatagtctttctttattccctgaatctctcatgtttggaannntttatgtacatgtnnnnntngatacccatttata

SEQ ID NO: 9849 - DNA, 403 bp, Canis familiaris
  misc_feature (1)..(403): n = a or c or g or t
ccttgacccaccacacnnncccagctcttcccagacagcaagtgacctgggtgggcaggcttcctgccatccaccatagccnctgtggcccactggggctctccttctcttgcctgcctgtgtcctcatcccctccagggtttggcagtgagaacactgggagcttcaggtgggtgaggagccataaagtaaaagccagtcccacctcttttcccctgctccctccctgcatcactcngcgggccacaagcttcttgcccctgccttnctacaactccagccggagccagaccgaaaccctttattcatttctcctgagcccagcagaatcatgataaaaagtattattattaaaaaaaaaaaactttactaaaacttcagggaaaaatcataggaagtaaac

SEQ ID NO: 9850 - DNA, 654 bp, Canis familiaris
  misc_feature (1)..(654): n = a or c or g or t
ccttcnagtnggccagaagacagannnnnnnctgctagattcagagnngtctccannnnagaagctgaccccaaaggcccagccaaataaaatggtcnagttttccactagtgaatccttgcttatgacatctcccaagcctgagttaacagaggagtacaaggacttcagtagcttccagctgctggttgatgcagctgtgcaaaaagctgcagaactggagctacagaagaaacaagagcccaatccatgatgtccaatgtccctgaaaagctcaagttgccagtcccttgtctacagtggtagatccatttatgttcccccagctaactcatagttttaccttttatagagacattattcttcctaggaattttatgagagccatcactggctattaggactcaattctctagctatttcagcgtttccaaatggacttgtcatgattgacactaaagtaaagatatcttctctacttctacttcttcctacgtttaaaggcttcagacaatcacacacctgagactagacacggtgctaatgaatcttcagaacccttgctttgttttttctagccagactttattgtcctaggactgctgcagatactgaatcaccaatctttctccctctctctaactttccttgtca

SEQ ID NO: 9851 - DNA, 500 bp, Canis familiaris
  misc_feature (1)..(500): n = a or c or g or t
taagcatggtactcaatgctttcctgttttgttttgaaggacaatttattctgctannggcattgatctagcatcacatgggttcatcgttgctgctatagaacacagagatggatccgcctctgcgacttactatttcaaggaccagtctgctgcagaaatagggaacaaatcttggtcttatcttcaagaactaaaaccaggggatgaggagatacatgttcgaaatgagcaggtacagaaaagggcaaaggagtgctcccaagctctcaacttgattctggacattgatcatggaaggccaattaagaatgtactagacttagagtttgatgtggaacaactgaaggtgagcttaagaaaaagccatttcccgggcacctgggtggctcagtcatttgagtggctgagtggttgagtgtctgcctttggctcaggtcatgatcctagggtcttaggatcgagccccacattgggctctttgctcagcagggagccta

SEQ ID NO: 9852 - DNA, 534 bp, Canis familiaris
  misc_feature (1)..(534): n = a or c or g or t
gctnnntctctcctctcctgctgccctgggccctcnnncnnnnnnngccccctncctggccgnnnngccggggcccatgaactttccttcctgccctcaaaagcgggggtcncntggctcctgccaccccggccctgctgctctcagctgaaggggaggcagccgggaacttgccctgtggggctcctnnnagtctcagactctatatttgatgctagaaaatatgtatttaaaagggaaagggaaaaaaaaaaaaaacacagaaaaaaggcattcctcccccaccccaaacatatagtattttaaaagtcaagaaagcaagtccaacccactgcagaagttctttgtgggcacttggtgacacaggcataggaggggccccagccctctgggtggctcccctggctacctgcacaggaatcnnntcgttgagaaannctgagagggaacattggctcacacactgtgagattttgtttttatacttggaagtgatgaattattttatataaagtcattgaaatatctatttaa

SEQ ID NO: 9853 - DNA, 504 bp, Canis familiaris
  misc_feature (1)..(504): n = a or c or g or t
agaattatgaaagaagacgcaaataaaccanctcatgtgtaatttattgagcttcgtgagtgtcactggccaatgaaaggtaaaatgagacatgcaccatgaggaataattatttatttaataataattgttttgagtggaaaactcaaaaaactgtttatttttcatattgtgccaatacgtgctgtgaaagtgtgttataattctaatatgactccctcagacgtagaaatcagtggtcatttctcaacaaagcacagtgttcagtgaaactgaaatatattcttcaaagaaagaaatcatcttcgtttcttggaagcagtcacatcagccactgctgaaggagagggaacacagataggcttgtgcttcatctgttttcatggtggaaatgtactaagatttgatatcagactgtatccctgcagcatgtttcatgtgttatgacttatatagagatgttnnnnaaattttaatgtgnnnnnnaagatcttcacttcattg

SEQ ID NO: 9854 - DNA, 401 bp, Canis familiaris
  misc_feature (1)..(401): n = a or c or g or t
ctggaggtnctgattgagttactgcctcttgttaaaaagatgagttttcctggagtgaaaagaggatagttctcacgaaatgcaatccacagcacagagttcaaggtcaaagaaccacatgtggcagatccagagggacacaagcattaacctctgcgcctgtaagatggcatagataacctggcctttcaagctgagaaaaacactcctgatgtaaaaggagccagcgagagtacacgacacggatcaggnnnnangnnnnnnnnngtactctgtgatatagcatcatggacaataggcccaacaccaacgcaacgatattctgaaatgaaaaattccttccatgaatctagaactccatgcctcaagtatcatctttaaaatgtcaacatagtgtctaa

SEQ ID NO: 9855 - DNA, 676 bp, Canis familiaris
  misc_feature (1)..(676): n = a or c or g or t
cattgctatgaaccatggacacgtatannctgctgnnacaaagactgtaaagtgcttcatttcaacagctgaggcgcnngccaagtgatcattaataaagcttttcttggttccttcagtggtgttggtagtaaaatggaaggtgtcttgctgcaggtaactaatgaagaagtggtcaaccacagaatcttcaagaaataagaaattctgtaccatctgaaagtagttcttgttggtgccttcatttaaaaaacaaaaagcactttaagattaaagggaaatgttttctgataaaatacaaatttcatttagttacaggttcttaatataaaacaattacaaattgagtattgtttgtaaaagagtaacatcaaataagctagagagaaatgtatcatgttttaaaataggttttgtgagtagacagattaaaattctattttaaatataaagtttataaaataaacacttttgtattcaaatacttggtgtaatgtttacacataaaatgtgtgaatcttgttctataaacatgcagttgtctaaaagattgccatcccctagatttttaaagcagtttcacaaagctatgcatattgccatttttctttcagtattgatagtcaaataagaaacgcattgtggncnnnntggctgtccctaataaaannnatnn

SEQ ID NO: 9856 - DNA, 434 bp, Canis familiaris
  misc_feature (1)..(434): n = a or c or g or t
catgggcagccnntgccaacggatgcctttaagagtggtgccaagagcagtgcagtgcacttgggacccaggttgcatcattcagcagactctaaagacttcccttgtctgccagaccacgttttgtggggatcctgaggagtttggattctttgagagggatgtcctggttgtgtgtgttcttgtagagtggctatcaccccctagtcatgctgaaatggtgactaaaatcctctgtccgttcacacctattcccatctttagaggtctgtaggtccaggggtgccacgtgactggtccctgcaagggcctcttcctcacaactggccaaggcagcgtgaaccaggcagtcctttccctctgaagggctcctacaaccccaaggactttcctggttatcctcagggaagggagtggaggctctgagtgtacgt

SEQ ID NO: 9857 - DNA, 532 bp, Canis familiaris
  misc_feature (1)..(532): n = a or c or g or t
gtganntttttctttctttttttttttttttaaatccaatcttgtttccaaaaaccatatgtctgccagngnnntaaaagccatcatgtaaattannagtaaagtataacatatgcaaacataacaaaatcacttccatagtgacgatactccaaccatatggatattagtcatagaaaactagaggtttatgatatttttttaagtctttttttttttttcgtctaggtagtcagtctgcacttaaatatcaaccattttccttttttgcttcttccctttaaatttatatgtatccagtacatttaattgagaaatgtatgttttttattatgctgtattttcttttattttttaattattgtttatattttcaattattaaaaaaatgtacaaaataaagtttcattgctggtcttgtaaaagctatacaattttcctaaatgtatacctataactacagcagttcacctatttcaaaaatttgnaattctgttcatttgttattcttaagaccacctcaaatttaaag

SEQ ID NO: 9858 - DNA, 559 bp, Canis familiaris
  misc_feature (1)..(559): n = a or c or g or t
taaagtcaggactgacnnnnnnnnnnctgtcgtcgnnggcanncagtctctgannntaatanaggacggacgactatgatcntggactttccaccgaaccagttgcttctcctggtttccattcctntagaatatgactgagaaccagtaattcaatcttatgtcagcattaactataaccagccctctatcaagtgtgaatagccactcgggtctctattttttttttaaacacagaggcgatcagcattgccttttggcgacctctcaagcagtggcactacaagaaatacagcgaaaagaaagaagagaaaaatgagaagggattagggaggaagaaaatgtaaaggaataaaggagaatgctgatattggggttgaggttggtttgaaattccaaggtagcgtgcagcagcgctttcatccaagtcctggcacaagaccagttgcccacgcaaacatatttgcatatacaatgttcccactcacacattgagcacccactatgataccttaccaaaaatttcagctttatactcatacaacttgacatatatttt

SEQ ID NO: 9859 - DNA, 575 bp, Canis familiaris
  misc_feature (1)..(575): n = a or c or g or t
ctgcccaaacangccaacacccccaagttgccagcaaaanntctccagnctaagcagatcaatagccccaaggttttagcaaaaagcatcctgcccaagcacggccaaacctccaagtcctcagaagaaaacatactgcccagagagggtgacatcaagtcctcagaagataccattcagcccgaggagggtgacatccccaagtcctcaaaagaaatcatccagcctgtagaaggcaatgtcctgaagccatcagggacaatggaactcctggaggtggacttggtgaaagtgatcctgaacaaggaggactttgagttggcgctcaaggaggccggggagaggctggtggccgtggacttctcggccacctggtgtgggccttgcaggaccatcaagccccttttccgttccctatccttaaagtatgaggatgtagtgttcctggaagtggatgctgatgagtgtgaggagctggtgaaagacctggagatcatttgtatcccaacctttcagttttataaacaagaagaaaaggtgggagaattttgtggcgctgttaaagaaaaacttga

SEQ ID NO: 9860 - DNA, 452 bp, Canis familiaris
  misc_feature (1)..(452): n = a or c or g or t
gagaaaatgtgaaagtatttccagtcagatgttnnnagtgnctcacttanngcnnatctcaaatttcatcttgaacatggtttaaaggctgtttagccaagtgatttttaaactgttttattgattcatgtgttaatgacaatatccagcagttttaggatgtgtatcctaagctgatcatctaaaagaaagcaaaactgtatctaatatgtcagaggacctttcttaggaatggttcatgaaaataggtatgtactgaccattctctttctttttcttttggagaatctttcctaccctgaaaccatatcattgctgtttccatctgggaatgtgtaaaataaccacattgtgatcatagtttctccaggagctttcctgaaattaagtctctgtgctcagagtaccagggcttctcctgtacccattggatgctgttgcnnnctcagtct

SEQ ID NO: 9861 - DNA, 543 bp, Canis familiaris
  misc_feature (1)..(543): n = a or c or g or t
gagtganngccattgatannnatcctgttaaganngatcttgctcgcnntaatgcagangtnnntngnntagcagacaagatagagttcatctgtngagatttcctcctgnnnncttctcacttaaangctgatgttgtatttcntagccccccttggggaggaccagactatgctactgcagagacctttgacattaggaccatgatgtctcctgatggctttgaaatcttcaggctttcccagaagatcactaataatattgtttattttcttccaagaaatgctgatattgaccaggtggcatccttagctggacctggagggcaagtggaaatagaacaaaactttcttaataataaactgaagacaatcactgcttattttggggacctgattcgaagatcagcacctgaatcataactgtgaggtggtacgggacaaaaagtttatgtgtggccagaacactatgcagatgaggcccttggaatttctttctgtattcactgatattttgtactcatgatcttatatcaccatatga

SEQ ID NO: 9862 - DNA, 296 bp, Canis familiaris
  misc_feature (1)..(296): n = a or c or g or t
aggactttgggttcanngnnnncgatggcttgctggagaaaggagtgtatgtcaaaaatatccgcccgnctgggccaggagannnnggtggcttaaagccctacgataggcnnntacaggtgaatcnnntccgaacgagagactttnnnnnntgccnnnntgtgcccctcnnnnnagaatccggtaataagctggacttggttattagtagaaacccactggcttcacagaagnnnatagaacagactcnnncaggaggagaatggagtgaacagaacagtgcttttttccaanag

SEQ ID NO: 9863 - DNA, 562 bp, Canis familiaris
  misc_feature (1)..(562): n = a or c or g or t
ggggcaggcncagctggctactcctatcagcccctgaaccaggatnntgagcaagannaggtnnagctggcaccggtgggggatggtgaagatgtagttgctgatattcaggatcggatccaggccctggggcttcatttgccagacccaccagtagagagcgaggatgaagaggaggagggagctaccggactgagcaaccacagctctattcccatggaccctgaacatgtggagctggtgaaaaggacaatggctggagtaagcctgcctgcaccaggggttcctgcctgggcccgggagatctcagatgcccagtgggaagatgtggtacagaaggccctccaagctcggcagggagccccagcctggaagtgactaccctaagagctgccttatctccctgcattccaggccagaaccagcacaggactgaacacatccctggttgtaatgtccatctccatcttcctcctctccctttccacatcaaggcaaatcagacttcttctcagagacccactttattcagttctgtacatannnngacatcggcccaagc

SEQ ID NO: 9864 - DNA, 452 bp, Canis familiaris
  misc_feature (1)..(452): n = a or c or g or t
gctgacctctccctgagaacatgcctcagctgtgagagacacaccagactacggggtcgatgtgggctggtttaggttttgtgtttcgggtagtcttgacaagtgctttctgctgtcccctcgagacagcccacggctgcacactgtcctgcctccccacctccactccacagctctgtgtggcccttccagctatttggggtctgagtttcagttcatttctgattcaccgtcttgtttctcattctcgcattgggatggatcccaggaagggggcgtggcagctctgctgctgacctgccggagcttttgtcctgcctgagaccacaccgtccaggtnnnacacggtttactgacggtccctgagacccctaaaacgacaaggaccgggggctcagcccgtgccaagtgaggacacactgccaggctctatctcatcattcaaggacaag

SEQ ID NO: 9865 - DNA, 545 bp, Canis familiaris
  misc_feature (1)..(545): n = a or c or g or t
agagatcaagagggagtatggtggccaccagaaagctgtcgtctgcctggccttcaacgacagcgtgctgggnnagcctgtgcccccctgggactgcaggcggctatgcagggagcacctgcggaacacgtctgcccagctgcccaggtcagagtgaagctccacagctagcctccgccagcctatccagctggacctgactggcctaccctggcccctcggccagcctagactgggcaggccagtatgtcctgggagtctctcagctcctcctgggtgcttctgtggatgtgacaaggctcaggaagcccacctcagccagccggcacttgcttcaggaattccagatccacacggcctagggggtctgaggccggtgcccaacccccagccagtgcaccccccccagccccccaccctgcccatttcgtgtcctgaggccacagagaacagcatcacggccaggtggagggtttattagaccccgctgccagccaccctctgtgaccggtgacggggctggccagctggctggcctgtggggc

SEQ ID NO: 9866 - DNA, 164 bp, Canis familiaris
gcgctcagctcctgcctcgacccagaacccggccctcgtgttcctgggtctactgcacctgctttgatacatttctcttgttaccaaagtattatgtatttaatgcagcaaactttgaagttatcagtatgtgggaaggaaaaatttaaagtcacctgtagttc

SEQ ID NO: 9867 - DNA, 686 bp, Canis familiaris
  misc_feature (1)..(686): n = a or c or g or t
gaggtgaacatgattaaagatgatgggacagttattcatttcaacaatcccaaagtccaagcttccctttctgctaacacctttgcaattactggtcatgcagaagccaaaccaatcacagaaatgcttcctggaatattaagtcagcttggtgctgacagcttaacaagtcttaggaagttagctgaacagttccctcggcaagtgttggatagcaaagcaccaaaaccagaagacattgatgaagaggatgatgatgttccagatctcgtagaaaattttgatgaggcatcaaagaatgaagctaactaaaattttttttctgtgtttggaagctggcatggactagatttaacaaatcagctatgtggttccaaagttttacagacatggagaacatcaactgttactagttcagtaatataaatattttgtatattaataatgctgtttgttcagcatttttcggtcatttgattttgcattttgcacttcctcccaggatctattcttttggtcaaaatacgaagtattggtgcagtttgagggtgttttggtgtttgattctcagttttctttttttttttgtttgggtatttttggtatgtgtatgtctgtgtatgcgtgtgggtatgtatgtatacagtggagagcaaattggaaaacggttctatttannnnncttc

SEQ ID NO: 9868 - DNA, 551 bp, Canis familiaris
  misc_feature (1)..(551): n = a or c or g or t
gggatttcagggacccttccatccactccgtgaatgtcntccagggccatacggacaccgtgacatctgccgtgttcaccgtgggagataatgtcgtttcgggcagcgatgaccgcacggtgaaggtctgggacttaaggaatatgaggtcccccattgcgactattcgcacagactctgccatcaacaggatcaatgtctgtgttggccaaaaaatcattgccctcccacatgacaaccgacaagtgaggttgtttgacatgtcaggtgtgaggctagcgcggctcccccgaagcagccggcagggccacagaagaatggtgtgctgctcggcgtggagcgaggaccaccccatgtgcaatctgttcacctgtggctttgacaggcaggccattggctggagcatcaacatccctgcattgttacaagagaaataaggttgctggcgtcctctgcgacgtagttggccatggacctgtggaccgctgccacttttctcatattggtcaagccctttttgtgagagttgcaccctggaaagggcggtttgt

SEQ ID NO: 9869 - DNA, 546 bp, Canis familiaris
  misc_feature (1)..(546): n = a or c or g or t
cattccagctaaaagccataagggagagaaattacttttatttatgggcattattgacattctgcagtcctataggttaatgaagaagctagaacattcctggaaagcccttgtctatgatggggacactgtttcagttcatcgaccaagcttttatgctgacagatttctaaagtttatgaattccagagttttcaagaaaattcaagccttgaaggcctcaccttctaaaaagcgttgcaactccatcgctgccctgaaggcaacctctcaagagatcgtgtcttcaattagccaggaatggaaggatgagaagcgtgacttgctgactgaggggcagagtttcagcagccttgacgaagaagcactgggatcccgacacaggccagacctggtgcctagcaccccatcactgtttgaagctgcttccttggcaaccaccatttcgtcttcttccctatatgtcgatgaacattgtccacatgacaggactgcgctctattcaaacagatcacggagtcacaccaaattcaaacccannnnnnn

SEQ ID NO: 9870 - DNA, 107 bp, Canis familiaris
caggaaagcagatatctgggctttggttttaacctttgtgtgctgccagctggactcaggcttcaccttttggaaagataaccaccatctgctccaatcatgtagac

SEQ ID NO: 9871 - DNA, 593 bp, Canis familiaris
  misc_feature (1)..(593): n = a or c or g or t
tacaagtatnnnnnntaagtttgcacaatgggtagtgtcagcaaaaggcangagaggggttttttaaattctgtgagaatgtggatttatggtattgagtatcacactcagctctgctgtattattaactctctgaaaccagatggaccaaacgttaacttacctagcaccaagtgtgaaaatgactttcatggttccttcataagaccataataatttccgacactttgatagaaaaaaaattcaaagctgtgcctttgagcctatactatactgtgtatgtgtggaaataaaaaatgtattgtacttttggaaaatttttttcgtaggcatttttctgtcagatttgtagcaatttgtgaggttcgttagagattaacataggttttctttctgtattataaaatgcaccaagcaattatggtggacctattaccctatgggtaagaaataaatggaaatatgacatcggatgttttagcagttgttctgtaaataaaatctttgatcacaccactcagtgtgataatcatgtctacagctaaaatggaaatagttttatctgtacagttgtgcaagntatgaatggtttc

SEQ ID NO: 9872 - DNA, 578 bp, Canis familiaris
  misc_feature (1)..(578): n = a or c or g or t
gtatttcaaagaacctttctctgcagtagatcttgcagaggaaatttgcactattacacttgaaaattgttaacttttttggcagctcaataggaaagctcgacattttaaacatggtagtactggaaatttcgacaagacttttacctagcacttaaatatgtataaatgtacataagacaaacctagtaagcatgacctggggaaatggtcagaccttgtattgtgtttttggccttgagagtagcaagtgaccagaatctgccatggcaacaggcttttaaaaagacccttcaaaagacactgtctcaactgtggtgttagcaccagccagctctctgtacatttgctagcttgtagttttctaagactgagtaaacttcttatttttagaaagtggaggtctggtttgtaactttccttgtacttaattgggtaaaagtcttttccacaaaccaccatctattttgtgaactttgttagtcatcttttatttggtaaattatgaactggtgtaaatttgtacagttcatgtatattgattgtggcaaannnnnnncagatttctatattttgga

SEQ ID NO: 9873 - DNA, 538 bp, Canis familiaris
  misc_feature (1)..(538): n = a or c or g or t
aannagctgacactgatgcaaacacacgagggtttattagcaagctcgagcttgggtccaagttcacccgacacagcggcgcagggacttggaccccgagatagattgcttaaagttggactccaaagttaaagcatatctgagtttgcagcagtgtggaggatgctttataaatgaatacatgtggatacttctgcttcaaaagaaaaacttttggaaaaatcacctgaggccacaataccctggtcttttcattttgatgaaagatggcttccttcaccttctcctgaacccacgagtagaatgggcagtgagaactcctgagttggaaagacaaggctactgtagcttctgttgattatccagagccgtggctttcatgtcacagcagcggaacccactctccaggcataacgtcattgagccattagatgtatatggagcagctatgagcgaagtggggcccagagcttggtgcaggtagctgcaggggtggaggtggagggcgatgtcttttgnnnnnnaagcttctcagatg

SEQ ID NO: 9874 - DNA, 241 bp, Canis familiaris
tatattacaggtaaaataaatattttatgtctttatagccaataaaaataactcctcatacagtacaactaaatattgatcttttaaggttgtttcctgcttctggcacagttgtgtgcttttagcttcatgaaacaagttactgtgaaactgagtgtcctttaagtagtaagtctagttgctgtatttttatttttaaaagtaaacatgaacactgattagtttagcaaaaactagaacc

SEQ ID NO: 9875 - DNA, 635 bp, Canis familiaris
  misc_feature (1)..(635): n = a or c or g or t
ctgatgtcagaaatcanntgatatttgctgtccgtcaagaatatgtcgagctnnnngatcagctcctccannnncagtcaggagatgaaattgccatcatcccccccattagtnnagggtagtgctctggagccatttaggaaagatctgaatgaaattgaagagaaacctaaagatataataaaattcactgctgagaaactctccgtagatgaagtctcacagttggtgatttctccactctgtggtgcagtctccctatttgtagggactacaagaaacaactttgaagggaaaaaagtcattagtttagaatatgaagcatatctaccgatggcagaaaatgaaatcagaaagatctgtagtgacattaggcagaaatggccagtcaaacacatagcagtgtttcatagacttggcttagttccagtatcagaagcgagcgttatcattgctgtgtcctcggtccatagggcctcatccctccaggctgtgagctatgccattgatactttaaaagccaaggtgcccatatggaaaaaggaaatgtatgaagaatcatcatcatcttggaaaagaaacaaagaatgtttttgggtaactgatgattaagtcacattttttaagagtactaa

SEQ ID NO: 9876 - DNA, 586 bp, Canis familiaris
  misc_feature (1)..(586): n = a or c or g or t
cccctgatactgtgcaaagtgacaacaaagaacnnnacgatgctttggaccaactttctgacagtctgggacaaaggcagcctgatccagatgagaacaagccgatagaggataaagtcaaggaaagagctaaagctgaacacagagacaagctgggagaaagagacgacaccatcccccctgaatatagacacctcttggataacgatgagggtaaaccaggaaagccacctgccaagaaaaccaaggactcaaagaagcctgaagatgacaaagaccccatcgatgccctgtcaggcgacttcgacagctgtcctgcacccacagaagcctcagagaacacagcagaggacaaagccaagagaactgctcccagctccaaaacaccgaagaataggggtaaagcaaaggattctgcaaaggcaaagcaggaaacttccaagcccaaagctgatgaaaaaaatacaagttaaagttcacgctatttggtatcggcctataaaatcttcagctggtggatggtgacttttgaaggacaaagggctttgaacaacagcagtttttttctgggtggcttctagacagt

SEQ ID NO: 9877 - DNA, 529 bp, Canis familiaris
  misc_feature (1)..(529): n = a or c or g or t
gaaagtgacaaagtcatcatcannanntctcacagtatnnaggaatgtgatgctctctgtaccaggcnnnccatcatggtgaagggaaaaatcatgtgcctgggcagccctcagcacctcaagaacaagtttggcaatgtttacaccctgaaggctaagttcaagatagatacagatgagaaaactttagaggattttaaaaagtatattgcaacagttttcccaggtagtgaattaaaacatgagaaccaagggatnnnnnnnnactacattcccagcaaggacaatggctggggaaaggtgtttggtattttggaggaggctaacaagaaattccatttagaagactattccatcagtcagataacactggaagaagtcttcatgacctttgctaaacaagaaaacatagaagcttaatgagaaaaaggtgcaatgagtttcacttctaactagtgacactatgctgtcttcttcagtactttctactacacctggatacatggaggggcatttctgtgtgtatatc

SEQ ID NO: 9878 - DNA, 441 bp, Canis familiaris
  misc_feature (1)..(441): n = a or c or g or t
atgaaaagtattcatttcaggaaaaaaaaaatgttttcttaaatccagttagctttttatagnnnaaataatagaataaaaatttcagttctttcatgagtaatctttctagattggtttgtggataaaatgagggcagatgatcatgactgatgatcagcatcttcaaagtcatatcctattttagcaatataccaannagtccgttccatggaggtttatgtattaatannnactttgtanttggtngaatgcttatggaatattgttttgctttatctnntttctcttttnnnngtaacannnnnnnnaaaggctttannnnnnnaaactgccttgttactgnnagtgtgttcttagcaggtcatatccagtattctaccnnncttannnaagtggtgttttggatagtgtgagtttggatgggtgtttatgtattat

SEQ ID NO: 9879 - DNA, 630 bp, Canis familiaris
  misc_feature (1)..(630): n = a or c or g or t
tgggggactggtgtgcccagaggatcntgcagcatgtccagagggacggacaggctgtgctggagaacgtgtcagaggatggcggggaactttctggttgcctggnnnggcaccagaacccaggccatgcgctggaagccggctggttcctgctccgtcacgccatcaggaagggtgaccccgaacttcgagcccgtgttatcgacaagttcctgttgttgcctttccgctctggatgggaccctgaccacggaggcctcttctacttccaggacgccgatggcctctgcccaacccagctggagtgggctatgaagctctggtggccacacagtgaagccatgattgccttcctcatgggctacagtgacagcggggaccccaccttgctgcacctcttctaccaggtggctgagtacaccttccgccagtttcgcgatcctgagcacggggagtggtttggctacttgacccgagaggggaaggtcgcgctcaccatcaaagggggtcctttcaaaggctgcttccacgtgccgaggtgcctggccatgtgcgaggagatgctgggcgctctgctgggccgtctcgccccggccccgagccccggccccggctcccccgccgnnntnc

SEQ ID NO: 9880 - DNA, 131 bp, Canis familiaris
  misc_feature (1)..(131): n = a or c or g or t
aaactattttcataataatattaagatgccttttttattttcattatctcaaaagtacacagtggagttttccagaggctacgtggcatgtgattacatcatctttctnnnatcattgttaatgggatgtg

SEQ ID NO: 9881 - DNA, 521 bp, Canis familiaris
  misc_feature (1)..(521): n = a or c or g or t
aaaaatnngtcttcaaccagcgcatcagtgggtggtggggtcaggntggnnaacagcacgtaagctgctccaggttaccacagactccccaccctcctgttactctgttctgttgtccgagccaaactttatcttgccagcttctcacaccttggcacctaactgacaaatgaaaagactggacatcaaattccttccagctctgtgcctggccagtccctgcagctcacatttggaacagtggaggcaggggatggtataagattctcctcttagatagtcaagccagagaggccagtgcttcttcacaacacccctagctttgactccctctcctgactcccaccaatcatcctgagcccttccaccacacctttgttctttttccgtctgatcccatgccatcttttctccccgacactgtctgatcaagagggtttcttttagaacatactgattaaggaaatgaggacttagtacataaagaattccagaagaaaaaaatccatgatgtaataaga

SEQ ID NO: 9882 - DNA, 669 bp, Canis familiaris
  misc_feature (1)..(669): n = a or c or g or t
cgagaagatctcnctgtttcganncgacatcactnngctnnnggnnnnngccattgtcaatgctgccaacagctccctgctcnnnggtnnnngtgtggacggctgcatccaccgngncgccggacccctgctcaccgacgagtgccggaccctgcagagctgcgagaccggcaaggccaagatcaccggcggctaccggctgcccgccaagcatgtcatccacacggtggggcccatcgcccacggagagcccagcgccagccaggctgccgagctccgcagctgctacctgagcagcctcgacctgctgctggagcaccggctccgctccgcggctttcccctgcatctccaccggcgtgtttggctaccccagtgaggcggcggcggaggtagtgttggccgcgctgcgcgagtggctggagcaacacaaggacaaggtggaccggctcatcatctgcgtgttcctggagaaggacgaaagcatctacctgcagcggctcccccagtacttcccagtggcctgacggcaccgctgcccaccctgcccaggactgactcccctgggcctacaggacctcgctctcagctctaagaggtccccgaagcctgcatctgggcctgggcaccctgttccttccctcagccccctgccctcaggagcctccta

SEQ ID NO: 9883 - DNA, 554 bp, Canis familiaris
  misc_feature (1)..(554): n = a or c or g or t
gcgcttcagcgtctccctgccccctagacccgccccctccacttcctctccggnnaggtggcttctgcagctgcagagcttgcacaggccagcagccacagaaataattttcctgcggcactaggcnttaactatctgcaaatgttcagcactgctgcatcgtacgccagagccaccaaaggaaatcacagccagatttaatacaataataataaaaagaaaaatctctccccacggaagctctggttttgacacacagtcggccaggtgcacatctttagggcccattcaatcacctgctggaaagcagtgcttatagtaaactccatcacattccatcacgggcagggaaactactgtgagtcccagaaagggtggggatcagggtggggtggggggcagagggactgataacccgaactgtgtgtgcagtctgcctgggagggttttgtgtcactagatggagttggagccaatgagttgaccctgttcacatgtgtaaccttgacaatgccccatatgcccgtgtgacactgtcgcgcccctgccgttcc

SEQ ID NO: 9884 - DNA, 621 bp, Canis familiaris
  misc_feature (1)..(621): n = a or c or g or t
ttagtatcatccnnnnnccnncagactgaaggatcaactctatgnnnnaacnnaatcacccttaaacaggatttaccagagcatgtcacccttctgcttcaatcaggtttggtggaggcaacctgaccagaaacactactgcaagccaaacaggaagatgattccatgtcagataagggcacttgggctggtcttactttgcatcaccactgctttcctccactgccgtcattaaacctcagctgcgacatgaaaggcttcacaggaccactgcaagtcttctgttttcttgtaaaatataatgaagccgaaacctttggcctaagaagaaaatggaaatatgtgccacttgatttgtatttctgattaacaaataaacaggggtatttcctaaggtgaccatgattgaacttgagctcgagggagtggaaacattggtttaattttctagagaattagacttaagaaagtaaaagagaaattctgttatcaataacttgcagtaattttttgtaaaagatccaattacagtaaacccatctttccttaatgaaaatttcctatgtttacagtctgtctattggtatgcaaacaatcttgtaactttgataatgaacagtt

SEQ ID NO: 9885 - DNA, 701 bp, Canis familiaris
  misc_feature (1)..(701): n = a or c or g or t
ctgncacctnngtgccccagtattgatnttcttttgacacagctctcagacactttgagttccttggttnggtccacatcccatgaacatgcagcagagctcgtcagcatnnatgaagaaaagtttgtggatgccattaactctgccttttggagtgatgctaaccacacagacttcatcgactcggctggtgccatgctgcaatatgctgttgcttttctgaagcctactaaggtctcagctcgccagctgccaccaagtgtagccagagtggacgccaaaagccgagtgctatttccacttgggttaggacatgctgctgagtacgtccggccacggctggcactcattggggatgcggcccacagagtccacccacttgcaggacaaggtgtcaacatgggctttggggatgtctccagcttagtccatcacctcagtgctgcagccttcaatgggaaggacttaggctctatgagccacctcacaggttatgaaacagatagacagcgtcacaacactgctcttctggctgctactgacctactaaaaaggctctattccaccagtgccactccacttgtgctgctcaggacatggggcttgcaggccacaaacgcagtatctccactcaaagaacagattatggcctttgcaagcaaatgaatgctcctcttctgaacatgatgttgaagaaaaat

SEQ ID NO: 9886 - DNA, 544 bp, Canis familiaris
  misc_feature (1)..(544): n = a or c or g or t
ttttttttttttaagatttngcaaactagtttttatttatttnnnnaagagtnnatttattcatgagagacagagagnnnnagaaacacaggcagaaggcgaagcaggcttnntgcagggnnagnctgatgcggggctggatcccaggactcagggatcatggcctgagccaaaggcagatgttcaaccactgagccacccacgcacccctataaaaatttttttttaattctttttatattcatattcagaatgtgctagatcttactccctgctacagttgtagcattttactatatattattacttcatggcttccacccataaccatcacctaccctttatctcagttgacattcagtgattatttgtctttagagcagaattactgaaagggttattctaaaaagtgagaagttacgtgtaggccaagtatggtggggaaaggtggaatgtcagatctggctggtcactgacttagtgtaattcaaaagtaacttctcaatatcagcattttcattttgtaaagggtccctgagnncca

SEQ ID NO: 9887 - DNA, 645 bp, Canis familiaris
  misc_feature (1)..(645): n = a or c or g or t
ccagtgnnggccatcgctaccatggaatctgcaagattgggtgttgttggtactgctgtcccatcaccctccacctttatctgaatactttgccagtgcactaatctctttggagataaaatttgttagcgtgttactaaatgttaattttcttttccagaaggtacatacagtactgtgtctgaattattaatttttaaaatagttcattcctttactcttcctcaattgcttgccctagactattcagttcctttgtttagcagaattctgcaaaatgtgtgtcacccactactgagattgttcaacccctgatatatttgtactgatttgttcctggtggtagcttgtcctaaaatgtgtgtagaaagcagatattttatgataatattgttgtgttgggtgtgctctgtgtggaattcagaggagaactcagcttcagtgattaacaatgccaaaaaatgcaggtaactagccattgttcaagtaacagtggtgctatttgtctcttgtggccttttagacttttgttgccctaaaattccattttattgggaacccattttccacatggtctttcttgagagggtttggttttttttttccctacttgacacagtttctaaataaaattctgtatttcaa

SEQ ID NO: 9888 - DNA, 529 bp, Canis familiaris
  misc_feature (1)..(529): n = a or c or g or t
tgttttatgttatgactgnngnnnacaataccggctgtcacttgannnnatatttttccaannnaaagaattcattcctcaactacaatgtgtcatgtatcctcaccatgcctcagtacatgagacagggctatggcaagatgctcatcgatttcagttacttgctttccaaagtggaagaaaaagttggctccccggagcgtcccctctctgacctggggctcataagctatcgcagttactggaaagaagtgcttctccgttacctgcataatttccaaggcaaagagatttctatcaaagaaattagccaggagacagctgtgaatcctgtggacattgtcagtactctgcaagcccttcagatgctcaagtactggaaaggaaaacatctagttctaaagagacaggacctgattgatgagtggnnngccaaagaggccaaaagatctaactccaataaaaccatggatccaagctgtttaaaatggacccctcccaagggcacttaaagtgacctgttactnng

SEQ ID NO: 9889 - DNA, 512 bp, Canis familiaris
  misc_feature (1)..(512): n = a or c or g or t
tccagcagtttcctcagagcccctgatcggcctggcntngaggacagagggcaaagggaacaaagtgaacactaaccatctgaaagtatacatctggatcccaacccgcagcagcatgggcacctcctttccaagggcaagtgtctaccttggacaaagtggtcaaaccagacagctgtgccagcctaagactctaatctagaattataatgcagacagtcctactccaggagacagtgggggcgccattgtgaaacagcggtccatttaccctttataccatcagtcacgtagaacccttcacgggagaggagaggtcctgttggaagggcacctcagggaccagttgaagcagaagggttgatagcttcaacccagactgcccagctcacagggttgtttctggtgtgcagccaccagtcactcctcagtgatggatatggttctggggggaaggctatgggaggggctgggtgccctctggagagnnnnnnctgctgtctctggctggg

SEQ ID NO: 9890 - DNA, 397 bp, Canis familiaris
  misc_feature (1)..(397): n = a or c or g or t
attgctcccagcanntactccacattcagggcccacnnnnntggtgaanctcatgctctgtctcctccctgtgctgctgctgagnnngctcccgcatnnnctggaagctgctgccccnctggcgttcagggtctccctccaggggccgtaggaggggatgcccagcactgtcaagtggaaggaattgggaaggatcaagggcagtatctatttggtggctgtgcccctgcccttggaggactggaacaaatggtttattttcaaatagctttagtcctgggaagtgatttaatagtttttgagccacaaaactctttgacaatctgatcaaagccatggtccttcctagaaactcannnnnnntaagaaatcctgannnnngattatgtgccttcct

SEQ ID NO: 9891 - DNA, 147 bp, Canis familiaris
  misc_feature (1)..(147): n = a or c or g or t
ctttccccannntgccttgnnnggttcaaaaataaccactnnnnngatttttaaatgctctcatatttagtgtttccttnnnnagttgaccttagnnnngcantnntttgannngannngagtgggggtccccacttcataatatgg

SEQ ID NO: 9892 - DNA, 201 bp, Canis familiaris
  misc_feature (1)..(201): n = a or c or g or t
acagttgtgcgttgtagttgctactgtagaggcagatagaagacgacgtggggagaggctcgtgaacgcnntggccagagaaacgtcttgggccgggttaatattaacttagagactcaggacacgggttcccctgggcaaagtactggtacgggccaaaggcccttccctttcctctgtgaaggcaaggtacctataccc

SEQ ID NO: 9893 - DNA, 354 bp, Canis familiaris
  misc_feature (1)..(354): n = a or c or g or t
aagaaagaatatgnaaaatgcctngaaaatngagttgcagtcttggaaaatcaaaacaaaactctaatataagagttaaaaactttgaaggatctttattcccacaaaagtgtttgattaagaaagaaatatttnnnnnnnnntgcctaaaattagatggatttttttttctagtggagttttataaattaaaaggtcaaaaatgaagctttttatttaggcttttgcaactcaaatatcttatgcaagagatctggtgacagaagataaagtagaaaatgacctcaaggaagttactggcacaactggaaacactgtacaaattaaacctacgcaagaagcaggaaatgaatt

SEQ ID NO: 9894 - DNA, 462 bp, Canis familiaris
aaccctcgagcaatcatattccacatgggaaagaacaaatcaaacgagttggtgatgcaggaatgcctggaatagaagagaatgaccttgcgaaagttgaagatcttcctactgctttaaagaaaccctctatttctgtatctcaatatgaaagccatcaggcaatctcccatattccaacaggacaacctctctccgcaaatatggttccagattctcatggacaccacaatggaaaccctgggacttcaaagcagaacccttccaatcctcttcagcgtttaattccaggtccaaacttggagagtgtacccagaattcaagcagatatactaaagcaggctaccaaggatagagtcggtgatttccataaattgaagcaaaatgatgaagaacgagaacttcagatggatcctgcagactatggaaagcaacgtttcaatgatgtcctttaagccctaa

SEQ ID NO: 9895 - DNA, 303 bp, Canis familiaris
cccctctcccacctccacccgccccccaccctcgtgccagattttctctggcaaagctctcctgggaggactccacagccagaatccgaaggcctggaggctggaaaacccccgagggggagaaggtctgaggtcaggggccgcagcgctgggtgagcctggctggtggctctggtggctctagtggctcgggaggggaggaagccccgggagctcctgtgtgggcgcaggcaggtgtgcccgggcccaaatgcagcctcttacctggaggtactggccgtgggcgcgcttagctcgtgctta

SEQ ID NO: 9896 - DNA, 531 bp, Canis familiaris
  misc_feature (1)..(531): n = a or c or g or t
tcccaaagggtgacgtnggactcagcactttccccaaactagagagnnnnnngctgggaaaacacagcttctccgaggnnngcataccactctgtgaagatgggaccatgcctnngcccaagaagacccaagctggnntttgtcctgttcccgnnaaacccagttcttccaaggacagtgaggacatcagcaaagagcccagcctctctacccagatgttacctctgttgaagtactctgggcagacttcgagactctctgcttcccccacctcccagtcaaccggtgactcactcctggctgctgtgagcccatgactggcctctctccactagcccctacctaggagcaccggtgttagctacctcatgggaactggccggccggccagccagcctgagcccccggcccctttctcaaagtatttttttgaagtggttgaattgcagaaatgggtatctagagggctggaggggtggtgggaatggggagaaggtgaggaaggttcactggctggtacctcannnntcc

SEQ ID NO: 9897 - DNA, 573 bp, Canis familiaris
  misc_feature (1)..(573): n = a or c or g or t
gcccgagctgtacgtcgctggccagaangacgagctctnnnactanngggtctttgtcnaggcccttgcccacggcatggtcacctncctggtcaacttcttcatgaccctgtgggtcacccacgactcggctgggcccatcagcttcagcgactaccagtctttcgcggtggtcgtggccctgtcgggcctgctatccatcaccatggaggtcatactcatcatcaagtactggacggtcctgtccgtgctggccatcgtcctcagcctcttcttctatgtggttgtaacttgggtcacccagagtttctggctcttccaaatctcacccaagaccttcccgtttctgtgtgagcccccagcagggggtggggtggtgggccctggagagggggacccgctttgcccctctcggagcctctgtcttctcagctgccccagggatacatgcagggggatgggaggaggggaaggcatggggtgtcaggaggctctgtggaggctccagccggggttgccctgtgaccctgccctgtcactagatgctgaccaaaacgtgctgtcccacccctc

SEQ ID NO: 9898 - DNA, 536 bp, Canis familiaris
  misc_feature (1)..(536): n = a or c or g or t
aatagcagtcactccagacccagtagaagttagccaaactggctacnntaagaaactaagtcactcggtacattgaaagcccccccactccatgcccagcagccatttgtgccgatgcctgtgccctaaggattgtggggagagatggaggggccagccagctgtctactcagagtgcctccaggaaggcaagctcactctccccacccaagcccccagcactcattttggaagcctgggatgaggctatgacccccaaccccgtcctcatacttctcggtcaatcccagaaccccagaagcatgctcattgtgaccagctagctccacacaggtgtgtgaggcaagcagagtgagaaatgagccgtgtgtaatcatatcctacactggacaccttcagggaggtccattggtttaaagggacagagaaggtggagggatgagaccatcacccccctccccaaaataaagctatacctttgagatttcctttttacccttgaagtcaaactaataactgtgtctagtacggatgtg

SEQ ID NO: 9899 - DNA, 595 bp, Canis familiaris
  misc_feature (1)..(595): n = a or c or g or t
ggggttcccaccgtnntccggggggatgtgcaccccaaacccagttttgcctgtttgtcctccctcaatcagtctgtaaaccctcggggtttaggcaccgccctgtccatccgtgtaaatgtaaatgttggccgagtcggtatttattctaacttttattttattttattttctctgagggatgggggtgggtgtgtgggaaatgtaccgctgatcacgccccgggcagctgtagggggcggcacccagccggccaggtcgcaaggagcagccccgcggggccgccccagacgccgccccagacgccgccccagacgccgcgttcccgtctcttctctggcatcaggccccggccagctctgccctgcggacggactccaggcccagtcctgcccctgcgctctgtggggacctcggcctgggcctcgggggatgcatgtcggagagaggaccggcctcctctgctggggaccctggcgggaaggcctgtgcagcggccggagccagcaggggcctggggccgcccgcctgcgcagcagaatcctcctcacgcgaccacccccctccctcggtatgtcctgctttccagctgaac

SEQ ID NO: 9900 - DNA, 614 bp, Canis familiaris
  misc_feature (1)..(614): n = a or c or g or t
ccccctcccttcaagtggntgcctgttgggccccacatcatggggaaggctgtgaaataactcttgcccaagtccagcctcgggncgggccgagcaatcccgcctaccggcggagtctgtcntctactgagagggatccaggcagagaagccacgctccccatcaccccctcttctcccttctcctatctctgccacaggtctcacttcaatccttccttccaaggtggaaaagctctatttcctatctggctgcaggaaggaaagtgacatcctgtcctatccctgactgcgaattcctaggctgggtctcccactttttgcccacccactgctagagcagttccctgtcgctttcccttgttcccctagtaaagctccccctcgtctttgcctgagaccacatccatgtgcctccaggagctcatcacaaaagtcatcatacgtgcacccctgctggcccccagccctccctctcgctaccacctctgccctgagccctgggggtgcaaagaagcagccgtctcctggggaccctggacgaggaggagcaggactcaacaaagaagccagaggttttatcctgaaatattttttaataaatagacanannnn

SEQ ID NO: 9901 - DNA, 514 bp, Canis familiaris
  misc_feature (1)..(514): n = a or c or g or t
agatacnnaantgatttaattggtnncagaagagttgacagatctctgtttgatcctannnnnnngnnnnctgnnnntgagaaaagcctccaaataaatatctcaactagaggcagcaatagtagttttagacattgtcctcattcctaatgacagattaagaagaaaactactaaatctctcatggctatatgtttcccatgttaaaaggtttcagagggatttctattactgtttttttttctttcttagaactgccatttcctcaattttttaaagaggccttagtgatagtaatttatatgtaaagaacagaagggcaaaccatactagaattatgttttggttaaatattttagatactattgatatgtgggattgttttgtgggctatcctaaataattggtataattcagctttttaaaaaaatttatagttgtcataatattaattttaggtatacagaagctttcttttgaaatttgattcggagatccttgggtgcctcagcaa

SEQ ID NO: 9902 - DNA, 568 bp, Canis familiaris
  misc_feature (1)..(568): n = a or c or g or t
agtcatgggggtgtacgntagtcaggagcacttcatctatggggagcccagggagctcctcaccaaaatctgggtgcannaaggctacctggagtactggcaggtggcgggcagcgaccctgcctgctacgagttcctgtggggttccagggcccatgctgaaaccagcaagatgaaaatcttagagtttttggccaaggtcaatgataccatccctagtgcctttcctgtctggtatgaggaagccttgagagatgaggaagtgcgatcccaagccagggttgcagccagggatgtagtgggagggccaggaccagggtccgttttagggccatatccagcagcttctcttgctccaagggaagtctgaggcagttatttcattttgtgtttgaagaaagcagtcactggtataagtggtaaagaggcagaattgggtttggtggtggtggtggggttgggtgtataacatctttgtgtgcttgttccataagaatgatttggaatttcctccttttggcatttttcaaatgttgctcctattaatggaagatttaattaacatcaa

SEQ ID NO: 9903 - DNA, 432 bp, Canis familiaris
  misc_feature (1)..(432): n = a or c or g or t
gctgcctaccatgaggctctgcgctgggcaggtggcagcaggcagtgggcaggacagacagctggagtttgtctagctggggtgctgggcaggccagtccaggggccgagggccgggtgccggctgtgtctggctcccgtccccgtgcatgaccagtcactgtgaggcctcctcctgccagcccagtgcaggaagggggtttctggctgctttttccagaagattccaggagcaaggagcaagcccgaggcctgccccgtgtctgcctgcgtgccggggagtcctcctctccagtggtnnnnnnnnnnntggacagaggagccacataggccccgctgagtggccgggtccgcggggccagcctggaggccagacagcaggggccaggtggcagcgtcgggaagtccccaggggccctgggaaatcgagttg

SEQ ID NO: 9904 - DNA, 699 bp, Canis familiaris
  misc_feature (1)..(699): n = a or c or g or t
ctgagacaaataagnnnaatcgggtattgcaagcccttttgtagtctgttgaattatttaaatttgtagacgtttaaaatttcctacaaaatgtgctgcttataatgttttcctcgatccggcagtgagtggttttctaactttggcttttattgggtattgtaaataggtttgtattggttttggtggcatcagtgtctccttggctttttacccattagcactgggcttgtaaaaaaaattgccaaggaaaagtaatctacctgtagaaagtttgcttagctaggggagtgaaaactctctcgtgaatgcgcctggtggtgaagcaggtcaggccattctttgttcctcaagtattaacatactgacttatgcagtattcaaaccatctagtgcaatgcctttttgtttgtttttgtaacacgggtgcagtgtattatagaaaaacaaaaattacaatcacgagcagttttaatgctgctgtgctggttttgtaaaaaatgtacattatgtcttttgacaggtttaattttaactagagaaatgacattgtaaatcataatatcctcttaatttaatatgaaaaattcagttaacaatattgaaaatacttactgtattatattgtatatatttctctactttggttctagctcttttatatgattgacatgttatttaagagataaaactgctttg

SEQ ID NO: 9905 - DNA, 707 bp, Canis familiaris
  misc_feature (1)..(707): n = a or c or g or t
cgacttnctcacttaccnnnaggttcccnnnagatgtcacnngcanccttgagtgtttctnnggnnatctgcacagnnngnnncttggtggttccatgtaacttgcttgggcaccagcccctgtccttgtggcttcccctttgttgataactctcctccctctgcctcccaccccttttaccccagcacaacgatgcctcttcctgaactccaaactgggacagatgggaggcagacccccaccggcatattgtctgtgtccctacatcaccctgtgccaaccatgtccatttgtgtcccattccctagtgtgttcttccccccctcacacctggtcagagagcccaccttcccagccaggtgtctctccagcaggctccaatccctccctctcgccatggggttctgagccaactcctcagcctcgaccatcagccttctcaggagaagctgagcacgcagggccgccatcccagctgcagccctctatctcctccagcaccctcagagctttactgttgccctctcatcccttctcgaagtttttgcacagaacttcattttgaaaagtgtttttctcattctccatacctccccaaactcctccagcccttatcccctgttcagccctatcatccagagcatctcctgggctgagctgctctcttggggccggagaagggtggggcttgagggactgaatggat
